United States Patent Application Publication US 2021/0254056 A1 - sequence listing, part 20

SEQ ID NO: 40845 - DNA, 1739 bp, Homo sapiens
tttcgtctttgtttgttctacatttaaatttaaaactgtaccctcattgaatttttttaaaagttcttctttggaaagacagcttaatagaaaagaaataaaaatattacaggagaggaaacttgagtttctacccaggtcctggcattcctgtccatcagagcattattctcaacgaggcttgtctttgctttgaaaccaccatggtgcaaatgcagctcaaaaaaaaaaaaaaaaaaaatcacccaacctctccatgtctcagtttctttgtttgcaaaatggcaataataatagtgttcctgtaggagtttgttgtgaagattaaaggtgtgatagagagctttgctgagcccctggcccacatcaaatgctccataaatatcatctgttagtattttgctgtgtttattctttttggtgattgtttcagcttgatttgctagcatgagagtggcacctctgaaaggtaagcaaacctcttttcactgtctttcaaataaaagtttattaatgtttacctatcattcaccatggcaagcaaacttcgtattatagttttcagggcattagtgaccttgtttaccaagtgtgaatttcccagtatcttctctctaaagtcaggaaaacagtgaatagcaggtagagaggtgctgctttgggcagaggagctcactttgtttgagctacttccagtgcttcctgccccctctctgacctcctttcctctaccactatgctcctttggcccattgcccaaggcttctcttcttttccagtttttttacttctatctcctccccaaacctagaggcataaatgccaataaagtttgcatttcagagttgacatcagctgataaatgttatactgtagttttctctaacctagattgaaaacctctaaatcagagactgtgctgtcacacactgcctgtcctgcaccacgtaaatcattgacagatgaatcatcataacgatactgccaactaaccccgtgtcgcactgcctggccctccttctttcaaactgtgtccattttgtctcaatcagcttctaatcccatgctaatatttaaatgaaaatgaattaatttaaaaattgtaaaccttgcaacacagcctacttaattctaaaatagaggcataatatttcttatatttatgtctacaagaactaatttccaaagaaattatccagcatatttagaccggtttgataaaattgttgtcttttgtcattcatgttcttatcacatccaaaataaatttatacttggccttgtccaccctttcacctattcaccaaatgttaatattcaccagatgttaataactggtattatgtttcctatcctctggtctcttggatttattatcataactcccttttccaacttgtgatgtcttaatttaagcacttccctgcagtctacaaattgcttattttagttggattacattattgtcacatttcccgtaagttttgaatattctatattttgatattttaagaagctattgcctctggtaccttttgtttgtttttatttttgttttagtcaaagctaactgacagccattcaggcatattaatatttacctgtcaggcattttgacaggtaaatatttgtatatagaattgtcatccacaaactataacatattaataaaatatttaccagagatgaatttttatacaccaccaaaatatttacctgagaacaatttcatagttcaa

SEQ ID NO: 40846 - DNA, 684 bp, Homo sapiens
gggaccaaagttgtcactgtggttatcaatgctggttttctgtttgtcttatttttaataattattatggcatcttataatccaaggggatataactcaaatattcaatggtaaaaaatagctttattattagaaaaccaattattcaattacctcccacttaactcccagagttagaagtgggcttctaactctgcccactggctaaagtaagttatttttaaagaataagtttgaatttgttaaatttaaatgtgcatattattccatcagttcctagaaataaggcttaatgacctacccagtgagtcagtgtccttgcttgcatttgtttgctttatcttcagtaagaatgagtaaacattaatccatccacttctagcttgctccctattgtgatgactaactgtccctgttgcttgctatatcagactaacaaatctgtggcctcagaacagagtgaatcaaatgatatgtaaataaataaaacgcagcctcttggcctcaatgacatcatgtgttaattgagttcaaatggccacagcaagaccaaatgaggggaaatgttctacctgcttcactgccatcgagagttgaaacacgatgaagcctggaagaccactggaggacagcatagtgtattctaccatattcatttttcatgagttttcttcttgcctggct

SEQ ID NO: 40847 - DNA, 437 bp, Homo sapiens
agccaaagcagaggggggcattgcgtcacctgggaagcacagagcagggcatcgcctcacccaggaagtgcaaggggtcaggggatttccctttcctagcaaagggaagctgtgacagactacttggaaaatcaggacactcccgcccaaatactgtgcttttccaatggtcttagcaaatggcacaccagaagattatatcccgcgcctggcttagcaggtcccgtgtccatggaaccttgtttactgctagcacagcagtctgagattgacctgtgaggcagcagcctggcagggggaggggcatccctcattgcggaggcttgagtaggtaaacaaagtggccaggaagctcgaagtgggcagagtccactgcagctctgcaaggcctgctgcttctgtagacgccacctatggggggagagcataacagaaca

SEQ ID NO: 40848 - DNA, 1147 bp, Homo sapiens
gtatcattctagtagaaagataggagaaaagaaaacgaagttgataattcagctctaataaaagaaagccaatacatagtgtctcaatttcataatttaagaaatggaggtataagcatggtataaagaaatgtggattaaaacaccaaaagaaacagtctcaagaatggaaagtagctatctccaggaaagggactatgaggttaggaaacactgctgctttttattatgagtgttttgcagtgatttttgttcatgttatgcctataataagttaataaaaataaaattagttggaaataatatgaattttatatttaactgatgtcaataattatgacaattttactttttgaggtttcaaatcatcttactgctcaattactgaatgcctcaagaaaattttcaataaggcacatgatttttctaccgtctgtgtgctttcataactgaacagtcatctctgtgtcctacagaagtggacaaattagctagacaaacctacatagattttattttaaggttaatgtttgagagaagtttgaagtccagttggcttttgtaatccacatggaatgtttttgttttggcttgttaccatattttagcctgaatgttcctgccatcttttaaatccataacattcagaaatgtgtcctgcttggatctaggtactgatttcatttcattaatttttcttaatacacagtgaactgtggtgggatgcaagctcagggctagcacttgaatgttactctttcctaatttctaagctcaggtatatttctacactattttagcttttcatagtgatcacaagtgaggtggcaaaagggcatagatgtttctgagtttgtcaggatcttatccataaatatggaagtctttaattttcctaagttagtgccagtcaggctttgctaactattaatcatctaaaggttaaaggtatttatagaaaaaatggagctcctaattgctaagctaagaccccctttgctatgttttcgattcctccccttctccagttaccagttacctcctttatgttttactctctctcctccatcatttgctctgcctttctcagtgaaaacatgcccagataatccgtatttcagcattctggcatgaggtgtgtgtgccg

SEQ ID NO: 40849 - DNA, 445 bp, Homo sapiens
cattgagttacagttatctctagaatttagtacagtaacatggctgtgcaggtttggaacttaagagcaataggctgtaccacatagcctaggtgtgtagtagactatgccatctaggtttgtgtcagtgcactctatgatgttcacacaatgatgaaatcacctaattacacatttctcagaacataaccctgtcgttgagcaatgcatgattgtatttacaaattaagtaacaggatgcctgagattagcttcaaaattcaattcaatattgagggagtgagtcagtgagaataaaactagattagctataattgacaattgttcagtttgggtaatgattcatggaggttcatcatactattctacctacttttgtatatgttttaaattttccataataaaaagttttgggaaaaatgagaaagagaagagaaaaagtaag

SEQ ID NO: 40850 - DNA, 638 bp, Homo sapiens
actgcgagcagaagtttagaaatctgaccagtctgattaggtgtaccttttccatagggctaatggggcagtaccaggaaggagctggagaaagagaatggtctagtaggggtagaggggttgaacagcttgcctctgtgcacccagtgctctcttttgttgaagaaatcatcttctcattcacagagcaaaggttaggattctgggtggactgggtgccctgagtttggtctttgctagacatacctcccttctccttattacataaaccatcacatcttctctcatgccaggcgttgctggaataaggtgagttggctgaacccaggatgagtatggagtgtctgccaaggcttgttcctgatttctttccagaacttgtccatttcccaatagaacaaataccaaaatagataaaatttcacaactctctaactgacaggaaagaaaatgtccttgttcaacttaaaatggttttgcatcagaggctccagagaattcttgaagagattggcactggccatgcataggccagaatgtacgctttccaattatctgacatcctcttccaacacatccagggcactctctgcatctcatttgcatcaaattcattttagtacatttttgattactgc

SEQ ID NO: 40851 - DNA, 1554 bp, Homo sapiens
acgggtcttctgatatggagcctgcagctccttcacagtgcataactcagcagcccagaaaatgccttcacaccctcctcccatttgaccattcgtcacaacacatttaagatcagaccctgacggtgacattctgcaaataagttcaacattgggtgttgttgaatctcagggaagaaaggccagcactgacccctgaggatatccacagtcaataattcaaaatgtaggcatgaatttgtcactaagccaacttaatcctcaaaaaaaaaaagaagtttcataagaagagaatctttaaaagagaaacagaattgatggcttaggaaaggtaaagttacggaaacgggttgtaaatcctgatcataaattagggctgaaaggaagaggatttttgattcagtcgctgagtaaactgtcttattggatacactggcaccaccttgtggtgagaagcaggaactcacaaagtactacctgtttggcaccacgtatagtaaaacatacccttgctgtggaggtaaacaatgttggatacaaatcacaaggctccagaatttcatcaccagagtgatgatggctactttgactaaaatagactacttttgaaagagcatgtttgttttatcccagagagggcaaaatgcaaaatgaggccagtcctctggtgcatttcaagggtatctttattgatgaatgcgaaaacctaatattgaggtatgagaatatctcacatttgtgtagcatttttcacatacataattttattttattatcaaaacaacactatgagttaggcagacaatatattgatcccatttcacagacaaggagagaggttcatttgtgataagcattaatgtgaagttaattgtgaagcttccagagaaagctcagtagttactaagccttctcaggaactgagaatattgtaaagatgagtatgctgaaaaggtaaaagagttagaatcaagagtcagtcaaacaaatgatccattcacttctaaataacttctaagcagttgatttctcagcaaaagtgtgctagagttcaaaagtaaatagaatcgtggcaccaaatgcctgatgaaataggcagccacaattgtctggaccactgagccaggcccatgccatgcccatgtgttgattcatcactaagtccttcagggacaacatgtttacatagaaaatacttttgccaagctggcctcatcacactgcagttgaaataattacatcatccaaatcagaccacctcaccccatccccaaactgtccaaaatctgcttgtaatttcttgtgtgagctcctgtccacaaaacatcggagaccttattttcattcctctgtttggactgagccaaggaacctcatttagcaaagaatagttctatatgcaatcttcctgctaggcctgtggcctggttcatggtggaatgacatgcatttggcaattttttttgactatgcttttagtgagagctgtgtcagggatggggtgctcacctgtcccatttgagagagggcttacttgatgtcttatttttgtgt

SEQ ID NO: 40852 - DNA, 2198 bp, Homo sapiens
caatttcatggggtttacaatttccataaagaacaaacctgctctagaagacaaaattccaaaaacttctgaactatatccaatcaagcattatctcctctcccaagagagaccttccagcactccccgcctgggtctcgggaatagccctcccttctgaatcccagtttctcaatccggaccctgaatcctattcatcctgatctctccttgattttcttgcatcttaaaggtgttattttcctttctttaaaaatttaaaaaaaaaaaaaaaagccacaactcgcctccacgctcagattaccattttctttttcctccttttcatcaccaaacggctgaggaggtctaccagtaccctcaccaccgccacgtccccatccctcacccactctggaacactttgcaacagtgtgcacacccacccactgttgataactactctcctaaggctaccaacccataggcctctcctcgatgcagagtcctttggactttgtctgttttttttcaaaccaagaattaacagcccttatctaatggaagacagaacatcaagggatacagatcaacaaacactggatggctgtctccgaagtcttttataatccaggtgaccaacccctttggagaaaggtcaaaggtcgccggcccctcgcaggactggggctggtgtcagctgatcagtttccccgttgaaacgctggagaaggagggtttccaggaagaaggggctttttcaggttgatgcacccggcggagaagtgctgggggcgaccccggaatcgtgacctggggtatgaatgagccctggattttttcctacccggcagcacctcgtctggctcccccggcccgcagcagaggcggcgccgcgcggaacgccagcacctgagccggtgcctcccgccaggctcggcctccgtaggcccccggcccggcccaccgctccggctgaggcgggactgccccacggacgccgccacgtcatccccacgcccgccccgctacagccctgggactgaccccggccgtcgcccggctaccctcgcacggcgcccgtgtccagggaactgcatttcccgggcgccggcggagccagcgtactcaccccggaggcggccgcggcgagctagcactgcccgcggagaggggagaacgcggaaagcagctcggggaccgccccagccgcccgggaggcggctcttgagtacgagctccgcctcccgccttggccggagaggctggtccgcccggctctgcacgcgcctggcgctccacccccgccaaatcgaccacaccgggcgctggaaggagcaccgggagggaaacggagggttgacgcctcggcctctgggtggctttaaaaccctgtgccaatagtagactgggtgctgagcgcttcccaaattccatccccttaaatactcacaaagcagtaggaaagagatagggacccttccattttacagagtgggaaactgagactttagagaggctaataaacttaatcaccctgcgagatttcagccctctcaactgcaaaaatgataataataataataatatttttcccatgttgcaggtctgagaatattaaatgatttttttaaatccgtatttcttcaaagatattattacagaaagcaaagacaattatatttacactaaagatttgagtgaaaaattatggtaggctctgtttaggcagtcaggatagctagattctctaatgcagtctcccactgcactcacgggaaagtagtagattctccaagaaccacacatccactccacccaaaaaggaacaaaccatagctagagccagtgctgggctcattaagcttcatagcaggaaatctgaggctatactgaggccgcataggcccaatgtaggcccttggaagctggaaaagagggccacctagtggcagttgaggataggtcagtgaaataggtcaacactgctcctgaacaaggtccagtgtgaaacttatttttttgtgttccctttgtaacatgctgtaagggtgtataaccacatttagtgaaaaaggacattactggatttcatccagtggcgttatacaatcagttacttatacccacatagtccccaggtcttgagcatatgatgcctggaagcataatatataccttttgcaagaatcactcagcttttcccctccccctccccc

SEQ ID NO: 40853 - DNA, 1368 bp, Homo sapiens
ctgaggtgggggtgcacgaacgctgcagaggaggttgggatgggagtggccggcgtgaagccactgcctgtcaggtttctccgctggagtcccctgtttgtctctgtcattactctttaagtatttgcgtagcagacaggcgggcaccgaaatagaaagtgtcaaagatacgatgacaatgaggataaaaccagggcagagggttctgaaagtcccaaccagcacggtccccgcagaatgccagcgcacctcctcccgccacttcaaagagccggctcggcggggcaggaagcggcggctgcggctgcgggtcctgcgagaagagcgcgatttcctccggggctgcccagttatctctggagtcgcagaactgctctcgggagaacgcgttctctaccccaaccccgtgctcctcaacccacccacctacttcctctagctccacacactcacaagcaccgagctgccaaaaatttccacccaccgcccccctccctagctaacttccttccagcatttcctgagctggatgatcctaggatttgtaagacaggaaaaaaaggaaggcgtgagggcgggcagcagcgacaggatgcttgtttttcgctctaccaaagtcgtctgaaggcgagacagcgggcccagggcgcaggacccaccgcagccccctgggcagtctcctcgccccgcgtccgcgtcgtctccggggcacttagtaaggggtggggagagcttgccctccctcttaagctgaggagaaacacccgaagacaccgcaggagcctgtgaaagtccctaggactccaagtgaggaagtgacactcccaggcgagccggcccgcggctgccagtctgcacggcctcggcacggcggccccggagcggcgcggggtggatctcaggctctgccggcccgcggcccgcggggtccatgcgcagggcccccagcccaagttcttccatcttccgatgcggccccccagagccgcggggcagccggtgatctagcccgggagcccatcttacagcggtgccaagcagaggggcggcagagacggaggggcagcctctttgggactaactcatgaagaacaagggtgctaagcagaagctgaaacgaaagggagccgccagcgcgtttggctgtgacctgacggagtatctggaaagctcgggacaggatggtaatgtgccttggcctttctcccccgcccccaccttctttttgtttgagggagagacggactctctcgagttgtgatagagtcggttcacaagttaatgtattccaggcctgtgcgctcattgcacttttttttcttttttttttttaaagaacataaacgattcttaaggtgcacagcgctg

SEQ ID NO: 40854 - DNA, 1663 bp, Homo sapiens
ttttagagccgggattttgttcgtggacttgccttgcctggtggttgaactttgcagccccttcctcctccgggcagcttctctcagtggcagctgtgttccccatggtttgtcctggatgtctcccttgtgccatccttgcaagcccgcggccagcgcctccacccacgctccggccttgctcccactcccaccgctctgccacctcccacctcagcctcccaccttggtgtggagggaccagcgtcgaagacaaaggaatctctgacgagaaccggccagtccgggagggacggcggggaagggggtgctgctctggcggagccctcacttcactcgcttcccctcgagcgcccctctaggctggggcccggccgctctgggcctgctcctcctcccgctcctgttgcggggcaccaggtcagaccctacagggggctccgccagggggagggggagaggggctcccttcaaactcggcccggccgcgggggtcccgggtgccctctgctgggctccttccacgtccttgtccctcctgaactcccgttccagccctgcccccgccccgcagtagggaacggactcgtttctgccccgccccggggtccgggcgcccgcccggcgcttcagcttcagcaacgtcaaggccacgttccctccgctccagctcgaaagacggtggcgctgactctgctctgcgcgccgcagcttcctcccgctgctccgcccagcggtttctgatcccctttcggcgctggggactcacacgctgcggcgacaggaaagcccgcgcccccggccgcttcccggaacgccctcggggacggctgagtcacttggcgcccgcccgcgcggccaccgagcccagaagcggggaaagcccagaagcggggaaaccccagggacagccgccggccctgggggcagccagcgctccaggccgcccagcacctcgggcccggatgggcttctcgcgccccagggctgcggccacaccccgccggcccagaccccgcgggtagagaaaggaggtgcaaccctgagagccaagacgttgggcttggctttgctttgcgtttctttccttttttcttttgtttcttttcttcttcttttttttttaaccacatccaggaagaggagaaacctgtctcatgacaggaaacgaagagggaggatgcatccgaactgagggacattgtttcagttgcctcacctgacatactgtctcacctgagagagggaggccgaagaggcagccaatggtggctggagcaagccctgtcctcgttacctgggctgtggctgagccctggggctcaccggctgtatggccctgggcaagtcctcggagccttaggttctctgcaaaatggagatgatgtttaatagaaaatgtttctataacttttgtggcttactttttgaaaagcgagggagggacttttgtccttccctcctcgcatctcagtcgcagtgctggttcacaatcaggctgttaacgcggtttccacatttcctgtcctcccccttcccctttcctgctgggaataagaaggtgggcccccaaggagacagagggtacactcgtaaatgaaaaagaaaagtcagcacaaggaccctttgctgcggagatttctttttccaggtatcctaagtg

SEQ ID NO: 40855 - DNA, 649 bp, Homo sapiens
ctgtattttaagatgtgcttctacaagctgtagccaatcctccagatgtagtctctctggagcagagtgcacagggatctctttctctctctctctttctctctctctctctctctctctctctctctcacacacacacacacacacacacacacacacacacacacacgcatgcacgcacgactttcagacctgtattggtactcattactcatgcagcctggctgagtgagcctttttttggcagctttgccctgctgctcactcatgttgacaagtagcaggcaattgtcatggtctttgtccctgacttcctgacagtgctaagcagaggtcaaggtactttcacagtgataatgagaacttccatttactagtccctcctctgtgccaagcactctacttgaagtatagcagatgttatttaattcaacctattaggtagatactgctatcttcattttccagttgagagcatcaaggctcagcgaggctaaataacttgcctaaagtcatatagaagactaagggccaacttggataagagcccaggctcatcagatcccagagcccatgcgtcatctatcgcattttgctgccctcatcaaaggtgctatttgttccatatgttggaaatactggacccaaa

SEQ ID NO: 40856 - DNA, 1897 bp, Homo sapiens
gtttcttcaaggggggggggcggggggggggagtgtcccctgttctgcagaggttgtcaggactgaggaagtggaatgaaagggtaccagtagttcttttaacagtttaaaagtaaaactgttcgagtggtatctctatatgttagggttaaaatattgaaagaaactcttcaaggggatgcccgctccagaaaagctggtgtaaaatcatacagaaattactgaaactgcaagattaagaagcaagtaaaagataaagatcctcactggaaaaaaaaaaaaaagctcttttcatcattctacggcaaaaatcatgattctgtcaacatggataccaatgtttcctaaacaatacaactaaaacccaaggatgacactggaaaaaacccgtgttttcaaatgctccctattcctaacagccttcggctgtaaactaaccccaagtcaaacaaagcattcaaaccgctggatgcaggggctgctggtccttgctccattaacaagcaaagggaaagaaaagtgcagggaaaaaactgggacggaagaggtgagagtatgcggtgtggtggactgcaggagaccacaaacttcaacagactggtccctaagagaagtcggcagaaaggtagacaaagcagtctccgccgcacacccaagagggccgaggcaggtccaggacagccggaccttggggcagctcagtaatactcacgcatggaagagtcccagccggtggggcggggtccctagaaagcggcgacaactttacagactggaccccaggtaagggaactccctcccagcgttggaacgctgcaaaccagctgcttggacgcaggcagcccccgcctagagaatcaagaaaaggtgtccaggcttcgggctgccagactcagacccagactccgacgcagttccagtgccagagctaaagctagagccagagcctgatacttcagcacccatccctagcctccattaccgcggagctgagcagacgtggcagcgcacggcgatgacgtcagctacgcgaccgcggtctgccccagccgcgagtgcgtccccggaatcagccggcacgacaacccctaccatttgcacctgcgcagtggggcgcgccttctcctcttaactcgcggtcccgccccttccggccagtgttggccaaagcatttcctctttcggcctcagtcagctagcggctgctaggtgcgggcaccatgctactgatccttcttgctgtctcttggactccatgtagtaaccatgtacaagttatcaccgccattttacagatgagtgtagattaggaggtgtcacctagggtcacgttactgctaagtgagggagcccaagtcatgaagtcatgcgtcagcatccaaccctgcgcttattgtttgctaagaactagacagatgctgtggttacaaagcgaataccacaaaagctcagagtctagtggaagagaggcgacactaagaaaatacagtaattaccatttgttacaatattaaaagtgtgtccaaggtccagagatagcatgtaacactaacgaattctgtgggatggtggtgatgtcaataccaagaaaagctttgcagagagcttggggtttcagccaagactccacaaaggcataggggctttgtgggagaatggcagtcctcctggagaagtggcagataaaaaggtaaagatctgtgagcaacgtcatcttgagttcaggaattgacaatagtttggtattagaagaagataagagtgtcaaaaggagcatttgtgtaatctttcactccagagattttaatctccttaatagaaagttgtttgtattgattgaatgattaacctttattaagaattttgttgtgtcaggcactggattagtagctttaca

SEQ ID NO: 40857 - DNA, 1768 bp, Homo sapiens
tttattagtgattcatgaatcaggcagcatctcatctataaaacagaaaagtgttctaatgagctgagcagaaggggttgggcttataggcagaaaagggctgaagaaagcagaaataaggaacaaaaagcagattggtcattttgaagttactttcctcaaagagttacatcagaggggacttctttatcatgccagctcaggtatatgggccccttctcctatttgttggaaaactgaccccttttaaagctgagtttaattacgcagcacctaggacaagttgcctccattctggttttgtctgctctcttgaggcctagtgccagagttctgtccaaaacaacgacctcccataaactttatttaacaccattgatcttttttcctacgtctaagtcaccccaactgttataaattcctattacaaagggatccctgctatgctaattgcaacctttggggtctaaccgtgctgtacacacacacacacacacacacacacacacacacacatgctcaacaaatttatgctatttgataagaggcaatttgacgtcaagagaagaactgtttggcctaggctctatgccaagtcttggttgtgccactaaccgtgaaacataccctctctgaccttcagttttctggctgcagacctattttcccaggggtgccagggagggaggataggcaactggtccattcgtttatcctccccaccttcccggcgcagccttctcagggaaactccgcctcaaggctggggactggaggaagggtggtggggccacggtggccatctttgtgcggggcgacccgccgcccacgtgctgcggctcccgggccatctttgtgcggggccgcgcttccgccagcgccgcagcggggaatctgcagtaggtctgccggcgatggagtggtgggctagctcgccgcttcggctctggctgctgttgttcctcctgccctcagcgcagggccgccagaaggagtcaggtgggctccgggcagtgccgagcctgccccttgggctcggggtctggccggagtcccgaggcgctcccccgcgcggccggctcccgggaagatgccgtggccgctgtagctcggagctgggcagaaggcaccggggcgccttgcggcggagagtgaggtgccggggtctctgctcctgctctggaccctggagagtaacccattccccggaattcagaatgacagggaggagagggaattccccgttcacccgcaggaggcgtggcccgtgcttggctactctggacctgcctgaaacactgaggggtcggggatgggggcaaatgtcgtgcgcgcgagcgtgtgtgtatatgcgttgccagaagagaagaggggtttaatgtctgtagcttttaactgatcctctttgtggagttcaatttgattagtagaaagtgagagtccgcgtcactatccatagcattctgagggttgagcattaagcttgggaattttccagtttcttggacacctgacagccggatagaggaacagacttgacgtgagcgtgggagttgcacacacaaaaattcctccctagcgtttcgtttccatcagtgggatgggaaggggatttctgaaagttttggtcttctgtttcttctgttggtgtggtgtcagcaaataacattcaggaaaatttttttaactctcatttacttcactttttaaaggttcaaaatggaaagtatttattgaccaaattaacaggtctttggagaattacgaa

SEQ ID NO: 40858 - DNA, 1904 bp, Homo sapiens
catttccagctatcaaattcctaagtccacttactgtattctactacagtgtggcagttttgattgacaactagaaaggaatcaaggaggtgaagggattggcaaaatgaataagggagtatgcttgttaacaaggattgaatgaaattacacgaatattgagaatattttaaatgcattcattttaatgaaaactgtacttcgaagcatatgttagcagaggttgtagtgacggcaaattatacaaacacttgatagaaattccagaaattctcctgccttttgagaagcagtaggcatatgaactaaagggagtgaaatccaccttaggaagacctgccaaaaagctgattcttcaaaaaagtgttctcgaaatcttagtgtaactggcaccaacacccatccccaatgcctcgttttttttccagcagaactgacaaggtacaaacggaccccgcccagcctggaaggcttctctaatgttggcagagtaggttggacttgtttttgcacaaatcgcctttccctctttccctactccacttgcactgaatattgcactttcttccttactgaagcgggattcctgccttttttttttttttttgagacagattttcgctcttgttgcccaggctgcagtgcagtggtgtgatctcggctcactgcaacctccgcctcccgggttcaagcgattctcctacctcagcctcccgagtagctaggattacaggcgcccgccaccatgcccggctaattcctggcattttaaatacgataaattacttcaacctatgaccacctcaagctgaatataagtagccgcagacaccgtttgcatgacccaggaaccacaaacacggagcgaaggcctgccgggaccacgctgagcttcactactggcagccaactcacttccgggggtgcactcagcacagcagtggcccaacccgccctcaaccggaagtcttttgggctccggcttcgccgtcgccccgccccctggcctttgccccggtcgggcgggacttcctgtgtcgtatttccaaggactccaaagcgaggccggggactgaaggtgtgggtgtcgagccctctggcagagggttaacctgggtcaaatgcacggattctcacctcgtacagttacgctctcccgcggcacgtccgcgaggacttgaagtcctgagcgctcaagtttgtccgtaggtcgagagaaggccatggaggtgccgccaccggcaccgcggagctttctctgtagagcattgtgcctatttccccgagtctttgctgccgaagctgtgactgccgattcggaagtccttgaggagcgtcagaagcggcttccctacgtcccagagccctattacccggaatctggatgggaccgcctccgggagctgtttggcaaagagtaaaagtgcctagggtgtgaagtggggtagggggccgcgaaagcggtgtcctgcagcgtgggcagcctgggtcagccttaggacaccaaggatggtgtgcttcatttttagattatatttgaggttctgatatttgtaacccaagcttgtatcttttttctttcttttttttttttttttttccagacagggtcttgctctgtcgcccaggctggagtgctgtggtgctatctcggctcactgcaacctctgcctctgggactcaagtgatcctcccacctcagcctcccgattaattgggactacaggcgcgcaccaccacgcccggctaatttttttttaatgtattttttatagacagggttcttaccatgttgcctaggctggtcttgaactcttggacttaggcgatccgcctacctcggcctcccaaagtgctgggattacaggcgtgagccaccgcgccagcccaaactcgtatttttc

SEQ ID NO: 40859 - DNA, 1738 bp, Homo sapiens
agtgatggaaatatttcatatctcgattatggtgtaaggacatttcattatatataaattatatatcaattttttaaaaagctctcagaccaaggctagtcattacagcaagaaaataggcatagcaaatttaaaactttggagaaatatatagaatatttgcatatggtgattctgatttgctttaaaagtgacatgattaatgtatttagacaaaaatactcttcgtttttctttgcttttatttacgatcaggatacaagaattctacgctgctgccaaataaatgactagttaaaattaactaactgaatccttaacaaccattctaagaggcagatattattatcccactttatgcgtgagggcccagaaccctggcaagggcggcacactcagtacgctcttcaagcatctgggcacacccggtccactacagtcctacaaagtcggacgtgagcacgggcgaaggcgtcagccggggccacacgggagtcactgaccacagccaggcgagagccggctttccggtgccgccacattccgggcaccaggctccgggctcttcagagcatttggggcgggcgacggaggtcccgtccactctcgcttgggtgcagaagggcgcggcggtgccaggaagccgccttggaggctccaagattagctcactcagcgcggccaagcgcaggtgcgggggccctcgccgccaccctgcttatctggggacagtcccggaacccggtgacccggctccgccccaacccgcgccctcgtccacccgcagcagccaaggcctcttccccggccccgggagcccgcgccacgcccgtcgctcgcgcgttccagtccaggctacagcaggtatcgcgatcccggccctcggccccgcgctcccctcccccgcccctggcgctctccgagtgtggccgaccatgaggattcccagtcttgcaaatcgtgggagcgtgtcaaccgccccgtttctttccaaagccgggcatggcccggaagcagctgatcagatcttagttctgaatgtatagttcgggtacgagaatgtgacccgtgaaagttcagaggagttaagtaattacagcgttctgaaagcgaacgttaaagggaatttacaaccgaaaaaagatgccggtcttcttcccccatcccagcttgcaattcacagaagcacacattagggtggagccagaaggaattacggaaaggacaatgaggacattgagagggagggtatggggggttaaagttagtcctccgaggccaagaagcagagtgtcttggcctagtgtctgaaaatcgcagcgcaggacggaacttccgagagcctatacctccccacttccccctccagtttacagatgggcaaaccgctgtcccgggtgtctgtcaggtctagtagcccagaatctcagtgcctaggcttcactgtaaataataaactatgtaaataacatttacaaatatcctttgtgagctcagaaactcagcattaccagtaactgggtagtggaacgcatccatcttcgtcgtttactccttctccaggggctctccagcctgcattccatggccaacagcagtgcagctgcagaagcacttctggaagcctcctgacttgaactagaccttgggtaaatagggtttagataagtggaggggagggaaaagtttcacctgaggggagaatgagctagtctgccagacccttataaaagtattg

SEQ ID NO: 40860 - DNA, 2254 bp, Homo sapiens
aagtctgacattctgaaagtgacatacgctgctccccacagcctcaaacacatctctgatctcactcttgggcacaccccaagccctgggatgaccatcacaactcccctctgccccaccatctcagaggaggtaggtttcttccccttaagaagagtatgggggtgatgagagtatcccagtgcctgagtcttcctaggccccaggaaggccttggaatcctctctgatccttagcattcaccctcatctatgaaagcaactgtttgcattatgtgtccacttagtgtcctgacaacagtctaaactcaatccatccaaaagcaaatcaacatcttccccaaagttgttcctcctctttttacggtaatagctgccaccatgatccaatcatccaggcttgaagcctgagtcatctttgactcagaacatcacagtgctaaaaaaaaaaaaaaaagtattttaagccatttgcctccttcccccagtatatgatttatactcagactctgtctctcaatatcttaaaatgcatctgaggtctgtcccttcctgtgtattcccccgataaggctctggattttggcaacaactcctgaactactactctcttttcctgctggtttgaatagggagagaagcaaaagtaaactggaaagtggaactagaagtctctaaaaccacaagtgttaaccttacccttgccagaatggggcacatgaattgtcctactagcaggtaacagctgagtttaaccaacatttaagaattaccaactacatcctggctaacatggtgaaatcctgtctctactaaaaatacaaaaaattagtcgggcgtagtggcgggcgccttgtagtcccagctactcgagacgctgacgcgggagaatggtgtgaacccgggaggcagagtgagccaagaccgtgccactgcactccagcctgggcgacagagcgagactccgtctcaaaaaaaaaaaaaaaaaaaaaagaattaccaactaaatgtcacacatgtggccttgtgtggggtgctggggccacagcaataagtaagacttccccagccctcaagtgcctagcgagggatgagagctgaggggggcgatcccagagggctctgcgagtcctgaaggggattgttcaatgctgagggcgaggtgaaggccaggagagtgtgcgtagggagaggacatgtgtactaggtttgagggctgaataggatttcaggcctgagggctgaggggtggagggcaattccaggctattaagcaaaggcttagtttacaggctggactaatccgatttgtgtgctgtgtcctgggctcccctgtggcagtgatgcaatcatgtgacagttggtggtcatgtgctgggtaaggacactttcaggaaggatgatatcacagaagtgatataatcaccagataactttctgagtaggaggcacatgtcagggcatgaattcaatggtgacagacgtgaaactgctgacagcattgttttcacttctacctcaagatttgtgtggatgtctacaggaaaccagggggtcaaaaatagaaagagaagaggtgctgaacattggagatggactcaatttccccctccaggcaattcttctccccaggatctctcacgggtttttgctttatacatatatgtaatgctatttttcaaacatataaagagactgttgtggctaatttttaaaacctataaatttatctaaaaatcctattgaaatccaaatgtcttttgccttacatacaccattagataataaaagcacaacttccactacgtaaggtctgattctttggtggggaaaagggattaaaagaggtcctcatcttgagaaaccactgctatacaccacaggtgtgtaatgacagccctgccttggtgatcctccaggttggggagtggcaccacatccaggttatgttgaatctcaatttacaatgtatagtgtactttttttttttttaagatggagtcttgctctgttgcccaggctggagtgcccattatgagtcatggagactcagattttgagtaagagagaaataaaactttgtgcttttaagtaataataagtcaatcctgactaatatcacatggtaagaagtctggattttattctaagtgggataggaagtcatttcaaattttgagccagagagtgataagatcttgtatatgtttaaatgacctctttactgtgtgtaggttatgaggcagaaggactgg

SEQ ID NO: 40861 - DNA, 981 bp, Homo sapiens
ccactgcgctgcagcctgggtgacaaagcgagactccgtctcaaacaaaaaaaaaaaaaaaaagaaagaaaaagaaaaggaaaaggaaaaaaaaatctgcactgtaatcacatggtaggtgatagattcttcacaggcatagaatggagggaactgctagttaaacaagacccaccaccacaagggctgaggagagtcccaaggtgccagagaaattgtagtgaaatatcacagagagttcttgctgaaagacactcagatgtcctggggcttgtgtctactgtactgcggactgactactcctcttttcttcctttgaaaaacttatccttgccttctcagatcaatccaagggggttcctggggacagctggtccaacacgctcaaatgaagaaagtaaggtttagtgaggtatggtttgcaaaaagtcacatatttgattagtagcaaagccagacatagaagccaggactttggactcccagtcctggcctctttctcatttaccatgctgcctgcctcctgatgtttggaaaacattcctaaagctggggattttacaccttcacttgaatggttttctttataggcagagggaaaagtactgatctttggaagagttaggattaaaaactaataagatgggggtacagggtgtttaggaggaagaatagatacagcaaggcaaaaaaggtgggaaaaagaaaaaaggaggtaataggagagataaatatatgaacaataaaatggaagaaaacaagagacaagtgaagagggagaaatgaactgagaagacatagaaaatggacacttaagagcagcaaactggccaggcatggtggctcatgcctgtaatcctaacacttcgggagaccaaggcaggaggattatttgagcccaggagttcgagaacaacctgggcaacatggggagagtttgtctctacaaaaaaatttaaaaattaaacattatccaggcac

SEQ ID NO: 40862 - DNA, 2206 bp, Homo sapiens
ccatgtatactgtgttagccacttgacatggcttgtatcattaacctttacaataatactggagggagtttcttttattagagtcattttacagacacatgaggctcaaggtcaccaagttagtggattaagattcaaaccttgactgtggatcccagactcttaatcatgctgtcataccattcaaggttcaacagcacttactgttaccactggaacaatttgttcagactagtctttcaatcctacccgtattatttacaaagtactgaggattaataaaagcactgagctcctacactcttattatcccattataccactaatgatttctttcttatatctactatctgggaagacaaaaggggccagaggaagagatgcacattcacgttatctgaggacgtcctctaatgagatttgctccacaagagaggctatataaaatgagaacaaatcttttgtggattgacaatctagatgaactattcttaatactttgtcccctgcgtcgtagactgattgattttcaacttttggttgtcttaaaagggttgaagcgtaactcttcagaactgtaaggaatacactctgtgtcctactgtctctaaattttgggagaaagccttagaaattaccagaaaacctttcctgtttggtcttaacaaatctatcatagcccttaccacgtcgtatacaagtcactggtttatgtctccattaactttaagctcctttatatcaagatgcatctttatccatgtctacatcttcggacctaacgcagtgcttaacccataacagatactcaacacacatttgtaggaaggaatgagtggttgaagcttgccgttctcctctctctccatcgtttcccggtactaagctacgggataagtcaacagagacccgaccacgaaacctacaaggcccaataattatctccagagcgccgcaatggggcggggcggggcggggcggggggggggggcagacagggaggaggagtgggggaaggggggaaggaagagggcagagggcagaaggcagagggcagagggcagaaggcagagggcagaggccgtagggcagaggcaccggaaggcacaggccgcggcccggggctcgtcggccgcgccctctccggctgcgcactgaccacgcatcgcgcgccttcttggtctccgggcaagcgcagcagggcttcagcggcttcttctcctgagactcaggcggggcagggtttgagtcaaccagacccggcatctttcgcgccaaaagcagctatgagcggagacagccaaatctatgccagcctcggcaaacgccgattcgtccgcagtcacttccggcagtcgctctaaaaagtacaggaagtcctgcttctctctgacaggtggggaatttaaaaggagcgcgtgcgcagaagaggcaaaattcgggccttaacgagagggtgcccccttcagcgcatgcgcaaggaggcccgctgaacgctcacctggactgtggtatttacactctaggactctaggtcatagagtatttgttaaatcaacttggggagggctcacgaagaaagaaagcagcaagacaactgagagatctcgtaacacccgctcctccccacccaatatcgaaacggaagcccaagatggtgaaatgatttgttcaagccaaacaggagaaaccataagtgaaagccagttcccttgaataacagactagtttcccccttttcttttatccgccttcttcctgatccccacacactgcaggcctttcctctctttcattgacctatttaaaaatgaatagcaagacatagaaccaccgagtccacaactattgggggaatttaaaaggtcctataaccccctatacacctcctacgcacattaaatcctcagctaatttgcatttatagcccccctccaactgatctgaattcagtatgaattattcagtcatatattcgttaatatactgatgaataaaattgaaaaataccatttccatagcatttcctcaggtacatagataaactggtgcccgtcttattcgcaatgaaatggatataatcattggatttttttcctgcagagtattgttggaaacaggcaataaactcttttttattttattttattttattttttggagatagggtcttgctctgtcgcccaggctggagtgaagtggcacg

SEQ ID NO: 40863 - DNA, 1234 bp, Homo sapiens
accattattatattgtactttgcttctgtgtcagctttctctatcatccagtgagctgtacaaattatctcaaaatctttaacacctattatatagtagacattcagtaaatttatttaacaaagggatggatttagtaatcatttcattaagatttcatgtaccagatacctcagagatacaaaaatgaccaggtgaagggctgtgccctcagtgaactcaaagttgtgggaagcagagttgtgaacaattactgattactaatacaaggtggtcaatgctattggtgctactacagcattggaaggatgatatctcactgtatttgaaagatatgaggaaactgcatagaagtggcaaagttagaggtgagtgttgaaatgtacctaaattagttgaggggtgttaaagaaaaaattattcaatgatcttattaaggcatggacaggcagagtgcgttcaagaccattgcaatagatataggaattactgcaacagggtcttgtagttgggggagggattgggttcaactccgaatatagcataagcaagtagaaatttatagcaaagagcaggctgagggtcagtggatgaaaaattactaagaggaaatatcagaggtaaagagaattctggttaaactcatctcaaaggattcttgctgaagacagccagggtaatcagacttcacctgggggtgaaaagcgaaagcgaaggatgaggaccccagtcagatatctaggatgggggattcttaccaaactgacatagcacggttctttgctaaaactggattttacaagaaagtacacagacagacctaggacatggctggttttcaaaaaccccaagaagtttaggagtagagacaataagttaaaaccaggagtatatgcagaaagagtagtaggccaggaagcgtattcaggaagtgtctgtggatcacattgagggactaagtggctaagttggctggacttcctggttcaatagggacttccctaaggggactttcccctaagccaaaatgagtcatagctgcaagctaagggattgaaacttcaaccaatcaaaggggactttcccctaagccaaagtgagtcccagctgcaaattaagggattgaaacttcagccaatcatatagagagtttaagctctagctgcagcctgatgtttttaaccaatcaggcccaccaacctaagagaggagaccacccctcatattgtgttat

SEQ ID NO: 40864 - DNA, 1210 bp, Homo sapiens
actttttttggatcttgactggaacaaaccaactataaaagataatttggactcaaacaggaaaattggaattatttatagtactaaggaattattgttaattttgttagatatgataacggtagttaaatttttaaaatctatgtcagtttgagatgcagactaatttaagggtaaaataatattatgtctaggatttctttaaaaaagaggggaaggaaactgaaacttgattggcaaaatgttgctaaatgttgattctgagggatgggttacttgagggtttgttattaaaagtagaatcacttttgcttatgtttaaaattttccattataaatagttttcaaaagcagagccagtgcctaccccacatcatcttctgttatttaatgcccaggactcagaaagggtcagcagtctcagatcaacagttactgatgtcctaacccatcctaaacactgatgctaatgagtgtggggcaaagttcacagcgtgctaaggagcaacatttaggaacctgactggattccgcagctctcgggacaagccccctggaaaagggctggggggaggggcggggaggcacccaattattctagaaggttctgagatctcccagggatttccgagaggctacgaggtgtaactggcaaatcaatgacttaagagtagctttctcccagcctccccgctggctctggagtatagagggaagccagccttttcctcccccatcctgcccctcccctctcttctcatcttcccctccactctcctcctgaccctggcctggccactcctgctttcacttctctccactcctcttcggccccgccccgcggcctcctccctcctccttgccccgccccctatccctgcgcgccggcggccgttaccatagcgacgtgcacgcagtagccaggcctgacccgctggtcccttgctggcgggaggaaagaggcggcaccatgagccacgcagtaaccatcgaggagccccaggcccagccgcaggtgtctcaaactcggtaccgggagaggtcgcgggctgggagccacatctcctccaatcgagcgtatgattttctgtacggtaaggaccgccgcagaccttcctccgcgtccgtcgcctcctaggccaggtgggctcccagatggtgggacctggccaggggcatggcgaacgaaacacgaccctctggactgacc

SEQ ID NO: 40865 - DNA, 638 bp, Homo sapiens
aatttgccgtggcaagaactgtaaccagctataagcatgattttttccaattttgccctctgcaatcccaggtttttcacctgaaccttgcattgctttcagcaatgtggtgttgcctctgggaatcccagtctcctttgtgtgggaatctagggtacacattcctagatagaggctgtgtaatgattgctgacatattctggccagtgtttttctgtatttactcttggttttgtgaaataaatcaagttagctcctgtaaacacatcaccatgtttttttttcacgggtaatttgagaaggaggacaaacatctccccaaagtatttattaagctggttgtttctttgatgccgaagtgtctcttttgcagaggaattgctaaatgtttccatgtcccttgctaagaacagaaattcactcagagtagatcaaataaaagtttggattgttataaaacaatctcgccgctagtcatggacaggaagcgaagtatagccagggcggatgagaacctggatggggaaaatcagaactaagatgctgtgctctcctgctttctttctttgaccttatgacctttcaccttgttagggttgccacatttagcaaataaaaatacaagaggcaccgttaag

SEQ ID NO: 40866 - DNA, 895 bp, Homo sapiens
atggtctcgatcccctgacctcgtgatctgcccacctcagcctcccaaagtgctgggattacaggcttgagctaccgcacctggcccaacacccgtactttaaagcagaggctctactttcaggcctagatggcaaattaaaaatatgctgaaaccttccctttctgctctgaatgcataaaaattacaggaaaaaattaataaacatgtagacacacttaaaagcaagaaagaaaatattcgtaatgtagaaatggagactttttcctaagaaagaagtagctgggaacctttggtggtgagtaggagctgtgcatggcagggaaccaggtccaagtcacctgcctgaaggtgaggggccagcgcccttctcctgcacactggtgcaactgaagcctggtgcctgcccaataaagattatagacagagcagagtcaggcattcctgcctgtggccttggactttacctcttggtgtgataaggacttggcgttaaactgcagaaggacaagagccaggcagaggctcagaaatgcttcattaggcaaaaaacaaacaaaaaaaacaacctaatctggtacactgtcatagcagaactgaagttaaagtgtcaataaaagcctctatgagacaggcctactcctaccatttgtgggacccaggactctaagggaggcccacctaccatatgtatagatattttaaaattataaatcaagctaatatctgttaagtaaaatacgttggtttttttttttttttttttcacaaacatctttataacaagttaaaaggacaagtttaaattggaattcttagactcctgggattccatactgtaatgcagcagcgaggtgagagcctgctgtggcctgcccttttctctccccaccct

SEQ ID NO: 40867 - DNA, 2221 bp, Homo sapiens
gggctggattaaagcatgtacttcaaaataataacaacttaagtcaataaataaatgtaaggaagtccaaatgttcacctgaagacaactgtggtcattttttggcaatcccaggttctcttttctacctgtttgctcaatcgtggtctccctctccctctcttgttggggcccatgcccctgctttactgttgccagaggcttgtacttgtttgccttttaggtaggagcagttacttccactcccctcacctgccataaagcatctttataaacaaagcaagtagaagaaacacatcctggtatccaccacattcggcttttgttgattctgttcacttgggagcacctgctgctagggaataagaaggttgaggctgaagagtgaggactcttcagctcccctctggcaggacccgggagaggaaagagccctcagctggtccatcctccccactcctggtcagccttctgttctgagatcaaagtggtggggtcacattctcgagaactgtgctcagccccctcatctcacaccctttccctctccctgtgtgcctgcccccctcttacataaccatgctggtgattggcaccgtcataaatcaatactttgctcactttcacatcaagtaacactatccagggaggtggtttcaacaaaggaggaagtataaggagatctaggttcaaattaatgttgcccctagtggtaaaggacagagaccctcagactgatgaaatgcactcagaattacttagacaaagcggatatttgccactctcttccccttttcctgtgtttttgtagtgaagagacctgaaagaaaaaagtagggagaacataatgagaacaaatacggtaatctcttcatttgctagttcaagtgctggacttgggacttaggaggggcaatggagccgcttagtgcctacatctgacttggactgaaatataggtgagagacaagattgtctcatatccggggaaatcataacctatgactaggacgggaagaggaagcactgcctttacttcagtgggaatctcggcctcagcctgcaagccaagtgttcacagtgagaaaagcaagagaataagctaatactcctgtcctgaacaaggcagcggctccttggtaaagctactccttgatcgatcctttgcaccggattgttcaaagtggaccccaggggagaagtcggagcaaagaacttaccaccaagcaggtatggtttttctttctttctcttttgctgggggctgaccgcccttcagctccagccaaaagatgtgtgtgaacacaaatataccttctgtttgaggtcagcatcatagtgggtcgtgaatcatgttggccttgctgctgtctcctcatttctagggtggaaaaaaaaaagcatgaaaacaatcacttaatgttgagccccattactgatgctctctggtcctgcactagcctcctagaaaaatcaccacaggagaagccttaactactgcatgagttaccacaagtcacacatacaaccagctccctgttacagggctggagtccctggacccaggaaataccacctccaaggactgtgggagctggggactatgggaactgggatcaactcagtcctgattccttttggcctgctgggttagtgctggcagccccctgaggccaaggacagcagcatgacagtcaccaggactcaccacttcaaggaggggtccctcagagcacctgccatacccctgcacagtgctgcggctgagttggcttcaaaccagtgagttttctacctctactattgaaagggcaccttgtcccacagaaccgagtcttgcctgcatgtggtcagtgccaccaggtccttcttctctccactttacagcccagctcggctgaagctatggccagaggcactgctttaaggccactccatatctaggacaggtcaacagacacctctgaggccactgagtcttgactcaatgaatcagctatagcaggcactattcctctcccacatggcctctaatgatatggtcagagttgaaaggatgctaagggaggcctcagaggcttatttaatcagttggttaatgggaaaaagtattttgtggtacacaaatacgctttaaaaatattttagttatgtcataaaagtctaaacctggggttgacaaactatggctcacaggctaactctggcccaccagctgttt

SEQ ID NO: 40868 - DNA, 3774 bp, Homo sapiens
cacctcttccagcttctagatgccgtggcaatccttggctcacagccccttcttccatcttcaaagccagcaacttagcatctgaccctttttccacattacgtctctttctctgatcaaacccaggaaagcttttctaattttaagattcatgtgattagactaggcctgcctggataattcagcacactccccatctccaggttctgtaccctcatcacatctgcagagacccttttgccatataaggaaacatattcacatgttctggggataagggtgcagacatctttgagggcctttattctatctaccataaggacacgatcaaaaacattatagaggcatgccaggcaattaattaatgaaagtgttatgacatttttctgaattctgtgatgttgttacttgtcctttttaatgtctgtcatttgttgtgatttcttttctcattctttcttacaaatattctcttcggtacataattttgtatttgtaattgcgtgttttttaaaattattttttagacagggtctcactctgtcacccaggctggaatgcagtggcacaatcctagctcaccacagccttgaattcctgggctcaggcaatcctcccacctcagcctcccaagtagctaggactacaggcatgcaccaacatgcctggctgagtttttttgtttgtttgtttttttggggtgtttttttttgagatagagtctcactctgttgcccagactggagttgtgtgaacatggctcactgcagcctcgacctcctgggctcacgtaatcttttcatctcagcctcctgagtagctgggaccacaggtacgtgccaccacacttggctaatttttaaatttttttgtagagacaggatctcaccatgtcacccaggcatgtctcgaactcctgggctcaagtgatcctcccactttggcctcccaaagtgctgagattataggtgtgagccactcacccagcctttttttttttttttttaagagatagggtcttgctatattgtccaggctggtctcatactcctcacaattgatccttccacctcagcctcccaaagtgctgacattagaggcatgagcccccacacctggcctatattcttttttcttaaataggactgcccaggccaagcgccatggttcatgcctgtaatcccagcattttggttggccaaggcagatggatcacctgaggtcaggagttcaagattagcctggccaacatggtgaaaaacctgtctctactgaaaatacaaaattaatctggtgtagtggcccatgccttgcggtcccagctacttgggaggctgagccaggagaattgcttgaacccaggaggcacaggttgcagtgtgccaagatcgtgcctttgcactccagcctgagtgacaagattgaaactctgtctcaaaataagtaaattaaattaaataatgtaaaataaaataaaataggactgcccaaattgtgtaagcctcagaacccacgtaagctgactaaagggcacctctacttgcccattgactaacctgaacaccagatgaaattgctcttccaaacaccactagctggggagttggctcttggctggggttggtcagtgcacaggccagtaagggagctgggcaagtgcagaagtggagactagctgtgtcccagacagcgactctccggctgtgaccctggagagtcctttagcagggcaaagtgcaacataggcagaccttaagggatgactcagtaacagataagctttgtgtgcctgcagggggatgggaagagggtggggcaggagagggacataaaagggctctgaggcattgtactgtgaattccttcagtctcctgctctgctcagccagtcagccctgcctcccttgtttaggaccacacagcactgctgggtgtctgcctttccttgtgactcttctctagcctctgcatggccagcagccctcttcttttctcctattctcttaagaaacatgcccatcacctgcagtttctctgggctccccgttaatctgccttcctcatctcctaatgctgcctcctccctcccattgccggtgcctggaaatagtcaaggctgggttctgttcttttgcttgaatttctttcacttggcttcttgactctttctaaactacaatccccccattctcactgccttagttttccctctctctgtgtttctcaaactatatcccaccacgccctgacaagggcttctctcctgtagatcatcccttttctagtattttgctagaaatatatagtgggattttctcctttgccctacatcatcactaaacttcccaacctaataggcagtgtcttgcaccttctactgatcatttcattctttcttgcactaaagatgaccacttcccatgtctgtacccaattcctgtttggcccaaatgtatctgcagcactcacccgtgttctcacactgagtctctaaatatttgactccaaaggtcactagtggatcacctccctgcctctcactttcccccaaggcacaaagtcttctcccagcacttctctttagtcctcctcttcctcatgtttcttctgtagggggaggaccatgttcaactttgtgatttttttctagtttgtagttgtgatctaccctgtaccactgagtcatctcaaatcacttaaacactcacaccaagtgtaccgcacttcacggcttaatcccctgttgatcagaaaaccccaggtccctggaattgaagcagggtctcattcagcctgacatgacctgaaatttctccctgactcctttcccagccccaagacaggggacttgcaagagtcccattgttgagcctccttggaacccactgtcttccattggtcatgttccacccagcaggttctatctagttctaatcctcaatgctgcttcgcatcccttccttgctccattgtccagccctgagctcactcaagccttgtactgctctccccttttcccttccctcccaaccctattcctctcctctctacatactcctgggagccttgctccttctgtagcagaaacttcacacacattttctttcaaattctcctccattgctatctccagttgcaccgctcttcttcatttctttccctccacattcaaacttgtcttctctggagggcatgctctcctgggggctccccctggcccagcctcagcatggcatctgcctttctggttccttcccaccttctctctcctcacttcttgccctgccagatctgtctatggcaacagcccctgcagcagtgcactctcctcttcctcttcatgcccaaagccatgtcagcctctctcagcagcttccattttattgtagagacactaagcatagagaagttagtgagtaaagtgagttagttcaacatcagtggcaagggctaggacatggcctcctgactatgacaacaagacaatgcccactatatctccagccgccaggagcaaaaaacaaagtcctctgacctccaggaggctgccggctagctgggtcctgtttggtcacaatcagtcattcccatgtttatgtgtgtgtcattcatggaagacctcccttctccctttaataggggatttggggcctcttagcaaatgaagtaactgcacaaagatatgtgtgtgtgtgtgtgtgtgtgtgtgtgtgtccccttctcattcttatgaagtcctaatgctcctccattacccccaaacaaacacagggg

SEQ ID NO: 40869 - DNA, 856 bp, Homo sapiens
ctatgtgtagaatgtggctatttctgcaagctcaattttcaattaaaaaatatgaaaaataaaccagtagatgactgttacagttcacattatttaactacaatgtcctctcaagtgtatctttccaagggaagtaactttagaaaaaaatctggacaaacttattcacagtggtgagatgtatccctgacctgtccccttcctctgggctcatcagcctttgacctcagcagctagctcagcctgctcaacaccccttccatctcctcccaggtcactagtttgaaactgtgctaagatttgcaaagaactttggtcaggcaaacaaagagccacctgtagagcatgtgtgcctgagtcttgcttgctgcttcccctctggcagcctcctgtacaagcctctacatcactagcactaactgagagcaaaacaaaaccttaacaaatctactaagaatcttccctgtagagttccaaactttattgacctccctgggttacgaatgatacacatttctttgtctgccacacctgccaccaacatgccaaaggcaagtctataaatacccgaagatatggattaattttacaagtgacatttaagtccccgttgagttatacctgctaagctcccaaccaatttcaagctgtgcactataccaaagtctcacactagactttaaaagaaaacaaagttcaaaaaaacccatcagcacagaaaaaggttttcttcttttgtggaaggggcatgaggcaggagtcctgtttttaaagtatacaacagcagacttttaataaaaaaagattgtcgtgggagagagattgtatgttctagtgctccgctttccccctcccc

SEQ ID NO: 40870 - DNA, 410 bp, Homo sapiens
aaatcatgtacactgtaaatatatacatttttatttttcaattatatcaataaagcttgaagaaaaaaattagattacaaactgacatgtctgttttaactcaaacagtattatggaaaatgggtatggagaggagacttgggaaagtgagaatgaatgcagggtgagcagctggaaaccttctacaagagtccaaaggctgaatcagggcataaggcaatagggactttttttaaagcagcgggaaggcagggtaggtataccggctagttgaacatgagactaatagagaatccaagaaacaaagagattgggattaatttaactgtctttaagcttgggcaaccaaataggtgatgagacacagaaagcaaaaacagtagaaaggtttgaaggaaaaattatttgaa

SEQ ID NO: 40871 - DNA, 3698 bp, Homo sapiens
cactcgagcacttgatgaaactgactaccaacagcaagaaaagtacaagaaagcagtttgaaatcgaatcatccaaataaatatcatattatctcaattcaaggttaatgagaccgggggagggggtatgggaggagtaaaaagggagctgcttcatccttgactgaagataggttttgcccttttccattgcctgtttatcaggaggtctaataatttcagatcctggtatttcgaggtttcttattttaagggcgaggtggaaaaggggtgtaaaataaaaccaatactcactgctaactttcatgctgccaaaagctgaaggctgctgcaccggcttgcagctctccgcaaaggaggtggttctgggccgccctgacatgatcactctcttcgcgaatcaccttttccttccttcctccttttcttccttttgtctttatgttggggtgttaggttaacgataaatgcagcattaagttctcccacagaagaaaaagaaaaagacttcgtcctcttggcttttcactccttttgtatactataaaaaacaaaacaagcgatatatttctccttcaagacagatcggcacggatatttaacatatagatgatttaggacttgggaaaaaatacaattctttcccctccctttcctgggaggagagaaaagagagggcaaatcctaaaaaaatatgtatcacgtgaaacgggggcaaatacttgattgaaaatgagtacttcgaatattatattttcctcggggattttttttccgagtcaatgaagaagggaagcggcggaaggatcacgagtctcacgcttgaagagaaagggggatgggtaggagggagggagagggagggagggggtggctcggagatgcgacgggaaacgctgcagctccggcaagccgcgggatccggcgggctgacggcaggggcccggcgaactagagggcggcggagtcgcgagtcagtcagaggcgggcggtggcggtggcggcggctcctctcctcattgcgccaggagcagctgcaggcggcggctggatccagcggccatggcggtggcggaggcagctcccttcagaccccaggcagcggctcctcgactgttccccattcgccggggacatgggaacccggcaaccgcttccgtccctcggggccccctcccccgtccgcggcaacagctcggccgccctcccgcccctcggctctgctcggtgcccgctcaggaagtgtccgcgctttgccccagcccagagccctgtcagcggctgcggggccggctcctcctcgcttccttccttcctttgtcacttggcccgggcggcggcggcggcggcggcggcacaagcccgcattcgcccgggtcaggagctgctctgtgtgaggagcgctgtctgcgcagccgccttgcacttccccactcctcctcccccctcctactcgtcctccacctccttcctcccccacccagccttacaccgcccagcgccccgccgcccgcgtaacaggcgtctgggaatcgccggccgagccccacgctcgcccgcttcggctgggagccgaagcccgaacggagccaatcacggacgtcgtttgtttgcggctcctcccggaaaaagccgatcagcctgagaaaccaattagaaagtgacgctgggaagccacgcccaaagagcggaaaatgccgaaggtagccgaacggaaagggtgaattcgccttgttcggtggctggctggaggagacattcgacaatggcaacagtggccaatcagagtcgccggcccttacgaagaggcttgaagagttgaggacggtgaaacccagagacgctggtgaaactgcacggctgggcgccgccgccgctttgtgattggctggaaaactccgctgggagcgtacctccttcggtgattggtgaagagaagggggcttccgaggacagtctggccagtcaggacttcccctccctctccaaggtggggagaagaaagcgaagggagggcgtctataaagcgctgtctcattggcctgaagcttaggcgctggagttggggcaaaagggagagggagggagcccgaaactcgcggcggcggccaatcggctctcactgccgtccaatcgcaagacctagctgcagtgtgattggccttcggccccggtcccaggagcggggagatgcctgactcgggtcgtggctgacgacccgacggttcgcctgcggccgcctccaacaacggtggaaaccgcacacagggaccgcgggccctcggtgcagcaaatcggaaagtgctgcggtcggcggccctgggctctgagcgctcaagcgagcagaggggtggaggggctctccccacccacaggaggctctcggcggggcgcagccaattctgcgcgcccaaggctcccctctgccgtggatcgcgtgtgccgagtgttggcctcttccccgaaagggccagacggaccaagggggccttcccagccggctgcaagctctcagacgctaaaatgggaacaaagcttccagaaaggcagcgcctttgggcggccgcgccccgcccagccgcgggggccattgatacagaggcttgctgcgcttggtgtgcgcggcccggccgggcctctggaaacgcccatgagaaatgagctcatgctggatgcgcgcgctccttgggcgcaactgcccagcgcaaaacgggccccgaaagcaggtgaggggaaatgccgtcaggccggatatcctgaagcctccgaggaaatgggggggtcagaggagcccgtggtagctttggatcttttggaactagggtgatctataaaagtgcagcttgagaagatttcatacataagaccagcgtccattgttctaccatagaaccagttcctttggtctgctttagaacagtgaggtatggctacgtcaagataacagagaaagtagaacagacagttgccatcctgattgtaatccagtggtgcctgtaatttctacctgcagagtcatctctttctgttaagatgctgtctccagaaagcacatgttaaaggacctatatttgatcagattacctggctcttgctttgaaacactgatgaaggacttgggacagaacaaagtaagctttgatggaagacaggaaaggtctagatagtgtttgcagattcaaatggctacagaggccagacaagtaaagcaaatgagtgagactggccttgtgtaagacaatggggaatgatagggaaaatggcaaattggaatatccatgccataactaaaaggaacagctgctcaactctagcagattgttgccctcaggaatgtgggtccagtgttctcagatgttcaatttttttcctcccaaaagaaaccccaaaattggatttttgtgtgaaatctctgcatttttaaatgttggtaaccaaattttcaaaccctgcaggccaacctaaaaacatcccttggccaatgaggcattggaaaaagtgttaataattgttaggggcccgatagcagtaggagggtgaaaacaaaatggtttgggaccttaaataattgaaatgtatctttatttatttatttatttttgagacggagtttcactcttgttgcccaggctggagtgcagtggcgcgatctcggctcaccgcaacctccgcctccccgattcaagtgattctcctgc

SEQ ID NO: 40872 - DNA, 739 bp, Homo sapiens
tcaacagggagttgccaaatgaggacacgcacatgctttgccttcattatctaactttcttccagtataaatagaattacatggaggtgtaaggcatttctcttgatctcagtcaatgctgtgcacatcgtgggaactcagtaaatgttggcaaaatgagtagtgtgattgtaattgaaaaagcgaaacaattataaccatcaaaattacaactttataaaatatctgcatatggacaagcactctgagaaaatactccccccaaaaaagttgttttattaattttttagttttctgaattttttcttacattaatttttttcctattatcggttctacaatataatttgagtatcaaaatttcttaattagatgcattcaaatagaatcacagcttggggcaagtctccgttcaccaccaggcttcaaacatgtcatggcatatctggcaaattggtagtttcaggctgccaagaggtgatttacataagggttttggtggaaagactgccaagaagtgtggatgacagagaggtgggggttggccagactgcttttcagtcaatttgcacagctacagtgcaccagccagtgttccagttggtcagtgcccatgccatgccagctgttaatccttggattgagggaatgacaccttacctatcttgaagattcatattccaatacagcctcgtggagtccactaggaaagtaccaagagcagaaataggagtgcact

SEQ ID NO: 40873 - DNA, 597 bp, Homo sapiens
tggggctctattagcacaagcgctcatcctctgactctgagttcttgaaccccagttctggctttactttcaagcaccaactaggggatcctggacaccacataatgccctttaggcctcagaagattccctcacattaagctggctgtgtggtggcctaactcccagctgccacctgccgtcttgccctgtggatgttcatctaccagggaagagctttggtgcagacccgggcaatcagtacagtttcatgaatgacatgggctcctttcccgggtggactgcattcctatcattcctgagagcatgctctgctctgatccgtaacttatctgacctcaggaaggcttgagaacatgtaaagaaagcaaatgagctgggtatggtggcacatgcctgtactcccagctacttgggaggctgagatggggaggatcacttgaggccagtagttcaaggctgcagtgagccgtgattgtgccactgcactccagcctgggtgaaagagtgagacattgtctctaaagaaagtagactgtggctaaggtcaggcccaggccattctttctgggcctactgctctgtcaaggatttctg

SEQ ID NO: 40874 - DNA, 572 bp, Homo sapiens
ttacaaagcacaatccttgagaaaagtttttcagtttgcaggactgaccgtgatctttttaaacagggagactgcttgctgtcagtatcacctgtattttgcattgagctttctgaaactgaggaggaccaggtagctctagggagctcccttccagcctccaggatgctgatgcaatgactgagcaatggagagttttgcaatatgcttacagaaccagaccagcttgcttttcctaaggaaaccttggtgtcctaagaaaacctcaggctgggtccctgccctgccgggttgaaattccttctgtcttctggtagcatgcctgtagcacatgctctgtaaccagctttagggagtccacaaaaggctttggaatgaagtcaaatttcagtgcaaactcagtctctgcctctaaccagttgtgtgatttttggcaagtgacctaacctctcccagttaaagtttcctcatctgtgaaacagagtcaataactactttgctaggtggttataaatattaaataagatgagtattaagtggtgcatagcagattatcttacatatattttctt

SEQ ID NO: 40875 - DNA, 844 bp, Homo sapiens
gtgtttaagtgcatgtacccagcagttaataagtggatggatggatgcatgcatgaacaaatgaaggaagctttctttaaaatgctcactggtctagtaggggtgctgggacatatacatataattataaggcagattagaaaggcctgcacatcttcagggaggagcagatgaaatgctttcggggttagaggagagagaaaacaatgtcctaccttaggacctgcctgcctctctgagggagcagagggctgggggatgggtcatattcaggtcagaacagcagcggctggctgacttctagtgatgacctcagtgcttggcataaacactcaggcatttcctgagtgcctgtgtaaagaaggcttcttgggccccttgtctccttagtaatgtcatccatttcacccgctctctggcgctgcctcgctgccctgggggtatctgtgcctttgctttcacaaactcctcccatcacagtcatgtctgaaagctcactggcaagaaggaaccccgttttgctgcaacccccaacccttacccagatagttcccctcacccactttcccaaatttactcaaattactttcccaaattatcttctaggaatacacagtgcaagtatcacagggagaatcgttcttctaccaaagacctcggagccagagggaaacacacagaaacctaacaaacctcagtttcttttatattttgaaaaagaactacttaccatctaaacctaaaatacaacagactacaaaatatattttttagtttcacatcatggtcagttagttccagaggagaaaaaaaaaaaacacaagggagaaaatggaagaggaaa

SEQ ID NO: 40876 - DNA, 507 bp, Homo sapiens
gagggggaaaaagccccaaaggatacccttactggaaaggaagtttgtgtggctttacttaggaatattatgggcacattctgctttgtttgtttatcttcaaaaaattagtttctgaatgtatttttgccatatctcatgcaattataatatattttagatgagcttttaaatgctgtggggaaaacactagacacacacacaaaatcctcttttcgcctagaacctcagactctaggttacaaccctggcatgtgttgtaatttatgaggcaatgatttcaacttcctttctccgtttagctgcaggaaaaggccttgagcaattcctggcaggagacttgtagctcttccaaaagggcagagcagatgtcctgattttaagtagggcatgaagcacaggcacaattggccataggaaacatccaatcacaaggagtcactgctaaagcagaatattatgggcttccaggtgacatgtaaattgatctccttgaggcaggaaaga

SEQ ID NO: 40877 - DNA, 573 bp, Homo sapiens
aaagttaaaatataaaaagtatttattgagacataactacaagtaaccccagtccccagagttcagtgaggtatgtggtcctctggcatttgctttgaattgatgctggtggttaacagcagataggagcttctgctcttgaagagagggttcaccttgtgtcactcaacagaagccaattaaagcccagaatcaacagtgcctccagaaaaggtcagtggttgtgaaacaaaaactacatctatttatttaaagcctcagccacagagcttgccaaggggctgcctgagccagtgagcagccagcaaacacgtggacgagaataactcacgcttttgtcttggaaaatcccactactccaactattgacagcctttgttggctcctgttccatacttcagagatgagaagcacaaagccagccacgtggctacaagtataaatattaaaccctgtgggagagatgctgctgcccaggtttgaagtgttctctattagcctttggcggaaaatactttgagcatcactggaagccacatgtcacacacagaatggcactggccaaggcaatgg

SEQ ID NO: 40878 - DNA, 785 bp, Homo sapiens
acacacatacatacatcatactatatatatttaacattttttcctgattttaaaatgtatagatgcttgtgaatagctattaaaatggtatagagatgtaaaatttaggatagaatgtacttcagaatccttctatatatcttcacttaagaatatatcaaaacattttccatgttcgctcatagagatctatttcattatttccaacagttgttagtagtccactataggaatctgccattgtttgttttggcattctccattgataaaatttgtgtagcttctattttttgtcactgaaatgacacaatcaagattgtgtcacttgattctttgtgttagtatttcgtagaagtggaatttgctgggtcaaagggtatgaaaatacgtgttgtgtaacctgtttgttttgtttaacctattaagatattatgaacattttcaagatcattaaatatttaatttacctacctagttttataatctatgaatatattaaaatttattttcccaatcccctaacactagaaattgagttatttctaaaattttcactattagaaacaaccttgcaataaacattactatagctaaatcttgcatgcatgcttacagttttttccttaagatgaattcctagatataaaattgccccttcaaggagtatgtatattaaaaataataacttttatcagtttttttcttattacagaaataatacatggttgggtgatcctagattagaaaatatagataggcaagaaaatgaaacgtgcattacttta

SEQ ID NO: 40879 - DNA, 2833 bp, Homo sapiens
tgcaaatgtagtggaaagcaagggttagatcagagcaccttgtacgccacgctcaaaggcacgtactttgatctatagagatggaaatccacggaagacttttgagcaaagaagtgacaacctctgatttacatctgttttgagtttccactcagtttggatcacgccccagattcaataaggaagacagaaaaaatgcctcgagaatctgcataggccaaacacaacacaccaaacagtcacacatgcgaacatactaggtatttacaacaacttgctgagatggttgggcagaactcactaccgcacagttaaagagaaagcttggaaatagttacgtgacaaacgttgaggtgcccaggcccggcgccccagggttcccggacaccgcccgaggcctccccaccctccggcacacacccgctcacctctgcaagttctcgatctcagccgggatgctctgcagttggttgccgcccaggctcagggtctgcagcgcgcgcagctctaagagcgaggcaggcacctcctggaaacagttgccgctgaggttgagcacctggaggctgcggcagagcggcgactgggccaggcccttgggcagcgcactgggcccgccgagccggttgttcttggccagcagcgtgcgcaggccgcgcagagcgagcagctccggcccgagcgcggtcaacgcgttgccgctcacgtccagcagctggaggtgcgggaagccgctgcccagcgcccgtggcagcgacaccagacggttgtgaggcagcagcagccgcagcagcgcctcccgcgccccgcgccgctcctccccccgcgcctccagctcagactccagcgtctcggtggacacgctgaggcgggaccagttcagttcggcctccccggccgtgaccaccgctgctccggcctcctccatcctggccaccgcacggcgcgtggcgccggattccccagagcgccgcgcgcggtccagaggccgggagctctgcggcgccccggaacctgaaccgagggctgagtcggaagtggcgcgggcgggcgcaaaccctgcgcgccttggccgagtcacgcgacgcgagtcctggggtgcgcgcgccgctccggggcgggctctgcctcacgaggcgcggggcgcggagtggcaagagcgcagcatgggctgcgcagaactgaggcagacacccagaggctgccaaattgtcatctgagccggaccgggtttcggcggccgcgctttatagtcgctggagcctggtgacctattccagggctacaagactgcctcggcaaacagcccaaggatgttcggttatctcgccttgagggttcgcgcgtcacgtgccccccccgtcccccgcttgtttttcagtttaaaagtggggcccgtgtctgcaggactctgtgagcacacagtaatttagtggtgatttagctccatgacagaaaaccgcaggaatttaaagtccgaggattaacaaagccgacctcgaaatgtgaacgcagctggactagacctcagaacccccggacccttactggaggttccgctgttaaatagcctagggcagggatttgatttcagttgccccatgcataaaatatgggtaacacccgcactacttgccccacagaattatttttttcttttttaaggcagaaatgtgtatcaagtaaggacgttttgcccgttttaattgtagaagcacatacgtggcttttggtgtaagttgtgtctaggagtgaatttgggagatatggaggcggttgcatgatttgagatagctcaaattaatgagttagtttaaaaactcaaagcatagagtttgtactgcaggtcaaaactacagtttgggaaaatcctgatctggtactaatttagtaattctaattaacgtatttttcatccttgtcccaaactcaatcttttctgaaattacattttatgattttgaaaagtaatgaatagaaatgagaaaaaatgcttagctttttttttttttaacaaagcttatacataagaaagttaagtggtcgtgtataatcaacgacattaaattgctttcctccttaaaaaaggaaagtcgtttttttcttgccagtcatttatttgtatgagaaactatgcctttactctgcagtcaaactttaatttctgattgagtggtagtcctagaaggacgtactttgtatgtttaagctaatggtggaatgctttttaaaactgatgagtcatctgttttgaaagagtccttttaagaacagaccttattttgggtcaagccagcattctaacagtagtcctaatatctgaaaataacaaatatttaaaataatagttgtttttgctttaaaatatttatcttggattttaaaaagtgataggaacgtaatgtaaaatgagaaaaagaaaggattcaaacataattcagaaataagagttggccaggtgccatggctcatgcctgtaatcccagtgctttggcccaggccagcagatcgctgaggtcaggagttccagaccagcctggccaacatggggaaaccccgtctctacaaaaaatacaaaaattagccgggcctagtggcgctcgcctgtggtgccaactactacacaggctgctgggaggattgtttcagcctaagaggtagaggttgcagagagccatgattgtgccactgccctgcacttttttttttttttgtctcaagaaaaataaaataagaggtaagattacaaatcagtggaattaaagggaaaaagataacctcaataatagcaaatgaggcttcctagtagaaagtttggaaaaaaatacttagt

SEQ ID NO: 40880 - DNA, 1198 bp, Homo sapiens
ggcactgatctgttggtggctcatcccttccctcccattcactggtggcagaaagccagccccacctcattcaccactcaacccaggggtagtggtggttgcatgaaggagaatgtgatttccccagcttctcatcctgactggctgggcaggcaaaatcacgaaagacctccagactcaaggctactgggctagatgctgtgacaaaaccaacaaagactgcaggaggcacgatggggtcatggggctggctggggtaaggcagggatggaaccagacagtccaccctccaggccatgtctaccacattatgcagagaactcacacccacaagtcttgtaacagtacaattcttatagttggtgaatgttttatactcaagattaggggaaaaaagcaaaaagaaagaagaggctttcgagctgaggtgctgtatccaatacagctagtctgctgccacccagaggctgctctgcaaactccaggtcattattttctgtcccaagccagcttgctggtcatgcagggctcccattggtctagaagccgttctcagctcacatttcattggttcacatgctgttgataaaccaattcttttttgaatgttgctaaggcgaattcaagaaagctagcaggcggggaagaaagaggaagtaattcccagaagtccgcggggattggagagcttttgttttcctaaacagagagtggagataaaaatcaaggatattctccaggcagggccctcttgtggaaactgtgcctgacaatgtaaggcaacacgaaaaaggaagaggaaaaggtttttgctgacgagttgttcccatgagttatggacacacaaatgcataaaaaagcatgctcagacacatgcctgcactcaaagacacccgcacacagctccacaggcaaacacccacaaacctccactcactagtctctgtccttaactagtaattttcattctttaaggctcacatgtcctcatctataaagtaggggtaaatgccaaccctgccctgcggagattcagtgagatacatgtggaagtaccaactgtaaaacaagctgcatatgaaacctgttattcatgggaatgccttatagagctacttgcagaaaagcctgtggcatgtatggaacctccttttaacttacattgttgtttttagtaagtattaaaaacggattgaat

SEQ ID NO: 40881 - DNA, 596 bp, Homo sapiens
tgcctgccacacaactgaaagtggctattactacagtgggcaatttattttcagacaactttcccactgagatgctgtcactaccaccttgggctgtcatgtccccgtttttccctgtcctcccttgcactgcagtgataatagagaacagaaggactcactgaatggaaaaaacaaaaggcccgtttgaagagcacacagagaaggggggagccactagttacacaatcattcctctttgcaggtgacacgtctgtcaataggtggcaatctctctctgtcttgcacagcccagcactgcaatgcagaagcgcagtgttggctcctgcagctccacccagctctgtcctcggaacaagaagtggtgcaggaggtggaagaatagggtggctgctccaaaaacatgggtagggggatctaccaatgtgggggaggtctcacctgcagcctcatagccctccccagtgatccccattcacaggcatgctttgatgcagaaatcaacaatgaagaaaattttctccagagagataggctttgtgccattgaaagctcttctccaagcctcatcttctctgggagtgggagtgtcaggt

SEQ ID NO: 40882 - DNA, 2693 bp, Homo sapiens
actcttttcattgtaaccatttccatacactgtgagttcacagcctcttttctcccccaacgcactctgttttcacatctcagtacttctctattttgccttcttccctgtagtttgcctgggaattatgtgagagcactggatgctcttctacctccagcaggaaattgctgctgggggaacttcctaccagggataagttttccctgtgtggaagggggttgggaggggtgtgtgtcttgcaggccgcctagaatagattccagaccttgggccacacagcctggtaagtcaaccaacagcctcctcacacctcatatttgcattccagttcactgagtgatttcacacactggctggcaattcttgagcctgctggaaaaccaaccagggattcacctcatccatcactggtctgcaactgccttttgagggccacagcaggggatggagaaatgtttcttaaccagggctacatcagccagtgaagggggatacgctctcaaatgcaaaccctggaaaaccagatggataagaagcagacctggagttcaagatgggctccaaaggtaagagaggtaggttcagatcctgcttcagagctaactagttgtatgaccctgggcaagttacctaatctccttaaacctgtttcttcctctgtaaaatcgggataataaaacctacattacagggtttgggagctttaaaagaagtaactgcaggtaacgtacacagcccagtgtgtggtaaacaaaaatgtacttggtaaatgttaaaccattgtgcttggaagtggtgtgggttaatggtcaagagccttgggtccggagccagactgtttgggttcaaatcccacccttagcatttaatagctgagagcattgggtaaccttcgctgactcaatttatctgtcattaaaatggaattttattacaacatagcagatatttaataaatattagctacttttatttcattggcagtaaaaacagttgattgagtttccacctcaatcaacaacgtagtagtgaattaaatgagaattcagtacaatgcgtattttttaaaaattgtgaagaccttgtatgcatttatgacttttttgggcagagtcaagctgcgatgctaagggtgtggttaaactgtaatatgaaggaaaaaattcaaacagggagcataaaccacccaccagggagctatttcttttgtaatgtgcattccatttcttctccctcatgctttttaattccttccatatttcctgccataattatcaaatgtttagtttctgacctcactttcctggagactggagcccggggaatttagaattgtttattttctgtccataaacctttgagttaatggagcggcttctgagcaaagagtttgttggtttgtttgtagtgtctcaggaaggtcgttagagttgaaaaaattggtacaaaaaaacaagcgctgaaatgctttaactggaaactcgagcccccaaagagcagagcaatggatcttctcttacacttgcgcaacgttacagggaacacttgggaaaaggccgttacattgcccagatgataacacaaaacccgaggacacttcacaaagaagaaaatacatttcagagaatcatgatctcactttaaaagagagaaaggaaaattaattttgccccaaaagaagaatcccgattcctctgcccccgcccccaggagacagacttgggagggaaaagtccccaactactctcagtctcctctgaagtgaaggacggaactgaggcgcctttttgaactcgctgctgctccagtcgccgcctcgtccccgtcggcccagcccgtcccctctcctcctccccgctctccctccatgttagccgcggcggggctcccgcttacggcccgaactacttttcctgctttaaagatttaagtttcgtaagcagcattactgccccagctccaccccagcacaccccaaggaccgaaactcccagcgccaccccgggagagcatccccaggacgcgcgcccacccgcccagcgcgcagacccaagaggccccggggaccgagttcggactcctcggcccctcgcctacctcggcgcggacccaggcgaccgccaccagcgcgagcgcgagcgcgagccagcgtttccacatctgcggaagagagaagagagcgagtctgaaggcgccgggccccgcgctgacctgggaaacttgctcgggtcccgcaggctcgctccggccgcccaagcacccccggccgcccgaagagtccggcctccgcgccgtgcgccctgcgctcaccgtggtctggtccaggtctcctgggggcgcggggcaggacggcggcagcgagctgtaagcggaggtgggagctccgccgatcgccagcctcggaggaaatgcgacctcccctcgccgccccttaagacctctccttccccgcctgcctgcccccccagctcctccccattctcctcccccttctgctgcagcggcccccgcggctcccgctccccctccttccgacccctgctccggggagcccgcgggagtcctggcgccgccgaacccctctctccgcacggtccctcgtccggcgccccttcggccccctggacgtggagcggaggcagagggggtgtcccgtgggtccctgccacaaaggggtagggggaagggaa

SEQ ID NO: 40883 - DNA, 3109 bp, Homo sapiens
tctttcctatgcattgagtcagggaatagggctttgtcacttggtgacttacatgcttatatttccccaggagaagcccaaccccatccttctagattcattaggtcctagttctgctcttcctccccttagtcatatcaacagccatacacactgccccaggcaactcctctaattttccacctctgagtcatcttgagttacaaatggatgatggaaggtcacataatttttgttttattataaagaggaaaaatgagggagcatttattcttgcagtcactctgtgctcctcaaatgttgctctggctcaggtatgggagaggagggtgtggttggaatcatgcctcaagtccccccaagttctcagggcagcctctgtttctcctcggctctcctcttccagcccttctaaaggcttctctttctttctctgacatcctgttagtatgaactcatgtaagctatttaatgagccaggcagcgttatccaatttttataaattgaatgatagcggtttatgagaaaacagccatgattatgaaaagtgccaagaatattaagttctgcactgctgcttttgaattggcctttattaaaaactgattataattcttctggggtcagtgctgctaaaagtattaaaaattgacctggaaattctgtactttcatgatgcctgttttccccagttatttgttttcagccagataatttgatatatctgaagatatgttgcatttgccatagttcataaactttattttcagttgctgcaccctggaaacccaagatactcagaacattgttatttatattgagagaaaaagattttcttttaatcaatcagatttactttagcagtaattaggtcagctggaacaaatctgcattttcttaacatttttagtggtggtgaaatgagaactactgtgtcccataattatgcattcagatattatactatcaaaaaacaccaaattaagaaaaaacaatgaaatgaaatggacaaatccgagaaaactctcttcttcctctgccactcaccttcccccttttctggctatttgagcataagcagtttcactattgtccaggagagtttaaattttacttcttgttagggtgactattatgaacttctccctaactgaagattttgtgttctgaagtcattgtgttcttaggctgtggtccaaagtgacttcattttctggttgctgggatttaacagagacttaatgtaagggctgcagctttgtgagccaaagatgtcttttttttctgactcatattaaataggactgaagcgtgtgttaagatgcccatcaaatttctccaaaatttcaattaagtattgcagaactctacttggccaacgatggggtaattaaaatgtacattatggatctgatagatttaatgaattggcattgtgaaagaacaggaacagctactaaaattccaaaaataacagttcttggagaacagttctcggagaacagttctcaatctcaaattaaatacatcaaaattaattttagctgtttcaggaaggtgacatgagagccatttcagtttttttaaaatgggtttgaatggaatgacaaaagcattccattcatctttgaaattctagagtttcaaaaaggaaatgaagagtttactaattgagagcctgtccattaagaatggatgcagccgtcttagcaactaacatcaagccatccagtaactgacatcactgtgaaccagaaagtcagcactcctgggagagcctgtgctagaagaaaatagtcacttaaaagttatccctcaaggtagttactcttgccttcaggatgaaaaaaaaaaatgtttcagaagtcactttaaaagaggatccaagatatacaaaaaagatttttgtagaaaggagttcagtgcagcattacttattagagtgagaaatcagaaacagccaaatagaaagtagaggactggttaaacaaattatgatacattcacataattgaatactatgcaatcataaaataatgttatgctgcagtcatattaaagttcataagaaaatgttataatatattaagttaattattatatacaaagagaaaaaagcaggctataaaatagtagactccaaaatttaatagtggctatctctaaggcagggccaaaatacctgatttttttttctcctttacccttcctatatttttcttagtaattaaagaaggagcaataaatgtcataaaaagacacttcatttgcaagtctgctgagagatagcacatattttaattccttatttttcgactagaacttaaattacttggcttttcagaaatacatctacttcctacatttctcatcaattaaaaaaatatctgtcacttcctatcatatttggaaggcttctgctttctacttaggcaatactttggggaagttaaatttgattgtgccaaagttgtcaaaatggccttaattttgtttcagtgaagtatctttaaaagttgttaggtggtgtcaataagctgtttaattggtcaagaggtcacaaggcctgcaataaaacacctctttattacgcaaaaatcttcatggacaaactccatcctcaaagcaacatgaaaaccccagaaactgaaaagaagacacaagtgctgagccagggacctcctgcatgcagaacacagatcaaattacttgactgaagatgcagaagagaggattccatcagtaagactgtgtgctggggaaagagcaggccttaggtcaatacattcctgtgtaggaggagccctgtccactgcaatttcacagcacaaatgagaatgactcttggttagatgggaaattccattaaactctgttatgcaagaatgtcaggaaacagtgttattatactagctgccccagatttcagacacatatgttgagggaaaccacattttaaagactacaaaatctcagtgatctcatctcatccctctttctactacacacacacacacacatatacacacaaacatgcatgcacgtatgtacacacatgacaggggaaagagaaacattttaagatcatagattattatggcaatagct

SEQ ID NO: 40884 - DNA, 1765 bp, Homo sapiens
ctgcattatctcctccaaaccatatgaggtactgtcaaaatttgcatggtctccaacttgatctatactggtacattgcctcccagggtgggtgggtgggggttagtggggagatggagtgaggcagaaacctgctttaccaaactgagataagaatcaggaaaactatcccagctgtcgatgctggtgcagagcaagaaaggagtctaacactgtctcagccctcatttctaacattaattttggcaggacatggaagcaacagtggaaagcctccctctccattaatttggagctaagaaaaagaaaaggtcatcttctgagttgaactagtaaaactcacatgcaatggatgtgattagtcaccttttggagtaaagctagagaatatctgaaatggttggacctcagaagactgcaatcaaggcaaatgatttgggtgtaatcagaggaaggcaggtccagaatatgaacttcatttaatagaaggcatttaattaattgtgttgtaaggtgttggtgtgggggaaggttggacagaaagggaattggtcagcttcggctatggaaatcccaaggaatcataactaggcagtgtccaatcaagcatgttgtagaggagagaccctgtcctctgtgcccttatggttgctggagaagttgctctacttggggacagtagtgcctcttctctcctcagcactctgggtgccctttgtacagcacctaggttgattcctggtctttgttattatgaataatgctgcaatgaacataatgagtacaagtgccttgttcacctgtcgctggttttccaggcattctgatcctaggacaggctgccctggatggtggacataagcttttcagtccctgggaagaaatgtcccccactgtgagtttatcagttggtcatgaggttagactcatggatttgattaacttgagtgacctcagattctgaaaacttctgagatcttgacgagggtaaattgtggaatttggaaagtggtcagttcccatgagaccttgtggttggcagcatagccttctctcagaacatgctgatctcatcatcagtctctttctgccttcaacagacactatctacttaggtcaatgactgtcaaccctatcagactcaaaagcctatttttaaatgaatgttttattatgttctctttactattctgaaaagaaattcacaagtaggccaaggcaggagaatcacttgagtccaagagtttgaggctgcagtaagctatgatcttgccactgcaagatccagcctgggtgacagagtgagactctatctttaaaaaaaagaaattcacagtaatacaacctcctactcatatatttttttaaaaaagtcattattaaaaaactggtaaagagaaatactttgtaataaaattgtatgtattagcaaattctaatgttggggatgactcattggaagacctaacgaagtagttgctttgagatcagagtgaaggtggcggaggcaagtgtagatagagacaggtgtgctggcaactcaaataccaagagtaatgttgctgtcagtgaagtgtgtttctgaaattgtgactactgttggtagagttccaaaccaaagtacagtcttacttgctttaaaaatgcagagagggccaatcacggtggctcatgcctgtaatcccaacactttgggaggctgaggcaagtggatcacttgaggtcaggagttcaagaccagcctgggcaacatggtgaaacccca

SEQ ID NO: 40885 - DNA, 1472 bp, Homo sapiens
gaaaattcagtgtacattaaaactttgcaaaggtaatctgtgtttctaagtaaaatggaattccatttcatacccagataattataaacaggtttttcacacaaatgttcagtgtgacttctgaaggttttatagggcacaagaatatttcttggttgttgtacctgtgctgcacatgactggatagctagcatccttggttccctctcagcaaatgccaccagtactattccaataattctgacagccaaaaatgtccgttcaagtgtctgatacatcccctaggtggtggtaccactgctgttgagagacactgaattaagtgaacaggaatcaaaatgagggtccaataatgcaaatatgctatttcccacagcacaatcattccatggcctggcatgatggaaaaccctgggtagcagaaagaaggcaaaggctgcatgagaatggggccaagtgttaggtctagagggggaagcaacattccaggcatgacaatatgtcagaacttaggaggggaaaccaggataacacttcacctctgggactttggccagcgtatgagtggggccaacatagaaagaactgtggctctgggccacatggatacccaggtttgtcctcggtgcctgagatcccagatctggctgaaaaggaaggattaggggtcagtgcaggagcctggaagcattggctttcttcctaaaatttgagtctagggatatgacttatttccagattccttatgcacagccccactcagaaatgccccgatgtcttgtatgaacttaagtcttctcaagtagtagcagcagagaagaaagcagaggccagagagacaacagcctccatttatcagtaccaagcatgtgactgaaaaggggatgcctataccacaccatctgattttcttacatcagagtattctttgtcctcattttaacagaaacgaatcaactcattattcaaacaaaaacatgtgctcaaaagaacaagggttgaatggtgttagcaaccatgcctcactccacccctgtccaactctgttggtttcctctggatggacacaaaacagctgcttggaactcagatttggagttcatttccacaagtagggtcatgaaggtgtggccatcaattgaggcaatgcttatactgaataccacaatttacaagggtaagtagataattatgctgagagcccaggctgagtccaggcaccacgatccatgctttgtaactcagaagccaaaaagcacttccataaacctgatattccctgaagaccatctgaacaggatgatgcctcatctcctgtgcttctgatcccaaagcatatccaagacaaccgtctaatctctgctcaggattcaaactacttaatgtttttattccattgagcaggctcctttgtggatacagatcctgcaaaacaataataaaaaaagctcttatctcaattatgaggtcct

SEQ ID NO: 40886 - DNA, 6620 bp, Homo sapiens
aatcatgcttaagatattgcagaattatactcctgaagtcccaagtcattgtgctggtctctctgacatcttctgtccctctactctttcccattctctcctggggtctcctatctccctatggacagctttctccaaacctggctctgcccctacctcttgagcacatgcctgagtagatttgaaggctacttatcttttgggtttttccctcagtaccacagagcaacgatttgatcccctggtagtttaagatctgagacaccactagaagttcctctgaacaaagcattctatgaaaaggaaggggatctacatatatgctaatatatttatctctgcttttcttctgtgtcctttggattttcttcctgtgtgtatctcattttaatcaagatatacttccctgcccagaaacccttaatggttacctattgcctaaaaaaatcaagtccaagtttgtcagcatagcattcaagatcctctgtgatttgccccctcacatgcatttccaacaaatcaactcctctagccagagtgagagtctgtataattcagtgctgaacgtgtagcctctgcagtccaatcccagcacagccacttgtgagctgtgtcctcaggtgagttgcttaaacctgtctatgcctcagtttcctcaactgtaaagatggaataataatagtagtaatttgagttgtgtgcaaaccaagagaactgataaatgtttgtgggctgagagcagggcctgatcataatgtatcaatgtactactctcaacccacttgcacttttctatctttgaacattttttcacagttaccaatttttgaaatgctcttcccttctctccactcctctaaatactttccatcctttaaagtcctgatcgaatttttcttgcacaaacttccctgaactgttcaatttacagtgttcttttctgtttattgttcttatgatctattccacaaattttgcaaataatcatttgttgcatcatggaactttttgtattgccaccttgtatgttaactgggaatgtaattttgccttgtcccctaccaactggcctgtgaattattggaagcaaggactcaggcctgtctttgtatacctggtatattgcctttccaatagtggctcaataaatatctgtttatttgacttatttgattcacaggttgaatgcaagattgccagatgcctttggaagtggttagctaaagggagactagaggagttagaaacattgttatttgcttgtaaaatatttatgtttctatgtaagatgttccatttccatcttggaagcactagaactgtctgactagtggaaatccaccaggatgagatcaggtgctgtttctggccagagggagagatttggcagccagatgggctcttagaagagcaatttaaccagatgcagaatggcagagacagagtccccagggctggctatgatacaaagggatctcctgaagcgcagttgcttccacaaagaagttttgcaaattcagaccttccttccttgctgcttaattttcccctgggtggaaacctttggcatccgagagggccagggccaggtaagataggaggaagagctagtgtgttactgggccaaagacttctgggttctagtccagattttttcaacaacttcctgggtggccttggaccttatgtcatctccctaatcttcagttccctcatctatcatgaatgtgttggatcaatatgtaatctctacagtccctgctgactctcatactctatcactctaggatttttctcatagtggagtcattagtatctactatgcaggagacagagacctcctttgcctggaattaatattctttcggttggggagatgcaatcagaactctggccagtggagctcaattgagtcagtccctagggtgtgagatgatctcattttatggggagtgaccctgcttacaacaacttggaattctttaccttctccaccacatctgggaaagtaaggacttgggatataggataatgaagagagggcagggtaataatggggcaaaggacttaaactggagccatatctgattatttggtcaattgtccttgcctctagattatcactgagtgttccctttctgtagtccctgactgaagtcacagtcattaatgatggtagaaatccagggagatgaagcaagattacactgaggcttggtgccaagtgtctacaagtgtcagagaccccacccaggccttggacttggccttatgggtacattctccaggaccgcccccacctcaccctgccagaaagtgctcctcccctggaacccgcccccacccagatgaccttcgcagccttcctcaggtgctcctggctgctctctgctcctgcaccacctctctctgtcaacttaaacccatagtagcccctcccactaactctcctctactcccccagctaagacagcaggtctgcctttttaaactcagatcaggctactgggtgtgaggtccatgaggccatggccttgtgtcttttggtgcttgtgagcttatcttgggcctggaaaatcatgctgaggaggaagatattcctgctgctgccaccatggaaaacagtgctgtgttccaggagctggggaatagtgtggcaagcagatgacccttgtacagcagaacattgatgaccttctggaagagacccagagataaggagggaacagcttgtgcggaaaagggagtcctagaagccagtccaaatattgcagatggaattcttgtgagtgagggctttctacaaaaccgtttgccaagacagctcacatgtttgcaaggcaaacatctaggcacaagcttacaaaatgaaacaggcagctcaatggcaggccctggcatgttgtcggtgggaggcggacaagtgaggaccatgggcctttcacctgtccatttctctctagctgctatggggggcctctaatgctgtatgagttctttgactttccaatctatttaatagaagagaacctgggaagttagctcatccaagtcatgcctctgtctctacactggatgttacctgcagcatgtgataacaagacagttctgttctttcaataaatgcctctagaggaaagtgcccacctattctctgtgacccattctagggtttaatcgctgtgaaatcttgaacaataggcctcacattgaccttaagatgccccctcggtagtttacttttattccatttcctattgattacaggtggggaatagccactgaccaaggttttcacttgaaaggatgcttttaaatacttgaccataacaggcccccttaacctacacttatttagacctaataactttagaaacattttatacacttatttacttgataatcttttccaactattctataatctctgctagtgaccacagctgctctccccccgacagagctcccctctcctttctaggcaccccatctcttccctacctaagaaatttttccatcttcaatgcaccaacatttgagcagctgtataagcacaaaatacttaatttgggaacagtgtctgtgggaaggaatgctttgttagtttccaaagtaatgcaaagcttaattttagaaagtaatttaactttttttttttttttttttttggttctggaagtcacagagattatggattgcactgcagaggcagcctgcctcctgatgatgctagcactttgtagcactgggtttttctgcagcagtttcatttttgttctcattcagagacacagtgggtcagttcaataaaaacatttactccctgaggtcagggcctatgtcttgtacagcctgtctgtatggccagggcctgacaaggacaagtaagtgggaagtattcttaaatgttgaatagcattgcattgcctatctgcctcccactccctaccttggtcttaaacttggtccaatcaggttctggaactaggaaagaacagctatcaagtattgggcaggacagggacaggcgggatcggatcataccactgctacattccatggctccaggagaaagttatggtgacaagattgaagagtatcatgtcctaccagatctgatatcagtctcttcctctcagggacacacaggactaggagctgaaacataataggaattgggataggaatctgaaccaatagagccagatagatttggagacagggaccatgaaatgcagaaattaggggggtacatcaccaccaccatagtagcaatatttagggctggaactgagataggctcttgataagtagcactgccccagagccctctgtgggctccaggtgaagcaccttctatcatttgctggggtgccttttgactgtcatggcatgctctagtgccttaacaccacgattggtgacattcccaattccccagaaataaaatttaaactctattttccaagggtacacacacacacacacacacacacacacacacacagtctctctcactctctcttccaactgtgttataagcaaaagtcagtttgagaggaagacagtgatgaagtccccaagagaaaatcactgtgagtaaagatactgtggcagagtggaccagactcaaccagagcacctgaatcttggaggacaagaggttccaggcagagcgtgaggctgtctctgtagttctcacctgaagtccctcaaccccaaatcctaagagttccagtatgttctggaaacgaggggggtggtctcaattagaaaacaaaaatcaaaacgaaacaaaaacatgtaaacagaggtacggtcattctggagttggtatcttctctaaaagacctggaagacccgtcctgctggccagggaggagctgaccattggaggtcaggggtttgggggaggtgggcaagagcggcggcagccaaggggaagaggcagctgtagggtggcacggcagcccactccgagaacagagacggggaaaaggaaagacatgactgcacagccaaatgtggcagagttagccacttttgcagtatgttttaaattttattcaaagtgttatattctgccagatcttgaaatatttcagagctcagcctgtgggtgggttcagctccatatatttttcattaacatctactagtaggcctaggatagtacagagagaaaagaaagaaccacgccagaaacacagataacgaaaaaaaaccaggctgacaaaaagatacatagggaaagatacagggagatgctgagaaaagccgttttctaggtgcggaggaacacagagttctaggaagcaatttagtcaagagattcaggaaagcctattaagacggtgtcctgcgagacgctagttgctaccccaggttagagatcaggcggtcctggattaagcctccccgaactgaaaaccgaacagaaaccgcaaagctgcattgttttgtttgtcccttggttgggctccgggcaaccagcgcgctggggttctgacacactgcctgagcgccccctgctggccactgtgcagaacttcaccgtctgggcccaaggtgaaatcgaattacgtaatttctcgagctttgcacaccccatttttacatttttatttattttttatttatttttgtattttcccaagctcctggcttcactgaagcctactgtctaatgccagcgcttgaatgctctgactgccaaggtcctaaggcccagtgagggcagtcctgagagacccagcctaatgagagtgcacgcaggggcttggctgaacatttatgaaacacgtgccacatacaaagtgctgcggaaaggcccaaagggatttcatttggcttttcgtcttcttgcctcaaaagggaggctagaattaaactgcccttctggggccggggtgagagcccttccccgcccagttctgaccttcggagcagccttccaaaataaatccccagaagagcctctcagggcaccagctggcgcgcctccctctttcctttcgttatctctctccctattcatcttctctttcttctctgcttggagaggagaaattgcaatgtgcaaagcccctggggcgagagggagagaaatacaagtctccccaaatgccaagcctatgttactgctaagaatagcctttatctctgggaggaagcgcaggagacctggttcctgtttctctctccctctccctccctcctttctccctctcttctccctccccctcacaccagatgaaggttgattataaagagggcagtgagcctgtctttcctaaagtgactgagacttgagtcacaaaggctagagaggggatgtgggaggagagaatgagagtccagaggcagggtgggagggaagggagaaggcaagagcagcatgggggaaacaggaagaacaggacacgggagtctgcagccaactgattgacaggggtggtgggaccctcaaggagcgtccctgaggtcagcagtgggggcaactggggctttaggcacgcccccccccccccccattctggcaggacacaggcatcaccttgagggatggggacaggtttccagacctctggctagtatatgggctcacagtaagcaactct

SEQ ID NO: 40887 - DNA, 1195 bp, Homo sapiens
ctcacaacaactttgctaggtggacaggagtcattatctccaggataaggaaaaggaaactcagagactttaagtgacttatccaaggtgacacagcacggttagacccacaatgaaaacccggacttctgactccacagccagtcccacacagctcaactttacataataagccctggttatgtcagtagagacaaggctgctaggaagaagcagcgcggtgacagatgagtaggtggggagcggcggtggggcagggcgcactgcgagaagagcacttcgcgcatgcgcatatcaccgagcgaacgcgccgtgttcgggaaggtaggagaaagaggcggagctccttgttaacgacatccccaacctctgctaacgcgcaggcgcacttcctgaagctgaaggtcagcatagacaaagggcctcagaatcgcgcaggcgcaattgtgccctggttcgccaagatgtcgttcccaaagtataagccgtcgagcctgcgcactctgcctgagaccctcgacccagccgaatacaacatatctccggaaacccggcgggcgcaagccgagcggttggccataagagcccagctgaaacgagagtacctgcttcagtacaacgatcccaaccgccgagggctcatcgtgagtgtggggcctcccaggcgggaatagggcccgagtcctgggagagaccgagagagaccacgcaaagggtcggccaccgctcccgatcagtatctcagacgcaggtcctcttccaggcctagccaactcactacccttttacctttgccagagcttggccctcgagaggaccggctctggactcagacctggctgggtttgaatcctggcttgatcacttcctgcctgcgtgaccttaagaacgttattcactctgcttatcctcgattttctgtctgcaaaatgggcgtaatatagtgcttactcttttatcaggctgttaggattaaatgagatagagtatgtgactgtcctagcacagtgcctcgttcgtaaggcgtgttcagaaaatgtttctatatatatgcatatatatattatattatatatatattctatatatatgcatatatattatattctatatatatgcatatatattttatatatatgcatatatattatattctatatatatgcatatatattttatatatatatataatttt

SEQ ID NO: 40888 - DNA, 679 bp, Homo sapiens
ggatgctggcatttgaccatggagtggcctacgtccatcctaagggccttcattcctgatgctataaaatagctaaattggccattcagtgcactgttgtgttctgttgagccctgacacctgggaactggtatatatagagagggacctattataaacagaaggccctggagtttactaaagaaaggaatttgttttctagaatgttccaggtggaatgcctcttagagtctttccagaactctatgcacaaaaaaatgcacactccaggaagtagaattgcacattgacctttgattggattttcagctagctattgcacaattaaaaatgtcaacctcattaagtacagccgtgaagtactttatttattcttgttgatgcattcacttattaaataaatatttattaaaagcatgctatatatcaggcactatgctagccataccagttagtggtcatgagtgtttgctctggtatcagacagcctgcaattaaatcctgactctacacttaacttgctgtgagtccttgagagagttacttaatccctcttgtgtcagtttaattttctgaaaaaaaaaaaaaaaaagcgggggggacaataatactacctgtctcttacaagtattataaacacttcatgagttagttttttaaaaaacttgtaacagagcca

SEQ ID NO: 40889 - DNA, 743 bp, Homo sapiens
tagaacagttaaattttctctactaagaactgatgccaacactttctcagaccctcttactaacctacaccctgagccctttgatcttagcctgtcttgacctgtttcccaaattattcctgatctccttggctcctaaacccaagctttccctccttttaatggtcttgtacctggtcttccaaattgacctttgtttactgttcctccagtgctgaatcaccctggccagtctgattcctgggacactaaccctgcttaggtccttcagggttaatgtttcttgtctaatccccttatattaattatttcaaacagtatttattgaacctctctgtgtgccagattttatgctagatgctggaggtgaacatgacattgtctcttccctcaggtaatccattacagaagatcctggaaatgtgaaaacctcatgatagaaaaacaaggaagtggatcagtgcaaataactttggaagagaaatgtaaatagaaatgttctctcaggaataagtcctggcacagggcctatttaacattcttatatatggaaaataagagatataagcaatgaaatcatctggtttgcagacagcgccaatatctttgcaagaagtgaaatgtaagttgatggagatgaaatgtaaaaagagctagcaagctgtccaaaagggctgagcaggggaatgtgcactgtaatgttggcacacaccactgaatgcatttagagaaatgcaatctaa

SEQ ID NO: 40890 - DNA, 5559 bp, Homo sapiens
tattctttttgccttcagactcaatattttgtatatttgaaaatttgtcaacacaaaaaatactaagttgtatactgatttgttaaaagcagcagcatgcagttaggatgatatctttggggaaatggcagagaccatccaacattctgattctccactgcatccaattttctactctcaaaatgaaccccatgctcaccatcaacgggattgaatttgagctgctgagaattggtaataaccccaaattatcttcaattctgtgaaatggaattttagaccagcctgtgactgaagccactgggcattacagtgccttcgctttgttcaactgccgcattgtttctctctgcaagagaggaaggaaggctggagtacagctgagctttctggcaggcactggtggagttactcattaaccttccccattctttgtaactggtggccttagaagagggttcagggttatgtgtttggaacacgagttagtataaatggttctgaagcacttgattcagactgtgctttaaaaaataggaaagaaagtagaaagaacagctgatggtttggaagggagccaccaagcaccaagaggtgtgagttctgaatccgtttctcaatcttagctgcagggcattggctaaagaggaaggtgaaaactgctgagtcactatcaaatcaattggtttttctaatcccctgagagaaaaagtacagagtttattgcagctttaaaatgccatgcccctcacggccaaaggcatctgaattaaggaagcagtattcacagctgctttctccagacattgagctcaaggacagaatctgaactctgcttttatcagctgcgaaaatccaagcattcatttccagctggttcagtgcctatgtaaaagtatactgtgtacaaaaataagattaaaaagctaacattaagcaagtgtgtttgtatgttttctacagttcggatttctgaataatttgatccgacagaaaaatatgatttcatttcttttcgagagaattatatgcatactttctaaatgcaagaataaattcctgagctccatgtgacttcagtaccatcagctctttggcagcttatgagtatacagctttttaattctcacctggtccccaggatatggtttacttgtcagagtagttttatgaggtgctttctcctgactctgattctaggtaacacctgatgagatgaacagatggtgcacctcacttcctcttactgggcatgaaggaaagagagagaagtcagggtagagatgaaactactgctacattttttttttctgtggaaaaagagtctaatatttctaattaaccttgatgggaacatagaacatagattgtaaagggaacttgcacattatcgcagtaggctgaataatggctaatggctcactctgaaagatatgtatggcttaacccctgaaacctgtgagtattatcttttctagccaaacagacttttgcatatataattaaggatcttgggatggggagatatcctaattatttgggtgtatcctaaatgtaatcacaagtgtcattataagagggaggcaaagggagatttgacttataagaggagaaaatgtgacgtgattacaaaagcagagatacatttttttgaagatcgaggaagaggctacaaaccaaggaatgtgggtagcctctagaagaggaaacagaatccatggaaaaggcaggaaaacacaatctctcatagagtctccagaagaaacagccacactgacacctcgactttagcccagtgaaaccgatttcagacttctgacctccacaacttcaagataatacatttgtgttgttttaagccaataaatttgtggtaattttttacagcagcaagaggaaatcagttacgtagaatagtaggtcctgtctctggctaatcattagaatcactccagaagcttgttacatacagacccagagccagtgaatcaaggatttggtggtggggcccagagcctgaatattaagcaagttcttcgttttagaaatgaggaaaccaaggttgggagaagctaagcaacttactcaaatacatagggtatttcattttaaatttaattttattactttatcttttgaattttcttaccccagttgtacttttgtgtaaatgtgatttcatttacggctttgtgttgacatattcattaaaatgaagaaataaaagatgagaaacagttttaaaaattatataatgtttattgattagaatgaatatgatgcaatctggttttctgtgttcagattcctgacctctggagttaacctttctttgtaaagattagacagcaggcagggaagaatgcctttgaaactgagagcaaagactggcatgcaatttacattgatgtcctggtgctgtgcataataagttgcttaaacatgacagcaggataggattttacataaaatttatttataaatggtaaagatgtttccaacctctgctgaacttcctcatagaatgttcatcagaaaacaaagtttctatctactctttcttccaagacttcaactcctaccactgacatcatgaccctcagttctattcccctagccctgcccactcccctgaaatccagatccataaatccaaccaccgcctgggtatctcagtttggctgtccctccatcaactcaaatttggctgacacagttttggattctagagcatgcaggcattctgtatgtgctgtgcctttgcactcactcttccctccagaccccgtccttcctcactttgccagttccaacttctctctgaagactcagtttaggtacaggctcctttaggaaatttttttttgactctacctagcccagactcagttcatctacgatattaatctgcagtgtcatgcactagcacaaaatatttgctgaatgaaagaatgagagttaacttttagtcaggcataaagataaaaaaccaaagtcttttactccggtgtggagtgttttcaggattcctaccaattaggaaggtgtttgattcttcaaactcagaaacacctccccttaactgatggattcttcaaactcagcatcagttagagggcattagggcacttctcaaaccctgcattcagggaagatgtctgttgtggggtggtctggcctacttggcctgagccaaggttctgggcagttctgttcagttacacatgcatgcgttgagcattgattcaagcctggcctgggcactaggcatggttttagatattagggacatattctgttttccttgccttaagataccagtctagtaggagccactaaggcccctttttgagcctggacttcgcattcaaacataccctgcttctaatcaagtcatctattggcagtgaccttgggcaaatcatagtctctccaagcattacttttctaattgaaacaagaacctctctctataccccagatttattttgaggattatgagttaattcatagctaaaatgcttagcacctaacagcacataacccacacatacttttcaattgcgtattactaaaaagaaggaatgatttcctagaggaggtgcttcttctggccaagggctgattcagagccttaattaactaaatagatcaagcatatctaactggtcaccggaagtggtccatgaggctgcagcaatgggaaggtgtcagagcaggggttgggaaaaagacatagagagaaacgtgcatgtccgtagtggaggggagctcttaggatgtctacagatttccaagacaataattgaaatgaacaaaggcaagggatgaccaataagagcttcatttctttcctttatcacctttcccttgttcttcagctccagctgtgcccacagacaccacagggaagcctctgaacacaggggtttgaaccagggcctctctaagtcttttccaactctgataccctgaagttctcagaaacttccataaattttggctgaagaagccatagcaaacttgtcagatggtttcttacctttaactcagccattttctctctcctctatgtgtggtgacttcaggaaacccaggcccagaggatataaagccacaatgcttctttctccttcaaaccactctttggatattccggttcccactgcttcactgcgcttcactggtcagtgcgtcactcaaactagctgaaagaattgtctaactcatacacagggacaaagtccagcaagcttatttaaccggttacacaattgcctttggtttttacagtttgttcctaagtgtttccagaggcttggttcctcttcacctgaggtagagattgaccaattatttattccagttaaaagtaggcttatttcaaaaggcagagaatttgaagctatcggggaaaggaactgtggcagatagtgcctgctgtgtgtggtggaggattctctgctcagtcctgactcaggctaggaaggaacagggcagtgctgagtctcctggagagcagtgagaaaacccccaggcatttaccagctgcagatgtgtacactggggtaagatgtttacacacagccacctgaagacagggaccaggaccagaaccagttttctgcaggtgcctcccaggaatgagctcaggttcttgggtgaaccattcagagcctgagatatttcacttagagcaaactgatatgtttcctactgctccttttaatttcttaaagtacgtttagttttcttataaattctttaagagttttgtttcctaatgcctctatacttctaaaacagaccaagggattattctccagccacctcctctatgactcccttgttcttcatcttggccgctctccttggtcattggcaggtagcagcttcatgactagtggtgttcagaaaggagaaaacatatattgagtttctgcttttgtcagatttttccatatctaacttcacaaaaacaatcttgtaaattaggcattatcacaactcaaatgccaacagatgagggaggaagtgtaagtgaataaagtaggctagctgatttttcaagataagatgaagctccaatttttaaccattggtaattagagtgagagagacagagaaaccaccctgtggtagatggcaaaaaatgctccaattcctcctatccttgtatgtgtgcccctttgaatgtgactttgctgttcctcccatcaagaggtagggtctttttctttggctagtagcaaacatgacacagagtttgaaacatgcctgtgccttaggacagggcccattcttgcagcctgagaccacagtgcagagaagctgggctggcctccagaggtccaggcaacagccctgcaagccccacaggaactgccagacatgtgaatgaggcagtctggctgccaggtgactgcagaacatgtgtgatcccaggcaagaccagcagaagaaccaccagttaaatctggcccgaactgctgagccacagaattgggaacaaatagaatggtgtatttcacactactaaattttggggtggtttgttaa

SEQ ID NO: 40891 - DNA, 536 bp, Homo sapiens
agacatgatatcaaaagcacaatccatagaagaaaagaagagtaatcagacttcatcaaaatgaaaactattgctttgtgaaagatactgttaaaaggaaaagataatctatacactgaaagaaaaatctttgcaaatcaaacattttacaaagtgttattcagggaagtacattcctgtgattgctacaatctttcaaaccaattgtgaaattggctcacccatttgtcaccaagactccagttggcaccaaatccctgttgagagcttccaatgaccaacgacgcaagttttgggaggacttcttatttgttaagtcgtgtacgaaaataatacctaaaataatcagagaaaacaatgttaatcccttaacaattcctcttcatttcacaattggccaaatgaagcttagtaaacagaagcattaggttgcttaatgaatctagcattctagtatgactaacaactcagagacaattattttaaaattttctctacaaatatttataaatagccataaacctttctctgtcagt

SEQ ID NO: 40892 - DNA, 2169 bp, Homo sapiens
tcttactttaatttctctattgtacagtctaggacataataggttttcaatgaagatcaaacgagaaccaggaaattaagctcagttaagaataaaacaggaccactacccaatatgtcactgcataattataacttagcgtttaagttcgtggactccgcgttcaaaaggattctgtcatttacatctctctgcctcactactctcatctgtaaaatgggataacaggactgtctcagaattaaatgagttaatacatgcgaagcgcttgccagtgcacgtttctcagtgcacgtttctcagtgcacgtttgacttccttaatgaacaaaatctcttgaaggcacggtcctactaacttctgtacccttaacatagaaccccatacaatactcaatgcctgctttttttttttttttttttaataaaagaattgacaatacactctaggctggggtcgcctgggagaccgatgcggaaagccgcgaaggcaaaagacccgggctccgcgacccccacccgcgcgacgacgccgccgccaccgcgtcgtcacacggagcaaagtcccctgggaagtgtagtcttcaggccctgggagggacttcagccacgggccgaggagccaggaagttgagggaaggaagctaaggggagggttactgggtaactcaaaagtgtctggagccccagaggtagggtaagccgctcacctgagtctcccaacaccagtaccttcacccgatccagggacgccatcttgccactgccttccctgggttaacgcctgttcctggattgtaagccaatcagagttgggcatggagggcagagccttcaatttcattggccactcggagcgtgactgtcttgatcgaaggtttcactgaactcattggctggtctggtaaaaggtagcggggtgcttccccagctggtcgcaggaatagtgcgttttctttgtcgcgcaaggggcgtggttcatttaagccggtagttgaagcgctgggggcagctgtagtgggagtgttccaggattcgccttggtaaaccttgttccctgttccttgttcggagttccctggccgggcattgcatttcatgatttcttcttcctttcgctccctcttaactatcctcccctaatgaattaccctgttgccttggtcctcttggtcctccaaagaaccattgaccccggagcggcccgtgtgcgacctcgggtagggcgggcttggctgcgccgagtgtggccctggacccaactgggagagtccgagggagtttggggtctcggagtctcgcattggggaggagtgcatatcaccgaacgcgtctcgtggagggcagctgggtccggaggtttcgcggtagtttgccgctgtgtgtgtgaaggcgtggaaagtgccatgaaatgtggtaacacaacaccgcagttagatgtgtagaatcccaagttgttctagaactggagtggcgatttactgaagtaatctaactggtctcttcgcatccacttttcttgtttttttctccactctgcagtcagtacaatcttttaacatcctgaatttgatccacgcacctcccgcttaaaactgttttaaatttaagaagagagtgcccagtagcctgtccgattctaccttggaaacaagagtggaggaagtgaagcagggggaagctggcaagatgagccatgttggaacaaaacgtgcctaggagacatatggaaagttttatggaagtacttgtctggctatgctagatgctggaaattaattggtgaacaagatgaagtctggtcttagagatagacatggagaaagtacaagaagggggaaagagccatggaacacgtgaaaggggatgattgtatgctacttaatggggagtctgggaaggcctccatgaggaaatatcatttgagacttgaaggatgattaggagaagggggtttgggcttagctgtaggggcagaaggaacagcatgtgcaaagccttgggatgcagggaaagcacatgtggctcatggaattgagaatatgctggtgtggctggttatgaggctgacagggtagacagagggcagagggtgccttcttttcaactttgtttctctggctccgtgcctggtgcacagtagtccttaaatgttgatatgattaaaata

SEQ ID NO: 40893 - DNA, 662 bp, Homo sapiens
cagatgtggaaccaaagtgctaagtgcatatttcaagcatctgttctgaatatgtttaaagccacagtaagttacaaaaggcaaattcatagatgctctttgaaagtgaatgtaactattatacttggtattctacttcccccacgcccccagaagtttttgatgctatagacactgatatatagtttgaaactctcactataaaattactaggctaagtctatcaagacttgaaagtttgttttgctgaggtaggtgaaagggtaatctctgttctttccaggtgactgcatctgcacaggcttccctgggaggacttcatcaacagcacagttacacatcaaagtcctttagctctccccagctggcgcctattttcactttcactttcaatttcacagacagttttacagcactttccatttcattcttgacaatctgagctacctaaggaaaaaaaaaatgtagttaacaaactgcccagtcaaagaatgtttcccaaaccatcccctgagaaagttataaaccagactggagctcttcacccaatggtgcttaaaatgctaaatcagaaaaaataaaaaataaaataaataaatgaataaataaaaagacatctcatactcttcttcactgatgagcaggaatttctgaaagttttt

SEQ ID NO: 40894 - DNA, 471 bp, Homo sapiens
cttagttaaaattatgatgccaatgacaacattattattagctaaatgttaaatgttctcaagaaccaaaggacacctcagtaaatcacttccttcaaaagtaaaataaaataggcctaggcactttttttttttttttttgatacggagtctccctctgttgcctaagctggagtgcagtggtgcgatctcggctcactgtaacctctgactcatgggttcaaggattctcttgcctcagccttccaagtagccaggattacaggcatgcgtcaccatgcctggctaatttttttttttttttttttgtatctttagtagagatggagtttcaccatgttggccaggctggtctcgaactcctgacctcaggtaatcccccccaccttgacctccccaaagtgctggaatagcaggcgtggggaggcctagccctaggcattttttacaagttcattttccctttccccc

SEQ ID NO: 40895 - DNA, 2063 bp, Homo sapiens
tttcctgagtttgccccttcataaccattctgaccatctaaatcttatcaattcacgcttttggaaaggcctctggcccttatgtaaagagccctccacttgcttgcatcttgcacagaactgtaaaaaggtcctttaaatgctcagacagcttccaactatctccaaaagtgaaagtacttacccatgattgtaaatatccctgtcccactctcaaactgtccgctccccatagaccaactggagctctttaaataagtcagacaaatatattcctcattcctcaaaggactcaccctccctttcacattccggttgtgcagattaaacatactccacaccatcaaaccaagttatttttcctcgagaactctcttagaggttcctttttctctaacagcctgcccacctctgattcctgggattttcgtgttgacgggatcgttgggatctttcctctcttctcatctttccagtaacccattagcattagcaggattattggacaggcctccgtttgcattaatatctccaatgattctgtgatctccgccctaaagacctttgatttcttttggtcgcgcctccccttcgggacaccaagtttgtttagggcctgagcacaggggcccagcaggttctttccgacgtcagcggctgcgtacggaggccgacttaggcaggccgctccaggaacaaggccgtgcggacaggactgacctaggcgcttttccccgtcgctcccagaggagaaacgtaccggggaggggacagaccgtgagcaagtggtccaagtctgcgcagggtgaccccgaaggcccaccggagaggccgaggcttgtgggctactagaactaggcctggtaggtgaaggaggcgggtgaagggccggatccaggactgaatccgggagaggcggggcgaggaggggactccggtgtagctgcttgggcagctcccgcggcccctctggcgggggtgaccgttattggactcgcagagggaagagttgggtagcgtcccctactcacctagaagcgctgccgcctgaggctccagctgcccccctcccaattcaagccacgtcagctcgggaagcccgtacgcgacaccttccaccgccgcgccccgccagggactcagccactagcagttgggacggaagatgggattaagacaccgaccaatcaggactatcggcaggacgttaccagggagaccaggcacaccttgtttgttaccaacctatcaacaatgacggaaaccaatcaacgacagaagatgctccgcttcctcaaagaaacagccaatggaccctaaagagtgaatgaggggagtgattagacgcgagtaggtgccccggaacaagatctggggagggacaggaagtgtcgagtgggcgggcgttctgggaaaggtcagatgttctcagtgtgaagtggttatgctggcttcctccaattcctcctcttcgtcggttgtgactgaccgagacagcggcttgggcttcggcagagacttgagactgcgggcacccgctgccattaggattgttgaatgagctgtgagaagggagtgggggatatgggactcttagattgaaaaaatactggagcctcttagttgttcgtctagtttcaccttttgattttgttgatgaaaaataattaaccacagaagtaacttgcccaaagtcaaacagcgacttagtgatggaactcggactagaacccggtgtcagtatgaaagaggatcagcaatgtctgtaaggacatgattgtgagagagagagtagtgaatactaggaaggtgcctcttacaaagtggagcctaagccaggacctaagcaaagattgagagttgagggctcaggctctgcaatgagtgtcagtgaggagctccagcaaaagactgaaatcactcatgctttccttaaacccctaaggaaagggaaggaaagtagccagtttccaatgagctgtcatttcaggcactctcttggcaataagagtaatgttagtttgaatttattgaatcttgctgtgcactcagctggcccattg

SEQ ID NO: 40896 - DNA, 1227 bp, Homo sapiens
taaactctggagaatgtaattagctggcacaaagtcacactgttaagtataaagcaggggttcaaactagagccaccatctgccttaaagcatttaactacgatatgaaacagcttcggcacaccttcaaagggtaggatttacacagacaggttgaaggagacataaccacctaccccaaaatcaattgacaaatgtgcctaaggcagaaggtgagggagtgcagttggattgcgtaattaccctgaaaaaccacctgttatggaaaccatctgtaaactttctcgagtgtttctcctataattcaacacttctcccatctttacattaaattcatgaaatttgacacaaaaagacaattatttatctattttaaggctactaccctgttgccaggccaccgggtccggcccagccttgattcttcgggaatcacttctccctcgccgcgcctgttactgcctccacggatcactgtgaggaaaataaatgaaaaggaaattcagtgcgatcctgttgcggctgatcctaaatgtctgcagttgctatctccgaatcctctttctcctccccactacacatccccttctccagtcctaggaccacaagaaacttcctctggtacaaaaaggtcagaaaacgattactgaggtaacagcgtcgcttcaagtctaaggaccgagattctggggcctctgggctcctttactccagattctagacccggctttcgcgctaccaggccttggataagacactaggccctgtgcctggacactgcacctccccaggcctcagtttccacaccagatctctacagagtgggcgtgagggcaggccgattctcccgttaagagctcttacaagccggctgacttcgtccaggagcctggggtcctggcctcctggtaggcgccctggggccctctccctccccagccaccacctcagataagttacctcatcctcgcttcgcgttcttccactaaagaacctggggctcccacgccgcactacagcgccgcggccttccggggcagcgtgcgtcgcgacgcgggaaggggcctggaggcgggactaggagcctcggagtcaaggggcggagcgccctttgctaataagccaatcagaacgtgagacgctccggtggggcggtgcgcgtcgagcgcggggtggagtctgggtgacttggctggcgggatcaagtgcagctgcttcaggctgagg

SEQ ID NO: 40897 - DNA, 877 bp, Homo sapiens
ctcaggcgatctgcctgcctcggcctcccaaagtactgggattacgggcatgagccaccatgcccagcccttgcccttcttttaacctatggtcacttagtctatttgctttctccaaaactaccagtcctccctgatttgactgaccagtcatttctgggacatcctcaggtgtttcctagaatctgatgcccctttgaactcttgtcattttagctttaggaaactaccagcagatgcttctgggtcccaaccaggcaattgacctcaaatagccctcctcccaatagggctttccttcttgacctctcaaacatgcattccctcctctatagcagcaggttaaacattccccacctcttaggtcttcccctgcctgtgaactttctgctgatgacttcatctctattgatgaagaggaaccagccctgaacgtggagccaagaaacctaggtttagtccagggcccactgctaacaggctgtaacaagtaattgtggaaaaatctccctcgacttcacttccctcagctgtgaggcagaaggagatggggcaggagagatcagagagtctcactgtggctgtggcctactgctgggcatgcctggaggttctccagtaaggagggccagtaactgctctagggatgaaagccgtttctccagttcttagggaaaaaatacgtttccatttcaaaaatgtctatctttaagtcctacagagggctgtttaccactattaggtgaactatcaagggttactaaaatttggtcttattttcatttttctcctctctaatccttttttaactctcactagaaagtgggagcaggttggggaggtgggatgtgatcaaagaagttcaagaatcactgac

SEQ ID NO: 40898 - DNA, 526 bp, Homo sapiens
accagcttcatcactcatcagtgacctcacttcttaatgcttcactttactcatttgatattaaccttggttctttgcttataaacatgtttaggattaccttattctacaaacaccaacaataactccttactcctctaaccaaagagctttctttaataactcatgcccttccatgcaattcttcttgtcaacaaacttctcaggacagtctaccccagtgactcactttgaaagtgacctcatcggcccaagttcagggatctttgtaatctacatttcttgattttactagttttttaaaatgaacctaatccctcaggagaaacaactctcccgcagaacctccatttattagtttactaataagtggtgcacttatcatttgtgttagctttgtccccagtcttgcctgcttttagtgccccacgaacctagggagtctaagcaggcatcttgggcgggtttttcttatctcatcctgcatattattactccagtgacagtgatttctccatggcctcct

SEQ ID NO: 40899 - DNA, 879 bp, Homo sapiens
tagggtggccggaaatagtgagcaaggaggaattgtataaaatggggtggtaggtcatttgtaggtcatactgaagattttggatttttttaaatacagcagctagaataacctgactgatgtttaaaagattactctgttgtgtgaaaaatggggaaaaattaattatttcacaccaagagtaaaagcagggagaacagttagaagccagtcattcaggtgatagaggatgataacttgcactgggactgtgatggtggatcagggaaagagaaacagatatcagagggattttaacaaactggcctcactgaagatccaaatgacccctaaagaagtggtggcatgattccgttgcataagttgacagcctggtgtaacctacctatgattcatctcaccagacccagcccagatcagggttcagggaccaaacccagcaccagagtagctgggatcagggccaggggtcatcaagactggggtcaccaaagtcacatcagggtctgtagcagctcacagtgaagggaggaatctgttgagctgggtttctatcagtgctgtttgcctggggctagaagtggtaaccagttcagaacctgggtgagggtagagctgggtcaacactggaggttaaagtggcaaagctgccagttcaaggttacagggatggagatatgccacctatgacaccattggatgagacatttggtggatgagtcagacattggagatttatttgtggaataccaagcagtgcaatctcagtgttctctagctccttgtgatttagacaagagggatccctgccttgcagatttagtttgatctagagtgtgaggctttttggtagccttaccagtaagatacttgccttct

SEQ ID NO: 40900 - DNA, 758 bp, Homo sapiens
ttaaagaaaatggtaacagaaaacatcacattaaaagttagaccaagagcttagggaacctaacaatacaatggagtataaaagattgtatatctcacctcctgtcactgtcactgagttcaagtagtgaaacccacaatataaagaacctggtgagttgttttttcctctagacacaaatacactgattcagcacatttactgagccctgactctgagcaaagtgctagggaagtgaaaactatgtcactgaccctatttctcttgttaacttgtttgatttttatttaaaatgttcttctttgaaaagcaatgcatgttcattttttagatataaagtataaataagccaaaagcacataattttaaaactcagcattccacctcccagaaataaccactgttgtacaccccagactgtctgtgtatggccttcataggtttgttatttgtttacaaaaatgagatcattcacgtccctttccccttgaccttcaggaatgtcatagtctaaacatatgactctgcaaatctgatctgaggttatttttaggcacccacatattaatatcctaatgtatttatgttttcctggtccttttcttgtacatctacatattgcttttatttaagtacctcatatcagctacttcaaattcattactgcagaagacagatacaaattattcaatgaattacaaatagcaatcttttattcttctttttatttttattattgtcattattgctctctgtct

SEQ ID NO: 40901 - DNA, 413 bp, Homo sapiens
tcttgcaaccaaaggaaaaattacatctctgaaatattttccccaccaaatttgaaatggaatctggaagcaagaatttgtactctattgcaaatattattttgcctgaccccaaagggagagacagagaatgtactcttgccttgcaagggtgagagactcaatctgtactctggcaggcactcctagaattttctgccacagactgtgtttttggcacagtgtgtggccactggtattgggccaagtgaagattcagagggtatgaccgtgcccagggctgtgggcagggcttattctgttctctctgggaaacagatttcctcccctacctgagggagagaatcaatcatcatctgtctagtttctcatttggagagttccagagacccatcctgggccctggaggctca

SEQ ID NO: 40902 - DNA, 619 bp, Homo sapiens
tacaggcgtaagccactgcgcccggccagccactgggggcttttaagcaggagaaattttgcttgctggtttttaaaactggagtgggaaaatcattcaatcacagcaattatctttaagtgccagtagattacctatcccttcttaatgcaccaggagatacacaaatgcacctcagccaagtcctcttcccttggacaggggtgcccccagctggccattgcattcagaagctggaagccatgtttgtctaaacctctttagaggttgggaatttccttcccaacgtaattctgtgggataaaatcaggcttgtcctggaaatgctaccccaatcaggagtggtcactttctatcttctttattcttcaatgtttatgctcaataataaagattcttttttaagggtcaatcaagttcatcaagggtactctacaagcctaaatacacacagaaatcatgagtaacctaagtaatctctaatatgtttgattagatcacctaactctagatagaatgttcatttttcttgatttaaaaagggctcacacatttgattaatctcccattttacaagatgacaagtttatcactcctggacactggcacattagcaggg

SEQ ID NO: 40903 - DNA, 3951 bp, Homo sapiens
gcacagaggaaaaaaaggacaaggaagtgcaaacctgacctgaatagagaattaagaaaaaaaaccctcagggaggaaagagaatatacatggaagtgatctagaaaggcatgcgtttcctcacaccttaaccatacagtcagaggtctcaggctaaaaatgccaagtctttctagctttctttataactgccaacctaattactccaacagaaaagtagccaattccattgccaggccctgagagcaggactcaccatactcccagtagcattttgttagaggacttgaaggggaaaaagctggctagttccaggcagaaggcttgaaaatattcaggaaaatgaggagaaaaaagcatgaactataggttgatgccaactaagaggttaacaccaggacgatttcctcaggccaaagtgaagaacccaggccagatttgggaacaaaatgtcagaaagctcaacaagatctgggcaagcatgaatctgacacctaggccaaagaccctggccaaccaggagcgcagttcaggcaggaggtttgagaaatttgtggcaacaacgataagaatggaacttcggacagatccaatggctccttgcaaactcccttcttagattcagaactggcgtcaaagcgtaggcctgtacatatggctagaactgtggaacaaggagaaggactcattctgacaattagtcctgtgctgtgcagtagtaacaagcctgaagaagcccaccaatgcaacctaagttcccattttaatcagccatacagaccaaaatcattaaagctccacttctctgacaaagcctggactgactgccaaagaaataatttcagttgaagaacagtgtgaaagtcactaagatagtcttcaaaactgctctcaaatatttaaagggatactatgtagaaaagggttcagaattatcctgggtaactccagagagaagattaagaagcagtacttatatatcatgggagcagaatttcacaatatgaaaatcttcgaacattagaactgtccaaaagagaataccctgacactgagacagggaatcctcccctgtcacaacaccctgcccttaagcagtagtgaaacaaaagctagaaaccactggttggtgatatgacaaagaagattaatgcaacaaatatggagtcccagagactcataaaggaaagaaactgctactttgtagcagccaatatgctagctcttacttacatccttgaatcctccccgcacatgccccccagaaataagaagttattaggtatcaactccattttacagattcaaaatcagacttttcagaacaattaatacacaaggttacaaagccaccaaggtaggtgggatttatttcctcagagctgtctgcctttggattattttttaaaattctacaacattgcagatattacagccaatttctaatacaattttatcagtgctaccaacaaactgtcacctttgagacagttgtctttgagactgtaggtcttcaacaggtaaacttaaggccactaacatgtgacagcagttatagaggtccagcaacgaaggtgctttttttgagttaaatattcaggtaaactagtggggattttttgactggcatctgtctataaatgaaatatactcactaaagtatctgactattagtcacaacttaaagaaactgactgaatgcagggtcagaagagatgggttaaagtcccagttctaccacttactagcttgtggctttgggggtgtcagttagtatctcaagtatctctgagtctttttcctcagatagaaaatgaagaggtagagctgtaccatctccaagagctctctctgattccataatcttcatagcaaacttgaaaattgaaaaaaaaaattcacatttccttatttgcttatgtactaccccatggttacccccaaccctatatgttatcaagctagaaagcaaacctcatgcaactcactgattggtttctaaaccctccttgcagtggtcatcctggtgattctatctgggccctaaagacacaagggcagatctcaaggctgagcaaattgtgtgtcacaatcattcccaaacactcagtagagttttgaactttgctctccactaatgagtcactctgttgtttgacttgatctgcaaacagtgacttttcagtttccaatttaacagcctttgccctgcagtttcctttgtcaacaccttcaagggcgttgaaatacaaactccaaaattactagactttcaccagttttatataaattatctatatgccggctggacacggtggctcatgcctgtaatcccagcactttgggaagctgagacgggcagatcacaaggtcaggagttcgagaccagtctggccaacatggtgaaaccctgtctctactaaaaatacaaaaaaaaattagctggacgtggtggcaggcacctgtaaccccagctactagggaggctgaggcaggagaatctcttgaacctgggaggcggaagtttcagtgagccaagattgcaccactgcactccagcccaggcgatagtgcgagactccatctcaaaaataaataaataaataaataaataaataaataaataaataaataatctatatgccttcatgaacagcaaggggagtaagatcaacatcactgcataaggtcactgtccaagggatccaccagtgcctgtggcatgagcaggtatggaatacagacctgacgcagtagtcatgaacaaagagagcagcaaagacagtggctgagtcctggatccagtgagacatccagaattggcggaatgatcgaaaaagtgcagcagcctggcctactcaccttgtgtgcagccagctacaaggaaagaggtttcttttcttttctactaatagttttcaatagatgacgaggtccccttttcaaagttcagctacatctactaaacaaagggcaaacttcatgactgtgcagtatgaaaagcatgactcaatcccacaaggatccgtaagtcacctattatgccatcttaaaatacaaacatgaagtcaggtgtgatggctcacacctataatcctagcactttgggaggctgaggaaggtggatcactttgagctcaggagtttgagataaacccgtgtaacatggtgagactccatctctacccaaaatacaaaaaataagctgggtgtggtggttcgcgcccgtagtcccagctactggggaggctgaggcaggattgcttgagccccagaaccagaggttgcagtaagctgagattgcaacactgcactccagcctaggtgacagagtgagaccccatctcaaaaaacaaaaaaaaaaccatgattttgataattgtacactggtcctgtaggaaaagtccctgttcttagaaataactaatgagtttaagggtaaagtggtacaatgtgtataacatagtctcaaaatggttcatgaaaaaactgtatttatgcatacaggtgtgtggggagacagggagagggaggaaggcagggaaggatgaagagaaggagagagggagggtgaagagaaggagagagggagggtgaagagaatgaactgtaaagcaggtggggcaacatataaacaataagtgaatataggtaaagggcacatgggagttccttacactattcttacaactttttggtaagtttgaaattatacaagataaaaagttaccccctaagagtcccctcaaaagaaagacagcaataaatcccacataataaaatatgctgtatttttctattgtttccttgacacgtcacatacaagtgctgtaaagaaacagttctgctgcattaactgtattctgaagtctacaccctatctacattatagttgatttgggaaaataaggcttcctctgacacatccctaggtaggtacttgctattttc

SEQ ID NO: 40904 - DNA, 2960 bp, Homo sapiens
ttctggattttatttcaatttggaaataggatattttacagaagtactaaatctaatttttataatgaaaaaataagagttgcaaaaattttaaacactttaggccgggcgtggtgactcacgcctgtaatcccaacactttgggaggacgaggcaagaggattatttggtgagacactctcgctacaaaatttcttttaaaaaattacccgggcgtggtgacacgtgcctgtagtcctagctacagggaggctgaggcagtattcaagaataccactaccttcaaaccgttcaaagtacaaagcttactacagataggtcaatttttcagtatcttgggttagttaataatgcaatacatatttaagatcatgattttggaattcaactttgtaactaaacagaagcacatttatgactgaattggaacagataactttaatggcaacttggtcaaaaccagatccctattcttgcattcaggtgttaataattagccctaggtctctgatatttgaacataaaaaggcaaaacctctaaatattacatcttctctaatgggcaatgacactagagcaggtactataattaatcctccctccaagcttccatacgtcctgtcccacaaaaatagtaaattgcaccaagtatgttttatcaactaaatagctcttctgcaccttcttctctcccacaaaaactctacttacaaaagtaggagaggaatggcagaagctggaaactgagttcagggaactgctacaagattgttacaatccttatccacgcatcccgagctttaccacagcagattacccagagcttcccagacaaggccggagagccgcggagagaactatgacccccctcctccctcctcctacagagcagcctcgctccctaaggccaaacccgcgccccccatgacctccaatggctcgagaaaagagctttgaattgcccgctttttccaaagctggttcatactccctcgcaaagcagggaatagggtctggggacaaaaggaggcacatgcctgccacatgaggaaaaccccatcacctggaactcggcgaactcctcacagttcacaccgccactgggcgccgccatattggacaaacacgaggaccccgctgcaggccaatcaccgcggagcaaaggtgaccgcggagtcgcctgacaaaaaatatagtacgaggggaatccttaggaaagctgagtgcaaggcttgagttcaacgtggtccgcatccacctcggaacctgtcaccctgctgtcccaacccttttaacatgtcctcctggaactgggccagatacatggatcaaagattgtcagaccttgaagggactgtttactccaatcccatcttttcacaaaagggaaacaatttccttgtggttcccctaccaggtcgttgaaggaaatctaggcaagtgaggcctttctaatacctctcactccagtgcctaacctcctccccggaccctggagcaggggggtctttgttaagaatttgggaccactaagaaacgtcaagaaaaaacggcatttctggcagtgtgggtgggtatgagtaaagtgtttaggatggagatgatcaaatgtttttagaaaataggtaaatagaaaacaaattgaaaacatacatgttaatttctcagattagcctgagggatgctccaacaagagatagggccactgagcagagtccaattatgtgttttctgataaaagcatatgttcattgaaaacactggaagagcggcatactggaatactggtttatctggtgtatttcgggagtttacagatcacgaaagttgcacatttcctttctatttcacacaggtactcccatgggtacatatccgctagggcaagggcccacggcgccacactccacaggaccatctccgaggctggctcaggatgcggcgccaggggcactaggctggcgccgcgggtctccagcgcgtggcgcacgtcctacacgccccgcactggcgcaggcctgtacaccgcgtcgcgcacgccccgccccccggcgccgcctgcgtccttcccactccaacgctgggtgacattgagctcaccagcgccaccgtccccggcgaagttctgcgctggtcggcggagtagcaagtggccatggggagcctcagcggtctgcgcctggcagcaggtgagacgccggtcgggatatgggaggtaggggagctggcccggccgctgcgggtgggggaatcctgaagccttcctgggccccggagtggctccattccatgacgcactttctcggttcctcagaatcctacctacttagtagccatgtgggagggaactaggtgagcagctgctgataggcattggagactgcccgtgaattaccctcatctccatccacccagctcccaccaacttaactgcccacgcgcctacccttctccccacccccgtcctcagcctcccctgagctcagtctgtaaagcacctactatccctagacctcccctttacccatgcattcagctttccaccctaacctcccctatctattgctctccttgagtcttccctcttccccctgctccttcctctctggagtttatcccagaaaacctccagtctgaagtttccccactcattaaatgtctgattaggccaaggatttaggtcttagagattaataataattgttttcttaaaatggaggatacattacttttaaacacttatacaattaattgattcgaatttcttggaggaagtgtgtaattgaaggatctgcagtttgttttggtggtagacatttgtgtgatgactattttggacttaggtaatgaaagcttaattctttttttttgggagaaccagcagagccttggcatagtaggggttgagaaatcagagggcttgcattttgactcttttctgggtaccagagatcttttgt

SEQ ID NO: 40905 - DNA, 949 bp, Homo sapiens
tgctcctaactgaccaatttgacagtccttagcagttgtcttgggttcctgccagcctgcaggcccagcttaagtgcctggagaaccccgtccacatgctgcctcacaggtcccagctcctacatcacattgtacatggcttcatcatcttcctccttccacctgcaacatcccagactctttgcctccttccaagcatttttaaagtactcccctccccaattttaaaagtaatatatgttaaatatctcaggggaaagaaagcacttcaatcccatcatctagagataatcacttcctatttacacatctactgagaaggccataagttaatcctgggccccataagggctccacatcccctgccttgaggttctgccagacaccgaggtaacagaatcgtgaccaccaggtgtggcaatgcatgcctatagccccggctgctcaggaggctgaggcaggaggatcgcttcagtctaagattttgagtcagcaacatggtgagaccccatctctttaaataaagtaaattaaaaatagaaccatgactcactgcctacttgcaaaatcaccaaggtagattggcctttagactcttctatattaagcctcttaggtttcacacaagaatgatgaaccaaccatcaacttttttttaaggcacatgggtctgtattcagtagataggttagaagagctgcactttggcacttgccaaagaccacaatatcaagttcactgtcactcaattttagcaaaacatttgtttaaaaagataaatattgaggagcattgcttaaaggatcttcctactattttagatattctcaaatctattctgggttcaagacagagagcaaaaagctgggtatatggagcacattggttaactttctccaatgtttgatcattctgaattgtgctttgtgttgaaacatatgaagcttat

SEQ ID NO: 40906 - DNA, 1122 bp, Homo sapiens
catgtgccaccacgcccggctaatttttatatttttagtagagacgaggtttcatcatgtttgtcaggctggccttgaactcctgatctcaagtcatcctcccatctaggcctcccaaagtgctgggattacaagcatgagccaccgcacccggccactttatattttcaaagtactattcacatactcgcagatgatccctacaacaacccagagatgtaaagtatctggcttttcttgtgtacaaatgaggaaactatctgaaaaaaaatccaacaatttgactaatgactcgagtaatgttacacagtcaaagacaaggactaagttacagcctcctaatctaatacattacgaagcccagtcatagtttcctgaaacataatgctgacccagaaatatttcatttgcttgtagtttggatatctagttcaagaaattttaaataacagtatgccagattatttatactaaaaaagaaaaaacaagttcacctaagatgtagtttcttttgcttactaggaaaattaatttgtaaaccagagtcatatgatgtaagtataaaagcaaactgtcccaccacaaggcaggctcaaagttcaataaacagtcatcagatactgcaaacataaagtcaaataaatgaaaactctaaggaaaagcaatctggaaaaaaaataagatcagaatacataccatctgtatacaagaaaaagattacagtgagatttggatgcaaaagaaattataataataacctgggtatacagggatatagtacagagttattggtgagaaaaaattacttagaattctaattggtgccagcgttcaaactgctattttgagtttagcaccaaagatctcaggggaaatgagggagaattccagaagctacacaagttaataaaatagagaagcaaaacaattcaagtgacaatgactaagaaaatgaaaagtaagtgaataacagcctgaatacagatggtaaaaaaaagaaattattacatcttagcaaaagaataacatgccagttatgcttatcactaagtagtacacaatgatgataacctctcaatgcaattcaggaatgaaaatcaaaaacagttttgctattattgg

SEQ ID NO: 40907 - DNA, 970 bp, Homo sapiens
aaagcagggggcaaaaaacccctcaaaagaccattgttaagtgttctggtatacttccttctagcctgtttcctgtacatgagttttaagtctaactgctcttgtctgttgtaaatcatcttaaggaattgcattacaagattctcaataggcctgcagaatttaattttgtacctgtaggagctagcaagaattcacgaagattgacttgccaacttagtctcactttcattcatgataatacagtatcctataaatgatgtcactcaataaaaacttataaggcaaataggagggaaatgtcatagacaatcagattaataacttcagccagagactgacaaagttactgacaatatgcgtgtggcaatgccagaaaaatggcaattagatcacaatactactagggagattcttacccaagtcgatggccttactgaaagaggtgactaatggttcaatgttcatttggaaaggactctaatgacatgtcatttacctggttgaacatttatattaaccacgcaggtaagcacaaaaaaacaaatttgatgattacaataaactagttaatatgctgagttacagaaataacacagaaaaagaacaataagtcagaataggcaacaacaacaacaaaaaaaaacagaaataaagcaaagttcagcatctaagttttttaaatggcaatttttaaaaatctacatgacttcacaaacaaaacctaacaacagttcgtgaacaaaagcactagggagtttagtttgctgaaaattcaataaaatattactatgccatgactatcaaaataactagctaccttggactacattatcaaaatagacactcttagggcaaagaaggtaacctctcaccataccctacattaataacaacacatctgaaatattggattctagttatcacatttttaagaggtatgctggcaaaccagaatacatgcaggaag

SEQ ID NO: 40908 - DNA, 595 bp, Homo sapiens
ctagaagaaagaaaatggtagcttttcaagtgcagaggctgggacagggaacagctgcttttcaggtattctaattccaaaattttatttttttaatgttgataaaacaaggaacttgaacaatctcacgacggttatattagatcttcagtattatttcatggtgttaaactacatctagtttgttctgccaaagagactgaacggctaaaaccaatctttaacgatcaatgtgaacacagtacaaacagccctatttgaatcccaactccactactttgtgaagtaaggcgagttacccaatcaccttgcacacgtaatcacctcctcaaaatggttttgcaagaacaagtaagtgaaagcacctgatgcagaacctgacccatcaatagatgtcagagtactttcagcgggtctttctgttccctagctgaccccaagctgcctattctgaccccaagctgcctattctgaccccaacctgccttgttgctcacagagtatataggcactcatggactcagcacatatccctcctcacgctggaaaaacaatcatgatgagtaagcagacttatctttgtatatgaagggca

SEQ ID NO: 40909 - DNA, 1771 bp, Homo sapiens
aaatgcaaaagctagttaagacaaaaacaatgtcgagaatgagccttgctggtggcatccgcctgtagttccagctagtagggaggatgccttgaggccaggagttccagatcagcccgggaaacaaagcaagactccatctcttaagaaaaaaaaaaacaaaacaggaggggggaaatcacttcatctactaatagagatttttaagcaaccgtttatttaagaaaaaagggtgaaattcaagttaatattacttgacagtacgtttcagaaaaaaaaatactctgcagagctgggtgtggttgcccaagactagtcccagctacttgggaagctgaggcaagaggacagtttgagctcaggagttggagtacagcctgggcaatatagcgagaccccatctctttaaaatacaaacaaaaactcggcaatcgtttgttctgagttgaaaccttaaaaatcaaatattttgaacgctttcatttaaaagtggaacacgacccaatcctaaaacattacttcatgacgacttccttgactccagtcatccttgtttcctcctcccgttttgagcttaatccgatacctcgctgcttccctcgcatcgcacacgcggcgtgcagaccaagttctgtcattgctataattaccacacccccgatcagccgctccaggcccatgttgttatgacatcggtaaactgcagccggccgtctccaccccccgcttcccccacctccctccgggccgccggctccgacccggtctgtaacttgtgaattcccaagacggtccctttttgccagggttagaatttttacacgccacccctgctccttcctgcctctgtcacagcgctctgcgcggcccacccccgcctcccgcccgccgcccggccgcggcgcaggctccgcgctcgcctcctctccgcccgctgcctcggcgccccgcagtccccggcgccgcttacagccccgccgccgcgccacgccgccccgccccgcctagcctcgaccggcgttcccgatggcgatcacaccagggctccccacccccaccctctcctccgccggccttgtggccgttaggacagccgggcccgtgacgcacggacgcggcgcgagcgtccggcccaggaaccccggctctaggccctgccggcacccgccctcgccccagggcctctcctgagtccctccgggactgcccggatctgccggcgggagggggaggggccggggccgcaaggccccagcactcaccaggctcaaggcaaccgatcccggtgccaccgctgaagttagcccctcgctcgcccgcccgccgtgccactcccgcgcacaacctcgaagagctggcccgcgcctcggcggtgctcaccaggcctcgctctccgccgcctcgcaccgagcagcgagactcagctcagccggcgttcgcagtgcgcctgcgtgcgggggccggcccgagcgcctacgcgcgcccctccggcgcttgtcgcagaggctgccgggagacgtagtcttgtaacgctctctcgccggacattcctaatggttagcgcccagcctgtgaagagtcgggggtcggggagggggtctcgctaagaaggaggtttgcagaccatggcaaaggttggagaaagttatatgtacaaacctgtctttgctaagctcttccagggcggatcgatgctcacctctgtatagcttctaagtacctaatacgcgttgatggaatgaatgatggaatgattgaaggctgagggagt

SEQ ID NO: 40910 - DNA, 720 bp, Homo sapiens
ttggagaatttccaccttctaatgtttttatggtttaaggtataagaaacttaacaaggttaaagaaactccaaatgggacaaaaaggtcttcaatgaaaagtaggtccccttcttggtcaggttcccagacccccccactcacccacccatcttatgtgcaaccaagttcttcatctctctcttcagaaatagactgtacatatacatgagctgtactttagataacatcgtctcctagttaaccctcagagctgtgctaaaaatgatagtgtccttccttcccccatgcccagattcccctaatcattctattgactttggctccctttcagggtaactcaggtatttcttcactgatgttaatgaatgcttcattttgaaagcacaattagaatttgcaatttgggggcaccgacaccctttaaaaattgtaatgttcctaacgttgctggcaataaatataccttaaaaaattcagttaaagggataagttactcaactaggatgcttccattttagttttaaatttgtgtgttaatgacttctcaaatatttcatttcatgaactcccctcagtcttccctctaattgtcttataggcaataagtgttattggtttgtttgttttaccagtgtctaagactatttgattgtggtcacgagagtcttaagtgtgacatcactgatccagaagaaaaaaaaagaataaagccttata

SEQ ID NO: 40911 - DNA, 1311 bp, Homo sapiens
aatggtcctccaacctcaggctctcaagtagctgggttacaggcatgtaccactgcatctggctcatattcttaatccaaacaagatggtttctacatagtgttgcatagtgtacactcaaaaattatttaattttcagggatcacctgtgccagtgcaagagaatagaaacaaagacttaccgtctgccattcaatgtggccctggacaatctggagggtcaggttgttcacgaccattgcattgaaagaaggggtggtttcttgtcccagctcactcttccctaggatgaattctgaagcagctttaaaggcagcaacagtagggtcctcattgctcaccaggtgaatttctttcaaattactcatcattggcttcccttgcaaactaacccggatagtctctacaatagtctttgtacacaaattcagagggaactgaaaaatcccagagctcaaggctggaattgctactgtcttaatgtgagtatttttatagatgacataattcagaatacttacaatggccctctgcagctttccagtacatccctgtttatcccattccatccaccgaggcccaacagcatggatgatctgtttgcagggaagcctccctgctcccgtgacagctatctcaccagctgacactttaccatatctggcaacaaactgtttgctctcttcttggatttcaaatccaccagcttttaccagggccagggccaggcctcccccatgcagaagatcttcattggctgcattcaccacagcatcaacagcatgtgtggtgaggtcatctttccagactgataactctatcctaggagtcagcatttttctgaacacttgcagagatttgctgttgccttcctgaactggagagaccagggtagagatacagccaaacttattctggaggacttcacacagctgacgctcattattttttaaaattttgaagtcattgtggttaatgggaatttgccaactatagttttctccaagagcaccagtctctggaaaagaagagaagattaaaaaaaaaaaaaaaaaaaaaaaaaaaaaaaagcacagtttgaaaggttgtaatcccacttcataccaggagactgtgtttcctatgtgcaaaagagagatgaacttcatgtagtgctcttcatgattcttcttctcaactacacatataattagaccacggacatctaagagttttcagtggtaggtcacccataaagtgcatagtcttgtgcctggcatatattaagtactccataagtggtagttactatgatgcagtgatgatggtagg

SEQ ID NO: 40912 - DNA, 2615 bp, Homo sapiens
tttttcatttttcctactgcccattgtattccattgtatagatatactattattattaaactgctagtccccctatttatgggcattaaagagttccctatcttttgctattgtaaacaaggctgtaaagaacatctttgtacacaggtcacttcacacaggggctaatatatcaatgggacaaattcctagaaatggaactccagaaccaaaaagtatatgcagttgtaattctgacagtattgccaaattgttcacagtaaagacgggcccatttccagtcttaccagccatgtgcaaaaaccttatctcaggcctctctgccgccactcatccctgcttgtaaatgtgtcctccacacggttgtcagcaccatatttctaaaatgcaaatctggcaagtcattttcttgctttccctgcttaaagcccttcaggtcatcttcactgctcttcaaggcttttcaccatctaaatatgtcctgtccagggtggactatcagcctcacatagctactgaggctacatgtggccagtctgaatcgagatgtgatgtaagtataagaaaaacactgggttgcaaagacgtggtatgataaaaagaatgtaaaaatctcattacatgctgaaatgattaagttttggatatgtcaagctaaataacatcattacagttaatttcatctgtttctttatcctttaaaaatttcctaaaaatcattaaaattaatttcatctgtttctttatcctttaaaaaatatggctgcaaaaattttagaatgaacctactggctcccattgtatttctgctggacagtgcccatctaggtaggctctccctccttcatcccctcacccatctcctctcctcccaggccccaggcccactctgtgcttcagaccacagtggtccctaagcctcaggtgcttttccccccaatcctgtcctccccatctcgccgccacactcaatttattaagattctgcttgaaacttccccttggaggccttggagaagttttgctccttggttcacaggtccgcctcccctcaccagcccttgacatcagggccttgctctgctctttgggcagcaagaaacaattcagtgctgttggttaaatcaagcaatggaggagaaaagcccgcagaagcccgtctaaagggtagagttggagggagggaaggggtaacaggtcacaattaccagatgaacacattcaaattttcaaaaatgggtaagtttaacatggattcagaatgtgaattactttttaggatcaaataatagtggtaacagcagtaagagttacaaagaataagaaacacaggagaaacttactttctttgcatagtctactcacaagggaggcctggccctgggacccgggtccgcgcccgtcccccttctccccgcccacctcgagcctgcaggagaggggaccccgagggcccagaggcaccggacctactcacccggcaggccgctctcctcggtgcagacagcacagggaggagggggaagcggctctgccgggaacagggagggacctccagggaagcgaaactgaaactttgcgcccagtccgcagggcgggccgcgcctttaccgcccagctgcctcccggagcccccgcgccctcccgacgcgcagagccatggcctcccacctgcgcccgccgtccccgctcctcgtgcgggtgtacaagtccggcccccgagtacgaaggaagctggagagctacttccagagctctaagtcctcgggcggcggggagtgcacggtcagcacccaggaacacgaagccccgggcaccttccgggtggagttcagtgaaagggcaggtgagcttcgggcggccaggctgcgaaagccctctgggggcccggcccccgggtttccaggcggacccagttccagctgacctaggggagagggcgggagaaagtatgtcactgtgcggtggcggacagggacggggccctactgccaagagactcactgagacagtgaacactcggtggaggatggggcctcacatgtgcctggtgcgggtctggctgacggcgccttagtgtggatgctttccatatcctcattctaacttaatttctcagctgtcatcttccttcccccagatgcctgccagctgctgtccttgtcattcagggattccacttttatgttttaaataatggttccattgttccatccatgaacaaaaggatgttccattttgtgtttttgaggattacaaaagtgatatatgctcactatagaaataaaagagtaaaaaagaaaacaacctgaagataaacaatgtgaccatttggtgtatttccttcctgcctttttttatgaatgccagcaaacacatgtatatttacaaaattcggagtctgcacttttgattcctgctgttgtcacttacctgtataatgagtattgaaatgggagactgggccgggtgcggtggctcacgcctgtaatcctagcactttggaggccgaggttggtggatcacctgaggccaggagttcgagaccagcctggccaacatggggaaattccgtctctactaataatacaaaaattacccgggcatggtggtgc

SEQ ID NO: 40913 - DNA, 847 bp, Homo sapiens
ttacaggcatgagccaccacacccacacaagactatcatttttaatgaccaagagcctagtatatagttggtgcctgtcttagtctgtttgtgttgctataaaagaacacctgagactgggtaattgataaagaaaaaggtttgtttggctcacaattttgctggctagaaggttgggcatccggtgaaagcctcaggctgcttccattcatagcaaagggcagccagtgtgtgcagaaatcaaatgacagagaggaagtgagagagagaggtgtcggggaggtgccaggctctttttaacaagcagttcttcaggaactaagagtgagtcactcccatgagaacagcaccaagccattcatgggggaatctgcccccatgacccagacccctcccgttaggcttcacctccaacactgaggatcaaatttcaacatgagatttggaggaggtcaaacaaactaaactgtagcagtgtttcataaaattgtttgcctgactcaggttgctagtaagccagcagagggatatttgcctcctaaatctttggcagaggcaggagtaaggaagccatttctggagtccttgctactaatttggaaaactgagcttctttctttcattgctttttcccttaagagacaagtccttactatattgccctgtctctcaagggaagacatcaagactggacttgaactcctgggctcaagccatcccccaaccttggcctctcgagtagatgggattataggcatgtgccacggtgcctgacttgagtttcttattctagaacacttggagcctgaactctgaccaggcccctcacttgagcctttgctttctg

SEQ ID NO: 40914 - DNA, 1294 bp, Homo sapiens
tacaatgaagaagagttccccaaagaaccaggacattaaaaatccacatgatcaggctgggctcatgccagtaatcccaacactttggggggccaaggtgggcaggtcacttgagatcaggagttcaagaccagcctggccaacatggcaaaaccccatctctactaataatacaaatattagccaggcatggtggcacatgcctgtaatccccgctactcaggaggctgaggcatgagaattgcttgaacctgggaggcagagggtgcagtgagccgagatcatgccactgcactccagccctgggaacagatcgaaatcgtgtttaaaaaaaaaaaaattaaaaaaaaaaaaggccacacgatgagagtgtttgtctcctcttactcccaacttaccagggaatcagaaggtttctggtgagcacaaaatctgagtaataggagttatgagttgaatatgtaacatctcatggcattaggctatgaccctcacttcaccaaaggaacagccttagcattgacactggagaactcaacatccctggacaggctagaatggatactgcctaccctcaccttagtgactttcctttgccaaggccttcagggccgaccataccctccttcacattgacctagtctttcttttggtatattgttaaattcaaaacaagtattctcagttcctgccaggctgagagcaattctttctcccttcccctgtctctctgtctcaatctttctgtgtttttgtttctgtctgtctctgtctctgtttttcactttcatttttcttctttctccatttctctctctcagtcttcgtctctgactctctgcctctggtctctgactcattttcatagctctactctgactcattacgtgttgatttcacagcagtggttaatatatttccttaatgtctaagttttggaagtaacctcatcatggtgtttcagtgctaacaatagactgtaagctccttgagggtggggctgacatgttagtatgacaggcaaaacatatctgtacattaccccacaatacttagtaaatttacagttgctccatcattatgtattattgattcaatctctaactgttgctattttcgttaaggccgatgtcattgtcaacagcgttcccatgaatcttcagcttggaggaggaccactatctcgggcatttttgcagaaagctggtcccatgctccagaaagagttagatgacagaaggcgggaaacagaggaaaaagtaggtaacatattcatgacaagcggctgcaatct

SEQ ID NO: 40915 - DNA, 1242 bp, Homo sapiens
ttcctattcagccatctcggaacagagaggcaaatgtctgcaaattcttaaacacccctccagtgaggatgtggaatctgtttctcttctacctgactatgaacttgacttagtgactcacttcattttttagagatggggtctctctctcgagtgcagtggtgccatcatagctcactgcagccttgaactcctggcctcaagtgatcctcctgcctcagcctgttaagtagctaggactacaggtgcacaccaccatgctcagttaatttttaaaaaatgttttttgttaggcagggtctagctatgttgttcaggctatgactcacttctaatcaatagaatgcttgagaagtgaaactataacttctaagggccaagtcataaaaagtaatagagctttcgactctctcttgctctctctcaacatgccttaggagctgagtcaccaagttgaaagttcacctactctgaagccaccatgctggagaaaccatgtggtgagcccacatattgatagagataccagaggagctccagagggtccagcccccagttttttgagttatcctaggctgggtaccagatgtgtgagtaagtaggcttcgagatgcctccagcctcagccacagtctgattacaattttctcaattcttgagaaagaattgtctagtttagcccagtctacccccagaatcttgagggataataccactaaatttgggggaggattgttaagcaggaaaagataactggaataatgttctcacctcctgctgtatatgaaaaaaattgttttaagttagctacattgcctactataaaaagggagtcatttatactgaaatttctttcatattcatgcctttaaatgactaagagattatgggatttagggaagaagttgatacgtaggatagggatttaatttattttaattcaggcttatgaccgatttttagaaacagaaaagatcttccaaatctcttcctcagagcaaattttttttgtatgtaagggctttgagatatctactacttgattgtacgtggaatagctcataagattgcactttttggcggatgatagatgcaacgtccaaatactctgaatttgaggctgcaaggaggaaggacgctactgctttcttcaaggtgttcatggttaggctgtggaaaacacatggattgagcagatggcacttattcccagccactgaccagccttccgttcagtggcat

SEQ ID NO: 40916 - DNA, 3191 bp, Homo sapiens
cgttcaacaatttgccccttctagaactttctttccttggctttcaagacctgccatcctgatcctctgatagctccttcccagtccacccaggcatgataagcagacctcggtggtaagacacattgtcgataattaaataaatcctcgaaagtaatccagaaatgcctctgactttatttcttatacaataattatgtgaggaaaaagggaaactttttgctgagttctggaaccccaaactcaggggagagtgggagaggaggagtgctgattttagttgtggtttgggatgagatgtaaaggccctggggagaaacagtcaccaagtctggctgagggcgcttgtcctcccgtcttccgcatgcgggggtccagagcagttttggatcagatgatgagcgccatctgcaggtagcaagctggaggcaggagaaaatatctgtgtactgtttaggattattacagagccgaaataaaagccaggtaaaccatttggcccatctctggttctcttcattctgaaattcagcccgatcctgtaaccccacaacctactgcctggctccttcttccccttcacggtcacatttctgcaaagagcgtgttacgctctctgcttccacttccttccctccctttcagtcttcagtagctgccatctccctctcctccctcctcaccaggagactatgcttgccgctcctcagcagtccagcagacacttctctgacctgaggtatcggtagcactggaatgataatccccccgcccccctcgacttgcaacactgctttatttggggtcaaggaaacacacagccccagcttctctcccatcactcggcctcccctcttgcagatgccactattatccagccacttgcacgggccatccatggctgaccatggagtcatccttgagcttctccttctctcaaggctcacattcttcagcaagtcctgctttcactattaattgagaatcctcgttttctcagttcttctctgccagcaccccagtctcagccacccttgtctctcacttaggacactatggtagccacttggctgatctctctgcctccactctagccaccacgcagcagccggagtgatcctgtacatgtgaatcacaccgtggaaccccacttcctaaccctccaaggctatcccctgatatcctggggttatcaggttacatgtcaccgccctataaaccctccctgagccgccacagctggactaggagccactcctcatctgttccaggaacacaagtatattctttcccagagcacctattgcccactgtgttcaccatagctccgtgagctcagcgagggttcagtgagtgagtgcatggcgcctagtaaatattccacaaaaaaaactgtgagtgtaattgtttcccccacatttctagacatgtagtattaacagatcaaggaacagaaagcaaaacagggaaagcaacgtaaaattctgataatcacaatgattgctgaaaaagtccccaaataggcagcaaacattctaaaggggccacagtttgtgagtcattttattcttttgtaaagggtcggcttgcggcaaaaattaaatgatctttgcgtttgggcaaggtctggtgccccaaagctgccgacttgatctgcggttggggcgagcggcaggtagggggcccggagttaggagggggtgtgggagcccgtggagcacaggtgaactgaggccgccttcccggggcgccgctggccagccccaaagggttactttggccttggctgtgggccgaatgcgaaggtggggaggtgggcgggggatgactctgccattcctgggtccgctgtgttaggctgaaggcaaaaggaaaccaaggcctgggagttttccaggaaacgaaagcgaaagagtcaaagttagcggcccggagttggcgcggcccctgcagtccggcggagagcggagctgaggatggctgtgcccggctccttcccgctgctggtcgagggctcctggggccccgaccccccgaagaacttgaacaccaagttgcagatgtacttccagagcccgaagaggtcgggaggcggcgagtgtgaggtccgccaggatcccaggagcccatcccgcttcctggtgttcttctacccggaggacggtgaggggcgcgaggggtggggtgaggagggggcacctctgccctccctccagggaaatggcggcagggcacgcacgggagggtgacccgcccgacttcggcggctgctgtagcggaggtggccggggcgggggcgggggcgggggcggcagaatggattccgagcgcacccggggcgctgcggttccccggcgccctgcgcttccaggcgcttaatggcgcggcccggaggtggcggcggaaccgcgcaagtaactctttatccctcgatcgttttctgtctttccctgttgtggtggtgttattgtttgttgttgttgttgtggaagtgagtctatcctcttatcatccttttctgtcttttcctgttgttattattcttgtgtggggaaggaaactgattaagaaacgtggcaagtcacagagattccttgtggttcttggagattcccaggggtcccggggtcacttgggagaggggcagaggcgctacctaaaatcacactgcctgaatgtcaacgtagagccgtcacagcggccacattggaggggctgtcgatcgaccacaggtgcccattgtcgagggcctgccggggcctcttctccgagtctctagtggccctcagattgggagcaaggatgatattctgaagtgattgtgggttgggagatttgagctttggagggaaagtcggcaaagttccctccttacagacccaccactacttggtgggccaagagcccagaggtgatctgctggctcaagggcctccctggtctgcaatgggaagccagtgacctgcagctcccagaatgggcaccttttccactggcatcttatggatgatgacctatcgggatctagtcaacccctaattccgctttcatgtcgctagatttggagaagcattcgggccagaggagaggcaaggaggctgaggctgaggccatgcaattagagtgcccaagcagggatccaaaaaggaaaaatgaaacagaaaaagaatggcgcacagaaggaaggaagg

SEQ ID NO: 40917 - DNA, 847 bp, Homo sapiens
tgagattacaggcatgagccactgcacccagcctcattttcttttaaagttttccttatccatccttctctcaccacgggcccttcctttttacctcacaagttcaacatggcaggagctccctgcctgctctgtctgtgtctgccacccttctccttaaacctgaccagccctttgcactattgctaaatagcctgccatccttttcatggaaaccttccatgactcacccttaccacaagctgggagataaagtccagaccaccttctggatctagtctgcttttctggcctcattttcttcattctgcacaattgtgcgccttttgagccacatcagtcaaatcactgttttctaaattgtctgatgcagttgcagcactctgcctgtgcttctgttgctcaccattccctctagcccacttttctctacccaattccacatacccttcaagacctgctgaacttcctcctcttctctcaagtctttccatgccagcccagcccttttatctctttctgggactcttggcctgattgttaatgctcttttttggtcaattaagcctttcttgtggtgaagcgtctaatattgatgggattataaaactatattgctggaaagattctttcagtccagttcacttagtcctataccctcattttatgattaagagacatgcccaaggtcacatggctaaagagtggcagcagggattaaacacatatagcctcctccctagcccagcagtcattgtgatttgtcatacctgtctcacttagtgctaatttatgtagttgctttatgcttaagctattttttttttaatttagcatgagtgtgtgt

SEQ ID NO: 40918 - DNA, 503 bp, Homo sapiens
aatataaaactaccacaaaataaaataattcaaattaacacaaaaatcaatagctatcatatacactaataatatccagttagaagacagaatggaagagaagaccttaccctagcagcaaaaaaagatgaaatatggcagtccgcccttatctgcagtttcgctttccacagtttcagttacccgtgggcaatctcagtcagaaaatattaagtgaaaaattccagaattaaacaatttataagctttaagtttcatgcaattctgagtagtgtgatgaaatctctcaccattccactccacacagtatacatcacctgcctctgagtcactcagtagttagctcagtgatcagatcactgtcatggtatttgcagtgcctatattcaaggaacccttattttacttaataatagccccaaagtacaagagttgtgatgctggcaatttggatatgccaaagacaaggcataaagtgcttcctttaagtgaaaaggtgaaag

SEQ ID NO: 40919 - DNA, 2770 bp, Homo sapiens
taataacagggatctcaggctcatgggcctccaaacctcatccccacttgctaaaccagggttcactgaaatagaataaaagcgcataatccctgttcacaaaagtctcagataacttccattaatctcaaaggttgccttcaatttcacaaatttaattttaatcccctctaaacgttcaaaacacctctatttagctaatgatgggcaaatataaaacaaaacaaaacaaaaataacaccccatgcgtgaaacagcactcgtaggctaccctacgacgatcaaaaatctggatgccacaattcgagaaatgccacgctcactagaaaatatagatttttcttcatagtctaatgcaaggccagagagacctgggttggggctaaggcaaacggccccacgaggggtgccacgagagtcaactggcattgggtttgtactcagggtcggacctcagcctggcacctaccttcctcccctccagccccagccgcaacgatcacaggagtggtcgcctcggagcctgctgccatggctaccgcaaggcgggttctgccggaacccaaggcggagcggagctggggtggggtcagagtaggggccaaactccgagacccgaagctgcaccacaggaaggagccccggcgactcccgcccggctcctacggaaacgccggctctcacgtggaggtcacgtgacggatgctgggcgggaccacgcagctttgttttgataccccgggtgtggaaatacaaacacgtggtctgagttgtggcgctttttacctaacccggaccttagcgttctttattgtagtcttagcttcgtttctgtttctccttttctagtcagatccttcctttccacctcggcttttctccaccctaaaggattggagttttaggggaaggtttgccgcttagtggggctccggcggtgggatgggtctctgccgtgagctttcgcgagccgctcttggcagcctggaatgcgaggctagctcacgcttctcttacacctctcttgcccttctggtggtaacctgactccttctgattttagtggctgccgggaaatacgaacctcgggcaaagaatcctgtgattgcgttccctgtgactcatttcccgatccagacaagccaaattgcttgactttaggttttcaaggacactaatccacagctgtcaggcttctgaatttgtataccaaaataaacaaacagctgtgtgaagagatcaacaaccacctttcttctcgtttaccctgtggtcaaatcataatcactggagatggatctttggggcaaaaatcttccaactttactggacatacctttattgctcgcctattggcaggcgaaatgggtaaagtttacatatatatgaatgaaattggctagtttggaatctcctctttggatatgtaagacaaaaaagtaacaaaaataggtagtacttattgcacgtaagaaatgatttttatgagataatcccctgggaccaactacgcttaaactttatccttcgcctataatttctgaagttactaactcaacaaaaatgagaataagcccaaaatagaagcaagcatcaggttaactgacgtcacttaacaggtcactgagttgtttattaggcacaagatttaacttggacacttcctccaaacaccccagggttccttgcccaacctcctcgaatacagcctctctgggagtttccctctccccgactcagccgcgctggtccctgccttttcagcgctacctgccctccgtctgggacctggctcctttcctctcgccggtgtttcctcgccacccgcggaggggagggcggaccccagcctccttgccgcctgccccgcctccccgcctccccgccggcccggctcgggccgcgcaggcgcaccaggcgcggtccggaggccgagggcgaccacagcagcctccgcctcctgctgctcaggactattctgcgctgggctagtcggcggtgacccggactgcgcccggcagtggcttcgcgggcgacgcgtcgccatgggctctcgctggagcagcgaagaggagaggcagccgctgctggggcccgggctcgggcctgggctgggggcctcctggagaagccgggaggcggcggcggcggcgctgcccgcggcggtcccgggtcccgggcgggtatacgggcgccgctggctggtgctgctgctcttctcgctgctggcgttcgttcagggcctggtctggaacacctggggtcccatccagaactcggcgcgccaggcctacggcttctccagctgggacatcgcgctgctcgtgctgtgggggcccatcggcttcctgccctgcttcgcgttcatgtggctcctggacaagagaggtgaggggtcgcggagcgccagcccgcgctgtctctcctccgggagcaggcgcctgcccgcgctccaggcctgccagccgcctcccttggccccggcataggggttgtgtgaggtgatagagtgttgctagcattccatttctgacttaggaaccctccgtccccaaagcgacaaatatggaaaggcaaccttgcaaatatttatgttttttatcaaggccctttatgcaacaccagggatttaagcgatctctaaacgttcaagtttttacacattgtgaacatcagagcatccccgtgcacgtgcggtgtatgtgttttacacctgacaaaaatgactgatgctttgacttcaaagggatatggggatgttgaggatgaa

SEQ ID NO: 40920 - DNA, 724 bp, Homo sapiens
ggaagggttgctaaaacacaggttgcctcttcccagagtttctgactcaagaggtctgagaaggacccaagaatctgcatttccaacacattctcgggtgctgctgggccagagactgcaccatgagagctactggggtcggccctctctaagccccctccctaccagagccaatgttctgtggtttcatgaggaatgagctcctcctagtccacccagaaagtctccacaggttcccccagagagtactgtctgttgatattggatctgaacagtggactaagaggtcaggccaaaggtaggtgaggtccttcgggaaaggttctacccctacccagccgtcccaggtgcaggccgccggctggccggcagggggcccctgggcaccttctctgcatggaactcccggggaattggcccagaaaaccattctgacagccgggcagggaccaggcagggaccgggcaggaggtggccagcaggcgtccctgctctcactaactgccaaccacaggggcctgcagctggctgagattgcgaggtcaagagtcacccccacccccacccagccgaaacacgcttcctcctgtggggggacagacatccacaaggagagggcccagcagagaggatggggcccagcacgcggggctgcccaggtgagttcatcctgaataatattccctctacccagctccaagcccctgcacttcccaccccgacc

SEQ ID NO: 40921 - DNA, 768 bp, Homo sapiens
atattttaccacaacaacagcaaaaaaaaaaaaaaaaaaagagtgtatgccaagactggtataatttaacatctttatacgtgttcgggaggggaaggtcacatgacaaatctttcccttgcagatggctccaactataatcctccaggtacagtggcaagaaactgacaggctttgacaggaggaggcaccagagcattggtctttgaccctggatggacattagaatcatctccgggagcttttgaagatatccccagagaatctgatttaactgccctgagtgaggccctgggaattagtgttttttttcaaagctcccgggtgattccaatccacagccagggtcgactggttagagcatcaaggctgaaaatctcagactccctgagtttgagtctaggctgtgtcgtttgccagctgtgtgatgatcaggttacttaatctgtctgtttctcaatatccttgtcttcaacattgtgtaataatagtccttacctcatagggttgcagagagaattaaaagagatactgtaaggagaacatttaatacagtgcctagggcattgtatgagctcactaaatgttagttatcattacccaccgagtttgtataatttggcaagaaaaggggcagataaatttaacgtggcatgtgcagatacgtttaaaaataaaatccaaactctgtgactaacatctctgtcaaaagtcaggagagggcctttggaagaattttcccttccaatacatgagttgaaagtcctg

SEQ ID NO: 40922 - DNA, 985 bp, Homo sapiens
acaaaacaaatgtcatgagcaagctgctctaccacgtagacactgtagaagatttttttccagccttgtgacaatattaaagatatggttttcatattgcttgtgcttaataggttgttgaaagtcaaacattaaaagaacttggggaaatcatgaccagtggcatatctggagaaaagtgtcacctggtgatgagaaagatgatgatgtcagcgatgggataagctggggtcaaaagacacctgcgcagcttcttggcagtggcaaagaataatcttccctcagactcaaaacaaaaacctcctaaatatagaaggcacagtgcatgagtctggttcctgggggtagagatgcagatataactgacccagcttccatggctgtggaagagttaaaggacaccaatggccacagtgaggaagaaaaagctattctggaggaccaagcaatcactgaggaggcagctccgacctttgatttgctaattaattttgcaaaaaggcaacctgcagtacatggctcccaagagcagacaggacacaaccttcacccagctttcagagagacaaacaaacagccaaaagcaagctgactttggggcttttccaaaagagcaatttgcagggcatttcctggggtcagtgatcactcagccctctgggccatcctgtctgctgcaattaccacagtacaaagaagtggccaatgtttgggaggctgaccaaggagcctgcagggcagagagggacaccccaggctttgatgccacctctctcctgtcgctcctgcctctagtctccacctattgttaggagtgtgacctcagccgaatttcttatcctttttttaaccttagtttttctacttgtgaagacaacaggcccacctgccttacaagattattgtgataaaaactaaaggagatggtgtgaacgtagtgagtgcctactgttttgtggagccgtacccctttgtctggagactc

SEQ ID NO: 40923 - DNA, 3052 bp, Homo sapiens
taaataacattccattagatggatgtatcacactttgtttacccattcatcctttgacagacgttagagttgtttctaccttttggttattgtaaatagtgttgctgtgaacactggtgtacgtgcatttgtctgaatacctgttttcaattcttttgggtattagcctaagggtggaattgctggtcatatagtaatctatgtttaactttttgaggaaccaccagattgttttccaacagctcaataatgttttactgaagttaaatagaataagcaggagggagtctgggaggcagggatgagggcttttcctgtccttcacaggcagccctggactctgccatttaccggctgtgtgatctggatcaacgtacttaaattccctgcgctgcctcctaatcctcaaagtggagaaaataaaacctaatttctgtgagctgcgtgagatactgtttctgaagctccaggcacagagtaagcccccgctcattaattgccttcccttactccctgaccttgccttttcgcacttcactcgctgccacgtggcctcggagcccagtccgcacccgcagcccccagctgagccaggctgcagactacaactcccagcgagcacttcttcccggccgcctctccccagctgctgcgcatgctttggcagacgtggcaccgggaactcggaggcggggagcggctgggaagtggccgtggtggttggccgcggtggagctagcaggcgggcgggcgggagcgggcgccggagtggagaaaggagccagcggtgggcagcgctgctgggatggcgcgggccgggccggcgtggctgctgctggcaatctgggtgagactgtggggcagggatccgggccgggccagcacgtgtgtcccgcgtgcccttctgcgctctctgctccagccctctgcggaacgtgcggggagctgccccggggcaccgggatgagggcgtgcatgccaggcaggcgggcactgggtgctacgcgggagacagcgggcgtcccggtgccctcgccgccaagcgctcccggacgcaggggcaggaggcagctgtggggcgccgggagatccctggcagggtgcttacgccacggccacaactttgcggggatgcaggtcggggcacagccggtcgggcaggacgccggcgggctgcggggtgagctccgctccagactccgagccctgcacctgtgtgagtgcggggtgggatgggggtgcttactacctgcactgccggaaaccttggtttagggccaccttgttcttggcttcggccccaggcgtctgggaaactgcgggccaccacctgggcctccgcccacaggccaggctcggtgggctgggtggggtcgacgtagcccgccccggcggaggagctgctcctacacccaactgaggcgggctcgagcctcagccactttctagctgtgtgacgcggcggttcatttaatgtatctgagctagtttcctcatgcatgatatagaaaggcaaagctacccccatagggtggttctgagagtcggatgaggtctcagtggaggaagctgtgtaaactgcaaaatcttacaaaagtggaaaaggagtggactccaagagtagtttgctacacttggtgggggggactccaggcatccctgagagaggtcggaatgggtgtgcctgccggcccaggtctggggtttggccttcgtttcgctgtgggtgtgtgatgagatattgtggcctccttccccatcttttccataacttatgcgctcccttattttaggaccatcctggtccttttcccctgaagttccagggaacttcctgttcctggcaccctccccccaacccagattttcccgttcttttccatttgggtgtggcaaggacactgggcaaatgggaggagaaaagtgtgggttgagttgcttgaaacacttccatctcccaataccctggccttttggatcaccagtgaggagtggcctggtactctctggttggaagtgggtggggaaagaagccccctgttctcttcggtctgtgttctccctcttggggagaaccaggctggagtggggcagtgtcacttaattgcgtctgggtttgttgaatgctggtttgccatcagttccctggagccagttggtctgggcgggtctctgggccaggaggagggagctatctcctgaaacgccccccatcggtctttgcacttgggctgagtaggaggtcctgctttcctccctttcccctcccttttgtgaaaacaaacggcttgagaatctgaaatttcattcggcagacatttatttgtcaatcacattgtttggattgatattttgccctccactgggttagattttgggcggagagcaaaacacacattgtacctgccgtctggtgttgccctggattgggcaaaggagtcagtcctgtgagcaaataatgacagaactgcaagtgctgtgaccttaagtactagtatccttcactgaaccggagccatacgttgatttaaagggaggtcagccatggctttcctgaggtggtagggttgaacagagtctgaaagatgtgtggtagttagctaggcagtggagggctgcaggtccccttcaccaggaggtgcggaagagcaggtaggtttgctgaaagcactagaacctgggagtcctgagcaagcaatttctatcttctcctttccctaagccctagagttggcttagcgggtaggaggtggagggagcatgccaacaggagcagtggtgagtgattgctggacagcgcgttgggtctttgtaaatttaaatgctgtatctatctgataagtgctccccaggttcctggaagccggttgggtttctttgttcactcaatatttactgagggctgatatgtgcacaggactgggctgtgacctgaagggtataaaggcatctgcagggattcgtgtacagggatatacacccaccacattttttacaatagcaaaatgtggaaatgggttaaatgctcaataatagtggcatggttaaataa

SEQ ID NO: 40924 - DNA, 406 bp, Homo sapiens
tagccttccaaaagaatactggggaggaaggtgtcactgtcaaacacgtgggacaggttagttccaagagcttccaggctgggtgtctgtgccctcagaggctatgggtggcggtgccctccctgccaagtgctcctggacacaggggcaggaggtagccctagggcacagggcgatccctgccgagccatgctgccctgctcccatccctgcgctgactgcctgctttcctgctgtccagctcagctcatccctgcagctgactcttctctagggccgtccatgctgattgtcctgttggctccatccagcctgtaggatggagaaacgtcgagctggagtgaactctaggtctcctagctcagtggttctcaagcattgggccaaggactgaagctgggctggg

SEQ ID NO: 40925 - DNA, 2010 bp, Homo sapiens
tcctgattatttttcctctctcattctcagatcctgccactctaggcaaatcctgcttctcctgtgcccactaacgcccgcacgcccccatcttcatgggatacaacttatccttcttctgaccctgtggcacttccttgcaccttcccattatcaccgcagctcctgtgctgggtagactttctctcctctgcagcctggcttccagctcccgccacgtgtactgctgacattctctccagtgttcccagggacttcacagcctttggccctgtcccagcctccccactctgactgcctgtggatcactctcttttctttagaagtgtcccctccctggtctctgtggacgcagccctccccacctccctcttggtcctgcctcctccctcactgagggtgtttcctgtctcctccctctgagcccggtccgtggggacttcatttacttggtggctcaccttgcaacctggaggaggcctgtatttgatgcctcactgtctacctgtccaaaacctgagcctattatcatcttccttaatgtaagagaaaagcctcctctgctgctgcttctccgttcttccacctttggctgttgttgcagtctcccagcccggaattctaagagtcattttagacttttttactctttcttcctcacttacctatgaatagtcattgggttttgttgtttttccctctgaggcttttgcattgatctgtgtctctccacgcgggcagccacccagcagggccctccacctccggcctccctggctgctgcccagtctgaggtcacggccagatgagtctctacaatatactgtgttcatcctttcactcccctgctaactgggcaatgatgcttcccactctcttcctgcaccaggccaggtccttgggcaggctttgaagagcccagcctgcccccactgccttctgccatgctctagcccagacaccccctgagctgtggtctgtgtggcttccatcgacccttctgggcctcccaagggctgctgtggactcaccccatcacatactgatagtgggtgacctctgctaaggccaggagtgtggtaacagtgtaatttgtcatgtttataatactggtcaaacatttcctgagggctttcaatgcgccaggccttgtgtgggggccctgccctcctccagagctcttaatcttggggatgggggtgagggtagggaggagatggatccttcattaggcttcaaaaccggattggctatgggtgatgcccagtctgagccccagtgtcatgcccagtgatggttttcaagcaaagtaaatttgctcagcgcgtttctggttgggcttaacttctctactgtgtgactccaaatgctgggtgaggggcttggctgactggctggaaggtggtttgtttaatctcattggccctgggttagatgacctgcgggatggactgggttttatgggaaggaagctgagggtgtgctgtgagcctcagcctctagtggtttctcttgtacacactttgttgtcgctgcggctcagctgcacacaccgctgcctgggcagatgagctctgggctcaccctccctcctgccttcccctttccttctccccagttccagaagcgtgggtgcctaccagcctcaggaggggctggactacaggtcagagtcctgaggccctgggcaagagcagttgttgctctccgctggtcagattatctgaggattaaaaacagcagtgaggcaatgtgtttttccaacagattattttttttccctttaatcatgtgcattgagctgtggagttttcagtctgaagtccgttagctccctgggagtagtaggataacatgtaataataataaagtttagcagactttttggtgagctcttaaggtggcttgcataagggcagcgggtcctcagacattttaccctgctctgcagggtgtgatgagggagaaatcattccttggcttcctcctggatgggtttactctgggaag

SEQ ID NO: 40926 - DNA, 881 bp, Homo sapiens
aggcacacagaggcattggctctgccactttctgatccgagggggtggttccatttcttttttatgactgtttgttgggaaagtcctctggagcccctcactcctcaagagggagagggcgtgtgtgaagtaggacagaggatcacagtggcggacactgggcatggatgtcctggcttcctgcacaggcatggggccgagccctgccagggcatgcttcaccagagctgttgattaactggccaggccggcctgttgccagctgaatgggtcccaggcttggaagtactcaccccagctggcagccctggccctgcccagtccatctgtcctgctctggggtcagatgcaagactgaatttggagtgggctctaagcttgggtcacagcatttcttgggggcaggagcagcggcctgcctctcttctgaccttgaggctggcaaggacatagcagatggagagaggtttgcttggctcttggcagtgactttgggggagggtgaacgctgactctgttgaagttgttccagcagagttaagtgttttttgctgcttctaaggatgccaagttttctgtggccctggagaagcagcagccagtggctggccagttccgggcaaagttttccccggcagctcggcctcagcactcactggcacctgggggatgatagaggctccagacgtgcctgcatcctccaggcatccctggcacgtgggatgtgttcattgccacttgcggctgctgcttccccttctggcacacatgccccgagtgcattgttgggagcccagcatgtgactagcattcctctgctgtcaggaataggggcgaaatcaagggaaaggggaagcagtgtcctcttgaggcctggggca

SEQ ID NO: 40927 - DNA, 1522 bp, Homo sapiens
aagttacctgacttatttcttaggacaccagcagattttgctgtcaacacctttgtgaggacttcaggtaataaatggttcccaacatttgtgtcttccagtgatgcagagagtagaaaattgtgcaagaagatgaaagttgacctgagcccgaaggacaaaaaggttgaattattccattaccagtaagtacacatgggcatttccaatttccaagtaagtgccaaatgctttcattggtattttcagcgaacagcaatttttagttagattaattttatttcagaatggttttcttcctgtgtttacaattatttcttttaaaaaaaaatcctgaactccgttcaaaagctgaatcttattaagatgctgcaggaaaccaaaggtatgtatcttcacaaccattcttaaagttaacacatttttctcctcatttgacagggatggtgcatttcatactgaatataaccgagctgtgacatttaaggtaaatttacctcccttgttctcagcaatggtggagtctaaatggacgcccaaagtctggcaggttttctctctgagaaaagaaagggcagattgcacaaatagctcttctaaatgacctgagagattcttatctctagagcatatgtcagcagaatatgtggaaaagtttgtagctcttaacacaacagattgacccagctttggaaataggtttgtgaatgtatcagcagttgtccagtaaggcaggtgatgtcacctctctctttgccaaaggcctgggcctcatttcgttgtagcttcaaagtcctcccctcatctctgtggtagtggccaccctcaggctggatgcccaggttagcacagggtattgcacatgggcaggttgacacctttgggctgatgcagcttgttccagatgagatatgggtatcattgaggagttccctgctatcaatccaatttagaagtagatggaaaagcataaatggaaagaaatatgagatcctgtaatctatacatgctttgtaatcacaaagcggctgccccagcccttagtcctcctgaactgcaactctcctccttcagggtcaggattcccttcctccagcctgtcttctgttttctggtcctgcgctggctgaagccatacatttctcctggtcctgacgtgtttgaactcacttcctaaccctcctgtttcccacacggggttggaccctgtgctcctgtctcttcatctgtccctctttctccatctgtgtctcttccatttttcctatctgtccatctgtctgtgcagctgtcagtgtccctctccctctgcccttccttctccctctgtctctccccaccatctctccaggtcattcttgcttatccactaacactcattctttttttaaattgctacagcgttcaccttatatagggactcagcctgattactcatcaccttaacacctacttagacacttagaaagttcttccaactagagttgctcagcccttcttattctatgttaagacgtcaacc

SEQ ID NO: 40928 - DNA, 1013 bp, Homo sapiens
gtatattttatgtttaaccgggacctctgaggaatctgtcttgggcttatggagcagggagttctgagcggctcctcataattgtggtagcagagaagaagcaaggagcccaggtggccccagcatgccactgggtgtctgggtgggagaggcagaatcctggcttcgccccacttcttacaaagaccagacgtgtgaggtcagcgttctcttgaccttcccgtgatttaggcatcaacaaggtgaagaagtggctgagcatcgtacggggccagagtcttcagtttcagttggagagagggcactcttagtcccagcatccccaagcaggactggggcagaatccctggagttcttcagggcagagggaaggggacaggacagttccctgactgctgatggcttctgctttttcagcttgagacagctgagatcagagcccacctcagtcactaattaactttccattcagggtttctcctgggaccctgactccagagagatggaggaccccccgacaggaggggcccatcacctgcaggcccatgttctggctgtggtttttgtcaacccgcatggttgggcagaagcctggtcacagacgctgtgccacggcacctagagaggtcataggccagttaagtgagaacttatctccccactggcaaagaataggaaactcgaagtggggaatgtcccctttaagctgccctttccttgttagcacatactccccaaatccttactatagaagtggtaagggccagaggtgcctggcagtctggattcagatgactcactgatgacctcagggcccagtagctgtgagccaggattacagctatgaaggccagatgtggtgtcagacagtgcctgggactcagagcacccagaataggacagttgagggtgggcttccaggtgctgctccctgcagacttttgccctgaggtcttgtccagttagatcaacttggagagaacctatgggtggggttattcagcttcagttaa

SEQ ID NO: 40929 - DNA, 871 bp, Homo sapiens
agatatccaggtgcccctaggaatggagaggccagaggcacagtggctcccatcaccaggaagacttggtaggaagatgacagttactgagctccagttttgtgctaaaacctctcatctcatttagttctctaaagagccctttgatggtcacatcttccagcaagggacctcagtgagggtgagtgacttgcccaaggtcacatgactcataagtggaagctgtctttgcaatcaatttattgtccactgaaacggttatttattttcctctctctctgtgtccttatgtattattcagtaaagttcagcttcctgggtttcttctctctgcttctgtaactactgctggctttttttacttacttttccctcgcttctatgccactctgctttgtggaacaacctttgtgtgtcgggccattctagctgtgttctctggtaagaacagattcaaagtcctggctgggcatgctggctcatgcctgtaattccagtgctttgggaggttgaagtgggaggatcgcttgagcccaggagttggaagccagcctgggcaacacagcaagacctcatctctaccaaaaagaaaaatatactagccggacatactgccacatgtctgtggtcccagctaatcaggaggctgacagcggaggattgcttgagcccaggagttagagggtgcagtgagctatgatcatgccactgcagagggagttttaggggattccttatatgagtcagtcttagtatttagctacatcgtcggttacccagctactaaaatactctttctgattcagggatagtggacatgtggacccctggagccagaatatgttcagaattctgagatgatgatccagcc

SEQ ID NO: 40930 - DNA, 1807 bp, Homo sapiens
gcaggtgtattgtaaagataaattgctctgaagtgtaattggtggtgttttgaggggtcagtagtttgagcccaagtataggaacctagattgcatgatgtttgtctaggaccattgtctggctggtgactcattctgaagcttgattttgtcaccagtcccatctgacattggatatgcatggactgagattgatttgccctctccctgcctccttccatttcttgggacctgggaggccatggtggccagtggggcccagtcagaagggccagagagggcttctgaaggcgacatcatacccggctgcggagggaagtgggtggcagagttccattgtgtcagccacttcactccctctggattttccagccctggctgctggaactttaaaatatttcctcctgtaggctctcaaaagtgcgacacaatggttgtcttttcacatttgtcatccttgagggttttttcaaagctgcaattaaggtgctctggcaaaggtagttgtgacagtaaagcagcagggagactgtgtcaccaccagccaccttgtcctgaactttggggcaagggagggcccctgcgagcctccctcctcctagcagatgatgacctaggactggcacacagtcacgctgcggaaacaggctccagagaggtcaggcggctgcctaaggttttgcagctgatgagtggtagagttgatttggcttctgggagaactaaataagttggttgttggcctctgggaaggattagtgatgtagcatacacgctgtcgtagttaggatacccccagccttacttcccttgctgcaaccttcccctgcacccccatgtggcagcttccccttgcatggcctagatctgatctttctgagatacctggcctctctctctcctcctcaccccctcctctctgtaccctcttcctcccctccactgcccagtgggcagttttaaacacaacagtgagcttttccaaaggtcaccattcactgttgctatttattctttccagtttgctgaaagtttgaaataggttgagaaagctaacaagcccctagattcccaggaggaagtgagatttcttaggctatctagagagctgtagccagaagccactgtttgtaacaggatatcagctaagtacctgtctggggctttgcggggaaggtggaggtgggcagggccacaccactcaccccacggcacctccatgagggcagtttctggtttgttaaaggctgagcccctggagtgggccgtcccgagcccatggggagctttgggtccaggggcctggaattagaagggctgccaaggccccagggcctgctctgagctctgcctgtttttggtcttccagtccgcagccgccacagccccaggtccctgagactccctgggcagatgagggcggctccgtttatcacctgaccgatgaagactttgaccagtttgtgaaggaacactcctctgtcctcgtcatgttccacgccccatgtgagtggaactttgctcctccccctccacaccctcccctctctcagagtaggatgagtgtggcgctttgcaatgtgaacccaggaagcacttattttttggatgccaggacccatgctaagccaggggatgcagtggtgacaggcgaggtccccaccctcgtagtgcacatggcctaccccccattgccatggaaacaacacagaagtcctgatcaggctttacttgtcccttagctagagctcagtgagtctccaccacccctagctctgagcatcttcctcccagtcagcatgaattg

SEQ ID NO: 40931 - DNA, 600 bp, Homo sapiens
agtgctcttcctctggttcatcccttgaaggcatcatgtgtgccactctattcccctctggaccaaagaccatggtcctctctgtcattatgctggaagattctaagggctgatgccttttctaccctttcttctgcatcatagcccaacaggagtaggcagctccctagataatggcagcagaggtgcctgtatacccagcagttcctcctcttcttgttgtggagcctcccacttgagggttagcagtgtctctcttccttggatccacctgggaagagctgacatgttgatgtggctaagcactgtagccactccctgggctgcattccatgagggtcagtgcccttgaccgagtcatgtctccagtgctctgtccagaggaggagcttcacaacactgcctgggagctcaaggatcagtttggttttctgttatcagttaagtggggagtagccactccggggtcccttgtccctgggagggacagggtgaggatgagctgaggaagccaggtacaggcaggagtgaaatggagagattaagaacgagacaggttcatgtctcacctggagctgagttctgcagaaatggccttgg

SEQ ID NO: 40932 - DNA, 1154 bp, Homo sapiens
actgacacacctttgcttgattgtcttgggccagtggtgttgtggccttttcctgggttcagtcctcctgtctcttattccctctgtctctcctttcagcttcctttattccaagccagggatcaccctcacttgcattcaggaatgcacttcataacctctctgtctgaggcaggtggcctgcctgggtttcctggaggttatattcatgacatcagggaagccagccatctggcctggggggctgaacttactggtgcccactctgtgctccaggcatggcactgtgactactgggtcccatcctacaactatcagatcagagtctctgggggatggtgctggaaatttgtggtttttaagagctggctcttgtgctggccacaggctggtgtgtggggactgttggcctgtcccctctccctttactcgtgagggatccaggcccagagaggagctgtgtcccttgttcaggaatgcccagcgggtcactgacagccagaactgggtctcctgacaccccaagctgccacttcttagctggaattgtggggtttttccacccagaagccagcccctgttcctatcccaatcaatatgcagttggttgttcacttccattttcatagccaaagtcaatattagctcctgcagagatttattttactgaatcaataaagctgtgtgtggcagctcatattttagcaggggagcctccaccccctcccgggagcttacttggggactttatcggttggcacactggtggggaaaggaatgcaaagtgttagtgttggaacagatggtgttattgaaggggcaaggcagacaggacctgtggtgggctggcaagcaggtggggggctcacctttcactgcacgtcaaggtgtgcaggctgggggtggtgtggggccaggtgtgaaggtcacccttagagggaggccctgaggcagtgggggccccacctctgccatgggcccacttcactgctggaatctggccatgacatgtaggtcctcctgtttatgaggctggctactgccttttccaagtgaaagctccctcaggacagagacctcatttgtccttgaactccccacagtcatgacaccttagacctgtgtaaatgttgactaggtgaaggaacaatata

SEQ ID NO: 40933 - DNA, 1848 bp, Homo sapiens
agttcctagagcacaagaagttctttcatgccccgacaacctcacacaatatttccttggcggggaacattctctaaggctcttcaatatgcctgccgcttaaaaggcacttattcagaagtcttttccctgatagtccaaaattaattgatcattgcacccactaattttccctcccaatactgacaatttgtagttctgtaactatttatgctttaatatctcttgctccaattactccttaaattccatcaagtgttatgtccactcctgtaaccccgtgcttaacacggtgcttggcacatggtaaacagtcaggaaatgcctgtttaataatgcatgaccgatgcgaaggctggaaggggtcgcagggtcagcatctggcacttctctgccatggttagtttccttcttgtgtgtgggaatagacggggccaggtcttctccttgctcacccagagggggcttttctccctgtcccctttataagtgtctgctgtagggccgcgtgtgagagacaaaatgcctgcagaaacagggcggcgagcggaagagattggccctatttctgaagtcaacgtagttctgtcatcagaggatgctgtacttttctggcgcaggtgcgagagaagctgccaatctctcctggagcgggtgggactaaggagggccccgggagctggggggttgttgtgtccttcctgcagaacccgattggcctgggtgagctgagggaacgggggcgtggtttgattccgcgggcgcgagccacgttggacgcgccgcagcgtcgccgaaaggtccctcccaggccccacaatgcacttcggggcgcgtcactcggagcggcgggtcccgtctcgacaggtactccccggcccctcccagtcctcttcttcctttcttaggggtcgttcgaatccctgccggcctctcccctcccgctccctgcctctcgccacagcctcggccttcgccctcgggattgaagacctaccccacgggcaggagccaagtccgtgcctttgggatgggagtcggggccgcggagctctggagggacgggcaagcggggaccccgtccccttcgacttgagggttctctggggccaggcgggcggcggttgcgcctcgtctgagccgcctcgggtgttgggcagccaggaaaggagtgtttgaaggggagggacagtcgcacttggctgtcagcatggtggtggggattccctggcgcccaggtgtcagaaacacggtgatctacctgtgtaggtggcccatgagagcttgaggtggcatttcctatttcttttaggcagaatgggacttgaaccagtgtcttactttacgttttgtggggatggagtgagccctgagcccagatatttgcccgcgttggctcacggaaatctcttgagaccctgtctcaagagtcactttgggaacgatgtggcagaagggagacctgagcaattggctcggcaagtggaggaggcttccaaaagaaaaggacaagccccagctggcttgaatctctctgccagtgaagacagcttaagataatttttccctgctgcttagtttcctggatcatccacctggggcagggggcgagcttgagaaccagtccctcctatgcctattcagccaaggcaaagcctagcccagagcaaaagtatcagccaccagactggagatgttgggatcttcagtcaggggaacagccacttttcaaactctgaatcactttccatgttactgatatttgcttacatgctaagattgtaaggaatcaggcaatgccttaaacggtacctacaatttctgatatattaaggttcattcagtatt

SEQ ID NO: 40934 - DNA, 908 bp, Homo sapiens
ccctctactaccaagcctaacccgttccctccatgagcctcctgtttcagtctgccagaaagctcttcttccttgccctgtgcctccaccaacctcttccattgcagtttccctgggcctcctggaatccacagtcaagggcgtactagtgcctgcttcgaggagagcctgccatccaccattggggtccactcagagggctgagcaagtataagagcaaaacaagtgtctggcaagtggactggattcccttcagttcagaagggaaaccagagcctcaaataagcagggagcagacccctgacaggcctcaccgatcactgactaaggagttagatcaccgggctgggggcctgtcctcggcacctaggggaggtaacactcatagtgcctgaactgagacagaaactcctgagacaacagatgctgactcagcctgaggggacaaaggacaaaggcctaagcctggcccaggatcccagtgcctatctttctccttcccctgcctcttatccccaacccccagccagcaacatgttttaagtccaagctcccacagagtgccaggcccagcacccccaatccaaccccaggactcgttccagaggcaaagcagggtggggcaacagttgctcctgtcctcacagcctggtgaccagggtggccctgggaccaaagcctctgggctcacagcttaacctaatgggacacctgagctgacatgtcaatacaggtgagcaggcccacgtggggctgtccaccgttgacagcacaacagagtcccaggtggactcactgtggccctgtcacccatcccctgcccccgcatagcccagtgtccatccccgcagcctgtgggcccaggtaccaagcccacccacacagaactccacctttggaacatgccc

SEQ ID NO: 40935 - DNA, 2468 bp, Homo sapiens
gacttcttaaaaaattacaaatgaagataacttaaaaatatataactgtctgatgctgtgatcctcctcaccaaaatgacaagataaagaattgcagagctgaaggaaccttcatcacccagaccaaccctttagttttacaaatgaaaaaacggaggctagagaaataagatgatttatccaaagtcacacagctagttagtggcagagcttgaactaaaaacccgccgggataagggatgcactgaaatgaaagagacagaagatgggtaaaaccgtttcgagggtccattctccccctttccagtaactctgccttctactccccagtttcttccccaccccaacccatcctaaaagtctaaactcatctaaagcctagctctgctcatgtcgctggccaaaaactttgaacgctttcccaatacctttcagattaaagcgcagcccagattttgaaaacagccgcccaaatgaatggtcactctgcagccacagctcctccactccccatgctggcgccgttcaacatccgaatctggccgcccaggacgggctccgcgccgcaggtagtccggccgctgcccccggccccgcacctgtggccagccccacctttcctcccgcggccctcgcgagccagcgcccggcagccgtccccgcgccccagtgcctgggaacttggctcgacccccagcgcaggagggagctcgcgggcagccaccggggccgattcagcgctcggccgccctcagcgcccaggtaccgggtcccgggcaccccccgccgggaatgcactgcctgcggcgggccgcgccgatcctatccgccccgccgctggccgcagggctccctccccggccgcgctggctccccgcctccccgagccccagcctcacccggctgtcatcaccacattgtagatgaccaggtacgccgtggccaggggccccgggcccttcttcttccgcgtgccgctggcgtccccggccccggccctgccaccgccgcccccattccccttcgctgctgcagtcgccgccactgccgccatgtcaagtgcccgaagcccgctctcctagcgcgagcggctcgggccggactacgcgaggagagggggcggaggaagggacgaggggcaggcggggccagggccgcggggcggagccgggacagggtccacggcagccgccatcttggctgagggcaaagacgctcctggcgctcccgtctttcggcttgcctcagttgccactgccatcttggatcagggtaattcccgcctcttgggcgctcccggttacaacctcggcgccatcttggattagttcaatgtagccaccctctccaggcccgctgcttctgccagctggatgttgcgtcgtccctcgctattcgccctcctataatcactgcttccatgttgaatcaaaacaattatgctttcgttctcccttcttcaattgccctatcttcacacctgaacactattgctccggtatcctgccattttggatcagggcggttgacggtggattcacttcccatcagcccttgaggctgcagggaccagccctttggtaggtgcgctttgcttcctaacccgttgccgggttggagattccacctccgaagttttctttctgacttttgattttacattcctagtacagtggagaagcccaggcggcctagaatccagtgtcgtccgtgagtgcttggctggtgttcaagtgcatcttccagcctgagaccgcgtggactcgctcatcgtgagggcgagaggaggataagcccattgggctgtcggctgagagtgaggtgcggggtaagggagtagatttatagctatagtgactaaaaataaaaggatgttggcttaggtggaaaacctctctgctttgggaagctggagcagcttgtgggcattgcttcaaccagctgatcccactttccattcattgctttgtttcaggaggttctttatttgtaaacgtcccctgcaattttttacacacccaagcagctccttaaatgtattactgtatatgtggtagtataaaatatttatgggttcattccagcaagtgtttatggagcgtccacaaagttgccctggagttcatggcactaagtgaaagagacaaagtcgtcagtctcccagggattatatagagcagcggcccccaaccttttggtcaacagggaccggtttcgtggtgggggggtggatgatggtttcaggatgattcaaaggcattacatttatcattagattctcataaggagcacacaacttagatccctccaatgcgcagttcacaataggttccccgctcctatgagaatctgatgccaccgctgatctgagggaggcggagctcaggaggtaatgctcccttgcttgctgctcacctcctgctgtgcctcctggttcctaacaggccagggattggttctatccgcag

SEQ ID NO: 40936 - DNA, 409 bp, Homo sapiens
taggtactcctttttattctttttttagagatggggtcttgttctgtcctgtcaaggagcaggtgtccctgagaacccaaacattccagagagtatctgagaacctacctgggaaaaaagtcccataacacacacagtaggcaaagagccagaaaattagtttaaaagcagcatagggatgggaggcagcatgggcctctaaagctgtcctgctgctgtccgggagtacctcctatataagtcctaataaactcatctacttgccaaactggacttgtctgagtcattgtttggtctcttggctccctcccagcttgggggaaggtttttctatatgattccaggtttttctcattacaggcatgataatgcatgcatgtagtcctgagctacttgggaggctgaggca

SEQ ID NO: 40937 - DNA, 3599 bp, Homo sapiens
aattcccttaaaagttaatattgcattttggtagattttataaacctaccaaatcagatctggaaattgaatttaaaagtttaaggaagaactaggttttaaaaattgcaataggtaaaatatgaattaaaaagaacaaactggtctctgaataatttttctgtgtgcaaaaaattgccattaaatgcataaagtacccacattgacaatttgatgagaattggatgtttttattgagaaattcccatatgacagtatatgtgggtcatttctctagattgtccagtttccaagaacagtccttcaatcccttgcttgtgcaagaataacctgcagcagggctggcttcatgggccagcatcccatgcagtctcacagggccctgctcttagaaggacctcacacttgttctaatgctctgctcaaaaaaaaaaaaaaaaaaaaaaaaaaaaggcatattagagaaatagattagcctgtgattccaatttaacatataaattgtgtaactgacttagatttgggattcaagatttaactcttactaaatttatcacagtattggaccatttaagagaaattttgccatcttgaaaattttattttaaacaaggagccctacatttttattttgcactgggccctgcaaattctgtagccagtcttgccctgtagtcagagttgtggcagccaagcagtaggagagggctggagtttcaaaggtcagtgtgcagactctccccagtccctgagttttctcagttgcctccctctcacccaccaagttgtgcctattgtccaccagtccgtggtctctccagtccaactttaaaagatccactttcctgccagggtcgaggggaggaactgtcagctggccatatgggctagaggaggaggagatgaggggaatatctagttcccctgcttttgctaattctgtggtaggaattaccttgcctttttcatttgtgtttttgagacagggtctcattctgttgcccaggctggagtgcagtggcatgatcatagctcactaaagccttgaactcctgggctcaagcgatcctcccacctcagcctcccgagtagctaggattacagatatgcaccaccacacccagcctgaatcaccttgtttttgaggctttctcccctgcagacacttgcagaatggaaaaagttgaaacttaattaccaattagcctattccaaaattttgctgacatctcaactctaatgtatctcctttctcattctttgcccttatggatttatgccttttgttcctttatttaggttttgggagaaacaggagaaaatgcaggtgttcaatctgccgggcatgacaagtggtctcaatttagcttccatagaaacaaggacttttctccttagtactcgatttttgttgctttatgtaatacttaatcaaatgatataattacaatgacaagtacaactggcataaataagtttaagaacaaacccattttggccgggcgtggtggctcacgcctgtaatcccagcactttggggggccgagactggtgggtcacgaggtcagcagatcgagaccatcctggctaacacggtgaaaccccgtctctactaaaaatacaaaaaaattagccgggcgtggtggcaggcgcctgtagtggaggctaaggcaggagaatggtgtgaacctgggaggtggagcttgcagtgagccgagattgcgccactgcactccagcctgggcgacagagtgagactctgtctcaaaaaaaaaaaaagaacaaacacattttgactcttggtaaatatgcacctcagttagtggggacagaagtatgcgggcattagtcattttacagaaggaatgagagttgtggttaagttgggcaagttggattaaatggagattagtcaactgagtttctattttaaataaatgaatataaggcattcattaagagggtgcattattgaaagtctaaatgatttggcttcttggacaaccaatttaactttaaagaagctaatctgtctttttttttttttctttagaaaagaatggggtttcattctttttgcccaggctggagtgtagtggcgtgatcacagctcactgcagcctcaatctcccaggcccaagcaatcctccctcttcagcctcccaagaagctgggactacagacacataccatgacacccggctaattaaaacacaatttatttttgtttttatttttttttttgtagagacggggtctccctatgtttcccaggctggtcttcaaggctcaaggaatactctcgctttgtcctcccaaagtgctgagattacagttgggaaccaccgtgcccagcctaatcggtgttttaaaaagccttaagcaaacaactgcctttctgggatcagagtcttttctgcactttgacatgggtagtatcgaagagtccagagtaacctcctgactcttggcccctgctctgtcctaactcccaacaatccctgcctctgcctttatctcctagtggacttttgagctgctttgacctcaaagaccttggtttgcatgtatgagtcataccttgtgaggctccctttcataggtacctggctgtctagcctctagcctttggggaattcagggcagactgacttgtctttctgttggcttcctccaatgcaggatgttagcttcagtttctctgctctacgtcagttatccattctttgttttccatcttccataattctgacattttccatctatcatcacctgtatttgtctttatatttgaagagtttatatctctattttattttattattattatactttaagttttagggtacatgtgcacaatgtgcaggtttgttaccttcacagatgggaactgaacaatgagaacacatggacacaggaaggggaacatcacacaccggggacatcttttttaaaaacattgttatccctttactatcagtttaatggaagttctgaggggtagagaatcactgcttctcttgagtaattcatgtttgactttctctctactgtggtaggttcctatttcctaagctgatatttccttcatctcctgattcttctgaaaacaggagtctcagtttttagctttctagacaatttgaaaaagacatctactcagccttcagagccctatttgttctgtggttaatatgcagccagaaacaagtcaatgtaagtcagcttttgcaaatatcaattagaacttaggggatgtgtcaggataaaacttaaagtgtaattagtttaagtcaagctaactctgggaaatttcctcttgatagaaaaataatattcataaggtcagatgagcttttctcctttgactgttaagaagggaatatttagggattggaagttaaaattttccttagaacgagatttagatttgtaacatttcctaaactcacagcaattgtttttttgtacaattgcatggcactttcagtttcaaagatccttttttttgggaggtgggtagaacttaaaataataccttccatctttagtacagttgttagtggggtattggttccaggacacccccacagataaca

SEQ ID NO: 40938 - DNA, 2406 bp, Homo sapiens
agctattcgggaggctgaggcgggaggaatgcttgcgtctaggagttcaaatccagcctgtgcaacagagtgagacccgatctctttaaaaaagagaaagattccaggctgctacatccccttctgcttttcccttcttgtcctgcctctcttctatttgaccacaaggggaggagtgagagagaagtagaggaaagaccacagttcaattagcagagctcttggtgcataaagggttgttgagaaaggtgaactggtttccatctttccactagggaagggtcttccactgaacttaaaaaaaaaaaaaatctgttcagaatgagctatgagatccatgagctaagtggaaggctatttggaagatggttctgagatatttctgcaaacagatgagagtctcgttaccctggagtgtttgggagaggatcagctgagtgctcaggaccctcacatggcacaagtccagtcagtcccctggacagagaattgtcccttcctgcagccaaggactgttgcacacccagagaacactagagggcacccccgccccggagacggcctctgaggccagggcgtagctgcagcctgggatgggagcggtacaggctttatatctcgaactgtcctgggggttgcaaggaggctccagttctgcaagaagcctcagtcacagtagctgttttgctaacaattatacagactagaacaaattagggtaaggagcagggatggagtggatttgagtgacagcaggatttgaggaggagtacagttcaagacctggctgggctgggagggagcggggctgtggtaaggttctggctctgtgcacttgggtttgggagtacattgtcagttcagggaccctagtcttaggagtggctctggcatagagaagccactggagctccacggggaacccatgctttgtcccccagtgtatccccagtgcccatggcagtgcctagaacacaggaggggcacagaacacatggtgagtggatgtgggatgagggctagggtaccaacagggatgcaaatgaggcatgagaatgaagtagaagagcgagaggcaggagtggcagtggctgtggtggtagtggtgaaggtcagagccaacattagccgggcttcatggagtgtgggttaatcagcactgcctttttaatatgatcccaccccatctgctccacagaaatgacctacaatgacctgtcacttgatcccacctctctgccaacacacacacacacacgtgcgtgaacacacacgccacttccctgagagccatttccctcttcagcagagggatggcctatgaagctttataactaacaagcatctgagcagaccgtggaggacttttgcctggaatcccctcaaccagagtcctctgccctgaggcctaacacttgccaactgttctgccctcttcctcctcccccttggtaatccagccagcctcagctggggagtagcttcctgtctggaagccctgggtggactggactcctcctctggatttcaagtgatttcaacattgccctttgtctattcccagctgggaggggtggcagcaggggaggggagtctgaaggcccagagagggttcagcgggctgatggcagggaacaagggagaggccacttgccccagacaggcagtcacagctcttcctcctggcagagtctccacacagccctgggagcagctgtcctagacccctgggggccacaccttgtagctcccgtggcctctggtcctgctgcctggggttagtcggggattctccagtctctccctctttacaccatagcacagacctggatgatttcctttccagccaatgaacatcttcacactgcaatcttactccttttcctgtcacttttccaagtaacatcctaacaccacagactggaacttgattgcccccctgggacccacactctatgcagcccccactctgctcatttcagagggatgttgtgtgtgtgtgtgtgtgtgtgtgtgtgtgtgtgtgtgtgtgtaagaagacagtgatggcagttttgttactcagtgtcccctgacagacatttgggagtggctagtggttgggatccctgcgaaagctgtcccaggagcaggcatcacgtctccgtgacttgcaccatagctctcaaggagacctgctctatgcatattgacatggctcaacgggtaaaggccgcctgacacacagctgctagcataaaattgtaaagttggtatgtttcccattggtaccctaactttctttctttctggagcccttgtttaattgaaagtaaaattttaatacctattttgtacctaattttcaatttttttttcaaaactaaacagggtcattgaatcagatgacagtttccatactcacga

SEQ ID NO: 40939 - DNA, 4259 bp, Homo sapiens
gaagggccatgtgcctaatcaaaaccagctttgtgctcacatggctgcccaggggataaaaataatagtaatataagtttaagagcagcttgtattttctattttaatcattttgtgatgaaattaaactccatttctagatctaggcccccaaggctgaagtcctttgcttgtgtccccaaagaagtgtgggggaggaagatggaggtgtgaggaagtggggggcctctacattgagaggaaaatgtgtccttatatagacaatgcctcacccctcccactcctgggctctggactcaagctctctgggcagcgtttttttttttttaatctcccccaagaggctggttccctgaactctgaccccacgcagggggcatgaggtcttgggaagcttctgggaggggtccagcttctaggggcccccagtggggcagggcagaggggctgggctccagcctctccctgggttggctcatccctccttgctggcctctctctctgactgagtgcaagcagtgtgctagcgtagtaaggaagagagatcaggatgcttgcgctttctggctctgctgcttaggagttgtgagtccctgggcaagttcctgaacttttctgagtctgagcttcctcacaaggaaaaccgaaataacatcacctcaatagaagagtgagggaggtgtggccaagtcgtaaggtgatggctgacatttactgggtattgactccatgtatgcacggtgctaagtactttgtatgctcagatcaggttgaactacaccattcgccagtattgaagtgtttttgacctacaaaaacagcaattttatttagtttcacataatacccgttagttgtctgtgatgatttaaagaataaatgtgggccaggcgcggtagctcacgcctgtaatcccagcactttgggaggctgaggcgggtggatcacctgaggtcaggagtttgagaccagactggccaacatggtgaaaccccttctctactaaaaatacaaaaattagctgggcgtgttggcgggtgcctgtaacctcagctacttgggaggctgaggcagcagaatggcttgaatccaggagacagaggttgcagtgagccgagatcatgccactgcactccagcctgggcaaaaagagtgaaactctgtctcaaaataaataaataaataaatgtgggggtgggagcagacttagtaatatggcagggctgaggccaagaaaggaggggtggatcaaaatcagctcagcaataatcagaagtgcccaggggccaagataacagtggatcacagtggttaggcaccaaggcttgggtttaacttcccactctgctagttagggtgaccttgagcaggtgactcagtctctgtttgcctgagatgaggctattgttactatcactcccctgaagccctcttgcaaggtcaccaatgacctcaatgttggcaaacccaatagccagtgctcaggctcatctttatttggcagcagcacctgacccttccttccttcctttcttccttccttccttccttcctaccttcattccttccttcctttccttccttccctccttccttccttccctttcttccttttcttcctttcttctttttttttgacagggtctccctctgtcccacaggctggagtaccgtggtacaatcttggctcactgtagcctcaacctcccatgctcaagctgtcctcctggctcatcctcctgagtagctgggactacaggcatgccccacagcatccaggcaacttttgtattttttgtagagacagggtttcaccatgtagcccaggctgatattgaactcctggctcaagcaattcacctgcttctcaaagtgttggtattacaggtgtgagccaccacacctggcctggcacactaatcttgatcattccttcctttttgaagttcttagcatttggtttctgggacacccccatctcctgggtttcttcccatctcactggagtacttccttcttagtcttcttcgcaggcccctgtcctgcccctgcctctctctctctccctcttcttatagccacctctgtactctccagggacctcattcaaccccagggcagtgaatggcctctgtgtgtggatggctccctgtatcccacctccaactctgacctccccctcaactccaggttcacctaaacacctgcctatgtgacaggaccgcttgagaggtcaaatagcaatcttaaacttcacatgcactaaactcttgatcgtgccccccagccccaccattggtcttcactcccccatgaaaactgagtcatctttaacttctctctctctccatacccagctcaccagcaactcatatcagctctacagccaaagaggttatgaatctgatcacttcctgtccctattgtggcaaccccccattgtgctccctgctttccctctgactcatcctgggtctggtcatcacatggacatgagtgatccttcataaatgtccagtgttggcccataacacttagaataaaatctcattttttttgtcctagccaacactgcctggatctggtccacggtcctcctcaacctcacttcctaccatcctgccccttgctcatggctccaccaccctggcctcctgcctcctgaaacgccttaagcacagtgtcctcagctcagggctatgctcttgttgtcaccttgtccctcttccttccctgcttccttcagtctctgttcaaatgttccttcctcagaggggcctcagtgaccaccccctccaaaaatggtattctctcccccattaccctgctttgctttcttcatagctggtgacattacctgaggatatgacacagctgttcacctgcattactgcctctttcccactagaaaagtcccaaaagctggaacttttcctacttcatttactgttttaaaaccagctcctatggcagtgcctggcacagagtgggcactcagatattagttgaatgactgagtgatggcatgagtacccactggagtgtcccttcccatcacaatcatgcatgaccctctgtggtcacaaagccctggtctcactggtaccaaaagctggatgccctggccagggtggctggggacaggaggcctgagttgagaatgactggatgagccagtgaggggctaaggtgttttttgagtcctctcatgggattctggcctaggaaggacttagtttcctcactgctcatctgggttggaatgagaggaaaggggttactgagtcccacgtgcagaaggacctccccacagggaggactgttactcagggaggtctggatcactctgggagcgggccccaccatggtaattcactgcccggggaggctgtgtcaggctgtggaaaggaacaggtttcagagccagaccactgagtcctgccaggatatttcatgttgtaattcactgtgcagggtggagccccaacaccagatctacacctactgtctgtggggcctggaaggcagctgacccttggtgagcctcagtttgctcactgagaaagacaccctgcccaactgttgcatagactgaaaatgcaaagtgcacaagagtctctggccaggacaggcattgaaggtcagcttgttctcctcctgggtgagttttcgggcaagtccacgtttactctaggttttagctcccttctatgtggcacaagttaacccttgtcttctgctgagttcagaaggaagggtgatatgaccataatcaagcaagttcataaacaccccttttcttaggaaaaagacccaaacacatgattaaaatagccagctgtgctgtgttataaaggttacatcccttatctttatgatatgagggaatcagtagtgtgggtaatgctattttagccccatttgcctcatttttatgagattttgaaagatatgttggcctcagatgtatggtctcgatggtgtttggcacaggatgagtgaatgatagcgactttcaggggccaggccagccctgctgagtggctggggaagccagtctgaagtcagcaccagctgtagtcccatcgcctagtggagatggacctcattgccccataagagggatgaaggcctggttctatgcagaggttgggtgggcagttgcagctggagacaggctggaagagcccacacaatggctgggcttgaaaattcagtcattgttgctgcttacggcaagtagttcttcaacgtattct

SEQ ID NO: 40940 - DNA, 3662 bp, Homo sapiens
accacgaattcctttatattaaatcttatcagtgtccaaattctcttgatgttcccataaaaactttttaaagattatctcagtcaggattggcagaagattatcaaaaattattgtaattgttgatgttactatataccttctaatataagttttctataggttgtctttttttttttttttttgcttgcaatttgtatgtggaaaaaaaatgggtgaaagttatttgttccacagtttccagcagcctgcaatttgcagattctactcttgtggtatttgttaatgcatttctcaagggtatggcatgggcctggggcttacatatgcatttagagtaagggggaaattttatagagatagacaggtacaagaatatttatcataggtatgttataatagtgaaaaatggaaacaatttaattattcaacaaataacagcatacctaaattagatacagccatttcatgcaatattatatggctactaaaagtcatgctttccaagaattgtataaaaagatgttaatatcacatgagcaaattaggatagaaagcagtatacaaataccacaatggtaagtttgtataaaaaacattaaaatataatttatttctgagtcataaggttatatattgtttaaattccccacaatgaacatgcattacttttataaacagacagtacaataaacataaaagatgtgggatcccacatcatctcacattactctaaacctgtatatttaatgaacactcagttctctgtggttacaaacgtgagtcacggcactattcaaacagctgagggacctaggaaaggtagctgtcagttgggctgggtgtggggccatgcatgtttattttgaggtgattctgatgtgaactcctgattatgaatcactggcctagagcaacacacttggccttggcatgtgattgggggtgacatttctgtcgggctgtgcaccaaggcagggggctataggagatgaaccatctgcagaaggtgaagcaccccatgaatggttgtcccacagagaatgcggggtgacctggagaagtgtactcactttccacttggagggtccagctacaggacagctggccttgggcgttggaagcagtgcagctgtatgtcccactgtccctggtccgggctttcagcaggcagaggtaatgggagccagcatcttcataaacctcaatgctgccttcctgtctcctcacgggggtgccttccaggaaccaggccacttcaggctttggaatcccggaaactacagggccaggtaaagaacgtgagctccctatgccctggagagcaccctgtgattgtgaggtaggtggggaaggtgtgagctggaggaaagggctcagtttggtgtggagctgccctcccacctctgagtctgcttcctcaccctcaaccacactccacaagacgaaacctcttgagagagtcaggggccttgaggaggatgaatacagcgtgatgggcaaggtctccaggttggccaaagccaggcaaggggaagaaagggcggaggagaccatgaggtttgcttttcgatgttggcgataatgagggtgtttcttctagggtggtaagaactagggccagggccagtactctatccaagagcaaacaacaggctactgttaggggtctctccagaataaagggcatttctacaatgagtcactcctaaggggaaggcccttgtaaggtggttttctaggggagctagtccaagaagatgagtggatataggtgatgcagactagctgggtgctgaaggaagggagtggccaccaaggggctacattttggcaatcggtgaccctaattacctctactcaccttcacatctgaacttgacagtttgattttccttgacctcctggctttggggcttgctctcaaatttggggaatgctgaatccctctggccctccatggggattctcctgttagcagccttgctcacaacatcttggctccccaggccaggctgcctggtggggaaggtggctggacggggaggagctggcctcttcctctcttctccagaaggtgataggacccccaggcctggtgctcttggttccggctgaactcttgcggcctgcagggtgatggagctggaagtcttctgaaggaccggggtctgcggggccgttctgggcgagtccttgcatgactccagcttggactcccttgggggctgaggctggctgtttgcagcccagggtggggagccacctctctgggggctggagcagttcttgcttttggctgcagcctccagactgtccagcttcgactcctttgagattacattggtcacctctttcctgacatctgaattggtggcttttgtttctctcacaaatgacctgtgtggtggtgagggtgggggtagggtgggtgaggagaggggagaatagaatgatcatctggttactcacaaatattactcatcacaagcacggattccagggatcacaaaagcccacaagttaagggcaagtaagagcatctttctctgcagtttgcccagtttcccaagccacagcacaagcagccattcccgacacttgcctgtcccacaaccctgcccagagccctgctttccctacagttcccttctctactagtgcctccgtagttcaacctctgccaccggtgtcccgtgtccactctgccctctctaatctattttctatacagcgaccatagtcgatcttttaaaaacattaatcaaattatgtcatttcaagcccaaggattttccaacagcttttccactactttaagaatgaaactgagccccacaagagggcccacaggaatgccagctcctgatcgtacagacattggcctgccattcaccaggctgcggccacactggcgtccttctgggtccccatgggcccatctcttggttcacagcttgtacatgctatccctgctgtttggagcacactccctgagcttttcttcaccagctaacattcctttgcacaggtctgagctcaaataccaagttcccgaaatggcttccctgcccctctattctaatcagtgccttcctgttgtccttcctcacagacgcatcccagttggtaatgtgcgttcgtgtggtttaagccctcctctacgcccacccctgcacatccagcatctagcgccgagcctcacacacaggaaagaggctcctgctgggtctgggctggatgagtgaacagattccgccctggaatgaggaaggcggccttctcagagcagtgttcttcctcaggatgctaaccagagaagagactgtgtagatactgtgaaaggtggcaacactgagttttccagtctcaatactgacagcaacctgagatagaacccgtgtgtcatattacaataggagaacaagacaaaacacccaaaataaaacaacatcctccaaatggccaattcttctgccccataagatgattcagaaattcagggcatttctcggtaacatccttgcagggcatttcaagagggaaaacgtaaaagtcacaaagcctagacatacctattggcactgtccaaacctggaaaaagggggaagggtggaaagactgttagtagaatgctgtatacaccaaaatttccctcccca

SEQ ID NO: 40941 - DNA, 839 bp, Homo sapiens
aggatagcttcattccttttaatcttccctctaaatgatgaccatttcttcaattactgggctctttttttttgtattattgaagactaaggaaccaccgatttatatatttgtggtgtctgttctggtaggactgtgaggaactgggaaaagattcttgctgtgaagcccatcctgtacccctagtgcttgccccctaaatccagcaacactcccaatcactgggaaaccaaaagggcccccatgaatctcctaagtgccccctagagggtggtactgtctctgtttagggccagtggcttaagaaaacctctggagaagtgcctagaaccagaatttctggttgaatattaaacttggtattgaagaaaaaaggaatgaaaaaagtcaaaactaaaggtcactgaaattgctcaatgtgaataacatttttgccaaaattctcctctttgaagcactctttcttttaaggctcagatattattctagattttgttgtacatgttagtctacttgttgaagctctgaccagtgcttatatatactaggaacggaatccctttcttagtacaggggatgaagtaccaaaggcagctacagaggcagtcaacaaatatttactgagctctttctacaggccagacctatcatggctcaggccctgtgctaggttccttacactggggattcagtaactgataaaaagagacatgtcttgccttcatggagcttacagttctagtggagaagaaaaacatttaaaatacttatttataatttatttatttatttttattttttacgtatttttgagatggagtctcactctgtcgcccagg

SEQ ID NO: 40942 - DNA, 3764 bp, Homo sapiens
tacttgggaggctgaggtaggaggatcgcttgagcccaggaggtcgaggctgcagtgagctgtgattacaccactgcactctcgtctgagcaacagagcaagacctagcctcaaaaaaaaaaaaaaagattatatatgtggctcacattaaatctctacaggacaggtctgtggtcctccacgggagaggaagttctcagagggcaggtaccacgtctcttccttgctctgcaccaagcctcatgacctgacctctggaggtgggcaagtgtcagagctgtcttcagatagccttccaggggctcagaccaaggctgatttccatcatgtaaggccctgaataactgcatggccctcattaaggcactggttctcttgggggattctgaatgtttcttgggcctgatcactacattaaacgtcagatgaggaatctttctctcttgcagatttccctttttaagtagctctaaggatgctaatgccagttcaaacaatgatgaagctaccactttctgggtgctacttcctactagctgtgcttatccttgtaccacactgtggggcagccatgaactccaagtcacagaaaaggaagtaaggcttaggaaggttaatttctccatagttagaaattagtagagctaaaattcaatccaagaccatttgactttctttccattgcacaacactgcctcctaaacttgaccactaaaggattacaaaactccacatatgaattacactctgaattcctggacctctgctcactccaagtaagaagcatagcacagagagctggagggaaggcagttgggctgctaggtttcctttgtaaagggttgggctagcctggcacagccagcaactcatccatggcagaagggcccagagtggactctttcaggcctaggtctgtggggtggccccaaaccacacattagcttaaaatcggtcttgctgcagaagcagaatgtgcataggactcacacacatttaaagagctgcatcctttaggctgttctctatctcctagagttagaagacagaaagtatcttacattttatgtcttaattttattttaattaactgtattttaattttaatttgagggcctgagtctccccaaatgaaaaccaaaggggaggggtggggttgagagccttagcctgctctccttcctctacagccctcagcctgatttcctttcccctgccctgagtaccatgagctactaaaaattttcctgcttggtcatgacatcagatctcacttcctgaacagtagggattgaagaaaacgttttcatattatctaggttttatatgcctcccctgtattcctaacagactccagtcttcccttaatgtggatcatagaaaacaagggctagtccaggttgtagagaccaccaaagtcaaaccctttatcctgcagaaagacaggtgcagaggtttagagtcacacatctcattggcacaaactcataactcagtgctttctcaatttccccagctctaaacagaactcagaagagggaacagggtaatttttatttgtaggcatcaacacaaagttcaggcattgaaagggggttcatgtaggggaaagcacagcaccaggatggcagagctgaggtccatcctgaggttctgagcaggggccactttccatctggaatgccccagccaaaagcactcaaaggtcattagagtaagtgagtcactcagttaaagaatttaaggaaagcatccaaactatgcatgctccactctgtgaaacagcctgttggcccttctgtggtgtggggagacagggaaaacagggcaaagggcggccattggcccaggtgcacctcgcccccttctggaaccttccctgactaccttaattctccatctagtgtcccctgaaaaccagattgggaggacagtcttctgaaagaggagaagtgagtctgagccttggtttataaacttccagtcttagaaagaccgggaagggtcaagggaaccttgtgttacttctgaggggctgacagaccccatgtccttcctgatatcaaggctttaagtgtcagccagggacctgaactagagatactctttccagtggagtggcttcagcatggcagaaggacacactagtagcaaaaaatattttacttatggtccaatttttctcctagaagttttaaagttaacagaattttttaaagtacagagtggggaaaaagacaaaaatattaggttggtgcaaaagtcatgtggtttttgcaattacttttaactaatatgttaacacattgatgtgtttacttcctacatatttttctgagttacataatttttaataatgagcatgtattatttcataatgacgctaaagatgatgttaatgaggataaaaacattgttcattcattcctcaaatatttcagtatctaccatgtgccaggaagctttctagatgttggagataaggcaatgagcagagaaagtccatctcctcctaaatcttccatttagtggtgggggatggagaagacactgcaatgtgagatggtaatacgtcctaaaagaaaaacctcgagtggggtgagaagatggagagtcatagggctgggatggttgggaaagggcctctaaggagcagacatctgagaacagacttgaaggatgtgaaaggagcgtcaggtgagaggctgagggaagggctcttcttttacagaaggaacagcaagggtgaaggccctgtagccttgctcaaagaagggccagaggtgggtgtgaccacggtgggctgaacaggtgcagagtggcagaagatgggtctgagagctagggaggggccagattgggtggggctctgtaagaccatcctaaggagtctgatttcagctgcagtgtgaggggaagccatgggagggctcaagcaggagacaggtgatacctagtttgacaaacatcatctcctggatgcctcccttgttcgcagggaccacatctctcccattagattggaaggtccggggttcaaggatggggtgtgttttctcttgtcagttcctccatccttcaagagagggctaaggcaggagctgcaggccttggggtaactgagagctcagctccctcctggactcgggcctcctgggactcaccttctactgtcaactccactgtcacctggcgagcaccactgccattggtggcttcacaggtatactttcccctgtcctcctcatggacagcatgaatcacaaggctgaaagtcccccggatgccgcaatccagcaggaagcggcccccgctggtgatgggttgcccgtttctgtgccatgtcacctggggctctgggtaaccccggaccttcaagaaaaagaagaaagggtaagagcctgtatttcatgagtactctctctgtgtcaggtattgtttggagtgctttacatgtgttaactcatttaatcctcataacgcccccatttcatcctcattttacagataaggaaatcaaggtacagagagttttggcaatttcccaaggtctcaaaggtagaaggtggcaaagtcaggcatcctgggtccagaatccactatgcaaatgactctcaagcccggctgcattttagaatcatccaggggagctttaaaaaaacactagtgcccaggtcccaccttagaccaattagattagaatcccagggggccaggactgagtacggggattctagaccagtgcttctcactccaacatgcta

SEQ ID NO: 40943 - DNA, 4832 bp, Homo sapiens
aataacagggaaaactcccaaagtgaacaatccctctttgattattccatatagtcacccctcagtgccagtttgtgaatctcacaagactgcctttctgtccccactaatttgtggtcaagcttcagtgaaaaagaaacaacaataaaactccaaatcaatatggtccatcttatttacaatgtctggaaacaaaaatatatccctttcctatcaaaatctaaactatactcatgacagagattgagtactttggaggaaatgctgagactctggagtggattccccaaaagccatgtgaacaatgcctgaagccattgtagcctcaccaaaacaagtgttccagaacttaggctgacagtgttgaaggagaccgcatccattgggatgcacagggtctcacagccactgtaatataaaatggtgtgttaacagctgttgtctctgggtggttaggattgtgagtctcctcctttctttttagttaactattagtttctgagagttctgcaatagtacacctggcctttgcaaaacagaaaaaagaattttacttaaaaaatgcatttcttttatattagtgtgctgtataatgaatgtatatagcacattcattaatttgttgagggcctcaaggaatttaaatctagtagcggaaataaaagagccatgcaaataaatgttatgcatgtttaaaggtgacagatgtcatgcgcccatataaaatcatgtcatcttgtggccctaaaggcagaaacgttcatgcatgggaacatcagacaacaattacactgttaaagtattcttctcgtgtgaaaccctttcctacagaaggtggcccctcaggactctgctcatacagtgaatctgcaaaccatcattgtcttctcctgcactccattaggcagggctggtctacccaggcttctatcagcttcagagaatgggagtgccaagcactgcaactaggaggaggtaaatcattaactgcgccaaaggcgtcctggcattccattagcaagcatactggccccctgcagcagggccagctctggtggctcactgggctctggggcatcaatgattaactggggacattgcaaacgttccagacctcagggacacaatccttctgtctctttctcttttcctctcactttctacacataccccaagcttacctctgaaatgccctcttaaaataaatatttagggatttgaaaatatgctgaaactggcatcacttaagaaagttgcagttcactatgatacttttatagcacattggacctgaagcaaaggcaggaatttttgtgaccttgttcagttccaaggtctgaatgatttgaaactttaatacttgccctcccaatatggaaaatcaatccgtttttactgtctgccactaccctggacctctgggtggtgaaggaataagcctgggttcacatccttgggatgcatgacaacagccctgccctcccaggttgccttatctgctgtcatcactggccttccaccaagaagtcatagctgggatttttacagtcaggatcttcatcaagagccagtaaaaactctttggtcctgtagttttcagagggctgccatgtatagactcttacttgactcttgcagctatgacggagatgtctttggtttggatacccagaagcagaacctcagatagggcttcagagaccccttcctgcaagtcctcaccaacactcacagcagctgggaatgggcctaatgaaggtatacgggtagggcaccaacaatgtccacaacagctcacaaagccagtcgttttactgggcccatgtagcctagaaaagaggcctggagaagtagatggtttgccatgatctcacatggcagcttaaatggcagattggagaccataattttggtttccaggttgagtggttgtctccatgcctcatcgtaaattcatgtttttggtgaggtaagttctgtagaaccaaaagtattcataagcgtctatctccaagagaccctaaatcccttataggttaaagcaatatctgctccccacttttggaaagtgtcaaatggttcaccaaggttataatcacaccataagcaagtcttgggctattcccttgttttcgtaataggacaggattggtgcctgccaggtgtgtacctaagacacccctaggagagtcagtgtggtacagagaggctagtatgcaagccaaggcctgcacactctgggcctggcttggtgtcctagctttcttgggttgtaattccttccttgtattaaggaggaaattgcttttggtatctaaggttcctcccatctctgaagtattatggttttaaatggtgacccacttagcttcttagggaagattctttcctttcccctgcattctcctctgggtccaacccacagccttagtaccctctaatcctccatatgagaaaaccaagtaaccacagaagaaatgctcacaaacatgaatagacagccctgagttttcaccacaatgagttttggaaatggcaccaaagagggtcactctaaggagagaatcgcattcttgacacagtaaccacatttaattggaggttgtattcttgaacaaaagcccggtatcaaataaatcaagggtataaccaacaacttgtcataaaaataaagatatagtcaccataacccctataataattttaaatagtaaaactgtgctccagcttcataaaatgtcctcaaaaacctttatggcctcaaaaggcctttaaaaggaatgagggctcattctgtgcttgctgaaggttgaggagaaagctgagctgcaggcaggcagtcgcttggccactgcattctacctgcctgtctcacttgagaggcagtttccagaacctggtgctgccttgagatttacttaatgactaaaagcaaaacatctgttagagcactaaacattttggtttttctctaacatatatcaagggctttcaacttatcctcagttgcttaggacgggctaccatagcctgtgctcagagcaggggcaaattctttgtccctataggtcctccaagactcaaagcaacatatccatcttctccaagcttggtgagtagcagaaagggggtgattgtgctgattctgcagatctgccgcatgtcttttttgtctggcagggcctggcgcaatgcacacactacaaacccacacagctgcagggcacagctgcggtggcccaaccgcagataggtcacatgagcaggaagaaggaactgaggctctgcccacatcagggatggaggaagaccaggaaggagagaaagcaggattgagctgaggccagggagaaaacagactgcccagcaggacactggggattgggaagatgcaccaagaagatatgagcagtgagctgaagaatctttagggctgggaacaacagacccgaggggttgccactgagtatttacttgattgttaagtaactgaagggatgctgggaaaggctgggcctggaggaggggacattaaggaattcttctagatggacatctcccctaagctgacaaagcctcattctgcaacactgtctatgtattcatgattgttgcctgcctgcctgtaacacattactgtgaacttcttaccctgttacaagtgttgtttctcctatgataaaagactagaagaggactggtgattaaaaactgaaaaatagtaggaaataaaaccaatggtgctgagggattagctgaagaagaatcaatcttcttctgccccatctccaagtataagctcactcagataataaatggacgtggttgcacaaaaaaaaaaaagaaggaaaacattaacaccccaaacaaatcagaccacagaaaatgtctataaaacttacctcatgggtatgttatgagggtgaagagtgaagggtgagccaggggcatggcatgaccaagcttcagagcctgcgtctgtgtcagcaactggcactcagccccataagcaggcaggcacttaattaaggctttgaataatcccattgccaacagtcaaaagccttaactgaacccacagaacccatcaggaagagaccataccaactaaaaacagcaattagtgagaggcttaaactgctggatgctccccacccccatgtccaacttgtaaaccaatgaggacaaaagtgcttccgtgtaaataaaaccagaatgcagagaattgttcctctcaatggctcagcaaatgccatgtgggtctccagggacagatgctcaaagtctctttctctgtgatcagccactctcacttcctatggcatgctttcttttcctatgacccgagacataggaatccctgcacctcgacatctgcaaggctgaggacttgtttctgtcactgaaaacacaaggcaagttatagctccgtagctgggggttacaattcaagcccttctggaccgcttaatcaaaaagatctatttccttttatctagaccaaccttatcaacacatgcaactttttgattcccttttaatgatataagcatctaaaaccctttggagcagccaaacaaagatacagatttttctttctttctttctttcttttttttctgagacacgttctcactctgttgcccaggctagagtgcagtggcacaatcagctcattttgcagcctcgaactcctgggctcaggtgattctcctactttaacctcccaagtagctgggactataggcatatgccactatgcccagctaattttttgtacttttgtagaaatggggtctttccatgttgcccaggctggtcttgaacttctg

SEQ ID NO: 40944 - DNA, 1631 bp, Homo sapiens
aaaggaaggttctgtggtttggcattacatagggaaaaatttaaaaaggaaggaaatgctgacatatgctacactggtgaaccttgaagacattatgctaagtaaagtaagacggtcacaaatacattataattccacttatgtgaggtacctagagtagtaaaattcatagagacagaaagtagaatggtggttgccaggggctagagggaaaggaagtaagaagttattgtttaatgggtgggaactttcagttttacaaggtgaaaaggttccagagataaatggtggtgatggttgtgcaacaatgtgaatgtacttagtgccgctgaactgtccacttaaaaatggttaaagtggtaaatttcatttcatgtgtatttaccacaataaaaaagtcaatgagccaatatataaaaatctatttcagaactctctgttctgtttcaattagctatatgtttatccctttgccaaatgttacactgccttataataaataaatcagaccaaagccactctctgttttgaaaatttccaatgagttctcattgtgctatgaataagacctggcctgcctatttctctccaccctcattcccccttctctgcctcgtgaccacacaggctccaggccgcccagaagtggctcgcagcctcgaggcccacagcacatgcagtcagggctgtgtaagaggtgtgtgctgaggaccatgggagcacggaggagggtgagggctccacagaggtgttgctgtgagttgagcaagaagggaggaccacctcttaatatagcatctgccccaggggagcagcagtaggggtgacttacagggctggggctggcgcccaagggtttgtagggaaagggtgaacccagtttgcactagaagcgagatagctcccaacagccctgcccgccttaggaggggtcctcggagaccccaggttgtgagccgaggcagattccaggtcgtgccagcacataaacagctcttgctgaaccagagtagctctcctcagccacttccgcctgatctattggctcttgccaacttagttccacagggcacagccctctcacaagctattgctcaggaattttagggcaatggcccaggggttgcagaaaagaaaagaaacacataccaacaaccctccaatcaggacccattgtgagcaaaccttgcctgcggttgttctctgggtatttgttggtggcctgtttgggggctggggagcaccaaaggggtcagagtcctggttcaaaacacacatttaaagcagaattagacttcccagtccatgccactgaaatctcttttctaaagaagcatctggaaaaatggagggaaaagctgcccagttacgtagtaaaaaacaaaactcaaactttcctttcctcctcccgccagtgtccctttcaagtctgtgatcctcggggaggaagaattggcgggggctggggcccagctgagccactgttagacaaaagcagtgggttgagaagcctgcaggtagggcttggtctcagtacagacaactgctcagaccacccagctcagagaatttcaggcgcagcgcaactcattcttcgtctgttaaaaacaaatgcatgaggctgggtgtgg

SEQ ID NO: 40945 - DNA, 1075 bp, Homo sapiens
aattcatttagcattaggtatatctcctaatgctatccctctcccctccccccaccccacaacagtccccagagtgtgatgttccccttcctgtgtccatgtgttctcattgttaaagtgctaaacatggtggctgactgcttctgagctggaagtgaactgagttgaaagttattgggagacagatacactattgtataaagtggaaactgaggaattattcatgcttccatggttcagtattctcatgttcccttcctccaccttccacagcttagacagaaacatgccttgacagggccagggctggctctttatcacaaagcccacctcagcaaacgctaaggccagcagtgtgagccgaaacctcatttgggctgtacttctcaagagacactaaagtattagctcatctgagtcacagcacagccagggcttgtcaccatgtttgctttttttttctgataagaataaattccagggtagaagggaagaaatctccagtaatttcagcatttttcccaccattgctcttttcatacttgactctgctggggaaaacagcccatcaacacttcagctaccagcatgggcaacagagcagctaggggtgtttccaccagcccctggcattcgtggagccctggctgtctgtacatggaagcccccagccacccctgaggcccagcagtgaacaccagacagtggcgcagtcctgtgcacttctcgccccaccctacttacatcctgttctactaggcacgtgagcagaacacagagcgcgcgtctgaattttcatctacctcactgtcctcccaagcaaacagctgccctttgaccccgcccccccaggcctagcaacatcttttcatgggaggaggcctacacaggtgttagaagtgtgctcagggccatttggtaaaaaattcctgggtcctgggtgcccagcacatgggggaggtttggctccggtgggcgtatcccttgggcagacaggtctcctgctctgctgctctatggagagagaacagctggataaaggaacaggggcttctaggttgtgggcacgggaaga

SEQ ID NO: 40946 - DNA, 3174 bp, Homo sapiens
gacaggtatcatgaggatcagacttttgtgaccctgccacaaacccggggacacggccactttccagctgtgagctgggcaaggtgctccaaccctcttggcttcagtctctttctctgtcaaatggaatgatcatatcagcctcataaagttgaagggaaggtttgaacgagagtgtatgtaacacccataatatagcataaaaggcattcaatagcagtggctgtcaacatcattatcatccagttcccaaagggatgcccgtctctccaccctgaatatagatatagaccctttcaccaaagacagcaagaagccccagatatcttcaggcaagggtctatgagtgagatgactggaaaacagtagcaggaagcagatggcagaattccctgggaaggtggggaggagggcctgaggcccatgggcagcttcccgcagcacctttgtgtctgtactagcagcaccatttaataagcaaggtgtacgtgctgacatcatgctgggcacccatctcaatcagaaagagcagttctaatgatcaccccttcacaaatgaagacatagaggcttagaaagccaactactcttgtctaaggtcacacagctaaaaagtgaaaaccaaatcaaggtctgattacaaagtcaaaatctgctggcttctcggaggcccccacatctcaaatgaggtatttcttgccatccccagtaatgagagatgcaataggcagagggttgggagttgtacagaggaagaggggcagagcatgtgcctcccccttctgctgtcaggcctggctttgaagacacaagactcttctctacctttgctttcaggggagctggaagctaggagtggtgagatcctcctggaaggtaggagtggctcaggaccctctgtgcaagtcctcttgatctaaaatcagaggcccatggaaatctcctgaaggccccagatgttctcatcaaaaggcacctgcttgatctcaacagcacattagacaggagtcatccatccctaggagaggtctggcttcaggttagaaaaggaacacgcaaatcaatacagcaagggaacatctagtcccttgcaaagtgcttttgtgggggagagttactcaactaccatgcggacaggaccagagcccagccacaccaaacagctctgctcaccctcagcccatcgccccacccactgccatcatcagcataaacagatctctgccacacaattaatggttactgacatatgtggaatgctctatcagaaaaaaaattaataataaagtaaattagaccaaacctcgttcctctctaatcccttgtcaagcctgtggactatattccaatcaagaaaaccagagaggttgggtgatttctacaataatttctctaatgcagagcaatgctcagtggctagaatcaaacacacccagctagggggtcttattcaatacaagctaaacacagatcaaaggggaaacacagagaagtaagaagaaaaaacaggggagagggtcaaaaagagcagtggttcaagagctggaaactcccccttaccccccttacccctcacccctcaccccctgatgcttgggccaacgcccacctctaaatgaggctttcacaagtaacataatttattaactatttgaagcagcattgagttaactggactttaatttgatcaaaagcactttaaattgtctcttgaacccagaaaggaacactttcaactacagcgaaaagagattgtaactataaggcaaatgactcagaaaaaaagtttaaaaaatcagggctcaagtaataccacagaacaagtttagagaaaccagttatccccttccctacccaaagtgtatacattttaaatgatcattgtcttgaagcacctggtcagtttgccgggcatcttggaaatatcataccttccctagagggaggggctcccaagcaggctccgcagtctaccgtgaaccctacctccaacaacagcacacatcagaggcagcaaaaccacccacgtgcaaatgccccaggcactgacagctccctctcccaccttaatcctctctgcaatgcactcaaatcctgacaagttctctaatcactcctaattccggagtgcgctgctcctcggctgtgccaggctgacttgctatgacctaccggagcaaagctgggcaggaccacacaccagtgaacgggacacaccttaccgcagcttcttcctcggcagctctcacatgagtcaggatgcgaggcagccacacttcaccaccaccgtactgcagaggttcctgtccaaggtccagccaagaatggagaccgaaggagtgccgggcgccacagagcccagggccagaccgaaaaagttaaggggcttttgttctgactctgctcgcagatggtgcaatttgccttccgctgagcagccaacttcacccggtccgggagatctgttgttctaatccgcccagctggggtgacctttgaaacctctggctgccactgcagaggctctcaatggagtcctgggggagccaggggtggaagctcacaggtttttatttttacttgttcagagctgcagattctaatctgagtgtggagcaaagggaggaccctgtcaagcagagagctgagtcctcggaggggctgggcactctcccaattccacatctggcctggaacaccactccaaccccttggcacatctggcctgggattaccacccagggatcataagatatttcctcctgagacccagctctttcttccctaagctgaagaagccctgtttatgatccctagagcaggatgcaagcccagcaagcagatggatggagaactcctgtgctgtgtttctcataaggaactgcactgatgaggcccagactccacagactgtgttcatgttgagcacgactttgcctcgttggtccagagccctggagagcttcaggaatgatccttggagcactcctctaaaatgaggcagcaaggtgatgccctgtccagaccttttcctccagcaagagaaggtattttcatagttccaaaggaacatcctatgcaactcacaccttggggcagactgtggacatccgaatcggcaatgacatgaatttaagttttcccttgattcatatctgattcttgaagagctgg

SEQ ID NO: 40947 - DNA, 745 bp, Homo sapiens
gttcccattcaaaggccagaaatctctgtgttctctccaaaaccttgctgcccttctccagactccctcaactctcctcccactggctgggcacaagcccagaccccagccttaggtgctgcatcagaatggccaggaggccttggcagtgtgacaagctctatgtttccacatgcagttcaccccctgccctcactgccctcctgagatatgagggctcctccccagacagcctccagctgtggatgagaaacaatggcttagtgcttcctggaaattacctggggagatggagagctgccaagccaaacctgccagggtcatcagctcaaggccgacagtcaggcccagacacagcccggctcttcctccagcctccttcacccttcactgcagagggctgtctctctccctgtttctgctagttccacttccacacagccctgtccattctcaccaggggcagggcacagggatcccgcttctcaggttcctttagaattctttggtaccaaccttaggtcctttgaggatgagactcacttactctaggtgcctggaatttcacagctggaagggacctttgaaactactttcaatcccacctccagcccagaggggtgtggctgtatgccctttgggatatttgaggctacctcaccctagaacatcaactttactcaaagatttgggtgaagcatttttatattacaaccaaaaaattcagatcattgtataggatacc

SEQ ID NO: 40948 - DNA, 1167 bp, Homo sapiens
tttccaactgcaatcatcggcgaacaaggtccctcaacaatgggaccccagttaacgcgaaggaggcagagcgaggtaaggagcttaaatgaggagtatggagtaggaacaagtctgcaaagcccgcgccccagcttcgcctgggatggccaggtctggcactcgcgggccgccttccccgccctaccttcccggaatcacatttgggctggaaggaccttcacgtggcacccccttcccagaggccgtcaccgagtcctctagcgagggtctgggagctgggagaagggtccgcttctcctccgcccctcaaatcaaaggcacccccttcggatgattcctagaaaggcaatcgcatcagtgtccccaagcacttcatctccccaaaagaaaactcgtgcagcctggcgtcactggggtcgtctccttacgcccctgactcctcgccgcaccccggggcccctctccattaggggagtcgggaggcacagacggtgggggtcccagcccccacccagaactcccaccctcggagccttgacttccagggcccgcgcctggacaaaagcatggggcgggctcactcacccgcgcggcgaaggcggcccgggagccggggcaccggcgctcggcggggcgccccggccgcaggcgcacagcgcgggctccgagctcgctcagcgccctgctgccgaccgggcggcgcggggagcccgcgaggcgcgtccgggactgggcagggcggggcggggcggggcggggcgggggtgagcgaaccggcgagagagagagcaagtgggagagcggagagcggacgcgcgctgaggagagcgagtgagagcgcggcgctacggggtcaggactcaaaccacccgctccagcccccatgcactgatttgcatgacatttgcatagcgctcggggagtggacctgctgcccttcccgccacgcccacccgccttctgcctcggagtccggagcggagaatccgcagccaaacctagcgccagacccgggcccccctcgcacttatcctgcaccgccccagttaactcctcgcaggcggcggtcagcgggctggtactgtcttggtgcgtgtcttagtcctacactgggagacctaggccttaggtcggggtctgatgctagcttcgtgagcgtgcatg

SEQ ID NO: 40949 - DNA, 1176 bp, Homo sapiens
aatgtttaaaagaagaatggactctggcatcagttttgtgagtctgaatcttgtttccacagctgtgtaactgccaagttatttgaatcctccagccctcgatttcctcatatataaaatagggataatagtacttacctcataaggatatcgtgactattaaatgagttattctatgtaatacataaaagcacttacagtagcatctgccacataagtcctatctaaatgttggctgctgttatcattaagatggtggcaaactacgtgttttaaagggaactaaattttgttgtatgtctacaacaactgtgtgatcgatgtttttaccgggttctcttatttaaccttctcaattctttgagacaggattttatgcttatttctgcctattttgcagctaaggaataggaagttctgagcagtaaaaagtagtagactctcaatctgcaggtgactgaagctaggagaggttaagtcactcgacgcagcggcgaaggctgggactcgaacccgggcctgaccccaaagccggcgctctagactagggctacgacgatttaaacagaaacatctagagaccgagcggccgtgttacgacgggaagattaggtgttccctgcacctctgtcccagcactttaatgtcgccgcattgtctttgtcttttttcgagcagagttttacaagttcctggcccgaaaacccccctgtccctctccatccccacagcggactcctcaggtcctcagccctcacctggcccggtcgagctccagacctgaccatctctcgccgcctcagagaagcccagaccgagggaagtgaagcctcacggtaaaaagaattaaccgccgtgggctcccggaccttcttggcccgcccgccgagcttccgcttccggaaaggatcccgccgaatgccgcgcttcatagtctccgacgcgcctccactccctttctcctgctccaggcccagcgccttgggcgtacgcaatagacccctccaagcttcccggcttgtcacccaccggcaggggttgggagaagccaataaacggcgaacggggcggggccaaggcatggctggggcggggccggggcggagccgccgagaaaagagttaagcggaggttccaggacttgcggtggggaaaacggggacgaggacccgccag

SEQ ID NO: 40950 - DNA, 786 bp, Homo sapiens
aaaggagagaaactgtggcgagctggtgaggaaaatgtgagaggctcaggagggcagggagacagaagagagctcgtcaggaaggaggggaagaaaggccggcctctagggacaggtcagtccagcttggagaccgatctgaagatccagagaaggcgggcgggcagcctggtggtcccctcacacacctgggagtggagtggacggaggaggtggccgcggggccgggaggagcaccggcggcgcgagcggagaagctgagcgcgcagcgcccgggccgcagagccccctggacaagcctggcgtgtgccctgcagccccgggctcgcccggcggccccgccccctccctggcccgggcttttcctgcggagctcaggaagccggcctagcacagcctcgaacaatagctcgggactcgggctccgctccccgggaggccggcgcggggccgctgggactgggggcgtaggcgccgccgggggcccgcagcgagccctcggccccggccggagcttcaattcagctcggcgctcccggggtcattgttggccgggactgagggagcgggagccgggggaggagctggggaggcggctgctgcggcggcggcggcggcgggagccagagggggagctagagagcgagcgagcgaaggagggaggtagcgagtgagcgagtgagcgagggagggaggaggtagggagacagggagggtgggagggaggaggaaaaataaagaggagagagcggagcagggctgaacaatagagacaggcagacgggc

SEQ ID NO: 40951 - DNA, 830 bp, Homo sapiens
taatgacacttgtgccagcttttgtgtttccagaagttttgaagatataagggaaccaccacatgtagagtatgtgaagtcttacagagacgaggtcctaaggtatttattttgacaaatcacgttgcaagtaatgtgaaagcagtttgaagaaaaaatgtccccatctaatgctgcattatggcatgcatttctttagcctaaatctgtcagtgacatgaaaatacatgttttgctggacacataataggttgaacacataataggttctaacatggatctgcataaagaagaaagaagaaaggctataaaggtagaagaataaatgtataaatattacaacaggacactgagctgagtggctctttaccatagaccttgctcatagttctcactacaggcttgctctgagccaacttccaagttctctccttctccttccaaacttccctgtatgtcatcttgctcctgggccacctgactgatgtttaatgcctggatatttgctttcacctctgcatgaccaagccttggccaagtcactgttgactcagttgcaacatctgtcccctgctgagggctgttgtagctttcatagctcacagtccagcttgaatctaaccttttctgtggtcattcagagtagcaagaagcattgtgttttggatttactgcagaactcacacacttaactgtacacagtcagtttttatagctatcactgcatccagattggacagtgaccttggctgagacatcctttacctctgtttcagattaatttaggcggcatataaaatctctgtgcactgccaggggaaagtaaagac

SEQ ID NO: 40952 - DNA, 1843 bp, Homo sapiens
caacatggaagatgagtacaagaaaaacaaaactatctagggtttctgttgcagagaatttagcttgggtgtaggcactcatcagttgcagaagatttctgtaccagtttgcctctgtcacttgtattgaaaaaaaaaagtctccccctcgccttctccaccccatctcatgttttcttagattgctttagaaaaaaagatttattcagaattttgttctcaaaagtccagcattacctaaacaaaacaagtgatttgaacagcatttaaagatttttgaatctggaaaactcatataatgggggtgagtcccatcccttctatgagatctgagtgtcctgagagaaaccacacaactttctctctgataggtggtgaacctcttgcaggttggaatggttggttttgtttcttgcccctgagggtgtggagcaccaccttgcaaactggctgaattcaattagactggaggctccccaaggaaaaaggagagggcttcaccccccccatactccttagggccaatgccgggatctctatttcagacatgaagtacctgaggccagactgaggtttccttcaggaggttctctttcctctgtccggggctgtgaccacagggggttacccaggccagaggtgggtggactggcactgtggcagagtggggcagagccttctgccaggggacggagcatggatgtacctgcgagggaactagcagtggactcagtctcaccaaggagctatattcttgtttctaaattaagcaagtatgacagccagccccatttctcctggaacttagatgggagcactttgtcagccatggtgactcagcaaggatgaatgtttttcggataatttactgacgtaattcaagcatgtgtcctgatggccctggcccctctttccttttctctcagagcctccttcctctctgcatttcccatttgttctaggtcaagtgaggaccagccttggttttgagagctactaaaaaactctaaaatcagtacatttttctcccttgcatctcccagactgttctgtccggagctggaattttatctgtttccatcgctagtaatgcatgtgccaggttttggcctggtgcctgagacaaggtctgaaccttgtcctgtgatgcactccaccctggttccctacacaggaagagaatgtcctggatctccagaccataagctgttttcctttgcaggaaattcaggcttcaccctcattggctgaagagaaactccctgttttgaacttggaggaaagcaagaccattcctcaccctcttgcagctctgactatgaaggagtgctgcattgggaagattgcacattggttcagatttaattctgtggatacacaggacacttgtttagttcttacatacacacaaactcagagggaatggtcaaatgatctcttggctgaatttgcagattaatggggtggggaatgggggagggacccagttcttgccttcaggaggtttgtggtctggttaaggtttcagaatccacaggagaagacaaaaactgaaagcttccaaggcagcagccacacaagcatgtcagttaaatggacgtaatcagacataatttactggtggtaaaaatctgacctggattgtaaaggaaatagatgaattggaattctggagcttaaaggcaggaagaagctgtagaggtctgccaggccaactctttcttttaaaaagagtagaatgctgtctaaaggggtccagtcatgggctcagggtcctccagctggctagggtaccagtcctgagcttgctgcaatcatacatacactgccccctaacatagac

SEQ ID NO: 40953 - DNA, 2929 bp, Homo sapiens
ctctcaagttgtgacaggaacagatcattacatctgagttattccacctggaaatgtagccaggtttgagacagagggagctgagatcttatggcctcctgcagataccaggggacatccaagcctcatcaggattggtgcctttatttgtcttgggatgcacaaggcatatgcccagctagcccaaggtactgccctttggatttaaatagagattggtgcagctgtcctgctgcaatctaggagccaacaaaacaaatactggcaacttcagctataattacatatctccatggtgtttcacaccatgggctattttgcacaatatatctgagcctcggcaatgccaaatatggattgaaatagctccggtggactttggctcatcacctgcctagaattttaaaatatcaccaagggaaggaagccatggaagaggctaaaatgggaactccaaatccatatgatggacatgtttcatttttctttttctttaggaggctttgacctatggactctttagtgtcttgggaattcccaaggtcagtttcatttgcttaaaaaaatacagctaagagaataggattatttggatgtagatcttgagtctgattcatccgctgtagctgtcactctgatgaaactttgcaagtttataaagttagaaaggttcaaggtttggatatcccagttactctgatttgatcattgtatattacatacaggtatcaaaatatcacattactctaaaaatatgtacaactattatataaaataaattttaaaaaaattatagtataaagtttgggatttactccaagaaactacattttatcatgacttcagggtgccagatgacctggactaaggataatttcctagattttccctttcttcactctatgcctcacacaaagatcacttgaaaaattagtgccacaatctccccatcaacaaaatgggagttgcagattcttcctgcatttcttccttgtgggaagcaacaagatccagtgagaagtatacagggattataatatttggatgggaggccagagctaccccacctatatgtacagctcccctaaccttgccaagcctcagtttctatgtctacaaaatgggaatgatatctattccatttcagttgaagtaggcatgcagtaagataatgtacttaaaagtactttaagtctagagcacagagcaaatgtaaattgccatcattatttttcaggggatatggtgacagtggatgagatcatgtctggaacacacccagaaaagaagaaagatatagaagagattgatgatattgccccatcccaggagtttcccaagagagggaatgtgctgaccagtctctgagtttaactgaactcttgatgccctgggcttctttcactgtttgagggccagattcccatgtgtagcaggattagccaggaaactttccacattctaaagctaaagctaatgatttaatgagcaaaatctctccctgttctgatgtttatttatataagtttaggtcagtaggactttggggcaaaagcagttgtaagtggaaacagcatgatgctttgcatttagagttctccatcagtttcttttccctgcccttctaatcagagaaaaatgggcagccctgcccagtgacctctcaacagcaagcagtgttgccccacttcaagacagcaagggagtgctacagtgcttcttatatctacgttttgggggttctgtgaacttatttatgcctaggtagatcctgcctccaagccagcttgttcttgtttcattatgtcaccatccacattaacaccactgcttaattttctttttctcatatggagggtggattcatatggaattacttatggttcttgcctaggcttttgtgactgtgaggattatggtatagtctgtggtcatggaagatagctcttggcctgtgaatgtcaggaacagtcaagagtttcagaaaattagctgaatgatgggatgggagcctgaacctcatgacccttccctgtctcatggtccaatcttcagctatttggattctgccctttccctgaagagctttatgtggggagactttgatctcctgcagcttctctgctctgaggaaatgttgcaatggctatgtcttttcagttaatctcctaaggaaaggaagtgggaagaacatgttcctgctttgaaagtggggagccagaggtcccagatggccctgggttttggccgacagtgcatggtgaacagtccttagtggctatgtggtgtctcttttgtcctaaagcaaatctcccaatccagccctgtttgagaagtgtgtgcagatggccttgtcattagcataggtctccttcctcttgtctttctctcctctgactccctcccaccagctttccacaccagacagccactcattagggcttatcccacagtgaggactgcagctggggtctctgactctcaaaccgtgcttctctgaggacagctgttctgcctggagagctgttagacacttctgctgtgctcccacagtgagctttccaaatctgtactattgcccctgccattccctttcctagtagactactctttggcttcacattctaggcttttaagttggctcaaaaagtcacttcctgaaaatttctccagccttatccctcctgccctggtcactcctttaccaagtatgacctcagcattatattgctaatttgtgctactgtcacccttcatttctttcatgtccttggggtctatataacttaattgtgtagagaaccaagacttaaccctaggcacctcaaggagaaacttgtcaatttttgtttttattgatgatgaactctgaaatacagtttatgtttttccatgccttatatactgagcattctgaacataattcacc

SEQ ID NO: 40954 - DNA, 498 bp, Homo sapiens
aagacagttgtgattgggtctgaattttagaaactcttttctactagtaatggggaagagagctgggcagagacaaagctgagggcccagctttaacactgaccccattgccttcccacctgtctttattgttccattctctctataaaatgtatcttatagctcttcactgacttatccaacctgattttttgccactctccaattttagtcaggttgactcaacttattcaaacaggcctactcatttgtgtcttgtttgttcaacaaacatttagtaaatgcctattgcataccagccacagcacttggcatgggggaaccaaggatgagtaagacatggaaactgcctttaaggagctcacagaccagtagggagataccatggagatacattgttactataaagtgtgatgatggctgtggggtgggctaaatatagagtaccctgggtgcagaaagaagacaggcttggctatgagaagcccttctccctct

SEQ ID NO: 40955 - DNA, 1017 bp, Homo sapiens
taaaaatgcctgcaccatactcaacttgaatctagaataaaatagtaaatggaaaagctttaatgtttcaaagaattatttatcattcaggatgttattcagccatcagtaagtaacataaatacaacaaaaattaacaaaagacaaaaaaaacaaaagtaaaaaataattaagaattagggcatatttgctcatgcagagaaatagacattatggaacatagtgttatttaacatctggtcttaggctgaactctgacctccagtgccccagtcagcaaaatcagatcattttgctgatgtttgactttggacccatgaagacataaaaaaagtgtggtggtgtcctaccagttccctgttacccaattatgaccttttaccattccttgctgcccagaaaataaaactccttctgcatcaacctaaacaaacataactaaggagacaaatcctgtctaaaatttttcatttgtttagaattacccaggccattgcctcctttctattggcatcaatatctagttctctgcccctgtcaaggacactggctccttagataaagtgtcatgaggccttaagcaagccctcagcaaccaaccccatgcctaggtgctgtataaataggatttgattgtgctaatgatgcttgcccacagggactttttcctatcccaaaatcactgagtgctgggacctctgccagctctggacagaaataatctcatcagcaagtcccaggctatccctagggcctgagggaattacgtcaattggagagggtttttttcacccataccagttgtccaattaaataaacaatgagaaattacctttagaaggccctggcatgtttttctgttggaaattaataatttctattccaaatatgcacatgagatgctccaaatcctcctattgcatgctaacaagacagcctcttttccttcttcccctaattatcttcatgaatatataatacatgacagctttgtgtgcctccctaggaaactccact

SEQ ID NO: 40956 - DNA, 738 bp, Homo sapiens
catgtcaaataaaaaagaaagaaacaactgctatgagaagtcagatttgaaaaatgtccctcatttggtttgcttcactgagttggttaccaatgagaaagactgaagtctcaaagacagtgttgattgcaaatgcgcttctctctgccctgccccacccccatctcattcaacattcctgaagctccaggaaatgaaaatgtgagaatcaatccatctattgtgagtcagcccaagaaatggtcaacagtggcatctgatgccaattccctggtagcaagtgaagctgatcttcagcttgattttaatgagctttaggactgttccaaaaatacataaaagggatagaaaatatccttaattagaagaatcatatagtccatttgggagagagaaaatataaatactcagggaacaaaattcataccatgtaggataggaatagctattgcattatcctgagaggtccaaaagttagaatgatctcgcctccctttttatctctgtccaacaccgaagatgagtcatttgatgtaatggcagtcatcttcaggttgtttttgtttttttatttgttgcccaggctggagtgcagtggtgtgatcatagctcactgcagccttgacctcctgggctgaagtgatcctcctgcttcagcctcttgagtagctgggactacagatgtgtaccaccacacttaactaatttttgtatttttttgtagagatggggtctcac

SEQ ID NO: 40957 - DNA, 765 bp, Homo sapiens
agatgtctgctgacatttcttctggcctgagagacagtgaccaggagtatttgctttctgaatcaaagcatttagaatgcgctgtttcttctgaacacgaatctgtaagtcaccccgctcccagccagaccccttacagaggcaggttgttcccctctcaggtgctccgcatgtgccctcttcccatctccagtcctggcagacaggctgcccgtccccagattacctaacaataattagaccaaccagagtttcctggtcaaccagaggagagcttggcctctttccaggaattagtttgccaggtttctatgtgtgactggataccttgacctccaccctacaaccacagtgtaaataaacatgtattatctaccctgatttggcaaccagttccaagaattctcttcccagtctgattccaatctgttgtttctctaggatgcccagtataggaagagcagaaagtcacatccgtggccctacaaagggaaattatagcctaaatttagggtactaaatctttgaaccgtgggtttgggaatagtttactatttttttctttctagtctgccagattatctcaagatatgtcattaagggtgctttggaaattgatttatttttgtttgtttgttttttgagatggagtttcactcttgtcgcccaggctggagtgcagtggtgcaatctctgctcactgcaacctccgcctcccaggttcaagtgattctcccacctcagcctcccaagtagctgggattg

SEQ ID NO: 40958 - DNA, 1210 bp, Homo sapiens
tacacggaaggaaaggaaagggttggggacggtgttttcaatacagaggaggctgtggggagggaacgggtgaggctgcgaggaagaaaagggcatccttgagtcttggagcatctaagtctgcccctctcttacctctttggccccatctagttgtattttttaagccaacgcccattgtggtggcctttgaagggaggaagttgcacataaggagtacctacctgtttggtgccaagggctcaaactccacccgtttgccccgtgcccacagcgttggtgccacaggcagcgttacatgaggctccggccgctgctggccaggtctcctgcccacagctggaccttggaactccgccccttaggccctccctccccgcctggcccctccccgcttcccaaggtggcagtggctcccagtaagtcagagctgcggccgcggtgcggggagagcacagcggggagggcgggagccggctctcgggcggcggcgctgaagtttccttcccgccgcgctctcaccccgggctggcgccccgtgccatgcgggagcgctggggcggcggggcaacatgaagggcggcgacagggcttacacccgaggtccctctttggggtggctctttgctaagtgctgctgttgcttcccgtgtagaggtgagtggctgtcggcggccttggtgccttctgttagccagactggtcgcgctcagcgcgagggagggtggtagggagggaagggttggggaggcctctggggtaggcggatggggctggggatcaggagggcggcgaagtgagagagtttgctgcgatccgtttcacagtttcccagacagaacgcgcgcgctcgctggctggcggtgaggttctgacttggatgcggagctgctgtttgggaactcagtcacctagcagcgactttggatgtcagggcgccagcctgctagggagtgggatgcggacgcgggggtgggaaggggacgcagagccgcgtgtgtccctatagtggcggagaagtacctcacctctcatttacacatggatctcagctgcgggattaacgtgtgactcctggctacaggaatgtgtttgacacctgtctgtacaccaggaactatttttgccaagtgacaattttctcgtgggactggagcacatttttttctgcctgggttttcacaggccagcgtggatttgtagctccggg

SEQ ID NO: 40959 - DNA, 1005 bp, Homo sapiens
ggaaacgtttttctcttctttttggccaatatttattgcacatcttttatgtttgaggctttgttggttcttcttcagactgtttttgcctagataaaaatcataaccggctgccctcaggccattattccagcccccatggtgctggatgtttcactgaggctccaccagtatcttccccctcccttgtaggtgaggcccacgggtggcttgcctccctgcctgctgtaatcaatgactaatagagcatatcttttgctcttggcagaactgtgttacaattcctggaaggaggggaaccctggttacacctgtgaggcagccaggaggctgccaggcagcttttgccaagtgaaagagcaaagatcagagttactaaaacaggttgttccacattctttttgcctttctggtgaccacagtgaggaaactgtcaaattgaaggggagggaaaccccttctgctgctaggtcaaagcagtacctcctaaaatgtttctgtttccaggtatgtgctcttcccagcgcaggattagttgtgggcttgtatctcttcttttacagcatctggtgtgtcatcagctgtcaggatattctcagtttctgctctctctccatgagaatcttcatattgctcctgtggggaaagggatgttatcttttcccattcaaaggggaaaccaagccttgttgtttaaaagaattgcaaacacattgtttgccacacattttgtatctcagtttcatatctgtgcagtgctccttctcttctttgtctgcctactcacagaatgacttagagcagaagttctcaaagtgtggtcacctgggaacatgttacaaatgcagattcccaggcaccattgaccaccctgccccgcctcaccccacaactgagggatgggctctagcagtctgtgttttaataagccctccaggtggttgtggtgcacgctcaaatttgaggactactaacttagtgctgctcacttggagggaaaaggta

SEQ ID NO: 40960 - DNA, 2614 bp, Homo sapiens
tgcctgaggaactgacatagctaccaagagtcttgttactacccctcttctggcccgcaagtgggtattatttgtgttctctaccaagtttaaaaagtatttccgaaaggttttgctaactactatgggagaacgtaaggtagggaagtagagtaaaagcggcataaagctggatagccttatcatgctcacattttttaggaccttgcttgaagccgacttgcttcaagagctctcctgccgttctttggtctataagaacctctgaggaacctgtacctaagtcacaaaggatcactgccagggctcttacttcctgatttgcaacctgagtctcgtcataattatgttggcactgggatccagattaaaagaaccagagtcccattccctgcaacccaccttggcctttcccatctgtctctcatttctgttctgaggcattgccatccacagctgctgcctcctgctgcgataactgttattcagggtgtgctggcagggttcagctgagtctgcatgaccctctttgggcaatgctgtagacctgtttctgtaacatttgggacgttgtactcagtggcctttacgatcttttccaattcccattccacaaagggatttaaaaaccagagataatcctgtttgtttacttgggttctgcttcaaagcagaagacctcaataaccttttaaggttttttccagcctttctaattttgaagttcccatttctttgggctttggtttagaaattctacccctttcccaatttaacttacagcttcaccaccaactagtgcttccattttagagtgttagcagccaactctgccagagtgtctatgggttccacacacagcttgtttcccagtgaattcccagtgaggtggtcaagtctaaatttaaactatgacccttctaccagcatatgcaagccagggctgcaagagcaaaatcagaactgaactgttctcagtgagatgtgtgtgtaggagttagaagagaaagtgggcaaggcttcccaaaaggtagaccagccgcggggaaagaagagcaggagttcagggtgaggataagtgcagttatcccaagggactgttggagtttattgtagcatggctgggtcccttggagaaagtcagccaaactcaccatcctctgtttcctctcattgtaacataccaatggcataactcacctgggtttgtcattaccatggcttcttgccaagcattatggcacttgtctcttattccaaagtcacagatccttggtttatgagatacaatctgcacattatgttatattggtttcaactcttgtttggttgcctggctcacatctttatttgtgtttttctgtatcaatgggtacgtatttcaaagacaggacagggcagtggctataattctggttgtggaatggctttgccaagtcaggtactagaaagtgaaactgcaaagcatagaaactgatttagtttgtaacgtttaactcattatgatttagtgacacctccaatttgtatttatatttgtgattagcatcctataccatgaaatttatatatatatatatgtgatatcatatatgtgactatatatgtaggacatttttagagtggcatcagatgtgattcaaatagagcaatctttattattctgtttgattgtgattgctaacatatattttggaagtagcctagaggcaggtttggagaggctaccttgagtgcatgtgtttttccaaaatgccccagctcgaagtaaagaggaaaaccagattacaaagcttctgaagctggggttctagcactctctgaaagtgcccagggtagaatcataaacagggctatgactaagaaggaacatgggccagttggccctcttgtgctcatgcgtcattttctctaagtaagctagagctttttgtgggcaattctctgtctttagttcagacctctaagagccaagcatgggttaggagggtcagactgagtccccctcctgacgttagagcttactacatgtatggcattagtctggtgacctaactttatggcaatgtcttcatctgcgcacttggggaaatacaggcatctatccctgagggtggttgtgaagattcaagtgaaaaagtatgtgtgtatcacttagggtagttcctggctacctggtatatggaatgcactcagtaagtgttagcttgagaacagcaacattcttcccattatcagacatttctctaacttatagggtaatagctttaaatgagccattatgtaggatggaagtagattaatgactatttctcaaagcttttaaggaaaacagacttgtaacctaggtctcaaactattggccttttgcccaggttttgagccctgggagtgtccgtgttcaaaacaagttgctgatctggtagatcctatggctgattcacgatgacaattgttattaaaaagagatggtctcctcccagtgtgttggattcttaagtaattcttcaaccaggtcactattaaggacctttatatgtatgtattagtttgtactattatcctgtattcatgttcaaagttgatgatcttggatgtattcctttagtttcta

SEQ ID NO: 40961 - DNA, 516 bp, Homo sapiens
ataccacttcttgtactgtaccctaaagaaggtctccatttgtcacaggatttcaagtgataatttttgtaatagcgaacaagaacatggacagtgacattgtttccaataggggaatgattgtggtataattttacagtggtgtggtattcagccatctgaaacaaacagcaaaatagaagatccaaacataggaagatctcccatttgttaaatgggaaaaaatccatacagaaccattcaacgacatagtataaacattgtgcaagaacaaactgtgtgtctatgtgggtgaatgcattgaaaatgagccaagatatatactgaatcactgtggttacttctaggtagcagagtagaattgatttgggtgtggggaagtaactgggagtaagttggggagagatgaactttttaccctataatcttctaaagtattttatgaaatttcatgagcatgtatttatgtatgacatactttttaaagtaatacatacttgtagccaataatttgga

SEQ ID NO: 40962 - DNA, 1646 bp, Homo sapiens
ttctttaggaacctacatactgtttgcataatagctgtatcaatctacacttccagcatcaatgtgctagggttcccttttctctacattctcaccagcatttgttatctcttgatttttgataatagccattctaacaggtatgagatgatatcatagtgaaaccattttggttttttttttttccacaatgaaaggcctgtattttatactaatataatgtgccctttcttcagtctgaatttgtaaagtttcaccatattctttcagcggctatggtttttgttttgttttggttttggttttggttttgagacagaggtctcactgtgttgcacaggctggagtgcagtggtggaatcacagctcactgcagccttgacctcctgggctcaagcaattctgctgcctcaacctcctaagtagctgagacaacaggagcgcaccaccacaccaggctaatttttgttattatttttagtagagatgaggtctcgctatgttgctcagctggtctcaaactcctgatctcaattgatcttcccaccttagccttctaaagtgctgggattataggcatgagccaccactcccggccttggtggttatgttttgaactcttcagaagtcttttgggaaagttttctactccacagtttagaaaaaatgtgtgttccctctccagaagctgcagcaaactctagcagaagtaaatgggtgtgtaggttgaaataatatctagaatatttactcttagaagagcagcagatctgctttcactgacttttgcttgatcccacatatcaagcttcagaatccaccactggtggaatatagagagaattttctcgcctttaacttccagagacagctagatggggcagtgagtccagtgagtcagcacagcagtatatcagagcagcggccttgtgttttcaggaagtgcttatctaggggcagagggtggagttcattgccctttgagggctttcctccctctgtctctgactcagacagaggattacacaggagaacccgaggtcgaggagaccttgaggacagtcaattgggaactttcattttatcctctgcttccaatgccatcctaacaggagccaaagcgtggggccagggtcgtggggaggacagcactgaagaagcctgcagtagttgagggagatctgcactgaattagaacaaaatttaggagacttctaatttgaagccagaggtgctgacttttgagtctttggagattgcctgttggaaatattcctgttgagggccaatgtcccaatgggctctgaagatgagaaggatccctgccctatgtggatgccactggatctggaatcatttctgtggctcagatatctgtacacattctgccaggacaggagcagccgtattgggaaaagaagggggacaataactagaaacgaactaagatgtggcccttgcttttgtacttttaatttaatgggaaaaaatagatacagatgttctaaatgcataaggattcagttgtacagaatttataaaaacacaaagttaagtctgactgaagtggtaaggtaaaggatgttgagttggtaaaggatgcattggaaaagagactcctaaactaggtctaaaagtggtggcat

SEQ ID NO: 40963 - DNA, 1181 bp, Homo sapiens
aagtgctgttttgttgcagtggtggtagtggatgtggcagcttgtctacctgtccctccaggctctcctgtgctctctagtgctctgccctgtagtgggacagcctcctgcgggtgtgtcctttctggtgacatctcagttcttattttaattctctctgctttgcatttgaattgttaacccacagacattaactgaagtcttcctctgtgctaggccggaaggacaaagtctagggactctgagatgtggcagctgcccccatgatgtgactcacctagtcgtggcccctcctaggtgatgttggtggccctgtcttcagggccagctctttgactctggattattgggaagagacatagtaggaaggctggtgttataccatcctgggttcctgagacagaagtgctggtgcttcaccttgagatggaaatgagacctgcctacttgtaatgtattttataaacagcgatcatggcctaaggagtagggtgcccatgtctcacacagccctctgtgcaagggccccacttgcataaggtcaccaccttctctctctaattccctcaaacacagcttgtttacagaaatggatgttacattgtttctggataatttttaacccagaattctgacttacctttatttgtgtagccttttccttatgcagaaatggggcagatggcaacagtctcctttcagatacatgaactctccttattcctgcttgtttgatttctgtatgttttttataaatgtttgggagtgggatgaacttcagagcatctagcaaatggagttggatgtattaaaacaatttttacaacactgtcaaaggaatttttaaaagttcaccgttgtaatattgtgcaattgtcttctccttgtttccttctaatctttttcttatgtgtgtacgttttacttttacaattataatatgcatatgttgtgtccaatgttttatttactaccatttcctaaaattgcatgaatttttttcttcctagctgtaattttaatagctggagaaaattttgcttatttgctgttccataatgtgtttgatcagcctgttggggacatcctaacagggtgtttccattgtttgctactatggctaatactactacatacagatcactgtgtatatacagcatttgttcttttgacttctgtcc

SEQ ID NO: 40964 - DNA, 838 bp, Homo sapiens
ggctatacggagcaagagtttcagatgaattgcttcctgggttaaaaatggttaccacccttgtgctggggtcccactttgacatctcagaactttatcatttctgctacttgtgcccaaaatgcaattgtgtggtcccaggcaaaactcattccaatcagattggaagagtttgactccagtaggttgcacagcaccaccctgcccctgtgcacaactttagcattttatgtaaagctctttagtgtctggacaaaagacagaaagagtgtttgggtttgaggcttcaaggactcccaagagccagtcagagtagtttaccaagcagtgggctgctgggaaagagcatggtctttggactcttgcacaactgggttcaaatcctggctctgctactcactttgcaatcatggtcaggttacctaatctttctgtctctgcattttcatttatataaaataggttttacaatacctaccttattataagcatgggaaaacccagatgaagggagtggcacatagtaaatggtagaaagaattaacaagaaagaaaccaagagagcaaatgtccttgtaattgttaaatcctgcatcctggagaaggtagtgctgcattaaatgtgtgattttggaatgtctgcagtccatctttctggccttgactgggggttttccaggccagttaccatgatacctatctgaataattgcagcttccatatcttaaaaacttcacttgatatctatccttgtcttggaggacttacaggttggtaatcaaataaatgtctttctcttcttgttaagtgaagaatggagctgaaatgaaggaagaaa

SEQ ID NO: 40965 - DNA, 605 bp, Homo sapiens
acccagcccagaatcaagcttttaagttaagcactgctgtctcttgtttttgtcaagccaccagaacctgctttttgcattccttcagctaactgggaagaacagtgagcatgtgtctattccctcagcccatggctttgggcttgagagaagttagagcctcctcttttaaattcctccccactttcagatcctctggctttccctttggtgctggccgagctataacccatgataggttcttgtgtaatattaatagagctttcctggctagctggtcactggcttaatattaactttagaccacagtagagataagcctgtttggctgctgacattggcagtaaggagccatgatccaggcagagggcaggcacttctcaggaacacaaaagaaaaatgacccctctgctgggtagtgtttggaataaggcatcacatgaagggaatggccacatttgtgccaaagggtagagttgccgcctgagaaagagcacctgcatttcagaggaggccctctgattgctctctctgatgtcagggtcttcttgttgcaaagcaatagaagtgcaaggtgctctgacagagtctgggaagactttctg

SEQ ID NO: 40966 - DNA, 707 bp, Homo sapiens
acagctataggacttcaaattaaggttgtgaaccacaaaactgcagtataggtgctagtgttagggcactcatttatttaattatgatctccctagcaaccaaagtgaagaaagaaacaggatcagacataagacactgtatcgatcagtcaaaaacaaaccctgtagggacgcacagttttcttgattctgagaattaagttatgcaaatggaggctggtgaaagaatacaggctgtccatttagcttatttaagaaggcattctattttcaaatgttttagcacaattattgtaaataaccaggtaatatcacaattccatgtgatgggaattgattcataaaatcagtttgataaggcctactttataactctgctatgtacttagaacttggaactgtatttatttaggcatagtcaatgattcagacctttacttcgttccaagagacctttctcctaatgaatcatggagatacagtcagcccttggtatccacagggaattggttccaagacctcccgaggataccagagtctgtggatgctcaagtcccttacataaaatggcatagtgtttgcatatgacctgtgtacatcatcctgtactttaaatcatctctagattgtttataatacccgatataatgtacatgctatgtaaatgattgttatactatattgtttatggaatgacaagaaaaaaa

SEQ ID NO: 40967 - DNA, 2431 bp, Homo sapiens
aataacacaattactctgaataacattaggaattacacaattgaactgaaagcaagtgcttgctaccctatcccccgaaccaaaaccatttgttttattctactttccattatgcttattattttaactcttctttctccttctttcttattaaacaggccctatgcagttataaacccatttatttctgcatccttcttaagctgttcactcttgtgtctcccaggttagcacaaaagtattaatagtgagctgggagacacattttacaaagttcatgtttaccttagcattatccagttcatagttcagctcattaactaagttctcttgggcaaattgttcaatatttctgaggctcagtttctacatctgtaaagtaagattagcggtctctacctcactgggtttctgtggatttaagacagaattaactttctgtcttaaatctcatttaactatgagagaattatgttgaaaacaccttccacagtattttacgtgtacgtagtgttcaatacatgttactttccattttgtttccatttccaaatgcatattttctctcatgttattaactaaaaatatactcttctggccttattaaaagtttgccatgtgtcccctgtaaattctgtattatctatgtctttttactctggcacttgcacatttgaaagtgaacagaatctataggccagcttcttccacgcctctcaccatttattccgtcatttaggaaaccgaatccaaactaccatagttagcctacaggctttcagagcctgacacggtaaccacaagcatcccttgaattgaatgtgtctattttcctgtctttgtttgctgaaggtctttgaaacaatatccctttggcttttctctttccctctcctgggaaactgtacactaggttctcagatctggcagcagtcagtggcttcgaccttggacacttacctcgtcatcgaagaccttagtcccgggtgtccttatcagttcagagtcagtgccagtaacccctggggaatcagccttcccagcgagccctcggagtttgtgcgacttccagaatatggtgagtcccagcccagccctggccccccaggcagtgggattgaggcacctggctgcctgtcacagactcctgggcacgttgacatgtcaggccaccatgcaagaggcaccttttagaggactaagaagaatgtttctgtaaagtatagctccaagcatcttgggcaaatgttaggtctgcacccatgcctacccctgcacctgccaagttccctggggaatgagtatgtccccaggaatggagagttacaggcaggagtcatgagtcctgtggatgttctctgcccctcttctgagacagtaatacaaagcctcctcccacccgggcacccctgccagccgtaaatgtacctccctgcatgagggactcacccacttcaaatgggggaaagaaaagcaacctggctgaaggacttcattacaacatgaggatttcatagtttcctcacccccaatcatcccagaatttcttttttcaacatgggtataattttatgtagatttgttgaaaaagtaactaagatacacatatagctagctaaatatgagtattttacaaataaggttcttattttgcccaaaacatcttcgtcccagggacattttgaaagagaaaacttggctatcctaaagaaatctccaaatggtgagattttgggcagtgcaagggagtggtctgtgtgtactggggagagcagtgggtggggggcagctgactgtactcgaaagaccatggacctgtgtgccttagggttaagggaattctggagtctccagaggggtttgggaaaccctctaaatcacctctgcccccacctgaatccagaaatgctctccagttccagtcccacagtcagcccggttttctcccagtgactttgactttgttcccacgagcctgtgactcttgcagaaacctacgccctgggtctctgtttcctcagaattcaagatggataagccgccttcagtctcagccaggctgtgctctgggaaacctgagggaactggctccagggtcagctgagccaagctgctcatgtgacccctctcctcccaggctgctcacttgctccagccccggatgatgctgtgtgttttgctatttgtgaaccttggtccccaacagatgacacaaatgcgtattgctgtgcttgctctgtgtgcgtgtgtgtgtgcacgcgtgcgtgaatcattgccaaggaattgacacatcacacaaggtaatactgccaaagaatctactcaggcatatattgtgggttaagctaaatccttcagtataccagataagctcattaatgcctgagaagagcgggataagaagataattttttctttttctttctttctt

SEQ ID NO: 40968 - DNA, 1859 bp, Homo sapiens
gtatttatcttcctgttcctggcttgtttcactaacataatgtccttcaggttcatccaccttgctgcaaatgacaaggtttcattctttatgtgaatttaagggttattttccttaagctagaataaagtattgccttatatacacaatggagaagggatttatttgtacagattatttattgattatttctttaagggatttatttgtaaagaccaaatatgtttggattttcagattgtctagcaatattatcctcctggataaccctgataccaatcaattaaccgtcttctaactctcctccttccctcccttaccttttctacacctattacctaagcatttgaggtacgccaaaggaaataaaaaagtactcctccaggaagcagagtacagacaaaagaggtaatgaatactgtaatgatctaagtgctatatattcctatgtgcaaactgctatggaactgtcacgtactagatgctatgaagttaataaaagaattgagtaaaggtccctgtctttgataacttatattctatttggagaaacatggggggtaaatcttggctaataactagcaaatataacatgttaggccaaggagtagagataattaagagaactagtcgagaaggcattggctattaaaaaatggacaggatttatgcaaactctcatgaaaggtgggacttcatgatcctacagtcaatctagctgttctgggctttgaaccccagcgaccccatccagaagaaaccaggagaagcacaaactggcgctaggttcgctaccatccacctgacccttgagcccggggaaacccacgggtgcagcaagccgggaaagctgcagacgaggcaggcggaagaggcgggacttcgcgggtgacgtcatcggggcgccggaggcccggggcgcctgggaatttgaagcaaacaggcagcgcgcgacaatggcggtcgctcgtgcagctttggggccattggtgacgggtctgtacgacgtgcaggctttcaagtttggggacttcgtgctgaagagcgggctttcctcccccatctacatcgatctgcggggcatcgtgtctcgaccgcgtcttctgagtcaggtgctggcctaggaagggaaaggacagggcttggtggcgggaaggaggacaaggaaatggaagagggtgacaggagttgggccgtgagtgagagcaaaagagccaagcaggcagaccgaccctactcttggtttggggagtaagcatgagaagcacagaggccaggggttgggctcctcgagagtcgtctgttctttcacccacacgcttagacacgtgttttgcaaaagtcgggaaacccagtttggaacgctttctggcactgaagcacacttgaatgaattctgtatatttaactctttaagaaaattagacttgcggccgggcgtggtgcctcatgagagtaataccagcactttgggatgcctaagtgggcagatcacctgagccccaggagttcgagaccagcctgggcaacatgacgagaccccgtctctacaaaaaattagctgggtgtggtggcgcacgcctgggacgctgaggtgggaggatcacctgagcctgggaggtcaaggctgcaatgagctgtcattgcgccactgcactccagcctgggcgacaagtgagaccctgccctcaaaaaacaaacaaatagaccgggaaaacgtgggtaggcagagaattcagtagctgggaaattactggtgagaaaaggaaaatagaacaaccagaactctgtgatgtatacaaaatttatcagagcccagagagacttcaaccatactcccctatgcagccccgggacaa

SEQ ID NO: 40969 - DNA, 1218 bp, Homo sapiens
cataaccatctggtgccccacatgccaggactgggattcagcagagaatggaacaccaactctgccctcagagcctgtttggggagatagacagagggcctagagccagcatgaagggacagcaggggaccctggcagcgggtgtggctgggttgggtctagactggtgctccaagttggtccagaacttggccaagttgggccacagggccaggacccagggaagcttcctcctgcttcagttgtgtgaataatggcccccaaatatgttcccactccaatccccagagtatcactgttactttctacagcaaaagagctttcacagatgagattaagttaaggattttgagatgagggattctcctggattgtctctgtgggccctaaatgtaatcaccaaggttcttctgagagggagcaagggagactggactacagaggaaggtggcagtgggacaacagaagccaggatgctggctgctgctctgaagatggggaggatgccaagagccaaggaatgcgaggaatgcagctctggaggctggaaaggccaggaagccgatgctccctgggagcctcagagggaatgcagccctgccgacacctccatgttagcccagtgaaaatgatttcaggcttctgacctccagagctgtaagaaaataaatccgtgttgctttatgtcactaaatctgcggtcatctgttacagccatagcagaaaacacggttgttctccctgagtcctagttagaagctgaattcctgcccagggacccgaaacccagaaatggatgatttaggagcagatgctgagaacagcagcagcagcagcagcagctaacactcaccagtgcttcctatatgagcaccttacacgtagaaatgggatgaatccgcacagtgacttatggggcaggcattattgtccttgttatataaggggtgaaaccaagacccagaaaggtgaagcaatggttgatggtcacacagctagtggcagcagagccaggactcaaacccagagagtctggctccagagtccatgatctcagtgccaaagtctactgcctcctatgagcacaggcagccaggactagaacctgcagggggatgccctggcccttccttgcagggggtcctctccatcgcctgcaagggtggagaggcgggggctgcccccactcagcaggtgtgaggggcaggaatatcactc

SEQ ID NO: 40970 - DNA, 856 bp, Homo sapiens
ctttacacatgggaggtaatttccctatcatcacccaaagtcagatttcatgtgtgttctagccagctctgtgtgagactctgggcccagtttctggaactctccatcaactgtcgtaggcagagcaggaagccaagtcagcagctgtgtgcttcagttcgctggtgtctgtgtggctgagggccgtgtgacactgccgagccagggcagcctgggatgagattacaaagtgcggaatgcgcagtggctggggagagctcggtgacagacctgcttggcgctcacatgctgggccaaccacagtcctctctggagcaccagagccagacccgggatgggctcactgtggccaaacacatacataagcttccaaggactgcggcctctgtctggggctttgaagatttcctggggggaaatccctcctaagaagcgctattcctggctctgctgacaagcaggttgggattacgtaacagaccccttgtcctcccatgccctcgtgtgtccccacctgacctgtgctgcctggtgttctcagggtgtctccaagcctggtccccacagcaatatgcccatcccactattttccctctcccctccatgtgctggtgttgattgtagaaaaagtaaagaacagagatttctgaaacgcacaggacgtgttcccaacttcctcacaagggatctcagcttgggtccaggcacctcagtagcaactaaataaatctccaagggcaagagagaagttgctcttgaaaagttttgttctcaccatgggtttcctgcgcttgtaaacagcattaccatgcctgggggagttatgcattggagaacttgccaactaagggctgtt

SEQ ID NO: 40971 - DNA, 5606 bp, Homo sapiens
tcgggtacactctagggagtgtggctgttggagagaacagcagacagacttgcctcttgctcttgtgggttttctttctttctttctttctttctttctcttttttgctgagcatatagtgctaaagttgaataagtgaaatatgtagttttccagcaaattaacagcttgttgaaaatactttctgtaaaaaatagtctctccctttgcaacaaattatctaagtgcttctacaactctaaaaatatgatccgtcttaaatccacttccctttgcaacttgccagccttaactggccaagggtcacaaaagcgccactcaatacacagagcactctcctgctgcctgtgattagctatttgcagatctgtcttccctaccatgttgtgaagtccaagggctgtatcatagatctctctgtgacttagtacaatctgtcgttgaatgaataaacgcatggatgggtagacagatgaatgatttaacagctatgctaaggtctcaggccaagtagatgaaaatatttcttaagacaaatattaaaaaataaatttataaccgtgaataagtagtggaggaaataaaacagtattgtaaaagagctgaagagtgaaggcatgtaaaaaaattacttgggaacgataacttgaaatatgggggccctgtcgttcacaaataaaactttggaaggaaacaccagtgctccccagcaagatctgcccaagccgccactcgaaagccccaagggaggatctgggaaaaagcaagagggacttggactcctactctgtgagtcagcaactaagaattagatggaaatggactcttatgttctactcaggccataagccccatgttctgatataaagtttgtattattcctgctacccacagagtctctggaatcagaaactcttaagacatttcaggcagcaggaaccgtggagatgatgcagcccaaacctctcatgtatggaagctggaggtcagggcaaggaaaaggtggcctgggaccactctgctgcacaggaccgggtgcaggctttcttgacccaccccagggctctttctaatccccacacctgatatgcacttctttctttggaaattggctctctgtccacagataaggtaaaaaacaaaaataaaaaaataaaaaggaatttggctctgtgactttggaaagagatcatcaggttgtatcgtggttgtaagggtctctgcccccaaaactatgagtgctggagggcaggactgtgttttgctcactattttatttccaaggtgcagcatgatccctgtcacacattaggctgttggtatatatctgttgaataagtgaatggatggagtcaaagtgcagttcttacacatgaagacttttatgtgtgactcctaaaattccattaactcctaccagattcgcccctcaaggtgcactccttagttctccagtaggaaacaagatgatgttgggaatgtcagaagtgtaaaggctattaaatactcggtcaggttaggtcacatctgcaattgctttaagtcgggccagctgtggagtgggtgggagcagactttatggcaacaacaaaaagagaaacatgtgctctgctagagaaaaatacaccacagcttctgaagtcaccctccacatgcagctccagtgctttccaactcattctgttcgctcccacactgaaaagaggcctttctgggtgcaacatgaggccagccccctctgcacgtgtggacccagggctccacggctgagctcaggaggggattctctcaccagcacttattacagagcaaagcaccacattgccaaactcccttgggaagacttggtgatttctcacagtgaagaatttggcacagcaagaaaaaatgtataaatccaacttgatttcacactcggagagatgtgtacaccagacttgattctacaagacatgaaattaaacataccctttccattttgctccctcctcagcctggccaaataccacagccattgcatctgttacatatgttccaacccaaatctgctcagaatgtccccacagatggtctgccagcactctaggggaggtaaaagccaacacccacacttagtcatgtgttgcatgactcatgaaatccaacacaaaccactcggacggtgaggtgacaaaaacacaagcggtctggagagagctgtgactggactctggccggatgcggagcaggtgaaaggagagcagagctgacgaaaacctctcctgctgccccggcacaccccacatggaccaggggcccgtgctggggctcaaagttgggaaaagtccaagtgcaaggagcttgaagcccagcccagcctttcccgttggccaggacaggagcaagtaagatgagtacttggaaggaaaaacccaaactgtttttcctactctactctcacacaccactcaacacaacacttctgacaccagatgtgaggatttttcccccacacaccatgcaattctctactggacactggttggttatcttctaattcagcacaattctgacactatctacctggacatagtgtcaggtcccacaggtgaagggctcagcccacaagactgcccccaccgcagatgccaatcacaagtactaggttgtcatctatacttccaactgatcggctataaattcaaattcccatgacccctctccttctttcatcaatttgctagaatggctcacagaactcagggacacagtttgtttacacttacccacatatgaataagagataaaggctgcagatgaacagctagatgaagagaaacagggcaaggtgtgtgaggagggtgcagaacttccctgtcctctctggtgccactctccaggaacctgtcccacagctttcccaaggccctccaaatccaggccttctgggttttcatggaggcattgttacatgggcatgactggtcacatctctggctactggtgatccactcaaccttcagcccctctctacctccccagaggtcatggagtggggctgaaagttccaaccctctaatcacatggctggttcccctggcaaccagccaccatcctgaggctgtccaggagcaccccccaagagtcacctcattagaacaaaagatgttcctattacccaggaaactacaatggtcttggaaactctgtgtcgggaaccagcgttaaagaccaaatataataacaaaagattctcctagtgtccttatctataaaggttttaggggctttatattaggaactaggggcagagacctatatatatatcttatcgtaccacagtatcacaggttctaatcaacacaggaaaccaacatacccctgacatggctttgaccaactgaacttgcttcaaatatcttgcagttttacatttctatatttaatatatatattttaaatttcacctgaagggaggggtggaagaagggaattatcaagggtcactttttggagtaatgaacatgttcagtatctctatggtggcgacggtttcacaggtgtatacctgtgccaacactcatattatacactttaaatcagtacagtttgctgtatgttaattatatgtcaataaggctttacaattcttttccaatttaaaaaaaaaaaaaaaagagacagagtctcactctgtcacccaggctagagcacagtgatacaatcatagctcactgcagccttgaactcccgggctcaggcgatcctcctgccccagcctcccaagtagcatgcccagctaattttcacaaaatttttggtctcgctatgttgaccaagctgatttcaaactcctggcctcaagtgatcctcccagcttagcctcccaaagcaccggaattacaggtgtgagccaccacgcctggtcataatcactcatttttaaaagtgctgagtttcaaagttcattcataagtcatcagcttcatttcacaacatgtttacttacaggaaccagtttaactcgcagaatcaagcgacagtgctaggttcccacagttcctctgggaattcgtgccaggttccaaaagcagctccagcccagaacaactgttccctgtactcacccctgctccccactccccatcagcagggagggatccacactcctctcctggcctctgcctaccacacagggaatgctttcccttgtcactccttgaccctgggtacctggatttccactaggaaaatgaatgtagatatatgagaaatcctgctcagggctaagcacttatgagatcccatgcatggaaccaataagaaagcctcctgctccctggttttcagcggtcccagcagaagcacagacacgcagaacccaccagtcacatagaagctggctgaccagtgtgccttccctgctgctgcaaggctgcccagccaggtctatggagctgtgcgccatgatgccctctgatatcaaagccgccaggagcagggggcctgggccttcaccagccaatgctcttggggagctccagagctctgaattcaggaggtggctgacaatgaaatgctgacaagtggcccctccgcagaagccttaaagagggacctcaccccactcaacagagcccagatgagctgctcttcagccatttcttcccaaaggccctgactcagcaggaggcaagcggtggcctccctgcctgtgagagtgggtccagcagcagtgcaccttctgccctgtggggtctcccagctctggcatcctcagagggaaggggagagtggcaaggcaggggttctggctcttgatttggttctcttagttcagtgtccagagattgagacccaagcggctcacagctcacaccagctcaccccaggaaagagggtgacattcacaggcctgcccctccttcccatgcaggctcacatcccaaaccctctctgggtgtcgcacttcagcagacctattgtgcccacataaccagcttacgtgttccccctcttcctgaagtgtaaagcaaatcactcaccgtggaatctgaaaggcactacggtgtaaagttaattaggaaaccctgtctcactgcactctgggttctgaagtgcctatgggatctggtgaggctctaagggccagagaacagaaaagaggatgttagtatgtgggcaatggggtaggagagaaggaagtcttcagtttctcacaataggaagttccaggagtatctgaatctgtgagagcaagaggacccttggctacaacaggagatgggagcagtgggaagggggaagaaagggggtaaaaacaagccaaaaatcctcactgctgcccacccggttgccttcaggacactgaggctccagggaactaagcgcagggctggctacaccccaagccccagggttccccctagctgggcagtactttgcaactcaaaacagggccacattggaagatggacaaggccaacattgggaaaggcccagctccaaacactcatttgtaatcagtcactgctgggaaggcaagatgacttttctcacagatgtgtgatgccgtactgattcgttaggttcccaggttagccagaaaaacctgttttacctaagtt

SEQ ID NO: 40972 - DNA, 6320 bp, Homo sapiens
tttttagtttgtttttcctacttccatccactgtttgcaatgaaatatcttttttaaaaaaatctgttctgtggctaaacttaatgaggccaaaagtgtagcatttctttccttgggaaaaagaaatcttggcctatgactcaggatacagacattcctcttgagctcaaatcccagcaatgtgcaggatgacatttctaatctgtactctgtgacacagtccaatctgaattatagaacattttggaatgaagaaggttgaaccatatgaattttccatttttgcaggaaaaacatcaataggcaaataacaaatatcatcaataaatatcaataattttatatggttcaatctaatgtttccaaacaggttgttttatttcccttctaatggatctgcaggctcaaatcaaatcccagaggatagagacttctcatctatctttaattttctccaccatacctgccactgagcatttattggacagccaataaatgctttctgaatggaaaagtattaccaagtaatagtacttctggttctgctttaatgaatttgcatgaagcactgtaaattccatggaggcagcctggtggatgggagggtggaagtcccatccaggatgggacaagcttggggccagaagaacctggtattcctgaacttcagaagcataaaggcacctgtgagaatgaagcctttgttcccagatgtttaacaagcatctgttatgtgcccagcagtgtctggtgctgggaatatagtcataagaaaaaagacatagtccctgccttcagggagtttactatctcaaagggaggcaggcattccaggaatgcttcaaataaataaaaataagatgataactaggacagaagtgattaagggcttgcctggagccagggcatcctgacctactcagggaagtccaccagggagggcttctctgacaaacagacagtgaagctgaaatctgaaacacaaacaggcacaggttagacattaaaaggaaaacagattccgggggaggaagcaggaatggacaagtggagcacagggacttccggggcagggaagctactctgtgtgatatttaatggtggctacctgttgtcgtacatttgttaaaacccacagaactgtacaaaccaagagtgaaccctaatgtgaactatggactctggttgataatgatgtgtcaacactgactgggtcactgattgtaacaaatataccacactgatgtggaatgctgatggtgggggaggttgtgtgcgcagtggtcagagggaagttgtgggaattctttattttctattcatttttgctatgaacctaaaactgctataaaaaataaaatctactgaaagaaagaaagaaagaaggaaacaaagaaagaaagaaggaaggaaggaaggaaagagagagagaaagaagggaaggatgggaagggagggagggagaggagggaaggaaggagggaggcgaggaaggggagggaggggagggagcggggggagggagggaggaaggaaggaaggaaagaaggaaggaaagagagagagagaagggaaggatggggagggagggagggagggaaggacggacaggaggaaggggagggaggggagggaggaaagaaggaaggaaggaagcaagcaagcaaaccaggaatacagggaagtagtatcaaagaaaaccaggaatacaggaatggagtatccaaacagaggaaacaacacatgcaaaggccttgcctgagtcagagtaacgcactccaggtcactgtggctggaatgcagaggccacaggtagaggccacaggcagagagccttgcaacaggagcccaagagcaaattcctgtctcctttcatctttgctcagtggacattccaagcaagaaggagcctctgacttaaaataaaaaattgacattctcacctggtatgaaaacagagccccagccatcaaaggggcctcctaccctttccccaggatgattattccctgccttggtcagtgaagggagccaccagcacgtgtagacacctcctaagcacaggtgcaaggcaggcacgtgacttgtttacactagagggcaaaaagaaacgcaaactctcccacgtgccctgttcacgatactgagttatgactcagccagttcccaccgctcaacccagaacagcagctgtcggtggggctgcggagcccacaacacagctcacagcagaaggcagagccaggaaaccacggagtcctgcacttgggatgtcgcctcagagaccaaaacagtagaaggattcagaagtgcacatgaaaccactgccgtctgccacatagaaagccaaggggaagctgcgccacacctgtctgacaacaaccctacagggcagagggtctgcacacctgcatgcgcaatgcccagagaaatccaatactttaatggtgcttccccaaagacacggcagcacaggaagagcaggcagcctggcgctggatcaagccccggaaacctgtggtgcgatctgctagcagaagcagctcacacatgctgagacagacaacgcagacagctgggaagcagaacatgtggcgggtccctctcttcaggtggtgcagaggtttgaggagtggggggatgccttccttgaggaaagaaaggcaatttcctgtatttctcaactcatgcttggaaaagtgacacaagtctgaggtctaaaagaaatcaggcaataagtcaaaagaaagcgagtcaattctgcaggaactgggagctgggagggagcaagaggaaaccctgacaaagttgtgcctgactctgggactggggaattttccacattttacaggtgtctgcagcagcctctactgggtctgaggcttaagcctgagccagaagagacaaaaaagcaaaatcaaaggccttgagcaaaggagacagggctgtgaccaagtcctctgcgagaagtggcactggctggcacagatggaaggcaacctggagcacctccctccagtcccatgcctccctgcatctcccagatgtgctctctgaggcctggagaagtcaactggcttccatggaggcagccgataacagaagaggcagagcttgagtaaggaaaacatgactctaaattcagtgccttcctaggtttggaatgtattattaaaaaaaaaaaaattcaacaggctgtgtgcagtggctcacacctataatcccagcattttgggaggctgaggtgggcagatcacttgagcccagaagttcaagaccagcctggccaacatggacaaaccatgtctttactaaaaatacaaaaaaattagctgggcaaggttgcagtgagccatgataacaccacagcactccagcctgggcgatagaatgagatctcctttcaaaaaaaaaagaaaaagaaaaaaaaattgttttaaataaataaatgcagtgccccttactcaatagtgcattattgttacttcccagagcacacagtcactgagtaataaaaagggcacagaatttcaaatcaacagaactggttcacattctggttctactccttactaaatgcaattagtccctgtgatactcagtttccacccctgtaaaatgggaacaacccttatcagagtcctaccaatatactgtaggattctggtaaggatcctccaacaagaatcacggctcctctgaggctgtggtcttcattttagataagatattctggccagggaagaataaaggtctcaattcctgccaaaaaaattttattcaatacataaatttaccttgtttgctttaagacttactcatccaactatttttgagaggaaataaatgctttaaaaattgaacacaggcaaaattaaaagaatcaggattaaaacagaaactctgtctaaagaatacaaaggataagtgccagggctctagcagtggagacaaacagggaaacgcattgggttgcactgatttattttctggctgacgaaaaaaagcagcacatagaatactgtgcagccagcatgtacccagccaagctcaaatgtacaagtaacttctttaacctgagagccatgaagaagagcaaagtgataactgacaacttgggacccagagcttccaggcaactgctcaccctctgtcctccctaggccaagggcgtgccctgttttgagagaagaggaaagcagccatatttccagtctgaaccacacatcacacttccgcctgcacaatttcagaacaaacaacttagagtcaacttctagaaggtcctggcagagaaaccattattctgaccataaaaaagtataaacaggttcaatcataggctctgggtaaagataagaaattacaggcagtggcattctccaactccaacccagccaggaacagtgcattagaaaaaatgcccgccttgacgacagaagcatcccttagctgtggatgctgttagatggcctctcacagcaatgtgacctgcaggggataaataaagcaactcaaaacctccattcatagaaacagggtccttatcataaatggaatgaatcctaaatagaaacaggtagtttccttctttttgcaaagaacatctttcaagagcaggccacagaggtggatttaaagtcagacatgtgaatattccatacccctaaatcccacaagttgataactaacagtccattcagggaaacaagaatgagaataaaaccagagtgagaataaaaccaggacaaagagctccctgtggcgctgggagataggcctgttatcagctccatctccagggcacagggtcaggggaagtagagcgtgcagcgctgccggggaattgcctggccaactccagcccctatgacgcacagagccaactgcacaagattccaggccttctccctctgttccactgtttgcaggattcagtggaagggcctttaatctggccagatcaggaggagacacagcattcagtaaacaaagtaagggatacttaggacttacaaatgatagccaagatctgcttcaaatatgggtgtggttgggaatacaaatgcaacaagactggtcatgagttagtaatcattaaagacgaacaatgagtacatggggtttcatttcactattctttattctgaaactgttccagaataaaaaaaaaaaaaaagaaatcatacttattcactgtggaaatttaggtaaatattaaacaaaaagccaaagaagaaaataagcctatcacctatcagaaaaatataatcttgtcacctgagacaaccactgttaccattttgttccatttccaatcttttccacattttttctttcttttgtttgcaaaacagaagtatactgtccatattgttttataacctgcttcccatgccaatcttaatttatcttacatattattctggaaattcttaaaacataaaacattgggttgtatcttccctaaggacaatttttcctagaagagggagccaagagagagcaaagttactattaaagccatctgatactaataccttacatattattcaagtcattaaaatttttttttttttgagacagagtcttgctctgttgcccaggctggagtgcagtggcatgatctcggttcactgaaagctccgcctccggggttcacaccattctcctgcctcagcctcccgagtagctgggactacaggcgcctgccaccacgcccggctaattttttgtatttttagtagagacggggtttcaccgcgttagccaggatggtctcgatctcctgacctcatgatctgcccgcctcagcctctcaaagtgctaggattacaggcgtgagccaccgcgcccagcctcaagtcattaaatattttaagtagtatgactgttgcgtagtctttcatccaaaagtagtccataaactacttccaattttttgtcaccataaggctgtggtgagccaggaaggatgacatgttttataagtaggtgatgtcaagtgagaaataaattgcttagtatgcacctgaacataaactgacagcacaatggaaaagaaaaggcaaagagagatgctggaggcacattggctgcataattctgagcaatcattaactttccaggtattcccttttgcaaaggtcgtggtgaggaataaagagcaaatttcaacaggtataagcctgaaacttgctcacaaagtgcctctccgtcaacaataattcaccaggtccagacaatgaactgagaaaatctgctagcatcgcctctgaaatgcttgagtcttgaaatactgtgttttcaaagggttgaag

SEQ ID NO: 40973 - DNA, 3100 bp, Homo sapiens
ttaagcaactctaaggcttgcagggccccatggtcacaaaacaaaatatctccactctaaaagtttgtccttgcagaatgctacagactcaaatggaatttgctgacaggaaaaaacactttttcctaaaagtggcgtgtttcctgagcaacttgcattcactaaggagtaaatctaccagcatcctcctagaataaaccacagcattattcacaagagccaaaagttgaagacaacctaaatgttcactgacaaatgaataaacaaaatgtgatacacccatacaatgaaatattactcagccaaaaaaggaatgaagtgctgacacatgccaaaatatgtgtgaaacttgaaaacattacacttagtgaaacaagtcaaacttcaaaggacaaatattggatgattccacttatggtaggtatctggactagtcaagttcagagtcggaaagtagagtaggcagccactacaccctgaatgactgtaatttctgccatcagttgctccctgatttaaacaaaatttaaaaacaaaaataaatgaaaaataaaaaataaagtagaatgctggttaccaggaaccaagggaaagagagaatgaggagttaatgtttaatgggtatagattttctgtttaggacgacgaaaatgttccggaaatagatactgctgatgtttatacaatattgtgaatttaatgctgctgaactgtacacttgaaaacgcttaaatggtaaatgttatgtatatttcaccacaattgtttaaaaatagcaaagatcttcctctgtccacaggagcctgtccacagacacatcaataagaatatactctgcttcctgaggtctgagccttgcctccccatcaccatctcgtggctctgatctcagcctggcctgactcattgtcccattattaacaagtcccacctcccccatgggccttcctgatcccagagcatccagccctttctgtgggcaactcaccgggccggaggttcacggcaatctcctgtggtgtcatctgaatgacgtcccagcctgcagagcccgaacccttgctgctgaggggcaggctcctcaggacatggaagctgctggctgggctctctatctcacctccacagccatttttgacaaggtttgccctcagatcacaccgagaggtgatggaccgtgggcttccgaagtcctaggcagggaaaaagaggaagagagcaggaggtggtcagggtgtctcccgaaaacatcgcatgtcgtggctgcgtctccatctggttgaccttaaattctctactttccattttcattgtctgaaaatggaggaaatggtaatccctatcccagatgcttcaccaagtattgtaaggattaactgagctgctggacatgacagcattttgtaaactgtaaacacataataaaaatgttcggttttgttgttattttgatggttaaaatgctcctaactgcctacatgattagcaagagaaacagaaatgatcagaagttgtatagctaaaattttttaaaagttgttatatattgctgggcatggtggctcatgcctgtaatcccagctatttgggagactgaggtgggaggatcgcttgagatcaagagtttgagaccagcctgggcaacataatgagacctcctctctaaaaataaataaataagtagatgaaataatatatagttaaataaataagatgacatataagtagctgaaaagtcttcccttgggcattcaagagttaacctttaagttgttcacttatcatctttcacaggcattggatgctggataatcattcaggagaacaatgtggcagtacaggtcatatccactgacccagtgctctactccaagaaacttattacaagaaaatcatctaaagagaaaggagaaactctatgtgatatatacggcagtattacttataatataatctttaaaacttgcaaacctaaatccttaaaccataagaataacatagcatatcacttcaatagatgacagccattacaaataattatgggaattaagaagaaatttaaaatatttacactaaggaggaaaaaaaaacccaaaatatagaattgtatttattaggatttgaaagaacaattttaaatgaggtgttatagtaaagtgacaaaaacatttttgtttttatctttgttgtttgtatgataacgacacattgataagaaaaatctttctttgggtttgggagaaagctggacatcagaacaactcaacctcatttgggacaccagaaggttaaggtattaactttaaaatgaaacaatatactttattataaatcatgaagcctccctggtcatttccggcaaaggggtttcaccttttccctggtgaatgtgaaaaacaagattccccccactctggcaggctggaagccaatgctgtcctatgagtctttctggaggagttaggacactggtcccttcctcttccctctggaacactttgccagaagcctcatgtgagtcagcatcccttgaccactttgttagaagccagactgctggcagaggcacaaaaatcagaggaatgcaccctccctcaaggtctcagatgtcctggaactacccaatgccctttagaatccttataaaattcaagatcaagaagtcagcctggtgtggtggctcacacctgtaatcccagcactttgagagacttgaggcaggaggatcatttgggctgggagttcaacgctgcagtgaactgcgattgtgccactgcactcctgcctgggcgacagagcaagagcctgtctcagaaaaacaaaaaacaaacacaaaaaagaacaagaagtcaagaagacgctgcagtgtttttaaataagtaaagccagatgtattgtcctaagcctacggtatgtttgtttatattctgggttgtttttttttaataacgattttttatttgtgcattaaatccccgaggatcttgcctgtcaacaacctccaggactacatcaaaggtataagtggctccataaacacttgttgtgcaacaaggttagaaaaatgagttttctagccagccatggtggctcatgccag

SEQ ID NO: 40974 - DNA, 3331 bp, Homo sapiens
agtgctaggattacaggcgtgagctaccacacctggctcacttagtgatttttaaataggcacttaagcctttaaaaacaaaagtgtgtgcaggaaaagagttgcaaaatgtcagtcccattttttggtcaaatccccgtacctgtcagcaatcactatctgcaggggaaaaaaaataaatctagaatgaaagtaactttgctcctcctctcctcaaccttatcaaatacaaactcaggctcgttgtggcatatccttttctttgatatataaaatcattttcataaaatcatgagattatagcaccttggggctaggattgttttaagatgagctagtcaagttgcctctttttatagatgaaaatgtaagataatgagagtatgtgacttgaaacaaggagccctatctacaaaaaagaggtcagacggggtcctgaccagcaagtgcccacatgggatacctgcctggtggtccctctgccatcttggatgtagggctggtgtgacctgctgagctctagggtcctctggagatctgtaacagcccctttatcagaaaggaatttgaggtcaaaggcctcacgtaggactctgatcaaagccacataatttttttttttagacagagtcttgctttgttgcccaagctggactgcaggggcatgatcttggctcactgcaaccttgcttcccaagttcaagtgattctcctgcctcagcctcctgaatagctgagattacaggcatatgccatcacgcctggctaatttttgtatttttaatagagatagggtttcagcatgttggacaggctggtcttctgacttcgactcctgacttcaagtgatctgcccacttcagcctcccaaagtgctgggattatagacgtgagccaccgtatccagcttcaaagccacatacatttgcaaacaacactttataattaccagagcctcatcatgagctctgggaacttgggctggaggtccagggctcaggacaataagagctcctcaattctgatgcagatcagactgagctctggtcttctggtccaccagcctaaaagcccttacttaattggacacaataccaaagaaactcaaaggatgtgatagtcacctggtatgaaaacatcatgaacaactgtaaaacaatttgtcatatagcattactaactgtttctgttattattaaatattcacatggaaaagtaaagtcgtttgtactcaaaatgattgccctaaaattcagttgctgttgggacacattcaaattcaagaaactctgcacttaacacaccctaaacgctgagcactggactggggggatgctagaaatgcacaggtgaatgacctaccagcccttgatgtccaggaactcacagtgtgccgggtaccaggtaccagacaggtactccaggatccaaaaccacaggctgtgtgctggtatgtgtaatgtcagactcactccctttggcatctctcctctctccacctattaatatttcagagtttggactttgctggatgagtcatttggcaccaataagcattttgaaaaggaaggaagcaatgaataaaaaactaaacacacggagttcacaaatgtcagtgttaggtctaggtcatggaaacaggaactagcagcccagatgatagccacatctcatcttctttgctgtttgcatagtgactattcccagctcggtggcaactccatgtatctcttttgcctcacgtctctgaagcccagtgtttactgcaaactgtaatctaaaaatatgttcttccaaaattcactgactcacccctgtgtttcatcaatcattcaaggagccaccgcatccggttgatcactcctttcaagatgcaagaaatgtttatcctaagccaacccttcctgtctgcaacctctagccccaacaacccaagccaggccctctggtctaaattcctgccatagcctcctggctggcctccttccattcagcctctctccacttctgtacaccccatgggtccaaggtcagacaactactactaaaacatacatctgcagttggaatttcctgatccaaaatattcagtaggataacagaagtgaatacagaagctgaaatggcctttctgccttgaagatggcaatgccctggaatgcttctccccacaccctgaaccaggccctcacatttgtcacacaatggacaaaagagtcccagtatagactccagcaactaaatagccatatgtctaaatgttaccatgaaatgcaaatatgccctaggaaggttctatcccagcagttctcattcaagactgcctttatgaacatcagacatctgcacaacactcaacaataccagccttacagatctgacttctatttttaaaacaccaattcatataatggagtgctagacagctataaagaaagaatgagcatgctctctgtattgacaggaagcttaccccaatacatcgctaagttaaaaataaaaagcaagatacatactgtgttttgtgctgcctctgaataaaaatgaaagagggatattcgtaacatatccatagaaaccctcaggatacataagaaagcttattagctttataataggaactatataggcacaatttatttagaaaagggggtcacagaaatatcccacactgatgggcaacaagaaagagaggcttctcgcttgatatgagttatacttttaaaaattatgggactatattacctatcaaaaggtatttttttaaagaggcaattgattacctctatgttcttcttccaaaatcacctaactctgtctaatcacgggaaaaaatcagaaaatcccaagagggggatgatctacaaaatatctgaccagtgcttcttaaaactgtcaaggtcataaaaaacaaggaaaagactgagaaactgtcacagccatgggaacccaaggtgacatgacaactcaatgtattgtggtatcttggatgggatcctagaacagaaaaaggacttaggtaaacactaaagaaatctaaactgatggactttagttaataataacatatcaatatggttcattaattataataaaggtaccatactaatgtaagatgttaataataggcaaaactgggtgtgaggtagatgggaactctttgcactatcttctcaatttttctggaaatctaaaactgctctaaattctttgaaggcttttttaagggccaggcacactggctcacttctgtgatcccaacaatttgcaaggaccaggtgggaggagcagttgagcccaggagttcaagctacagtgggccatgatcacg

SEQ ID NO: 40975 - DNA, 2861 bp, Homo sapiens
ttctgtttgtcagaattacagaatgtcaagctggaaaggaacttaaaagccatctcctttggcagtttctgaacttttggatttcaaagaaaactaagatttaaaaacaaaacaaaagaaacaaacagaaaaagagaaggggagcttaacatagggttgtcagattttcttattttgccaaaattaaaaactactaatattattaagaagtattaaaagaaaatgttcccaccaaaaaaagaaaaagtgcctaatttcaaactaaaggaaagtccttgtggagcaggggagcgttgacaacaatacattcctgtgtgatgcaggctacatcttcctgctcctcgctttccctagggacccatgaaaatatccgtgatgggcactggctgccggatgggtgtttggaatccactcatctactctccaagctctggagtgattattttcccatttaaaacaaaaaccaaaaaccttgctacagtattaagtttgaattagggtctgaacgaagttattgtttgctcagacccctcctccgctcttaaacctaaacctccactgccttcatgtaaatgagacaccgtgggggaacagtcctcccttcgggcagccaggcaaccacttggctcacaagagcaatcaagtatctccggcttgaaagttaatagagcactattatttcctaaaagaaaggagaaaatccgcatcccaaacaagtgcatccttcctcgagggcctccaaactaccacgtccaatcatctcccaactctgaaaagttagagcaggtaaccgagggatccttgcaacgctgccagcccaccgcagcgtcgggctaaggcaatctccacagcccctgtcctctgctccagaatcctccacagttaggggagtgtgaggctccgagcgtgtgcaaatcgcgggataaagtcgggcagaaggaatttaatagggaagtcccaggtggggctgtggtttgggacgcgggtgccccctcgggtttgcggtggcctaggcgaggaggaagcaggcggggggcggggagggtgggggctgcatcttcaaaggcaggcggctagcctaggcgcagcgaactccaggattcgctgtgggccctgtgcacccgctgttccaggaggcgagccctccggagtggaggtggccccgggctttggctggggtttcgagactcccttgcttctccgggaacagggcaccgacggcatccccccagcagcccgcccgctcccggccggccacaaggaccgctttgtgcccgccaacggagagcccgggccccaaggcagggctggcggcggtcctccccgtgccctgggcgcgggccctggcgggctaggtcagcaggccggccagcctgtttacacaggaagggaagctcctcctcagcccgggagggaacaggagactcacgacagcccggcggggctgcgcgcggggagcgccccgcggggctgtcccccagcgactggcccaccagggagtgccccgaaggcgccctccgccctcaggcaccgcctgcgctccccgcccctccgagacgcccgcccgcggctgagtgtgcgacaaagtttctctgggcgccgtgggcggcgcggcttacctgcgagccggggcaggagcgcgcagagccccaggaggcaggcgtacagcggcgccggggcccgcggcatggtggggcgcctccctcagcggcggcgcggtcgctgcactccgcgggggccggcggccggggctggggccggagcgcgggggccgagggccgggggccgcagccgcatgccccgcgcgcagctccggctcacggcgcccgcgctggcccgcgccccgccgccaccatccgtcccgcagcactcacggccgagtcccgggaccgcggctgccctggctggccggccgggactcctagtgtgtcgccgctcgggacggccccagcgggctgctccgggtaggggaggggctggctccgctcggcggccgcgacttgggctccgagacgcgcccagcgccgagactcccccgcgcgccggcacactctgcccctggcctccgccccttcccttcctccctccggcccgccaggctccactttcctcctctcctttctcctccccttctctcccctgccaggccctcgcccggccgccacacggtcagcttacggtgaggcggggcggggcgagctccgggccgggccagctccgccctgtgcggggaccggcccgggacgcggaggccctacgggcccaggtggaagtcgcttgcgactcacttggggcgtggggggctcgaaaccactgagtagagcccgctcccgttgcttagccgcccgtcgccacgggaaaggggcggggcacgctgtattaggcgagccgagattacttgggccaaaggcggttgctagactgcgagagggagagcaggtacgggggtcgtgccggtaccgcctcatcctcccaaagcctcactgccggcggcctgagatgggacgtagacgcccgcgcgtggaaccgcaaagcgacttctggatgagcaagggagggcgtggtggggcgtggaggcacaagtaaaacctacatttctttttcttttcttttttttttttttttgagacagcgtcttgctctcactcaggctggagtgcactggcccagtcttggctcactgcagcctggacctcctgggctcaaaggttcctccaccttagcctcctgagtaactgggactacaggcgcgcgccaccacacccggacaatttttacatgttttgtagagatgggggtctcgctgtgttgctcaggttagtcttgaactcctgggctcaagcattcctcctgtgtctgcc

SEQ ID NO: 40976 - DNA, 632 bp, Homo sapiens
ggcgtgaaccaccatgtcaggcatgtagttgtaattattatatgaccaatgcaattcatttagaagttctctatagatgaagaatgtcccctggggaaactccttccatcacaaagacatatggctccccttctttaatgtaaatcaaacctttaacctgataatggccctgctgacacccttccatgagaagggggggagctgtaggtgacatcttctggggcacagtcctggtgtgtacccaggttttcgtaacagaatgctcaccctagagtctgtgtaggggatttcggacatatctagatgtgtgctaatcggcaccttgcccaagaacagaactttgaaccctcgggtggtgcagctcatggaacgctacttcactgaagcagttgcagcctggccatttccctggatcagcagttcctgaatttatgtgatcacagaacattttcaacacaacaataagatgacagaacaccatgagctataatgcatgcttgaatgaaagcaatgaaaaatggcctcacagacaaattctctgctgcaaggaatgataaaaatgtgatacagggttaatgtacgagatacattgcataaaagatcccgaataagaaaaggtacagagtgtagag

SEQ ID NO: 40977 - DNA, 656 bp, Homo sapiens
tcctgggcctgagccctggatgccttgcatttccatcttaggtctgtgcctaactatatgggtaggatcctcccagagggctgccctcttacctctaaagatccgcctctgagatcccaagagctggcagacctcagcagaggacttgcaggagttgacacatttctgcatcctatcagccaggtcaaatagcgtcacattggaggccagggaaaaggttgtttgcagtgagatcaccaccgcgttggactccctataggcaaagtttgtgggtttttaacagccctgaaatgacacgtgggtcccaaggcttttggaaatgaatgtcatcgccattcaccagtgacgggatgggagagcatgaaggtcagtgaccttggccctggattgccccatggctgggtgaaaacagcccggttttgttgctatcacccatgttagaacagcctcccctttgtacagactagttcacaagcaaatataattctgttacttacctagaggcgtgaactgtagatcggatgtaactaggtaacgctgaaaaacacatatttaactgaaaggaagaacaagcctgtcgttaacagtgagttagacaaaagccttggacctagaaccagtttcctattttcaggataaaacaggcattttccagc

SEQ ID NO: 40978 - DNA, 4142 bp, Homo sapiens
tgggaatactgttgaatatgaaattgagtttttacaggagaacttgatttttaaaaatccaaactttttcttatttaactctaagaagcacctctaggttggaggaagcaagctaattcacgtgccagaaagtctgcatgagatgagaaacttaaatgaattgtcaattatgcagacaaaaaactcaactttcagggaaactccaaatcaatgtccagtgttgcaagcaacccagcttatttgaatagcccggacagagcatatgccctgtgtcactcacaggaaggcaaaggctaacaccaccacgttgctgactttgttcaaagcactttccatttatttttactttcattttgtcacatcatcactaggaggctagaaggaacagggatcatcactttcatttcacagatggagaaagtgagcgcaaagagacagcagtcccaaggtcataatggtattatggttagaattccactcagtatgtggcatatttttccagatcataagaaagaactggacacaaaggtagcagggagaagaggtcagttccttctctctgcgtgggacaggcggtggctaccacggagcaacagttcattgggaaaggaaaggggagggaggaggctcagggatggtcctgtatcagcctgtgccttgcaggggttcaaccatgcaaccccaaccgcgttcctttgcttttaagtcgaaccagtagagcgttttgtttcaaactacgtacatcctttgtcctttacaatatcccgtcctagaaccccttaaaaatcagttatttagatgagaaagtcgagccctgtacctggagaggccagttctgtatagcggaaaaaatgaaactggggaccggctggccagatatcggaggtgggagagatgctttgcagtctttttccctttcctttccattttttttaaagtggggtggaagagatacagggtaccccataggaaataagttttcttccaaagggttggaggagaacgggatagtcacacccctcagtccagccaactgcgaaagcgtccctccctacccgccgaccctcagggtcccgcacacgccgggcgaggagcccccaccctgggtcgcgccgcgcggaggggcctacggctggggatgcagcccggggcgcgcccacgcccccagcacagactggccaggcgccaggttcccggctctcactcacccgcgctcccgcctctgggggcccggccggagggtccccgctgtgtcgcggcgcctggctcaggggccctgtagctggggccgggggtcgcgggcccgcggcgctcccggggcggcgtgggcggcggctcgcgctccgggcggcgctccagctgcagctccagccccgctcccgcgaggggcgccaggctcagcgcgcggcgagccggggaaggcggcgggtcccgcgtcccgggggccgccggcggcagcagcagcagcggcagcaacagcagcaggagcggcggcggccaccgcgaggcgcgcggcgaggccatggtgacggcgcccgcccgcgctcacatgcccggcgcgcggggcgagggcagcgggcagcgggcagcgggcggcgggggccgcgcggggccggggaagtgagcggagtgaggctgcgagcgcgctccccgcctcaaaagttatcgggagccgcgggagggctgccgggggccgggctggctgggcggaggcggcccgcggcgccgctacatgctaattagcccgggcgggtcgctggctggcgggcggctcctcctcagttgacatcaccggccccgcgcggcgggcccggaggcggggagagggcaggaagggggctggggccgggcgcctggagagcggcccggcccgggacagcgggatgaggtcagcggagccacggtgctgcaacttttgtcacacacatgctccagagtcttctgaatcgggcaccacctacccaactccttaaacgcacaagaagtaggtgaaaagcaggtcctgggtaatgtgattagcaccagactagattatcccaagtgctttgataggagagagaaagggaacggtcccctggtacccagcccgcgctgtcaccgccgttattgatttgaagtgtccccactcccacccccacctccccttcttcaggccccagggctggtgatgagctcgtgtttgccaaacctaacacctcaccctccggccaacgcgagaatccgagtatcccccacgccctctcaagcttggatgccgttcccatccgaccactgcctttggctcacaccagagttctgcagagatgtcaccgcgaggacacccaaacaggctgcagggaaaagaaaactgtgaattcaggcaggctagggcaaactcatcatcaggaaaagaactgcagatcgcaaattaaaccaaatgatgcccagagaacacagaattttaaatggaaacctatggggaaagattcaaagatttcatgtaaacaaattttcttggtcaataaagttccatttgtttccataacctctccctccccagtaaatgaataataaactgtctaaagtttaggactgtaagccacctcattaagtgaagaaagaggggctcaaatgggaaaataacttgctcaagattctgaaggtagacccgaagacgaaatgattgatctgtgaatgaccatgtgatattattaattctggtctcctaattcagagtttgcaataattcgcaaacggaaacaaatagtattgcaacagaaacaaatgttgcagctccttggggttcttgcgagttctgttgggggcccctgtctgacaaccaaatgctcgtgaaaatatgagtatgcacctcactgtcaggcctggctctccatcctatttctctgctcttctctttttctctgtctccagatctccatgacccacctccaggagaatgagatcgtagtgtccagggcagctgcagatgggcctaggcccactttctggtgactcagtacaagtgagtcatttggcagaaaaacataaaggaggctgtgtataaacaaactcaccttaaatgagagaatgaggagtaaagatttggttttattttgttttgtttttaaacaaaccagctttccagggctctaacacagaacttccaggtctctccaagaaagtaccaaacagtaatctccctgaaactgacttggtttgctcccatggcctgagcttaacttctctggatgctgctctcacattaacaggcaggactgcacagctgcccagacccagccagacaagccccaacagactaggactgtgctcagaggttctggtcactgccactccctcccctccaaggagaccatgtcacatagtactggttgcactcccaggcaagtggaaaggtttaagggtagaatggcccttacaggcttctcgtgtggattcagggatcctatgagataatctgccttctctactaagacccaaggagtaaacatgtacctgccacctccccccaatcctcccccaccccccaatcccaccccactttaagtaccacaggtttatctctctctaatcttctctctgccttctaagagaaatgaccgagttcagggtaactgtcagctagaaagggcttaacaagcagattaggagagggacacacagggagaacttggaaagattgatcaaggtgtagatggatttcagctctttttcttctcctcctaaggcagaacaagagaaaacagcaagacagcaagagagaactggatgcagtatagaaccttggaaagaacagttgacttggtcctagagcccttgcttcttttctggcctttaccactgtttaattgtgtgattgggccatagtttccaatctctaaaacaaagatggtcctggatgattgctaaggagtgttctagctctgatgttttagagttcagtaaagaacttctggcacagtagcaaggaggtatgaaataggtatctcccatccaagtactaaccagactcaagcctgcttagtttctgagatcagaaaatatcaggcacttttagggtggtacagccatagactaaaacagttatctaagaacatttgtagtgttttcttcccagggatatgaaaatccagacaagattcttg

SEQ ID NO: 40979 - DNA, 2139 bp, Homo sapiens
cccttataatccagtctgatcttattttattcacatctgcaaagacgctattttcaaataaggtcacattcacagataccagaagttagggcttgaacatatcttttggggagacataattctatccattatcattaagacatttagaaatggttgtagagagggagagaaatgtccgagcatgcccagcgctgtcacgggcccatggggactggtgaagataaaccaatagtgagagtatgctgcggcatcagctgctctcccacttgctcctctctgctgaccggcatccttgggcagagctggggcaccccagccctctcctgctgcagggcaggtttccctcccacaagaacagaaccttgtgacctctcttgactcttcctcccttcctgcctcagcctccatctctgcctcccattcagtccctttctctgccccaaggtacatgaagaactcttgaagacaggagctgcagagctggccccacagcaccagagatgtcacagaagagcagaattccagccctccatggcacatgggctacatctgcactattttgttcagagctccaagaagcaggtgcattgggattttcaccaaagaacgaaaggaataaacccatctccctatttttaaccccccagaagaagccttattctctcctttctggaatgtcaggaccagtgtcattttgtccaggctgcattgacctctttgctggaccccgggcatagggagcccttgctgcttctccacccaccagtgctgagctccgggggtgtttgccttgcaggtccaaggtgagaatgtaaacactgcaattcctctgaaaactggctggaacctcctccagggaggaagggttgctcatgggctggccaggctcccaaacatcatacacagcaacccggagctccaacttaacacagcttggggcaggtcctcaaatgaccttccgtttcttgtctgcccatctgagaggaccattccattccaaacaacattcctttgataaaagtggttacacactgtaaacatcaatgagccaggaacattctccggtgcaacaggattctgataaagcagtcctattttgcaaaaccttccagtgtgaaacatcctccccacagcaagcagggaaattcctgggatgccacaacattgggcagagtgtccagggccccagggaaggagcagaaagtctagaggtggagctcccattgtgggcagagggacctgagttttcaatcatctgttcatcagtcactcactcaacaaatatttgctgaacatgtcccaagcgccaggctctgatggagtcactggaaatgcagtgtttccacatgactgcaaagctcccctgactttcaaaaagcagcaatgatttcctctccccacacagtccaggttgacagtcgggtgcaatatccacacgcctctctacctcactccctctgtgagtctggatgtgttcttcttcctctccagccccctgggccctcattctgttggcttttctgctgtcactctctgttcgcaggtatctcttcttgagtctgtttctgggtctctcagtctctattcttcaagtctccctttgtgtcaccaagtgcttcccagcctagccactcctctacctctccatcagtctgccttacttccaatcaattcatccccatttttttctccttccctcttctgtttcttctccttaagtgactgttgatacagaactagatacatttttcttaggttggtggaatagactttcacattctctggtgtttagttctaaaattgattgaaaaatgtttgtattctttagtgttgtctgaatttcttataagagtatgtgtaattctttaaaactgtttattaaaatacgatgcctatattagtccattttcatcctgctgtgaagaagttcatgagactgggtaatttataaagaaaaagaggtttaatgaactcaccgttccacatggctagggaggcctcacattcatggcagaaggcaaaggagaagcaaagtcacatcttacatggccgcaggcaagagagtgtgtgcaggcgaactgccctttataaaaccatcagctctcgtgagacttactcactatcatgagaacagcatgg

SEQ ID NO: 40980 - DNA, 798 bp, Homo sapiens
ttttatgtttaaagaaaaaattaccacattattagaaatattttaaaaacagaatgggttttttggctgacctggcattagggataccatttatggctatatgtcattttattcagtggatgaattcaccaaaagattcctgtgatttcaatcacattttaaaatgtattgaatacatggaatacttaaagatggtgaatccttttgtaaaatcaatgtctacctcaaaattctttgtgtatctctaagtttttaaatttgtttttgctttgtgttattctttactaataactacctaaaattaaaaaggaaagtgactcaaaaggagtcatggctttcggttttaagttgaattctatgaacacggagactcatggtagagcaggaacgcaactatttttggcttagtgagggttgctcagccaccattgcctcaagttaatcagtaagctcctaaagcctgtaaccagggacagtgaccatggatgtgatttaccggatatctgcaaactgggaaaagaacatgctagaatttttacacaggtgagtggtttttaccacactacccttttttctttctttctgactgttcgtgtggggaagaagacattcacacaacaaatcaaaaacaaacaggctggacacggtggctcacatttgtaatcccagtgctttcagaggctgaggcgggaagatcacttgaggccaggcaaggagttcatcaccagcctgggaaacatagtgagaccccatctctacaaaaaatttaaaaatttgccagacatggtggcatgtgct

SEQ ID NO: 40981 - DNA, 2509 bp, Homo sapiens
tctggaaggtaacagcatccttggtcaggctggcttctcctctcctctccccttgttgtccatcctttctctctactagaattgttcaaactaccaggcgaggccctggctgaggaagaaaccttgtctacctcatctggaaacttggccgggttacctttttggtacccaggtagatcccgctggtccttcagtgcccacctgtgctcaaaccttgctgccctagaacctcaggcactcccagctctctccttccctgagctccttaaatacgtgagggtcagagccagctgccctgctgcccagcccttgaggacacagagtcacactcctctcccaccctcaagtgcctcgtgaacccctctctccaggaggagggcatcatgacgcactagacctggctgcaggtggtgagtgaatgtagctgcgccctgagcagaggggagaggggccatgaggaggctgttttggggcccttctggagcagggccggagaagggtaggagattgaagagggtgagtgagaaaaggctggacaggactagggcagctcctcaacccacccccaggcaccctccccttcgcgctggacctggctttccttgaggggaggagggagtttgtccccttgatctgtgtggcgcctctccccagcacagtgctgcaaggtagacggggctcaggaccctttggtagaaggaggaagggggaggaagagagcgagggggagggttagagctgatcttcctgggaagaaggcgactaaggacagcagccagcgctggcgaggagggaaggcgcccggagcactgagtggggggttgggagaggagggttagcccagtgggaagctgggaaggctgggggacttggtgggctgcagtcctgccaaaagccgggtgacaggtagggagccagagcacccgggtgtccccggctgcccgcgccgcacagagcaagggaccccaggcctccgctcgcccttcccgccgccccgcggcctccgcaggccgccccgcaggcctccgcccacattcacctggctcctccgcggagcccctaccctcacgtttgggccacgctgggacccgggccccttggcaccccacgcagacgcggacccgcaccccaagtactggggccaggcccgtgtgccggcgcgcgggtgaccggcggtaggagaggatccacctgggcggggaggtgggggcaaaggtgaccccaggcctggctcctaactgcgggccggggagaggaactgtcccgagaccaccctctccaccccccacagcccttccgccctcacctgctcctgggacagccagctcccagcgcccggcccgcccggtccccgccccgccgccacgtggctgccccggctcggctgcgcgggtcccagctgtcccgtcccggcgggggcacccctgccacgccagcaccgggagtctcgggcccaggtggcgaggaggcgctgcagaggctttccctccgcaagggtcgggccttcgcgcctacctggacaagaacattcacctgggtaggggcagggctgggggaaaacagggagtaggggccgcaagcccacaggctcgaagtgaccagccactgcctctcccccctcgacagtgcaaccagcggaaatgcccagccccgggaccaggggactagggacaggagcctaccctgtgcggctctgaggagtggctgtgagcactgcacgcaggactgagaaagcccgggataagcccggagtgcagggaaacccgcagccccctgggcagatgtggagaagaatctggacaagctgaccgagaccccggtaccgggggtctccgtgtgtgcctggctgcgtgatcaggtgaccccagactctgagggcgtggaactgcttttgccaggaaagcgctctgggcatgctgtgtaggggtgaattacccttacccccttcaccaagacccagaactgcctttcctaggggtgaagtaaggtttccagggcctcatgttgcagaaaaaaagaaccctaaattaacatacagagagattaaattatctccattcccaatctggcatatttcctaaaccttaaataatttgagaggcttccatgtgggcttctgagaaacaggagggcagctgggagaacttcccacgcccacaagcctttgtgtgaaaatccctaaaaatagaggttgttcttctaaaaacaaaagggaaggctaagccatgggaacactgacagaacctaacctctcgcttctgctccagcaaagacgcgtgtgaagatatagaacatcatatttgccatttttaccattttaactgtacagttcagtggtattaatcacacacaatattgtccaaccatcatcgctatttccaaaactttcatcgtccccaatagacactctgtacccactaagtactaactccccgtttcgtctaccctcagaggtaactcccctcatctacttcccgtctctatggatttacctattttgtgtatttca

SEQ ID NO: 40982 - DNA, 488 bp, Homo sapiens
tttaatttgcatgtatatttccaagatagaactgcaagaacagtttgatgtaaccagacaacaggaagacttcaaattccaagctcacaaagtcacagaacaggacagggaggtgaagcagtacactgatggataggcctgtgtgaatcacgaactatatctgtcccgtttgcctgatccatgaccgcatgcaaaattttgaaaggagctacatttgttaggggaaagtccacagctatcctttgattttcgaaaaggttcagagagccacagttggaaacaaacattctgatctatttccctattacatttctcactataaatgtaaactctggttactatatcagcatcttatagtttacataattaaagattaactagatgaactgatcaaatcaagttaccttacctgaaacagtgctgaccatccctatcctacttggaaattctagtcttccaagttccataaaatcacctaatttaagttc

SEQ ID NO: 40983 - DNA, 751 bp, Homo sapiens
gtatgaatgcatatattagaaacaaaaaatctaaaatgaatacgcttccactttaggaaagtagaaaaagaagagcaaattaaatccgaaacaagcagaaaaaaattataaaaattagagcagaaataaatgaaactgaaaataggaaatagagggaaaaaaatcaagaaaatcaaaagctgtttctttgaaaatatcaataaaataagcaagcctctaccactgggcagggggaaatgcagagttgttcgaacatgagtttcagtttcagttttgcaagatgaaaaagttctagagatctgttgtacaacaatgtcaatatagtttgcactactaaaatggacacttaaaaattgttgctctctcctctgctcgcattttcactctgccatgccctgctctgaagagacacccaccgttacccccagcaaacaggctggtttgcagaggaaggcagcatgcagctccgttttgccccattctctgagcaggccacaaccctgactcagggatccacacaggccacaggctatgacctcaacggtgcctatgatgatacaataccacctatggagaaagctctagggaaaatggacattcagatagctcttccttctggatgttacagaagagtagctccatggtttggattagctgcaaaacactttattgatagatgaagattactgaggaaatgttggtgctgtactgtttaattttggcaaaaaaaagtttaaagtcagaaaaagtg

SEQ ID NO: 40984 - DNA, 2876 bp, Homo sapiens
ttataatcttgtgtactgcaatccaggctgaataatacggcaccaattctcctggaccagataaactgggcagtgaagaaaaccaccaagtcaattaatttccattccagcgtttgccaggatagtatttacccaacctcgggtaagtgttaatacttcaaattttctaaaatcgaagctccatagcctaaggaatccccacaggccagaccctttctcaaggtctgcttcagaggttctcatactcattggtgcacgtctaaaatgtcacagaccaaactacagactaaaatctaattctcagtgaccccaaccacggcccagacccacacttaccagatgtcatctactgaacagcccacacaggttcggaactaggccatcccggcccatctggaataactcttcagtacttaggccaatatttattaattatactacatctgtctattctattatgcattccctgcatcttctctactatttagcactccctcttgcttcaaacgcgatcctttctattcacgggaactcctatctcccttctttccttccctgagaaacgcttcagttctttccataatgaaatacctaacgtatctgcacaatgaacaccccccagaatcctcaagactcctccacagccacctccccgcattcctccacctctccggcatctttcctccggcccctcgccctgttcgcactcccactacgtttcctgcaagcattcccttttctccaacccctgcccttcccttctcccaaagagcacactccggcagcaacagtgactgaggcctgcggtgcataaagcactgcaccaggcacggtggacagagccctggtgtctccctagccttttcacacccacacccagcaccctccggcctccccgtgcaaacatcccacctcctcccctacctctgacacccgcctccagcctcggaggccgccttctcgcctccgccacccccgtcattatccctcctcaaccccccaacccaccctccgcgccctgcttcctcacgtcccccagccagccccagcgtttccctcggcctcggctggccccctggccacccccagcctcgccacggctcgctccccccggggtcaggccgttaccgccgcgcgctccccccgcgcgccgccccctccccctcccccgccctcccccgggcccgggcctgccaggccgagcgctttaccgcgggcgggcgccgagtcgcgcggtcaccgactgcaggcggcggcagctccaacctttctaggggccttgagaggaggggaaggggggaggggggagaacttttgctgtggcagcttcggcaacagctcccacccctgcgcctttctcctcttcctccccctcctcctcctcctcctcttcctccttctcttcctcctcccagagcagtagagacgcagacatgccgcagctagagcgccgccgcggtcgccgccactgccggcccggtgcattgtgggaagccccgcacacgggaagcgctccgcggcgcccgccctcgtctggcgcagagacctggctggaaagacacagcgtggcttcgattccggcgcctgcgtgtcaccagcccagggtggccgtggaagctggacccgagccgcaggccccccaggctgggcctgggaggaaagcggtttgaaaaagatcggaactgaggaactctcttagagcgggggactccctgctcctacagccttaaccaatgcccagcgcttggaaagtggaggactcggggattcgggagcgtttcaggcctggggaaatggaagggtcggggacctaggtgaaaggttatttgccagaaatgtcttggctttttcatttattctgtcttacctagcccttcgccgccacctccagtcgttggcctcttaccaccttcaaatgccaccttttccggaagatgtagccctgcgcccttgaaactggcaaaccctattagtgtctgcaagctgagatgcagggtgtgggcatagacacagatcaagagatccggccctggaccctcttgggcagaaccttgcccttctcatttcacctgaagcccaaactttgtatggcaaagacttggtaatgatctctatagagctaggattacacagttgtctcatcctttgggggccctttagccaaactgtgacctccttaatggtgccttcgtcagctaacattaggcgccctgaggtgcttctgcatactgccatcgtttacaattactcatctttgtgtacacaccctagcacaaggtcagccatataacataaaagatgctcagtgaatgttgagtaattgtgagcatctggaacttgccgtgggataaaacgcgttcattgggatttcttcataataatatgaagattccatttagcgcctctctgcaatacttaaacgtaacctttgaggggagagggaaaagaaaaggcatgaaaatatctatagagccatttctggtgttctccttcccttttccacacccgccttcccaccccttgccaactaaatgttcatttgaatagtgctttttggcaaaattccaaactcctgcattatgcacttgtgatgacactgaattagattagtgtctgcaaggttaatgttccctcaggcattaaccttagtaaatcgtgatgcctgtttagaaatagctaaggcccagaggttcagcttaatttagacacaggtaactaagagcaagagtaaaccacagctccacaatcaactctctctgtgtgctttctccattaaaaaatataaattttaataagatgaccgcacatattctgaatgttaattgcaacaaaacaatgacacaagttagagccaagggacagttatctggaggaca

SEQ ID NO: 40985 - DNA, 1093 bp, Homo sapiens
ccgtacatctgttcttttattcatcaaacaaattgttattgaatgtctgggactatactaaataccagaaatactgtggtaaataaaatactcttctaggccagaagcttacaaccatcagttggtggagtaaaacaggtgaataaactgcttcactgcagggtgatacattctaatatagagatgagcaccggacgctggaggaggacactggaagaggacctgtgcagccccgggccaggacagcttccccaacatgacattttagctgagacatgaaagggggtggtactggtggagtcctgagcagaggaaggagatggcatatgcagagtcctagtgccaaaaggagctcagtgtgttcaggcacctgcgagtcattccgaatgaatgcatgcaggaagtggtaaaaaagaaaaaaaaaatgatactgcagtggaaagcaccagcaagctccagagtgccttgtggacttagttgaggtatctgaccttcctttatcccaagaacagtctttcccaaagtgtggctggatgataagaagatcttagatggtacacagaatactattttttttaatttttgtagttaatggggtgaacacgcatagaaaatatatagatagatagatatagatctatttcatacatgcaacacattgcttatcttatatttttgcttaggatgaggttgactgacaaaagtaattcaactgacagaatactacctagattatagttggtacatgaacaaccatgaatgactgacgtttgggcaaaaatgcctgaggctgacagattgccatggaaagcttttatgtagggaagtcacataagaatacttctaggttagaaagagcactctggttgtggagaatagataaggacagtatttgccaaacttctggttaagtcacatgagtggattctgaaatcaaatttaaagttgtgctgggtgcagttgtgcaacctgcaatcccagctactgggaaagctgaggtgggaagattacttgagcccaggagttcaagagcagcctgggcaacacagtgagaccccatctcaaaaaaaattttttttttaattttctttaa

SEQ ID NO: 40986 - DNA, 1778 bp, Homo sapiens
aaaggccttttcatattccaattccattgaaatacaatacccacaacatggtgaaacaatttgaatgtatgttcaaatggtttgaaaaagatgctgcccagcaagagtggaaaatggacaagcaaagcaccagtgtttgtacagacaggaacgctaaaaaaaaggaaaggggaagagtttaaaaaataaaaccttcttttttttttctaaagtggagcagaaaaatctcaaaatgtgatggggagattgaagaaaagaaagaggcacgtccttcctcccaggctggaagattgaagggtgcctggatagatggtgaatctgagattctctccagaaccaggaatgcccacctatgccccctagaagggtatattcgaatctcctggggaccattcactgcccaccaacatcccactctctaaatttcttgcctcaaattctgatacgctttcccagttgaaggtcttcctatagctttgattactgctaggagtgtgctagtgcagagggcagaggcagcaaagaatgggcagaaaatcagggagaattgcccaagtgtgggtgacttagaaaaagagattttcccctgaggaattatattgatgaaatctaggcttgaaaggtccaagttcaaaggtctgcttactttattatcgttttacccagaggaatgtgcctgttaggttaatatttattttattgaataatctagttttagttactgtcaataaaagtcagcgctactttttataggaaaaaaaggcagttttgtggctaatttcagatctcagagaggttgttcctgggcccattggctctaccgccacctggtggtagattcctgtagaacagggctggccatttgggtttcggaccagaacccaagtctgagaggttggaatcctgatctgctcacccagtagcagggtgaccagttggacagacttcctctctccctgaatttcaattcccatatcttaaaatagagaccataatatctacttttggagtttgtcgtaacaatcaaatgagttaacatatatgtagtgcctagtgcatagtaaatgtttaataaactattaactattagcctcattgaaaaagaacttgatatccccatgggcttgtttccagtggtttgccatggagttctgttctcactatttccataactgactggagcaaagctacagaagacacggcccctgcatcatggccgacactctgctggtcagaggctgggagagacttacggtttggagggacgggcccaatctaacggattaaattgtaagaggagtaatgcaagttccaaatgacacataaagtctgccaagtgcacacatattgggtgagggacaaaaaaaaaaaaaaagaccaagtcaaaaacactgagggattttgggaacagatagctcaacaggagccaattgggtgacacaggcaccaaaaattctaatttcatcaacagccatgaaggaacaacatatatgaaaagtctttaaaatgttcatacagcctaaccttgtaattccactacaagaaatctacccagaggaggaaatcatcagaaacaattgcatacaaagatgctcacttcagtgtggtttataaaaatgaaaaattagaaacaatgtccaataatagacaaaaagttaaattgtggtttatccatgcagccctttaaatttttcaaagggaaatgcacatgaaataagttgaggggggtggtgagaatcgggctctcattacaaatagaggacacattgataaaaggc

SEQ ID NO: 40987 - DNA, 1502 bp, Homo sapiens
acatttttccccttttcctcaagcaaatgaaaatcactaattactaaagggtcttcaaaaagtacatgggttatcaataagtctccaatgggaaacacagcacttcccccaaaacaaagaaattacagccaaatgaggagtctaaaaaatgttttctcatttgtaccttttcttgaagctgacattttcttcaatttcctgatggcagcaccaggccaaccacccttattggccctgacctgcacctcactctagtcccccattcccttccttctcaagcactgttgcccactccccactgtgtccctttaagctactccccagcaaaaccccttagcaactggctgaaacatcagcgttcttctcacggtccagatctcccagctacgcgaccactgaaaaccccctcctccagcctcgcccatccggggcccagacccccacgcctgcgggggcgcccccccgggtccctttccctccccttcgcagtctcgacacttccctcagtcacccgcagcgcctggcgctcgccccacacccagcaccctgtttttccactgagcctcctctcactgcacctgcggaccccgcctttccacctcgctccccctcactgctgggcctcctcggccgagcccactggcccggcccggcccagcccagcccagcccagcccagcccggcccgctaggccaccacacaggccatgagggctctgccgccccttctcctcaccgtgtcgaccccagagctctcttctccggccccctccgcttccttgccgaccgcagcccccagcccagcgtctggggagcccagcggctccaagggcgccggctggagctgccgctcggggtccggaggtgcctgctccatggctgcagttcggcgcggcgaacccagtgcgcctgcgccgccgccgcgcccgcggccaaccagtctctcagctagcgacgcccgcccctccgctagccatcgcctcgcccctcttgtcaacctagagggctcccggagctgcagctggaggcggaaccgggggtgggaggacacgcaagcccgcggaggacctggtcagctgcttaagccaggagacccaggaagcaggggcagctggtgaagagagagacaaagagaaaggcaaggggaaagtgaacacttgaagtaggcacggcgatcctaaagccaacgaaactcaaaagaaattggaggcgtagtctgacctgctccttctgggcctctgccttgccagttattattgggtctgttttctcccggaaagatcagagctctataaattgttaactttcagcaggttgagtaacacattcagcaaaaggtaatacttgcaagttttttttttttctttttgagacggagtttccctcttgttgcccaggctggcgtgcagtggcgcgatctcaggtcaccgcaacctccgtctcccaggttcaagcgatcctcctgtctcagcctccggagtagctgggattacaggcgcccgc

SEQ ID NO: 40988 - DNA, 2925 bp, Homo sapiens
aatatagactttctcatcaacacagagagcattgaagtggcctgagcaacgcaaactgaacatctccaggctcaggtttagtttatcagaggcattaggatctctacctttgtccttgcattccaattacttatgtacattcccctttccaagtcacaaataccttcagggcaagaatcttttctgattctggagaagctctggacaagtaagttttgagcaccagtatttgctaccctctcgagaaagctgagttaaacagttcctgccctcgcagtctatcagagaaagctggcttgtaaataaattgcaacataggcaaaagcagaagtgagtacagaattaaatctgaggaagcattaactctctgactgtagaggaagttcagggatacatttctgtgttcctcaaaaggccttccataaatacctgttgaatgaacaaatgaatggattaaatcttttaggcgaggtcccagatccaaacgagatgtatcagtagcttctggaagccagtgaaaaaacttttatctttcaacaattgcgggatgcagcctccagggcatattcacccctacctccacctcgggaaataattttggagaaaggagcatacctgtactgccagccttttgcactgccaccgcggctgctgctgctgctactgattccacctccacagctgctgttcttgttcggggtcaccgctgtggcctggccctccagctttccttcgctctccgagactttcattgtggacactggttcacccccctgcatcttaacgccaaagtccacttgcccttcttgagcgggagagaacaattctgtagttctgtaggtgactttttttttttaagatttgatctgaatatgataccggttgctaaatcacacggcggctggggcgggactgtcaaatggtccagaaaaggaagatacacattcccacagaagttaaacttttgagagggcaggggaagcaacgaggacagatatccttcacatgtatctctctcctttccggcaaaagcaaggaggaaaaagcatccggcgagaagacttaagtgacatactcaaaagagaaggagtgtggggaggtcgcagattctgtagccaagacggctgggaaaaggacggagcgccacggacaggggacccgcggcctaacctcggggctgacccgccgcgctccctcgtctcctccgcaggtcctcaggcagtgcgtccagtcaagcccgctcggcagttcccgccgcagcccccgagatacagccagggccggcgcgcgcagccggggaggagggtcggggaatgaggccgccgggggcgggacgccggctcccggggccgcctctcccagggccagaggcgagccactcgggacaacttcctcttatgcccctggcccgggccctcgactgggttcccaggagccggtgagtctctcgcgctatctccagacccaagcgcgaatgccagggccgcggccgccgccccacccacagccccacagccccacagccccacagcgggtcagccaccccccgccccctgctcccttcccgccttcccttccggagtagcgtgagctcacttccctcacagccgaagcgtctggcgccatcttgggtcagggcggcgggtccctgaaggaggcggaggctctgggagctggtagctgggcgactggctgatgggcgagggagggcgagggagggcgccgcaacggaacgaggaacccggacagtgaaggaggaagaaacaaaggagccagcagcactagagagttcccttctggtgtgtgagtgcccgccttccttttttttttttttttttttgagacggagtctcgctctgtcgcccaggctggagtgcagtggcgcgatctcggctcactgcaagctccgcctcccggattcacgccattctcctgcctcagcctcccaagtagctgggactacaggcacccgccactacgcccggctagttttttgtatttttagtagagacggggtttcaccgttttagccgggatggtctcgatctcctgacctcgtgatccgcccgcctcggcctcccaaagtgctgggattacaggcgtgagccaccgcgcccggccgagtgcccgccttcctaaccacgtcctagccttccatttgaggggccgttccaggcattttaggaagaaagcttacaaaaataagaaagtacaagaacgaagcaaacatctgtacgttttagttacttggggtggggggggggcaagcatgacattggagtaaagccaatcattattataaattaaaaagaagctgtcatggaaattagagatctcagaacagagctaggtactcttccagaccccagacaaatctttcaccttgtttaggccttggttttggatttgtaaaacaagagtgcatgggtagatttctaaagtctctcctaattgctaattttagtttataataacatgacttgaggctgggcacagtggctcacgcctgtaatcccagcactttgggaggccgaggtgggcggatcacttgaggtcaggagttcgagaccagcctggccaacatggtgaaacccattctcaactaaaaatacaaaaattaaccgggcatggtggtgcgtgcccgtaatcccagctacttaagaggctgagacagaagaatcacttgagcctgggaggcggacgttgcagtgagcctgaggaaggagagagaccctctcatattgttttatactcagtacctgttttaagaaaaaaagaaacagcaaggaagtaaaaccaaagacaggcagcccagcgccaggccggaaaccaggcctgggcctgcctggcctaaactcagtagttaaaaatcaactcataacttagaaaccgatgttattcatggattccagacattgtgcagca

SEQ ID NO: 40989 - DNA, 1226 bp, Homo sapiens
tctactaaaaatacaaaatgagctgggtgtggtggtgggagcctgtagtcccagctactgcagaggctgagacaagagaattgcttgaacctgggaggtggaggctgcagtgagccgagatcgttccactgccctccagcctgggcaagacagagcaagactccatctaaacaaataagaagtaaataatgaaataaaataaaaatttaaatttatagaaaagaaataaagaggtggggcctggtggctcatacctgttatcttagcactttgggaggctgaggccggccgatcacttgaggccaggagattgagactaccatggccaacatggtgaaaccttatctctactaaaaatacaaaaattagctgggtgtggtggcacccggctgaggcaggagaattgcttgaacccgggaggtggaggttacagtgagccaagaacacaccgcttgcactccagcttcggtgacacagtgagactctgtctcaaaaaaaaaaaaaaaaaaagtgaaaagggattctgtgtggggtgatatctcacagtttatagtaatggtctgctacagctgtgtgttctcttctgaagtacctgccatagttctagcagttctatttggttctttacaagtagtccccacttctggaatagcctatgtattaaagagtgtttacaaagccagtcatttgaaactcccaatgccagttcccacagaaatgaggttaccactggtcatcgggttctcagggcagcctacgaaagtccatctaatccagaatgttgccaatctgctgcacgaggtgtactgttgctactcccagtaactgcacgagcttgattctgaaagggagacagagagggtactttgtgttccaactctgggtgccagggacacagccctcccctgctccctacttggctggacgggcagctggggtgaggggctgttccaggaagggtgctggggagaagggcacataatgtttgagcagcagaaccagaagtttgattctctgtctcatgacatctttccagtccgttcactctcaggcattttgaataataactaataggaatactaatgacattcttatagtgttttatagcttacaaatgacatgtcttcatgtctcctcccacagctagttgtctatacagttctcccttaatatccatgagggcttggttccaggactcctctccccctcagatacccaaatccatg

SEQ ID NO: 40990 - DNA, 1032 bp, Homo sapiens
aagaggtaccaggcactcttttaaaagggttaccaatgtcagcctgtttactatggctcattaataagtttgacttcttttctttttaaatttttaaacctgtgcctcaatctctgtagaatcactttagaaatggatagtggggcaggtacagtgcctcacacctgtaatcctcacacttcgggaggctgaggtgggaggatcacttgagcccaggggttctagaccagcctgagcaacaacaacaacaacaacaaaaattagccgggcatggtggcacatgcctgtagtcccagctgcagaggaagctgaggcaggaggattgcttgagcccaggaggtcaaggctgcaatgagctaggatcgcgccactgaactccagcctgggtgacagagtgacagcctctctcaaaaataaaaaaataaaaaaaaaagaaagaaatgaaatggattgtgaactttaataatgttccccactgtatattgtttagtcagaaagatctaaactacttagtcaagtgatctctaactccatttctggtatctgataagacattttcaagagtcagattctttgccaaatagtttaaatatgatgtcagcctttatattcacaaactcagtaggtctttccaccgttgcctttttttttttttttttgagacaaagtctcactcttgtctcccaggctggagtgcaatggcgtgatctccacctccgggttcaagcaattctcctggctcagtctcccaagtagctgggactacaggtgcgtaccaccatgcccagctaatttgtgtattttaagtagagacagggtttcaccatgttggccaggctgttctcgaactcctgacctcaggtgatctgcccacctcagcctcccaaagtgctgggattacagacatgagccaccgcgcctggccaccattgccttttttaagacaaaaatataaactgaccaggcataatggttcacacctgggagcatgatggctcccagtactttgtgaggctgaggcaggaggattgc

SEQ ID NO: 40991 - DNA, 662 bp, Homo sapiens
gaatggactctgtgatgaagggacctcatacagaacctgagtcagaagctaggcacctgagcaagccgggagctagggtctgaatccctaatccagggacaggccacactgtgtgtggggaaaagggtgactgacagaagacacagctaaaggctgctttttctgattctaggaaaggcatatttttctgatgcctgtgaggccatagccaatggcaatatccttgtgtttgtcacccctctgaattgcatctgggccacaggcacacagctggtggctcatgcgaagcctggaagctttgacctctccttcagtatagttgatttgctcttgctttgctaagttgtgcaataactgtgattgcacccttatttgatgatgtgtgtttcggtaaccatggagcgagtgctgctttgccaatcctaggtcaacactgacccctttccaaggactgttcagtaatccccaagccaggttttatatactgggtaattgtctgtcttttgagcttctcagtgggatgggagttcgtgggattccagtgagaaataaaggcaatggctctcagtgacatgcaagcattcctggaatcagcatggtgacctccctatgcctatgctgagctggtttattgagtatgagctacgcggcaggccccacaa

SEQ ID NO: 40992 - DNA, 738 bp, Homo sapiens
tagaaagaggtacttgctgatttgtgtagtctggatggtaggaagctggaacaggaggcaagggaagcataacctttcaagtgtgtgttcaggcctgctagaactcaccttgggaggctcagagattttttgtatactctagcatgccagtcaggattcactatggaaaccgagtgactacttgagagaaggaaatcaaacacaacaaaaggaaactgtccagaaaacaaggagcacgaggctggatgtgctccaccagtcaggtgaggttaggacaaagcatagttctgaagacctgacctggaggcagagtgaagacatctctcccttcagatgtctatctggagttcagggtttcctgggttctggtctgccctgaatcaaaaggtaaggcctagaaaacccagagaggagatttttgtttcctggtggccaggctgcaggggagggatcaaaggcaaacccagggcaggtgctgcaggcgcaccagcctgactggtgagtcaggcctccggcataagagtggcgtcaggaggagggggtgggaccttacctgcctcagcttgtttcggttccttgacattttcttcactgttgtgcagaaccacacagtctgggagttggaggagctgaaaggagacgttaagagaaagggctgcaaacgtaggggtgttcaagacatcccctttgggggacaatgggaagctctcctttgtttcttcccaaaaagcctaagaa

SEQ ID NO: 40993 - DNA, 652 bp, Homo sapiens
tttctagtttttagggctggatatttgcatgtttttctaattagtcaataggctaagaaatgttacctcatgaattctaaaaaatgtgtacttggagctgtctaatcaaattataggttctatactgtgatatggaacagcatatcacaaagtgttttcacagatagcttgtttgtaaattttagggctggatattcatatgttcctattaagaaaggcacaataggttcagaaatgtcacttcttacatattctaaaaaaaattgtttggaacctgtttaatcaaaaccaaagatcaatcttgtattacgaaactgcacattccaaagcactttctcaaatagcttgtttctagtttttagggctgtatattcgaatgttcctataagggctcaataggctaagaaatgtcacttattagattctgcaaaaagagtgattggaacttgtttaatgaaaacccaggttcagtcccaaaatataaaacagcacatcacaaagctctttcacagatagcttctttttacttattagggttggatatttgtatgttcctctaaaagctcaatgggctctgaaatgtcatttcttagattctacagaacacgtgtttaagaacctcttccatcaaaatactgattccactcagtga

SEQ ID NO: 40994 - DNA, 1592 bp, Homo sapiens
ttgaaaaccactggtgtaaaaaaagccttctaaaaaaaagtgggatttgatcactaaagtcatatggaaaaaactggaagaaagaggaaaaaataaacaaataaataacgggattttaaagagacctatcccaccggctctcctggatggagagagtgtgggactctgagacagactcccggctgggcacccccaggaggttttcttcaccagaggtttgcaccgagcccacccaggacagtgggctgagcctgtggtagaggctggcgggaggtctggctgaggcagcgaggggtccctgcgcgcgggcgctgcaggagtcacgcgtgtgacatccaaccaggagccgtgccctgagcaggccaggaaggaggagacagggccgctgaatgcacaccgcagcggtgtggggagcggcctcagacacctaagggtaggaccggccggctcccccgcgacccccagcgcctgggttctctcccggcctccccgaggcgtggcctaccccaggcatggccccaccccgccccaggccgcccctccgacccctcgtgtttacctcatctcccgcgcgcctttcccccaccgagtcccccaaatcccggtccccacctgactccccctcccgccgagcccccagggcccggcgcccggctcactcgcctcccgcgcacccactcccgggcgccctctcccgcgcgcctccccgaccccccttgggccccagctgaccccaccttccgccccaaccccgcccggaacagggccgcgcttaccgggtcccctcccaggcggcggcgggaaagaggcgggcggaggacgcaggggcgggcctgcggctcaggcaggaagcgggaaggccgggcctccctggccccgccccggccgggcggccggacctcggacgacttggcgctccgggacagcagcagacgcccaagctccggcagcgcagagccccgccgggggcccggggggctgggagccggggatcgcggggacggaagtgggggaccgagtctcgcgagcccgggccctcctcgcagctggggccccactggcgcccccgcgggagcgctacgggagaggcgcctatgcggctgcaggttttattatggagctgtcaaggtagaaaggtacggagaacgggaacccaccgacagccaacttcccttgggacccgccttttgctttaaaaacaacaacgacaagtctgtgcttcaccccacacatgcctttcgttttcccttttttcccagagtaattttaaagcatcccagtggataaattctcctttaaatactcgagtatgtttaatcagtaaggcctatttttttaaacattctcatagtattacggtcacacctaacgaaattggcaattcccagtccgggcctgagggaggcctgatggttcacaagacttggtaaaatatatcattatattttaaaccaaaaaataaatgataaggcacctccccgttcccaaccaccaaatcatccgaatggacttcttcctcagccaggacttttagaatttaacctgaaaaactggttcaggccataaggggaagtggaggccgaacatgcctc

SEQ ID NO: 40995 - DNA, 1074 bp, Homo sapiens
caatttttattatcttttacagtttaaattatatccgttacagaaatcaactcctggatacatcatattcaagtcaaagcctaaagagctgagaaagcaacccctaacagtccaaaaaaagtcctattcatgtaaaaaaataaataagaaatcttaagctaaaaatcataaaagttaagtaactaagtaaaaattgctcatcttactcagtctcaaccccacctcaccaaatactttttgtcgtttctacttctccttttaagccaactattaaaaccttttttaatgaaaattatttactatgacaccctcgcgggaactgctgtactcactctactatttgcagtaggactgtgaaccctcagagtggaatatctgacagagaatctcaattactgtagcattttgcttaattattatcctcatagcaggaataacagttactaacaaaaaataacacatgggtctttccaaacatgcacctctgcctgtcattaaaaaaaaaaaaaaaaaaagttacttctgtctcaaccagtcgggcctaataaaaaatgctgctgaaaagcctaggactaatgtttttactctgcctaattaacctttatcaaaaatttttaaccgacagaatcatggccatttcgcaactacccaaaaacatctacaaatggtgttgatcctacagtcaatctaagaccaaaaaactctccacccccgcatcagcaggaagtagctagaaagaacatgtcccctcttgtccttttataaccatagggtctggaatgatagagcaggagtactgtcatctcagacaaacaccgccactttaaattccagctccctttctagcctcatgcatttcaaggaaatcacttctcttctaactacaagcagccagaaagagcagacagtaaaacacggataagacagctgggacacaaagggaggtggggggaaagtatcttgggtaactgccaaacttcaccctcatacgatgggccccagtaaaacagtgggccttaataataaggaacaagcacattccctttccttcaggggcactaagacaggaaagct

SEQ ID NO: 40996 - DNA, 3216 bp, Homo sapiens
ccaacaagtaacaaaccacgataattgtgtaaggcttaagtttgtgtgtgtgtgtgtgtgtgtctgtgtgtgcatgcgtgtgtttatctgcagggtaaaagcctagaagaatttacactgaaatgttgaaagttactgggtaaagggttttgggtttcagaggtttttgacgactgtaattattttgttttcttaactgaatgttctttttttatattgtacatgattacttctgaaaaaaaaaaataaaagagtatgtcgttccccccctgcagggaggcagagtccaggtggccaccaaggggctgttgtcacagtccagggaaagccagaatggcaggcacgggagccttgggaggggcctcaatcaggcttgccctttggccccagaaagagcaggggcctgcagtgaagcccatagagccccttgtgggccgtatgggccgcctccaggcctccacctcctcccccagtcatggccgctcagtgtcctttcacttggtggtgtggggacactgggaggcttcctgggcctcccaaccctcctacccaattcccagcccaggcttggctctccaggacccagcttctagtccctgtgaggctgggccaccctgcaggactgcagctctgggccctctgttctggtgctagggccctggggcccatgaatgcagttctagcactcgggaggctgaggcgggagaatcacttgaacccgggaggcggaggttgcagtgagccgagatcgtgccactgcactccagcctgggcgacagagcgagactctgtctcaaacaaacaaacaaacaaacagcagccaacattctccgagggtttcctagggccaggcgcggggcagtctcatgtaattctcaagcaatcttgggaggcaggcactactgttcattgcccctcccgattttagagacaagaaactaagattcagaacacaagaaacttgcccaaggtcaaggagaagtggaggcgtggggaggaaacaaagtcacctgacaccagagcccatgcctccaaactccaagtctgggactcctgattaaattccgtctctgtctgcactttgggaagattctttcctctcctaggcaagtgcccgcggggcctgagctctcgatagcggggccccaggagccacgttgtggggtctgctatccggcctccctctgcacgcgcgaccgtccacttgagcgcagtggctggagctgggactccagcgcagcccctgagcgctcacgtcgacccctccaatcacaagaggccctcgtgccaggcccccagatttggccaatcagggaagacctttccctgtcacagaatggggtcgaggggcccaggaaacaggtagtccccagtcacaaatcatcgcgtcgccttcgctggtccctttctcttatcgagcctcagttttctcttccataagccgggccagcagtgcccaccccacaggttggcgccagctccgtaagggccctaccaccgcggccggccagatcctcggcgggccagtcctggcgctgcggtcatttagcctgatgacccctggccaggttcagcctcaattgctccaaagaactccggacccgtaccccgagcccggcgtcccagcggcgaagttgatgggccccgcaggagcccttgcggtgagaaccgagtcctggagcccctggagcccccggagcccccggagctgcagccggggcagcctcctttccgccgggagtccagcgctctcgagagcccagaaactcaccgcgcgcaggagttggtgcgggcgtcccgggcaggttagacttctgtgagccgcagccccgaaactgaggttggtgcagacccgtcctgggagccaggaggtgggacctgtccccgccagtccgcgagctctggttaaggccagagcccgtgaggggaggggcgcggggcgggcggagagtcagccgagtgggggcggcgctcaccggtggtgggactatggcgggagcgcagcgcaccctctccgggcgggtctataaatgccatgtaaaagccaaccccgcaggggcctgcgctctttcccgcttaggtcaagaagacttactgtggacccttggagaattcccagggctttgaaaagtcccaagcacccagcagggctggcagttctgagcgctggcaaggctaagtgggtcagaggagaccctcgccaagccggtgactcactcactcgctcaccctctctcactcttgatgggccaagtacctgccatgtgctacggacacagcagagcgaaaggagacgctgccctccgggaatttgcagccgcttgcagaggcggccccttagcagctgcgcatccgggtggatagcggcgcttctgcccgcccagtgcctacccgcctctccgagagaaaaacagcccctggttttctctctgcaattccccttctccactctctcccttctactcagtcctggtgccgcagacccctcctcctggttcccagagatcctggccagcccggtctcaggcaaggccatgtagaatgccgggagtgataattgcgtattgtttcatgactgcaagcctgtgtccaggtggctccttctcctggaacacccttcccaccacacctgcggccgcactgctccgtgccctgctaagcctcacttcttttgaggcgaccctctcgctaagtcccgaccacctggccctctctctgctcagtgcctgaacacatcaggcttgctgcagcccctgcctttacctctctacttgtagtgttctttcagagcctgctcccatatggtatcacatatcagatatctgatgcagagccttagagaggctgttccaggtcacacaaactaaggaagtccctcagccactccctgccacatcaccctgttctatttccttcacagcacttaactgtatatctgatatttccttgtttctttgtttgttcattgtctgtctctcccactagactgtaagctctttgaggacaggaaatttgtgagatgtattcactgttgtatccccaatacacagtgatggcttgtagcagttgctaaataaatgtttgttgaatggcttaatgcatgtattttgctcacataagccagtatgggcacccaggattgaggtggcctgtgcctgctgatccacttagcctactttcaggcactgtccccttgttctttaggctccagcctgc

SEQ ID NO: 40997 - DNA, 1616 bp, Homo sapiens
tcaaggagtggcacttaattcccctgcctttgaatgtaggctgaacgtagtgacttccttttaacacatgaaagatggtggaagtaactgtgtgatttccgaatccatcctttcatagaccagagagagaagctgaggcttgaggtcagacagtggcagaagccagcttgtccctgtcccaggactatatgatactctctgaacgagtcccactgaaaccctcttttgccagttcagttcactgtgccgggaatgccctgcttcttgaagccaccagctgagccctgcctgtgccccagggatgggcttgtgcatcatctcctttgggaagcctgaccccaaccttctccttgggaattccctcactcacagcacagaccacactctaatgcaactatttatatgtgtgtctgtctctttatcaactgcaacacctctgagggcagggacagggcctgtttcatctgtgtatcccacagccctgcacaggccctgatccaggagaggcacctgcagtgacagtggctggataagccctgcagagagagcctctgcccgggctttccgcagggccctggtggctaagtcctcccagggaaagcagtgtgcacttacacagcccaagtctgggtagaacaatgggggctactgctccaatccagaggcagattaggagacaagcctggctcagggctctgtgaatgggggatgggatagacatgggttctctttctgttgtataatgatgattcagcttgtttttggggaatcagtaactgggactgtgtgtacgctgcaaaggaaacattaacttgaaggtcatagcctgtgggaaatcaaagcggggaggccaagtgacctgggcttgtttttgttttgttttgttttgttttaattttggagccagtgtttctctttatctcctaggatgcctcgttcagatgcttctaccctgcctcgtgagttactcatgatgtcacctgatccccaccccttagaacctctccccagtgggaaccaagaattcaaaatggttttctccatatttccccctttaaagggcctgcatgcaatttttcatgtagaggcgaaggtagggatgagacttaacagagctctgtgccacacaccagagcccacctgatgacctgcagacatagatggaatgcttctgggccacagagcttacagccctgctcctgccaggtcctctccagccccatgccaaatctaacctgggggtgttgcgtgtttgcacccccatgcaaactggctggtgccagcacctggctggcacatggcccccagaaactcactgtaaaggaataaatgagcaaagaggaggcagggacggtgtctctactccaggtgctcgcacctctatgggggagatgaatgcacaggtggcagatatgaaaggtgggaggggatgtgaaccatcacagaggtgagacatgaagaaagcgggtctgggtacttcaggcttcacctgggagataaggcccagtaagactgtgatgactttaaccagcaaaaaataagaaacgttccagttggagagaatgtaagaatgatgcattggtgcatggaggtggggatgtgggttgtttttgagg

SEQ ID NO: 40998 - DNA, 2981 bp, Homo sapiens
aaaaaagaagacccagtagtttctatgtctcttaattggattactgggtttagggtagagtccttggaaggacagggccaggaaagcatgcagtttctagggcctaatataataagcagtcacagctggaaggcaaaaccgaccttcaaaaattaagggtctcatttttataccatttggtctggtctaaagaacagagccttagattttgagagggatctatccatttccaatgcctgggattccatgaagaaaacagcttttttttttttttttttccaaaatggggtctctggcacctcttatttttcccaaagagcccaaggctgttagagcttgaatatctgcttttaattaagctgaattttaaccatagtgctctttctaaaaactccttttaaatttcttattacctgactttagccaggccaaatggccaatatttctggcttctgaactttaccaatggtaaccttacagatgaaaccaacaaagctcaactaaggatatgacttaaccacaagtgtactaggtattttcaaagaggtggtaagcagtttttacaaaacctggaatttttaaaggtagctcagagaaaggaagatttaagaagggaagctagaggttgttcatggatgggaagaaaatcaggaagtggtaaaagtcacacaggtgttaaccagaaagtactcattctctaagcttggaatcaaacccaggccaccaatgtgaaaggacaaaaccttagctactgagctacaatactgggcagtctccatcgcccttcccagaaggagtctagagtagttaattttgagcttgcaaagcctttcaactactcaagataatttttagagtttgctgtgacatgaaccctaaaattcctatcccctggaaggcagagaccaagagaaagtaccaccacgaagttacaagttcaagctaccaatgacataaaacaagatggagacctaatccagtttttgtttgtttgtttgtttcagggacctgctgcaacacaaaagaaaaaaaattaatgcactctagtgtatttgttgtttatttggaatgtaccactgtaagttatctttagtaacgtttcgctgtttctgtaagactttgctgcctcccgggcctaatgtataagccagaaggaacttggttttccagaaattaaggatcccatttttacctaaaacattggctttactatcaggtttcctagattaacttagccaatgaattttttttcccacctaaacgcacaagaaaaatgaaacaaaagagtagaatacaaaaatccctgaaaatttttaaaagccaaattttacaccccctgcaatattaccatttatgaccagttcctttctgacccagtcagatgtaagagtcctctaactggatccaagccagttaattcccagatcaaatccattcctggacccagtccagtttctgtcatgacttccaaacccagcttggatcagaaatttgctcaaagaaactgagagctcaaaacacaaatccatggagctccgaaatccgagagagaatttacccacgatccccagccattctgagagatcaatggacacaaataggtcctgcagttaccttgcttgttcactcagtactcctgggggtcgctagaagctgtactttggatcccgcttctgacaccatgttaaaagaaaaacttcagccaaattaaatttaaaaaagtttaattgagcaatgaacgattcacaaattgggcagccctcagaatcacagcagattcagagagactccagggttgcctcgtggacagaacaaatttatagacaaaaaaaaaaaggaagtgacttgcagaaatcagaagtgaggtacagaacagctggattggttacagctcggcgtttgccttatttgaacacagtttgaacactgagtggtgtatgggtggttgaagtatggctgctgggattggccaggactcagcgattgttacaggtgcatactcctaagttagattttcaatcttgtccacctattaagttaggttgcagttcatccacaaggactcaaacatagaagtacagagtccttctcaagccatatttagtttgctttaacagcttattaaagtggggtttgtgaaagataaagtagccccaatattcaccagcatggtacacgttccctgcttgtcttagcctctgtttctcattatttatcaaaaggcatcacaggcaacagctagctggagggtccctcctgcagccaggctgattgtgatctcatggactccctctagtgggcagaccatccccgctgaaaggaggaggctccttggtagacttggatgactaggcagcctctctcccagggacctggctgtttgcaatgtaggcagacatcttggggtgaagggtttcttactctaggttctttaggctgtggtttaaaacaaggagaagatggtccctttggctttggcccctgtaattgttgcaattgaaaagacataagcttattagctttttgtgctttttcttattctggagtcctttgaaaatgctcagctaaagccacgaattcaaccatgtctgtcattccccatccaagttcatgcttcttaatgcaactgctaaattcgggacaacgtttgtttataaatagagcagttaatgccattttagtccctacaggaaattctccttgctgtcttttgagtgcagaatgtttcacaaatagtgtttctaaaccagctctgcaatatgaaatgggtccgtccttttttcacctgcaagactgtctgacagatggatcctttttttgtggagaagacttaggaactgaatttaaaaggttttcagtgttcttccagcttgttgtagcaagaaggttttttaaggtctttaatatcccctcgggttctctctattctgctgctttcatacacctttgagctttaccaagtcccaaaatcaagtgaataa

SEQ ID NO: 40999 - DNA, 1099 bp, Homo sapiens
agcagaagttaacacactgatgctgtgatcactgttcagtaggtggaatggtccttagtgatccttgaagagtagctgcaactggaagacacagaatggagagggtggatcatgcaaatgaaaagatgggctccaacattcagcggaaggaatttatggttggttcccccgtttttttgttggcggtggtggtttattttcattccccatgcccggtccttctgatggcactcactgatttggctctagggcacaagtctatgttgcatgcagtcctggtgtaacaatcaattgaggcatttcctgggcgaggagctgggacacgggccaagccaatcagactctggttcccccaggacgctgagtcatagtggagccatgccaagacggaaacagctgacctgctgtgctgctgccatggctccctgaggagtgtccctcagttcctaagaggggactgtctgcacgctggctcttatgggttgattttgcactttttctttgattctgagagctacccacatcctctccaattcttgctccagtcaaccagacacagtttctattgcttgcggtggaagacatgcccatgcagaaggcgtcaaggctcttgggaagatggggagtggcatgtgttctcatggtgttcacagctgcacatgggaaacacctcattgccttcgcacaacaaacccaagagggagggggttccttccccaattctgcaaatggaaaaactgaggctcagaggggaaattgatctctcagtgtcacagccaatgaatgacagagggaaagttgtggtccagggctgagtccgggttccacagtgtgtagatgaatttcttcaaccccttcatcatgtgacaagagccacaaggtctccaggcctcctggacatgacaggtgtttgctcacaaactgaaactttctctgctgggtcacaccctcctcgcccatccctactcttggtgcagggcatgagctggaccctggaagaccaatgggtattcaactttcagaaagccttggcgaggtctagtgatgaaataattttgtcatttggaatgctgacaaaaaaaatttgaatttttcggcc

SEQ ID NO: 41000 - DNA, 1293 bp, Homo sapiens
agggaaggaaggagggaggcggggaggggtacacaacaagggcagcctaggctccggttgctgtgacaaagaagcggagtggccctgctgcattcttttgctggcatttggcataagcctgtgatagataaagagcagaaggtgcctttagggggcaccgaagaacagggtcgatagggctgggggaaagcaagtatttcaaagctaacttttccatcatttttgtgtttgaaccatgtaaatgtattgcctgtccccctaaaatggattaattgagaagagagcgagaccacgccgagcctcgggccatcacagcctgaatgggaagcagcgaaccccgctgtgacggcttcaggccccggcctgtggagggtgggggagtcgcccttgggaggggctgggccccaccgccggctctgcttctcacggcaggggcgcccccaggaagggacaggacagggagctttgtcccgcagcgaacgggaacgcggaggcccggcctctcgcctccccaccctccccaccctccccgcgccttctcgggcctccgcgtccgccctgcgccctcggaaggcgccgcccggcggccgcggcccttcgccgcagccagagtgctttgtccgagctcaaaaaagccgtctccatggaagcggcccttccgctcggagcccggcggcctggagggagacccggcggggatgcgaggattccgccccagccccagaggacgcggcggagagcctggaggaggcgctttgagagtcgaggtctcccgcccgcgcgcctccctggcgcagacctcttttaactttttggcgtggagtgcgcgtcctgacgtgccccctgagctacagcttactgagctttactggcttcgccggacagccgtccccaggtggagagacagcgcgtcgcgcgctgcccgggccccgcagggcctggcgcctggggcccttgcgccgctttggggcgaggggatcacaccgcgggctcccggagcttagcgtcttccacgcggcgctgtgtgtcatccacgcagtgtgctctcgctgccgtgttcaggtcactgcgagggtgagccccgctttatctaccccttctgctgttgatgggcactcgtctggggctagaagggataaggttgctgtgagcgttctcgtgtgtttttggtgcacgcgcacacacatttctctggggtgcagacctgtctagtagtggaactgccgtttcccagcactttggagcaaagccctgttgcagtctgaagcggaaaaggcagacgggccttccatg

SEQ ID NO: 41001 - DNA, 2671 bp, Homo sapiens
tacaaagatatctacattttgaaattaaaaggtatcaaaaagaaacaggctttgagaatccctgtgcctccacactccacacagggggaaattcagccatttgtgcatcctttacttgggttggagaaggtttttcttttgttcttaatctcagaattccagatgtcagacctggaagagcataaagacctcctcgctgaaagccccactttatgcatgaagaagtggggcccccgggagggcgcggcctggctggtctcacagtggcaggtcccagcatcatctgctgaggggaaagggctcttctccaagactggacaaagcttgcagcccccaagcaccccagggactggtgtctcctggtgcctatctaatggccttcaggtcctgcacgggccccacagcctgaccagcggggggcagtggagggctgctgatggccccaatcccggtcttctggaaactcttgcagatggggtcgggggatacggccgtgcccccatggctcaggttctaagacggggcacagacaacccaaaaccactagaaacgccttaataacttgccacacagagagcgatgggcctcgcaaagtcaacgctgttgggttttcctccacccttggatcggatcgctgtttatgtagctcagcggagaatttcaggaccttgttgcgtgagccatacctatttttacacactagcgtcagcctcagggtgacagtggagatccaggacggagacctactgtggggcaggaggtgccaggtttccatccgttgtggcagagcacctagcatgagtgccacatctccctcctccctcctccctcctcccctcctccttttcccctcttcctccctcctccattcttcccctctccacctcttcctctccctcccccttccctctccacatctccttcctcttcctctcctacctccctcctccctcctctattcttccccttcctcccttctcttccccctccctccccctcttccctctctacatcttcctcttccccctctgttcttcttcctcctcttccccatcctccctctagccccttccctctccacatctttttcttcctcctccccatccctcctcgcttctttctcttcacctcttccccctccccctcttccttctcccctcctccctgtcctcctttccctcctcctaaccctaatccaagactaaccttaacccaaaccctccttgtcctcctctccctcctcctaaccctaatccaagcctaaccttaacccaaaccctccttgtcctcctctccctcctcccttccctcttccctctcctcctccccccatcttcttcccctcctcctccttcccctcctcctgcctaacctcctccctcctgtaatcttccccttcctctctcctcttcctccccttcttctccccctctccctccccctctttcctctccacatctcctcctcccctacccctctctttcttcctgcctccccttcctctatccccccttccttcttcttcccttcctccctgttcttctcccactccttctcccgtttcccccttcttctcccccctcctccccacccttctttcctctcttcatcttccttctcctctccttccttccctcttctttctccccatctcttcccccttcccctcttcctccccctacttccccttctttcttctccccctcctctcctctcccttctccccctcctccctccctcctcttccttctccccctcctcctccttttcactggtctctcctgggctctcagggtgtgagttttatgtcttccttttcctctgaatcttagactgtctgtgtgtataactgattgtgacccagttcaatgtgtggctgatgcaaagcccctgtgtgtgcgccctccctggtggccctttcatctcattgcacaatgcagagtggagttgcatcatctcagtggcccggccaacacaaaactcagcacaccccagggctttctgctgcctcttgagtaactgttctctggcgggcaaggtggggctggggggtctgagaccctcctgccaagagcaaggcccaagctgtcagagctttctttccagccactagcatgtggccaccgccacttcctctcgtgcccccctcactcccgccaagcccagcttgggccaccctgtctcagagccaggggctcccaggcaaggccccagcagaaaaggcccatgaagatcggctctccatagcttctctaggatgagccctctggacccccaagctgaatgcccccaaatccaggcctgtgctcaaaatataaggcaaaataaaataaaataagctagaagatgttcacatttcaaacttagatttgtttccacaaaccaaagacctatatgcagtgaggatgagttttagcccacaaaggtgcgcatgtcattttaatgcaatttgttgctcaaattaatctgtctccgttttctattttaatttaaccaaaatcccagtcagttcagggacctccaccccttttcctgagcccgtgtcccagctggcttatctactgccgaggcgtgtccttgccctagcatctgctgacaatattgtcattcccttcagctgtcgttgtagatggagtctgcttttcctttctacccagcatcacctgatgag

SEQ ID NO: 41002 - DNA, 2516 bp, Homo sapiens
attactaaaattatattactttattattttacaagctttaaaattgtcgcaaggccaaacaaaacgtatctgtgagctggaaatatgtggggcactggggacagaggcagagtgtctcgatggcctctgctggcatgtggtgcctggcatgttgtaggcagtcagcaaacagttcctgaatgaatgaataaatgactggatggataagtgaatgaatgaaagggttggcaggatgccctggttcccacggggctgggatgctcacgtttgccccgtatcccaagagagaacactgtgtccagagggaggtggtggagctggcatggacacagggctggctggcggccacccgcggccaggagcaggactggggaggccaggcgctgcttggatcagccttggagcccctatgggcactccggttctccaggcaacagcttccagtcctttagcccctcatgtcacggtttaacacacacacaagccccaaaagaggccccccactgcacccctcaacgtcctctctgtgcagcttttcccagcccttcacatctgcaggagactcagtcctgagaggccaggccgggatgggcgggggctaagaagggagggaggaaccaaggtttctcctccagcccagggagccaggggctggcattctgtgtccaggacttcgggccctctgtgagcctctgtccgccaaggcgatggagctgtgtttggagtccctcgtgagtacaacactccactattgtgcctgtgtgcacgctgtgccatggatatgtgcgccccttttatttgggtacacaaccagctatgttttgtgtgtacaccactggagttatacgtgggtaggggtgcacaatgtgcaggcttctggaatgtgagtgtaggtctccttgtgtgcaaaaaccacctactatgtgcatcggtttgaaaagaccatagtgtgtgtttgtacaccaatgtgtgtatgtgtgccccacctgaggtgtttctgtgcatgcaaaggctgcgtgtgcgcccctgtgtgtgtgcgcacccttttgtgtgcatacaccctgctgtgtgtgccggtgcgcacatccccagggccgaagcgtgagagtggccccggtgtgtcccggcggcgctgcttggctctctcgcctcactttgaatgcttaccgtctgaatctcccactgcagacgtcaggccacgtggccctgagtgttcgtggcggccgggccggctcagggatcccaggctgtggctcagggatcccaggctgtggctctgggatcccaggctgtggcgctggggcggtgcgctggccgtgggtcgagaggtcgctgcgccctgcattcctggccgcgcgcgcacaggctggaatccgtacattccattcataacattcccgcaagcgaggggaggagacgcaaagccggggagtgagtgattaaagaaaagaaagaagggcttcttgcagctccgggctgtgttttttcctgcgcgccctggcgcagtccccggctcggaaaggcaggagcacgtgagcggtttgcagagcagcccggcccagccgcgcgcccgtggccggaggctccatttaccctccgcggagggcgctgtgcggcggcacttaagcggcagcttcctctctcccaggcggcctttgtggctgtggccgggacagggaaaagctgcccaggccaagagggcgggggcgtcaggggcagccagcgccgcctttgcgcaactgaagcggatgaagccgcctgctctcaggtcttctaaggagaaggtctttttatcactcccattttacagatgaggaaatcgaggctcagagacaggaagtagcttgtgccattcattagggtcccaggcctggtacctcctcccgttgatggcagtaccgattgcctttgcaaggacccagcccttcaccgtgtgtttctgctctcctgacccccacatctcccttagctcagtgacactctcctctgggaccgtcctcttcatcctcctgcattttccagcgccccttctcttagcactgtgtgtgccgtcccactgcctcccccgctgagctaggccttcccccaggacaggtcctgtgaaccacctgtgcgaggtcagtgggcagcatggatcctagatgtaggtgggcagtggggcaggcgggggtctatctgggggacgtcctgacatatggagggatggagcatggctttccttgagacagagccgtgaaaacaggagagaagagggagaatctgacctggcacccaggtgggcagggaggcccatgggatgggggacgaccaacttgtctgggacaaatggtgcgagacactctgccacgacaactctggccacatcccagaattgggcaagggcaacatggagaaggcggcttgattccaggtgccactggccctggccagaggtgaggctggaaagggtgcaggtttgctgtgggcctctgaggacagctttcaggagctggaggttgggggcggggggggggggc

SEQ ID NO: 41003 - DNA, 1737 bp, Homo sapiens
agacatacagttaggtagaaggaacaagtgttataagttaacaatattttcttgtatatttcagtatagctaaaagagatttgtaatgttcccaacagaaagaaaagacacatgtttaaggtcttatatatcccagttaccttgatttgatcattgcacattgtatatgtgtatcagaatatcacatgtacccccaaaatatgtacaacctaatatagatcaataaaaataaataagcttttcattttcatttcaaatacattaaataccaataggtgtaactcaccatttaaaaaaggtcctcagcaatttttatttaatttattaagagtgaaaaggggtcctgagactaaaattttgagactcgctggattaaatagagtttaaatccaggttctgtccctgaacgtctacaaggcctagaggaaattactttaaacatgtgaagcctcagtttctcttcttaaaaggagagaaaaggcaccttcctcattgtgtgatgtggctcattactgagacaatgcaaacaaaacacacagacatgtgcccagccctcctgcatggtggagctctccttccgggtggaggctgccagctgccctggcttgcgctccaaggaccagggtgcccatggactctgaagggactcttagcagctagctcctcaaaggctggccaacaaggacaagcagagcccctgccccagagcattcatccagcctggcaccctccccaggcgggcgcccggccagctccctgagtacacattttcctacatgtctaaggtgtgagaaaagtaacacatttgttgttgatcttgttggaaaaggcctggttttaaagagcagtgtgtttttaacttgttgcgaagtacattctgtaattcctgaccaaaataccaactgacgttaaaaaaaacctccttcatggaaaaaatattttgtttggagagtgatccttaaacgctagtggagggtgcaatgcctcctcctaaggccattccaggagggtcagccgtccccccaagagtgctgggactcagcctggacagcctggcttctgccacaaaaggcacagaagtcaaacatccagagaaaaccacaggggaaaaggagctattcaagttgaaaagagaattcagtgaggtggccagttacaaaataaatatacaaaactttgcggcttgccaagtgccccaaaatagtcgtaacaaaatatattgggggaaaaaaggccccattcacaattcaataagaaattagaaattcctaggagtaaactaaacaaggaaacacatacaggacctaaagtcagagggctccaactattacctgagaagcacaaattatttagtaaatggagagatatatgtatacatgtccctggataggaagacacaatattgcaaaaatgtccattttctggcaataaatatttgaaaagaaaaccagagcagcagggaatgagatttgccttatcagatattaaagctaaaagtcttttaaaaattgaattcctgatgccggaatgcagtggcacagaatcagaactccacatgcccaccggaagttatgtaagcatttaatatgcgataagatgacctttcaaattagtgtgtaaatcataggcgtttttcaataaacagtttgggcaaatggccaatcccttgaaatgaaataaagttagctttctgtttttcactctaggtggattaaagattcaaacgtaacatgaaac

SEQ ID NO: 41004 - DNA, 1668 bp, Homo sapiens
ttcttttccagtgttttttttatatcttgagttaattttagtacttgacatttattttatttttttaagagtcgaggtctccctatgttgcccaggctggtctcaaactcctaggctcaagggatgctcctgcctctccctcccaaagtgctgggattacaggccatcacccctggcctgacatttcttttaaaaattatgtattgctttaagatgtttaagcatattagctcagcattctgtactgtatttgtcccactttaaaaattttccttctggtccattttgcactatgcctacggcatgttttccatagcattagcctccccccacccccccggccccaatagagccaaaacagctaccagtgtcccctgggagtcagggatggcctgggctggttcaggggactgtagctggagcccctggctggctgtgtgattctgcccagtcccccgctccctgtccgggccctctgttctctccttacggtggggagaggtctgaatgaggccccagctcacgcactccattatcttgaggctgctcccacccccaggcccgagggagacagaggccttttgagctggggctggcaggcgaggctggagtcccagggctaccagagcgttgcggagggaatgctttgaagaggccccgcccttcctggggctgcggctcagctccggcctccctcacccggcagggattcccgttctagggaacatgtggttcgtgccagccagttgatgtgggcgctttcttctgcccctactcccggctgtccgcttcctccccagccccctcctgtgagctctgggagctacagaataaggacactccttggccccaagccagccccagcttgctcgggagcctgggtttccccctccgtccccatcaccgcgagggtctgtgcatgggaatctgctccagaggctccctcaggcgccgcgccgcggggatacgcctttcaccgccccagcaattggagcgctgagtcgaagtcctgattccacgataggcggatgaagccctaacgctgaaattctttcctctaggtctttggcagcggctggggccaaagcccgggcaagaccaacgccttcggcacccggactcaggctccgtcctctctgccagcgtgcggctacaatgactcgacatggcaggtgggcaagcacagcacgccccaacagacatgctttatttaatatgtactaaaaatacagcaggcctgtgaaacccacaggtgcaattgcttaaaatgaggctaaggtagacgtgtgaatggttaataatgagttgattaaaatattcagaaatcatctactggagacgggcaaactgcaaaatggtagcatgggagcaactgatgttcgagaaagcccaggctccggcaagccgtgggtttgaatttacacatgcgcacataatgggtatgaataaacctttcttcaaaaaaaccagatcaagtcaaggcagttatttgctgtgggcaggtgccaaggctggctgcttcagtccccacgcgagtcgcccccgagcctgcttctgcagcccagcctggaaagtgcaaggcacttggaaaggagccacgcccaacgccctgtaccagcggcctcccggacaccaacagcgtcctctgcgcctgctgcagcttgtccc

SEQ ID NO: 41005 - DNA, 1155 bp, Homo sapiens
tggctgaatggctgcagcgacttcctccacagaccctgagcagcggcagtgtggaggctagacccagcctgctgaccggggcaggatcaatagatggattagtggggccagtgggtctttgctcttccagaattccgagcagatacaagtgcacctggtagaggaagcacaaggaaccatcctccatccttaatgcacggagggtccgctgaacgtcaggccagggcaagacttgagggcagggaagtgatccaggccacacatcactgggtgcgaaaggaggacaaagagagggtccaggtgaaggggtgaaggtcgcacacacaaacctcacaaagcctcacgttatggactgggctttgctggaacatgggaagtttcacttcgcctgctgtgccccggtttccgcatctgtttcttctgtggctaaatcagtgaatgctctggacctctgctctccacactccagaacttttcttcctgccccatcaaaatgtacccatgcagggtttcagtcctcagggctttctgtgtagccgccagggcccatgagcacaaggttttgacactgagagcaaagcagaacatcacgtgtttcgctttctcgctaacaaggagtgaagtccaggaattccagaccttgttttgctaattgtagaggctctccagattggacggcttcccagctgccctcaaatcagatctgctcttctggctggcagacctaggagagagcagagaggcagacattgaagaaataaaacaagaaaacacacaagagctgcagaaaaatgagcttacagagcactataggaataataaaacaggactcacacgccgccacgcacactctctcaccctctctgttttctatttcacttatttccagtctaatctttattacttctgctttctttcttttttctttttctttttttttttttttttttctgagacagagtttccctgttgtcgcccaggctggagtgcaatggcgccttctcagttcacggcaacctctgcccccggggttcaagcaattctcctgcctcagcctcccgagtagctgggattacaggcgcccgccaccatgcccggctaatttttgtttttttagtagagacggggtttcactatgttgaccaggctggtgtt

SEQ ID NO: 41006 - DNA, 553 bp, Homo sapiens
ccatgctgccagctcgtgggaagggggacccactgtgggcacagctgggacaaaacaatgtgcttacaatggaaactcctggctgccctctgctcctacctccttgccttctcctgcaacatgtgccccacattccagctgtgctcatgctgcccagatgacgactgcattttccagcctccctggcagtggatgaggctgagttactgagttccggccaacagaatgggagtggaagtgagtgtgcaaatcccaggagggcagggcagaaacatggccccttgcctgcttctcccagctggcccagtcctgtggagccaaggggcattggaggagcaacaagagcgaaggaggctgggtgccctgtactcagtctgctgtgccagcccaggctgctccctctgagaccatctaagcagaggaaaataaactgctatgttgtttaagccacaaagtttggggatttctttgttatagtagcctaactcatactctacctagtacagtgatcagtagatggtacttccttcctctctgtgtgccttaggggcag

SEQ ID NO: 41007 - DNA, 1307 bp, Homo sapiens
gcccaggatcaacaggcagtgcggccccattatccctgttccctgcactgtgctgtactctccacgactcagccaagacctccaggaggcacactcatcccggggaggtgcaccatatgtgtgcacgtacacacaattcaggtgcaagcctggaagcccagactgaggagaccactaagaccaccccttacacacactccctgccacaagacaacagcaggatgttgggacacacacccaggggaggtgagcagcgtgtccggccggtccttggcacagaaggtgcatatgctcccgaggttattccacgtcccatgtcatcatcctgaccagacaacaatcctccctgtccctctgacgtacctcttatctagggctgaactgcttgtttatggatgaagaaagcccatgttaacaaggctggaaatcaatgccttgcttccctagagtgtgtttgcccacagagggtacatccggtcaggggcaaaggacagaggtcactaggcccagcctcctcctcgggaccatggccagtcaggataggatgtccatcctcctatcagctgtgctgtgtgctgggcggctggtgagaacaacggcctctgccctctgagatgcacgacctcacacagacccccacattcagacatctctctgctgggagcccatgggtgccctacccccagcctccagatctccaaggttttcaccgagaaacacttgacccgacttgcatccagttcttataaagcaaaggatccttctagaaggttcttgcttcccactgcacatgactgggtgaaccagggcagccctctctgtgtgtgtgtgcttcataccagctgagccactgaagcaggccctggtcagcctccatttccttgccattccctgtggggctcatagcccctccttgtgcttgggcccccacttcccccaggctccagccagcacaggacgtgtggatgggtccaacctcaactgtgcaaccacacagcgaagaccccaggcatgttggggagttagggacgatggaggacaggacgtaactgcatatactggcctctccgagtctcacctctgcctgctcaggattcctaacactttcacaattacccacgccagtaggaaatggcacagccacgttcctaagggggtaaatactctgccaaggcacagcaaacatatagggcatgtgtaataggtttggtggactggatgggggtaggaagtgcaagaaagggtctccgatagcagagtaggtgagcctcgcaggactggccaggcctgaggcagcttcccacagg

SEQ ID NO: 41008 - DNA, 7724 bp, Homo sapiens
aacagcacacagcgccccccaggcaggccagagattcctttgggatgggcatcaggaactgcagagggctggctctggcaccccggagcacatgagctcttcgcaagcagcctacatttcaggaaaaggtggacagccactcccaaggaggttgagcagcacccggtgctcagggaagggtgctccctggttgggagactaccagttaccatttgaggcctgatttccccactgccatgcagaccagacagcctgggttctgccacctgtgacagcaccaccagctggcctagcctccctctgggttggcctttgcagcctcccaaacatgcttccacgtccccagggaggaagcataggcgaggcccagcccatgtgtccagagacatctgtgaatgaagctagtcccactggttggggaagcagcattttcaggatgtgacctctcgaatccggcctctgggttcaaatcccattcacaaagcagagtgaccttgggcaagtacctggccagtcggagccctagtgtcctgtgatgtaagttgggagtgatggtggtacttaccctgtggggctgtgggcccaaagggagccgctgcctggcccctagaccgcactcatccttcctcgccagcccctcaatccccacccttgtcagactggatggggagacccagctggcagcacaggccagtgaagccttacctggccatcaggaaactggacaccagttggcttccggcttcaggaaccaggaggaccaaggaagcctccaggcaactgtgccagctctgggcctgcacccgcctgcccctccctcccctccctcatctaccttctgttaatggtggaaaatggccctgctgcacacccaagtaagcagacatgagtggctgtgctcactgcccaggcctgtcactcgctatactgacctccagccgcagcctggccaggtgcaggcgaagggcttctcacccgtgtgccggcgcaggtgggccttgaggtggctgcttttggtgtacatcttgctgcagccagggaaagtacatttgtgcattttgatgagttctgcggctgggttcttggggaacttctggcccatgaggagaccggcagggccaggccccaggggtcccgatccaacaggcttggcggcaatgggcacaggggcaatgcgcacaaacttggagggcaggttcaagttggaggagggtaccacctggggcacgagtgcgaaggtctgcccctggatgttgaccaggagctgggcaaccttgacattctctggggcttgcccaggggaggcaggccctgtgcccgattcctgcttcacaggcacgggctggatctgcagcaacactgggatggggccatcaggcgtggggcccccacctgggccctgggcacctcctgcactggcaccacctggtggaggggaacagcgctctctcccgctggacccaggatggaggtggctcttgtgtggcccagctgagagctggctgcaggcatccaagtccttgctgttgccctcagggacctccttgactccaggctccatgttctcctccagaaactcttcaatctcctccagggtaggctggaagggccgtgggacgtcatcaggatcacccaaaggaaactcgggcaagcagaaatgctcccccttcacaggggccgctgcccttcgccagggcccccaggccacggggccactgctggccccaatgctactgccgctgcccccgccactgcccagcgtggcctgggacaataggaagtccaagatgctgtcctggctctcggtgcccaggcctccaccatagcaggagcagagggcttgagagtcgggactggaacaggagcaggggctggaggcatcgctgtcatcttcagagacgggtgagggcagcatgtgatatgcccgccggccaaccagcctatcacccagatacccaactgggcattttggcgacgagaagttctcgtccactggaagtaagtggtccaccatgctggcctggccgtgccggtggcggctgcaggaaaggaacacaggaggcctggtcagaaggacagtgctcacctgccacctcgcaggcctctgaccccaccctcagctgcctgcccacagcctcctattgccaaacgcctggatcctgcttccatcccccaggagagctgtgcctgcaagagtgttttctgaaattgcaccacctgtttgcaaaagagacctctccaagcccattgcataaccaggggcacttctggtttcaaacagattttccagaattatcctggaaaatagcacatatgtctgtgaacaactgagtatgggtgagtatgagagaagggcatgcgcgaggaggctctctggaccccaggagggccaaagccctgaatcagcccaccgtcaacatcataggagtcactgtacatctgaggactcctgacctcagcttcacgcctgttgagtcacagaatgggggtagaacagccatttgccctctgaccctcatgttgctgaggcttccagagggttgccagattacgcaaataaaaatacaagccaacagttacattcgaatttcagatttaaaaaataaactatttttaatataagtatgttcccaatattggataggacacacttacatttaaaaattatttcacctgagattcaaatttaactaggccgcctgcattttaactgggcaagtgtagcatgtaggcaaaacagtcaaagaccaaaaagtgcctgcctgcgcagctgtttccccacctaaagctcctccactctccagtcctcaaacccctctgagccttgactgccctgtgagtggcacaggcttgaacgcaaccctctcacctgcaccctgatgcttgagcatcctggtggccaaggccctgcccctctggtgataatccgtggagtggaagcagaccactggggtcccagagcacccgcatgtgcctaactgccttggacttcacacccatctagtgggaaaggagacaaccacccccccagcccatcctgaccaataaggaagtggagtcccctgcactctctgccattgctctctccatctgggacactcaccgccttgcgaaggttcagctaatgcctgtctccccctgagacagtgcactccatgtctctgctgcgtccccagtgcctggactggccgctggtgcccagcaggggctcagagaactttgatagagaggagaagggaaagctgcatcctctgaagccaaggacatgctaggtctggtgccaaggagagtcaatagtgtccagctgtgacggggccacctctgtgaacctttgtccctgctcagtgaccagggcaggctgggtgtttatcaagcttggggaaggggaatgctctgcaccaaagtcagaggttctctgctgcccagcatcacctctacacccagcccctctgtctccaggaccccttcagggcctggcacccggcactgcccaatggccaataccatcatcagctacaaccttgagcaagtccttgctccccttcccaaaccttagtttcctcatctgttccatgcttcaaagatctctaagtctcttcctgctcagggaccccaggacctttagccccagttcccaacttacccaggaagcttcacggagctccaggaaactaaggcaaggtctgtgccccaggccagttttactaggaggacatttggctttttggtttaaatactcagctaaggatttaaacctggaatatgttttaaaatgcacctattcaccaaatcaggtgctgggaaggaatgaaagtgctagacactgtgaagggcacaaggctgggcagagcccacactccaccctgggcctcccccaaccctttcccaccctccaagcaggggctccatttctgagtctgcaagttgtctgccaggtgacctcaggcaggtgcacagcctttctgtgtctgtctcagtctgtgagatgggggtgcttccaacagtgcctggttcctcaggtgttgtgagaattccgtgagctgacgctcactaagcacccccctcaggatctggcacaccggcagcactcagccagtgccagccattggtgtcagcctgcaggcacggcaaacgttcggcctctgcccctctactgtgatgttaaggaatcaggggcctccagccctcctgggacccagagcaggccttagagccctcccctgaaacgtgatcactaactggccatcccatgatattaagtaattactgttaatatttttaattgtgatgatcatattgtggttaaaggaggccttaccttttaaacatataaacagatattgacagataaagtgatctaaaaagtacagtaggggggctggaaggaaacaccctccaatggcttcccaaggacaggtggccctatctcctcgcagcagcccagcacctgggcccttgggactctctgcagacctcaccaccaactgcctctcttctagtccaggtgtgctcacttcacttcagcctcagcccggggccactgccctggctcttcccccagcactgcaggtgggagctgcttagttagatctcggctcagaagtcacccctgtgggggcctccaggcccactctgttacatcatcctatattatactcttccctgcagtttctactgtgggaaactatcttggtgatgtgtttgtgaactttcctccctgtctaccttcccatcagaatatcagctgtcctgactgttcactccaaggccatatcccagagtctaaaacaggaccgggcaaaatttgctgaatgagtgaatggaaggtgcgggggagagcgggggaggtcggagagtaggaatgggtggcccaggtcagccaacagggtcttaatgctgggctgaacgtcccaagggggaagcacccaggcactgacaacccagaaagggctctgggatgtcccagggcaccggcattaaagagaggacactctagggctggagctggctcggcccctgaaacacagcagcacgtggggcggccagaggcgcaggctgcgtgcagggggaggggacacgctgttccgggcacagtccccggctggccgccggactccgccccctcccctggcccggccaggcctgctgtttatcctcccggggacacagcggctgcaggaacaacatgtaattgataacaagcccagcgccggccaagggcttgccattgggtcagcgtgcaaatcacgggggtggcggcgggggctgtccttcaaaataagagtctccggtccctgagccgcccgcaggccccaaagtcgcagagtccgggcgtcctcacacctgtagggcggcagggtctccccaggggccacctggtccggggggacagggggaaggagatttgaggctctcaaacaattgttgattttgtcacctccgagggccgtgggagaaaacagcccctctgtgccctccgtgagaggggggttccatgagtaacaccaaggcggggagggaagagtgaaccggaccaccatatgggatggggacggcctctctgccccgccgccgccatccctcggtcaggccatggctttggtaatgttcggtctgagcggacggggactcagcgtggagtgagacgcgtgaacggtgcgggtgtgcgtgaaggggtgtgagttcctgtcgtgtgactgcgtgtgcggggcgtggtgcgcggcagccgctgtggctgtgcgggaggctgtccgcgaaggactcgcgcgtggagccgccgtgggtgccggcgggtgaggggaaacgtgcgtgggaaatgaagagagccggctcagaccccttctagagtcctggaccgctgcccgctgggcaccatgccctcgtcccacgccccccccttgcccccgacactgctgcggtgaccgacagtaacccctccgtctccagcccctccgccccccaaccccgggctggccagcgcgtccgctctccccctcctctcaccaggccgcgccggtgcccaccatatgggagggccggcccgcaaggcgcgccacggaatcgcccggccaggcaccgaggcggcggcgcgggcctcagcaaagtgctggtgggcgaccggggcggggggggtcacctcccccgggccagtccgacccctgcccacctccgcgggggcccatcccgctcctccgacattcctccagcactcgcgcggtgcctccgagagctgcgcgggagcacggccacgcgccccgaggccggccagccctctgatcacccggggccgcgtccacgcggccggccggccccgccgcgcctctcccacctgaacttggcgcacgccggaccggcggccaggccccggcggtcctgcggccgggcgggctgggctgggggcggcggctagactctcggtccggcggcggccgggggccgagccgcgggtcctgcgctggctcgatcgcccgccggcccgcgggtcgctgcggcggagcactagcccgcccgcagctcgctgggcactcactccccgccgctcacgtgacgcagcgggcgccgcgaaggctcgcaggaggctcggccccgggcgcgcgccccattggcccgcgctgcgcgtcacacgtcccgccccgccctggccccgccctggccccgccccggcccgcccgcgcggctcccggacttgagcggcggatgctcggggatcccggagctgccagacgcgcacgccccccaacacgctgcctggtccctggcccgcagccacctccttgcttcccacctctcgccgctgtctcgcggcgtccacgagggccggcttctaaagctcggttcccaaggtgagaacgtgagactggcctgaagacttaagaaaagctctgagatcgccccaaagtgcagtctgcgtgattgagcgggaagcgctggggagcctgtctggcccggtctggcccacgtccccaccttcatccccagcgcggtacaagcagctctgtcccccgctgagtgtcagataaatcacttgcctagaaggacgtatttttggataaatacggtattgggctttcagcaggacaatcagttaccctccggaaattgcgcgcgctctgcgctgccaccctgccctccaggactaaggaggtttgctgaccggccccccccccccccacctgaaaccaatgacaccttgtctctggggcacctttctgaagaccaaacaatgcttcgcagtctacaaaagcgttcgtagactgctttagtccgcagcaatcctggctcgcatttgggttcccgcttagagacaggaagagtaaggctcagagtggcttgcccaagaaaaacacgtgggctgacggtgctaggcaccctgctgtgccctttaatccacactccagctggatcctcagccaagcactttacagatgaagaaaccgactcagagagggcaccagccctccccagccccacagctgggaaggagcaggtagagaggtagagccaggtcatcttgcagacacccccaggccacctgtgcagagctgtcctactgagcttccttcctctcccctcctggcactgggaggtggggagcattttctcctgcttcttcttgaagacattgctagaacaggaatttttaaccataccctttccaggctctctggaatgctataggtctaggcttgcttgaccagggatctggggacactgtgcaccaggtc

SEQ ID NO: 41009 - DNA, 2161 bp, Homo sapiens
aaacaggagactgtctctctccctctggcctcccacctgctgagtgtcagggatggggatggtaacccagtgtggggcccaggctcctcccactttgtggctctgccattgctcagtcacagccctcactcgcgtggcccaagatgactcaaacacacacacacacacacacacacacacacacacacgggctccagcccctggggagaggaaggagggcaggaaggcacagagctgctctataagggaatccggcagaaggagtcatcatcagcccagggtgtgatgtctccctgccagcaggttgggagcctggagacctgcaggctaagccctgctctaactggctgcagagatctgagcaagtcaccaccctccaccggtctctgctttctcctctgcaccaagagttcagccaaaacagcctttggggggtcttgagtggaggactcttaacttacagctctttgggggcagatgggacaatgccttggggaaggacagatggtttgggctgctaggcctccctgggctatggcatgaggaagggggcagaccattgacatagccctggaacttccaagctttcttagaaaaacatctgtggaccaccagataatataataggtaattttactgagtgcttcctgtatcccaggcacacagctgagagctaacattcgagcaattactgaaggccgggcactgttctgagtgctctacaacttccacctcacctaacatataatctcccgctaggcaggcgctattgctattgccatgggcatggtgaacccataaaacaagaaccagccgccatgaaaaaggagcactcagaaaacgagagatgattcctggaaatgtaatgcttgatgatatccatgcaaactcaatccaaagactgaagagcagaatggacacaccaaaggagccaaataaaacgacagatggaaatcatgagaatattccacagccaaggcttcagtgtccactggaaaggaattgagttcccattcagaagggaagacaggtccaaatcacctccccagccccagcctgccctccccagctgaatctggctggcgggcattgatgggtgacagggagttaatgagtcactcctgcctggttaaagtcctcaaagtttaacacatgtttttcaggccaaccttggccctgaagttcccatcccctttccccaaggtgcccgtcccgtaagcccagcagactggggtcaccggctgtcactcagctccaagctgcccaaaaggaaccaagggtgggccatggctcagcacatgagggggaagcttcacacacaaggaggggcctcagagggcaatgagatggcaccacccacccagcccgataccaggcacttccacacaatcaggataacaccagtccgagtagcatgaagacagagcatgccaatggccagtccttacactgggaaatgttcaacctcaccactgatcaaagaaacacaaatgcaaacaagatgctattttcatccaattgacagggatattctggaattataacactgttggaaagaggttaaataggtacatttccagaaaacaaccttgcactagagccctgagccggtaagtctatgttcagaaactgattcaaagaaattcagatttgcagccagatttatgcacaaacttgtcctttccgatatgacttgccattgagaaaaaaatggaaactagttaatgaccaacaaaaggaaaactggtcataaactatgtcccgtgcatgcaatggaacatcatttatctatttaaatcaggtttttaagactacttgatgaaagttaaaactctatataggaattattctagatatgattttgcaaggaaaatttattcatagaaaaaaattagaaagaaatcaatacagaaatattcaagttaatgatttttcaaatatttatgttgaatagtgggatgacaagtgctctttctttttagcattacatattttgctttttcagattttttacaatgaacatgtattacttttataaacagaaaaaaatggtttgctttatgtttgttttgattgtgcaacttagttattattttgcaatagtttttctgtaaattttctcactgaccaaaccatcagaatatacagacaagtataagaa

SEQ ID NO: 41010 - DNA, 1427 bp, Homo sapiens
agtgtgagagtggtccaggcgtggtggctcacgcctgtaatcccagcactttgggaggccaaggcaggcagatcacctgaggtcaggagtttaagaccagcctggccaacatggtgaaacccagtctctactaaaaatacaaaaattagccggacacggtggcgggtgcctgtagtcccagctactcaggaggctgaggctggagaatcgcttgaacctgggaggcggaagttgtagtgagccgagatcgcgccattgcactccagcctgggcaacagagctaaacgctgccaaaaaaaaaagaaaaaaaagaaaaagaaaaatgtgttagcattttggcagaggggctctgtaggcttggaggccctgcccaacatatctctgtggattcctgtaacaactcaaggaagggacactggggcctgtggaggggtctctggcccctccggcgcccctttggtaccgcgccccgcctgcgagctaggaactgtggggacccggcagcgggcgagcgagcccaggtcgcggcagcactgcctgcgcggtcgtcttgacgcctgaccagggccggttttcaacttgtttacaagcctgcgtcaccgggaacctttcaccgccgcctgggacaaaaggttcctctttgtaagtcccttctgggcagaaaggggattcgccgcccggcgcgctgacggtgcggggcgccacgccgtggcggatgcggacagcgcgcggccggttcgcccgtctgccccctagcgccctgctcttcccgccgagcgcgtagtctgcccatagcctcggccaccagccccctttacatcgtccacccacccacagcgtcctgccgtccacgcctcgcccacccacgggttccccgcagtccgtgcctcgtccacccactcactcatctgcgcgtggctcaaacaggcatgccttgtccactccctccacaggaatttcctcctttcatggaaacaacttgccctcccgtccaccgtccactccattccccattcactgtccattgactcatttgaggaactatcctatgaacaccttccaggtgctacgcgttgcggtcagcaggtcacaggacacagctcctgtcctctgggacctccaggacagcagaggagacaccagcagaggtcctcgtgaagtgatcatggctctgggggcaaaaagaggacatatcagccgagacttgggcgcaggggtggcgaggctggggctgagacggaaagactggctgcggaagagatgggaggaggacaggggctaggcccttggcaggggctcggcagaggggaaagcctggaaaccaagtgggctccaggcagagggcaccgagggggccgcgggaagaggccagacccgaaagtcctcgtcaacagcgccacagagctcgggcatcacccggggtcacg

SEQ ID NO: 41011 - DNA, 839 bp, Homo sapiens
ccctgtaggtcctcacaaccaccctacaaagccaggtcccatcactttccccatttcacagaaggggatgctaaagccagaggctaggcaacctgccccaggctgctgcaggtggagccacacctcacctggcggtcctgaccctacgactgatgctttgaatgtctcagcaggttggctctacaaatcatcgctctggctgtgtgtggcaaagtcaattccatttctttgttaaatagaagtttcctcctcccaaaggctggagacctgccactgacggccaggagtcaagggactttccactgggctgccaaggccgaccttcaccctcaatcacctgacggcaacatagggacgaccgaaaggggacacagaatgaactggacctgcagaggccaggtgtctgccatgcagactgaaagggagccggggctgtgtgctccatgcaggaaagcagagtaagaaacaagaaaggcgtcaaagttaacacaaaccaaagtgacagcaggacgctctgtggagaaggaccatggcgctcactcatgcaggtgcgggaaactcggctcacagcccattctccagcactggggtcacacccacttctgcagcaggaagttcactgccaccaagcacctttctacctttccctgagacagtcatcaaaaccaaagctttactcacaggactaaaggagcccaggcccctctaggaagtgatgtccagagtctgcaaggggtctgagaccctcacaggaagtgtacaacaggaaaggcccctccacagctgctcacaggcaactgcaccttgctcaccctttacctgccagggctccaaccttg

SEQ ID NO: 41012 - DNA, 442 bp, Homo sapiens
ggttaccagctcttgtttggtctttaaaaatgcaagtaagttgctaacattttcaaataagatttcaacataactctgacaatgccacaggacacacagtttggctccatgtacacgtacctggggacagtggcagtccccaggtctctgccatgccaagatcaggccccaaggccattcagcaccaggcacaatctctgctttcctgacaactggcctgctttgcttatttaccttagtagccttccaggtaactgacactggtgtttgaacgcttaactttcacaaagcttgtttaggcaaataaaatatgttcatactgatgctgggaattttgttactaattttttcccttaagttcaaataaaactaaggagttgataaaagggtattctgaacagaaaagtaaaaccaagagcacagaaacacctgctgtgtttct

SEQ ID NO: 41013 - DNA, 675 bp, Homo sapiens
atcctaggatgacatttagagctggaaactatcttgacagatcaccaaagccagtcctttcactttcccactgagacaatggatgcccagggagactgagcaggtgtcctggagcccagagctggcaactccttgcttacactcccagtccacttatgtctctgatctgcacacaggcatcagaggaaaaacaagacacattcaaagttacaatcacctcccctccgtgccctggctttctactacgctggagctctgccccatatggacacaggaaggagacgtggagctcttggcggtcagaggcctatgacctggtaggggcaaatagaacagccagttgctgcaacaaagggcagaaggaagtcagtgccaacactgaaacatgcaagcagcagaggaaaccacacacctcccgagaaggcagaaaagcggtctcaggagtatgcagccctcgaggtgactgggccaccctgcagcagagcagatggtgctcctgccgcaggagctgcccagccaaggcatgggggcatgaagggcagcagtgcaggcaccccagcctgggttccagttcagcctcttaccagcagtgtggccttagacaaattatttatcttttgcgggtctcctttttctgttctgtgaaacgggagtgacacctacctcacaggggtg

SEQ ID NO: 41014 - DNA, 1786 bp, Homo sapiens
tcaactacatttttcattttctaatacagctgcaaactcgtttccaggtcaggctcgtcaaaaaccatctgggaaacaaaggagacagtccgacggcccaggactgccctgcaagcgcgcagtttcctctgcatgccctgctcaccatggtacacagggtaccctggaaccccctttcccagctgggggtcctgagcacggatttctagagacaggtcacagagcagaggctctgagcacatcttctgtcaaatgccttcttgatggcagggccacgctacaacaggacccttgcacactcttgccagcactgggtttccattttttaaagtacttgctaattccataggcaaaaaatatatttcattttggtttgtatttcctgcgacaaccaggaatgtaatcatttctccaagtgtactaactgctggcttttccaaattctgccagtatattgagatctgtttccattctttacaaatccaagctgcaaccagggagaggcagaagcagccatcactgacagacctgtctgcaaagctgcattcagaggacagtgaggcgctcacatggacggccaggcaagcacaaggctcggcaacacgagacacaggccccagcacacatagccccgaggccgcaacgaggccacccaacacctgccctcagacatacttctggtctgtggccttgtcctttcctcctcctcctgttactacaaaaaaaggtagttttgccttctactttttattacagaacagttcaaacacctaccaaagtggaaaaaatggtgtcatcagccccaactattgcccaaccccaagaatgatcaactctcagtccagctgagaagaggttctgggctcctcccaccagctccaactccatctccacgtgctgcccatacaccacgtggggagtgcccagtttctctcccagcacaacacctagacttgctggaagaaacagagctctacagaaacaaatgccctatcctccacggccaactcccacctttcccctttccccagtcacctctggcagaagtgtcagcacaaaccatccccatctcccactcaggccacctctcagggcaccagagcaggactctgcctgagtgacccacggaacctcatccatcagcacaccaagacaaccccgcaggtggcaccgaggcatgtgttccctggtcctggctcaccctagcactccaggtgacccccacttccacacattccccactcacctcagcaccacccccactgtgctgttgctggtcctgccagtacccgtcccagccactccaccggaatctggggcagccccagggctctgtcctaggtcctttttaagaaaatctaacagcaatcacaacaacgacagtaactgacatatatactgatgttttccatatgcgctaaacttagtaaccaatccagccttctcaacaaccctgggaggttttattcactttacagataaggaagaggcacagagagcttcaagtgtttgtccgaggccccagacctacttacgtggcaaacttaggactcgaatccaggcagtctgactccagaattcaggcttttgatcaactacactaccctgactctcctccatttatactcttctttgagaatttcatccacttttgtggcttaaatgatgattcgggtgctgtctgcttcgctccctgcctggcctgctctccccagcaccagtggcacatcccctgccctctgcgcattagacgcacaagggtaccaaaaacacaacatgtccaaac

SEQ ID NO: 41015 - DNA, 5065 bp, Homo sapiens
ctggtgaaggtccagccacagctgtcagagtcacaaataaatggtctttcaccttataaaagaaaaaattatacagcataaaatttacaactccaacagctacgatgaagacaaatcttgggtccaaatgctgtgcgttccctagctcattacctgtatggctccgcaggtgaattttcagccgacaggctttatcatactgcttgctgcacccaggaaaggagcaggaaaagagctcttgttccctgaagtgggctcggttatgggaaaacagggcactcactgtgataaatgtcttctcacagcctgaacaaggaaaacacaaaccctgctcaaagcgtggcaaaaattatacaacatagctaatgctagtcacacccaccagaccctgttcacactgaagcagacaagggaaaacatgactcagaagcactctctaaaaagggaagaccattaatgcttggctttgtgatcaccacaggaaggcagctaatggcagccaataggcacacgctggccacctgttgcaacatgacttggagatggagcaaccgataaagagaaagtcctccgttcacagccatctactggccggctccggagcactgatcctgcacacacactgagacccaagaaccccatgagagaaatcaaatactaaggaacaagattttgtctggtagggttgatctttgaaaggctacaaatcatcctactagccaggatttttcaccccttgggggtgatgctgcatcctctacatatccaaatttcctccctgacaccctccaactgccagccctgtcccttgctgtttggattctttttcctttcgcaatttccttaggttccctgctttgtaatcttcacctcaatcctaacccctggccaaagcagctaagcctcaacaattccacagcaatacttctcctccgacagaaacattcagggctccaacagggtggaaaacatgaggctgcaggatgtttaacaggagtctttgctgcagctcctcttggagcctttaacgagatactatcatgcctatgaactgccacacagatgtacatggcatagcactgcccaaaagtatcagcccaaggaaccctactttccccagcaacatctaactcagaaatgctgatctttggcctcaatctggtcccaaaatacctccagggtattttgggcttcggtgtgttcacacacttggtcatgtaaatctgaacacagactctctctgccttggcaagaaccccccacacccccatagataattacaccctttggttctccctctgcaatctcacctgctagagaccctcatcattcccactccctggctcaggccttcagaaaactcaggtctgggccctttgatgatgcttccctggtcctgctcctgcttctaaacatctaatctcatctaaccatctaatctcatctcaacacaagaagcctcatggatcagccaacacaaaaccctcaagagacctcatgcctggaagcaggcgggatccctgaccttcccagtgtcatacacagaatgatactcttttagcagggaaagggtctacagccaccatcagattcccaagagtgtatgactgaaaaagactttgagctagtggcctcaagccacattctctctgaagaggaatgcgcaagacagtccacaggcatatgcgagggaaaaaataataaaacccgttcataattctcatctcatcctttaaaaattcttgtttaaggacattataaggagagccgtgtgcatatacaggttaggggcatgctaggcacacattccagtttctgtttgaatgactggtccttcctcctgggccctcaccacagaccacaatccccacctgggctctgccacccagccgactccattcttctgcctttccagggaggaatcctttcttgcccttctggaggaaccctatccctgtgaaagcagggaaagctgcccatcctggtgaagagctcactgtgttggagtcctacattcccaacaactgcaggtcaacacacaggagaaagaacaggcagtggacttttttttttttttttttttgagacggtgtctcgctctgtcgccccggctggaatgcagtggcgcgatctcggctcactgcaagctccgtctctggggttcacaccattctcctgcctcagcctcccgagtagctgggactacaggcgcccgctaccacgcccggctaattttttgtagttttaatagagacggggtttcaccgtgttagccaggatggtctcgatctcctgacctcgtaatccgcccgcctcggcctcccaaagtgctgggattacaggcgtgagccaccgcgcccagccaccagcagtggactttatccacaaggctcggcctctgtctcttcatctgtaaaagaggacagtttttaaccttcacagacggctaatttttaaaacttcacaaaactgtgaggttcaacggaaatcaaagtgcaaaaggcaaaaaaagccaggatgtgcgcacacctgtggctatcctcccagcgtgttaaggtcctgaatctggccacattcatctctgctcctctagcacggagtgtgcaccccgtaaacaaatgacgagactgaggaaaataaagacctgacacatagctccgtgccactctgtgaagatgcgtgccgctttcatcaagcacaagcaggttaaggatatctgttgccgccacctttgggaagcgcagctgtggtgatctgcgctacctgccatcggaatccctgcggcagggcagggccaagatctcaaatcgaatgacatggaaggagctagaatacaaatcccgaagagcctgcgtccccggcttgctaaggtctggcaggcccctctgtggggcggacgtggcaccccagacctgcctgcaacaccgcgcagcccgcccgcccccgagagcgcggttaccgggaaagtcacacttgtaagggcgctcgggctcgaagtggctgcgctggtgggagctgagcttggcgtgcgtggggaagcgctcggcgcacacctcgcacttgaacaggctctcctgctcgtggcccttcatgtgcgccttgaggttatagaccgtagtgaacttcttgccacagccgcccactggacagccgaagggccgcagcttgtcgtgcgactgcaggtgccgcttgagcttgtaggacgttgtgaaggcccaaccacagccctccagtgggcacttgaagggccgccggccctgaccgccgccgtgcgtgagcaggtgcaccttgagctggtgcttcttggcgaaggccagcgcgcactgcggctcggggcagcggtagccgggcgtgctggggccggaggcctggggcgcgcggcggggagcggcggcgcccgcggttgcggggccgggcggcgcagacagcgcgaggacgccgcggtcgagacgcaccagcaggtcctggctgctgatggtgacggcgcccgccggggctacgccagggccggggggggcggccgggccgctggggccctgctcggggcggctcgccaggttgacacgggagccaggctcggcctcctgtgatccggcagcctcggcggcagcgccgccgtgcggcacttccagcagcaccaagaaagagtcgccgtcgctgtcgtcctcggcgggcggcgggcttggcccggaggcctccccgggccgcgccccgggcccgccatcttcagggccccgcaccagtagcaggcggcggcgcgcggggctcgcgccgagcggcgctggggctcggcggagcgggccggggccgccgccatgttgccctccgcgcgcagtcggggcggggagcagcgccgggaggtccatcttggtcccagcgacggcgtcggagcagcttcggacgcagagctgcccgcgccccgcccaggtgtgcgtgcgccgccccgggacgcgatccgcgccaagccccggcgtagagtccggctcggaaccgcgcgtgcgcggacgccgccgggcgatgcgcgaggcctgctgggctgacgtgacgtgaggctgggctgcggggcgccggaggcggaggcgggggcggggcgccgggaccgactagggcggggcgcggggtcggggggcggggcgcggggtcggggggcggggcgcggggtcggggggcggggcgcggggtcggggggcggggcgcggggtcggggggcggggcgcggggtcggggggcggagcgccggcacctacgagggcgagcggcggggcacgggaccgacaggggacggggtgaggctcccaacgctgagcgattccttctcgttcccgctggcgtggaagacgaggcttgtcttgacttcgaatcgtattaatatttcagacacttaacaggcaacctctcgtaggcattgactgcgtcccaggggctgtacctgtccgagctgattaagcgtgcgcggtcacccaggggtgaggaaacagggacggcgagctcgagtcactcggcagccggcagatccaggattcgaacctgtccaacaggccggacgcctacccccagctcacttaagtgcaagctcgcctgccgccgctggcgcacagacctcgtttgctttggcccaggtccttgctcggcacacggggcctccctgatacgcaggacccctgcctgtatttccaactgtatttcctactaaacttggcacaacctcactctgcaacagcttaattacttactgtttccggtcctcaccctcccccacctcaccgtacacctccgcattcaatctggactcctccacttcaacttcaccaccactcagatccaaacccgcactttattcctgggtacctgaaaaataactactagctggtcatcggtctccctccgctccactcgctcccatccacggggcaccgttttatgatctaaaaattgcacatcaaattatgctcacctccaccttgctcccgaaggcgcctatggccttgctagtctaccctcccctacctgtttgccctcacttcccgccactctcccgctgccccccccacccctcccccgcacc

SEQ ID NO: 41016 - DNA, 1506 bp, Homo sapiens
ccttgctggcccctcccccatttccctttccctccagcacccgctccacctgcccccagtgccccactcccacaaggacccccagcatcctcctagccccccaactcccctccacccccacacccaccaacctgcttcccctttctcccttccccagcgccagctctgccctgagtgacccctactgtccccactgtgtcctgttaggcctctgtgggtggctccagaaaagtccagtgggctccggtgcaaagggcagccatctttacctggggaggtaggattcctcttttaatctttatgcttgtttgcagtttccacttctctactgtttctgaaaatcttgagtagtttccagtaaaaagtaggaggaaagtctatataaccgtgtcacctactttatttcattactcttctccacaaccccctggtgtcaccattttcatctcaagctgacaaatgacaaaagggaggttcccagacagggcaccactggcaagcgtgcaccatccctggactgctttgctgttagatgaggggatactggcctcagcccatctttccctggcaactgcctgccagctacagggttcagccatgcagccgcacgttctccagagatttgcgggagggacatttgcaaatgaaaataagagctgacctgtgtgcaaacgttctgagtgttggggtggacgcggcgcttggtgtgggacacttcacacccacccaaggcctcctcccactggaggtggccaaagtgccaccagtgaccggctgctgaccttgagcctcagggtcctcatctgtaaacaggcacggcgatcctgcacccaagggcggctgcatccaagagacagagtccactgtgcattgcacccgcacaggctggagcccctggagtccagggtgggcggctgagcagctcccactaagagggcaggaagcctgggtgctcactatggaccacctggaggatgcctagaggccaaggcctcgggagcacgggcccactgcttacctgtttctccacagggctgaggctgggggtcctgacaggggcatggggcaccccagcctggcgtccccggttctctgggaggggccgcaggggcaggccagagcacagcgcctggaggctagacatgtgtgactgagatggaggcagaggccagcactgtggggaggccaggaagagactgggcagatagggcagggacctctagccccagggccacctcctccagcctctcattgggcgcctggcctgtgcagggagccatgtgcaggtcggagggtcactggcctcaggtagggcacttgcagcgctgacctggggaggacattgctctgcgggagggcaggcttcacagtggggaggggggctgggctcacttccccttccaggagggctgtgctgtccgggacagctttgggggtgggtggggctctaatgctggggtgtgctgtggcagccctctggtgcaccacaccaaacattcgatgtgg

SEQ ID NO: 41017 - DNA, 620 bp, Homo sapiens
ctatctctctatcctgattttccgtgcttccaatctgtaatggaaatgctgtgagggcagacactgcatgggtctcaccctctccacccaggcctcagcacggagtgggtgttctgtatctgtcgaatgaatgaatgaatgcgagtccctgggagagggcgtcttcgcagggaagctccctaggccccgggcgtctagccaggcatctgcaccctcccaccccaagacccaagaccatctcttcctttctccagggaccccatttccagggacatctccggatgaagggctgagatgttattcccaactttggccaccaggtggcagcatataagggcaaagcgcgctgaggattccaggctggcagtgaggccagggaatgccggtctggggaaatttggaaggcacctttggatgcgagttaggtccggcagggaatgcagatgacctggaatccctgggtcctgggccagtctgggggtgggctagaggttccccaaggccagaaaagtcatgataagaagcttctagcttactgtgagtctggactcccacccctgtcctttgagaacatcatcaccatttaaagctgtatctcaaaaccagcagaactattattt

SEQ ID NO: 41018 - DNA, 2194 bp, Homo sapiens
tggacattatttaggtgatggttacacggaaagcccagacctcaccactgcatatctccatgtaacaaacctgcacttgtgtcccttacatttatacaaaaaactccaaaaaaaacctacagtgtaatgtagtaccctatcccatgcactcacactgctaaatgttgtttccaacgcactcatccgcgcacccagtgccagctgcaccctcccgttccctgctagcctgacttctgggcagcaagaccctgcggttagacgtgggctcctgcccacagggctagctggatgtgtgtgtctttcaaaggctggactttactctcacctcgccccctccaccccccaacacacacacacacacacacacacacacacacacacacagtccctggcaagtcctcagagctcacgtggtgcccagagaagttgtgggtgacacgatgaggcacaagctccattccccgggggatgtaagctgagaccctacctctctgtgcaaaggctagtgccacctgcatgagctagattcaggcaggacctggagaccctggaggaaagcaaggctgcagggtagccttgggtcggggagggagggacactcttaggcctcttactgagggcgggggtcccggagagccatggacagggcaacgctctactaggctccttggttcatcccagatcagcccttgggcccctggcatctaaggcagcaaaaaggcaaggggacaccgcccggggtggggcacgccaccgcgacaatgcctcttggccttgggtggataatggcacccctgggcaaaccctaggggcggggcccagaggcgaggggcttccccaatcagtctccgccctagcgccctggacttcggccccattccattgggtgagggtgggggcacgaaaagaggagcgggcttgcggccccaccgtgtcccgcctcctcagtccccagcgactcgcaggggctggtggggctggggtccagctgccgtgctcccctgccctgcgccgcgccgcgcgtcttggtaggcgctgcgctgccggggccgggtcctgggccagtgcaactccgcccccagccgtatccagcggactgtcctccgccgcgcgcccggcacagcatggggaggcgctgctgccggcggcgcgtgctggcggccgcctgtctgggcgccgcgctcctgctcctatgcgccgcgccccgctccctgcgcccgggtgagtgcccgccggccgagccgcgcacccccaaccaaacctggctcctcgcgctttccaccgcggcctgacccctcgacagcgcgggggacacctgttgtctccttcctggctggggctaggggtggcgggcaggggcgctggtgaggcacagaaaggctctagacgcccccgcgagcaaaggctcttgctcctcctccggagttacctccccactcccagagcggtgactgttttgagtcccacagccggtgcctggagaccggggtcagttgtggggggtagaggacaattggccaatccgggaaggccatctcccttaccttcacccccttcccctgcgcaccccacggcccctggacatgagcgctgctgggcgcatgcgcataggaggggaagcttgggccactcggtccggtcccttggttgtcctactgtgcagtgggtgccactccctgctccaccctgaaatccacactgggtagggcttgggactcctgtgcacccactcgtggtctggctggggaaactgaggcagttagtcatgactccgcagagctgagtgccctgggctccaccggtgctgagtctttgctctgagtctctcctcagctcatgtgaagcctcccatcaacccatttcacacaatctgaagcgggccagagagtggggagacaggtgtggtggcaacgtgctggctatacaatctacttgggactggaggggcccagccagcgcccgggtctcctgacctcagggctgtttgcctttccttgtatgtggtatgcgtgctgggtgggacgactcagtccgcctccccacccccagtgtgggctctgagaatcctgggccccacccttggaacctggcagacacagtcccagggagtaagtaactaggtccagggtgggcggggatgttgggcagtgggggtgggagtggcccaagacttgaggatatcagggcctgggga

SEQ ID NO: 41019 - DNA, 3214 bp, Homo sapiens
ctgggtccttgagagagaatggtgggatggaaggcaggaagatactctaagttggggctcagtcatgaatagtcttgaatgggatgctaggggctggggtgctcttcctatggctgtcagagggcatcagtctttaaataaatagtcactggcactgggcaaggttgcaggggttacagaaaagcaaaaagtccccttccatgtagatctgaccttccagagtgatcaacctacacagaactcaaaagatttcagcaataaagagtgccgtggctggagctgagcagtgaaccaggaagggtggtagtgcactggtgggccttggggggaaccagggattgctgcaaggagtgagaagccctgtgggtttagagatcaccaaggtggggcgaggagaaataggagataggtgaggtgtctccttccagtcttggtaattgttccagggagagccctggggcctacccggggctggccatgggcagggaaggtggaagtggggtccggagggttctggaggcacagccgacaggactgtgctcaagggggatctgggcagactggggttccattctagatggcctgtggagttcagcaaatggagtttgaactaaatacacgtggagagatctctagttctctcccctaaacagaattgcttataataatacatgaagggcttgtccaatgtgtccttcccttgggcctgatccccagaaggaatgtccctgactctgagacatgcaggtcaccccagaaagcccctaggggaaggaatggggcaggacagaggccctcggaggccacgtgggaacctatgcctgctggcaggagcttgctggggcctggctgccctgcttatctcctcttgcaacactgtaacctgctggaacttattaaccagaagccgagtgtcatcatctctgcttgctggactagggagtctgcaaacagcatccccctacatgatggctgtgccctcaccctgcacagggcgcgagccctgctttggctgaggtgggtgtgcagaggaggatggtcgtgcttctgctgtaggtttctagtgtggtgtttcacccggtatcttgattggcagaggaggccttgcaacatgacgtgtgcgggtgtcctgtgtgcagcaatcgcatggccttgagcagctctctctgctctccttccctgggctggtatttcctcatgggtcagtgaaatggggcccacttgcctacggatgccgcaaggggggacaggtgtcaggacaagggggcacccagaggcagggcagcatgggtgttaagggtgcagatgctggcaccggtggcctggggtcaaattctgtttctggcacagcaaggaagctgtgaggcctcgggcaagtttctttgcctcagtttccccctctgtcaagtgggataaagatagtttctacatgagaggggtaagcatgtcagtgtgcactaagcacccggcactgtgctggggcctgcagtccccaccatgctttgtctccttctgtctcttccttctctttctcccagcctcgggccctgtcgtccatcactgtctccctgtctctgtcattgtttttggcactcctcccatccctcctcccctcccatcatcctgtcccccttctctcccctgtctccctaacctcctgctggttttgtttcctttttctaagcagtcaccgcgtggctttccctgtgctgctctgggatgggccctcctgggctacactgcctggctctccctgttctgtctgctcctctgtccccttggcagggggtggcagggagcctgggacctagggcccagtggagggacgggggtacagaggacacagacaagggagtttgggatgatgggggtggagggggtggatgccccagtgtggccctgtttggggccagcccccagctggccaagtcaggattggacccaaggatcctcaagataccccccttctgacctcctgtgcccatctgtccctccatggcagcctgcccgtctgcagggcccaggctcctcggggcagggtggcaggcagggtggggctggatggaggcggcccagccctgtaatcactggccacagctattctgagcctctctctggtacctgctcccttttcccttctacccactggcccctgggggctgttatggtacccactttccagcaggctgtggtctggccaggaaatgagaggccttatgcaagggctggcgtttccggaaggctgggagcctccgagtagcagggccctggggcggagacaggcctgggtcggcttctcagtcactgcaactgcccctccaccccctgcccacagaacacaggctgctgagcaccagttcttcctcagtccccagccacagttcccaggaaagggacacgtctcatctgcaacacggcgagaaggcctggcctcctctcatgggttgcctggccctgccctgcctggtgtggcaccagcggagctccccatggttgctgctagactcaggccacacccagcctgggtctccctgcaccagcatgaccagccaacattgctgccctctcctgtcagctccttttctgatgacggtgtcgttcctgggacatgtccggcagttcagatctctgactctgtctggagacgcaaggtcaaatgctgggctggtcagtggcctggagacacaggtggccctgaacctcctcagcctcctctgcatgccctggccactggagtctggcccttgttcctgggccttacaggatgtggcctgggcgcagagggggcctgaggcaggcagggggcagcaggaccctggacagtgggcttcagttacacgcagcagggttctggacaatgggctttagggttctggaggccagtgcaaggcccgtccagctgccatctattccttccacgaacctctgtttattcagcacagaccatattctgcctgccaggcactgcgctggcgcagctggtgtcaaagcacgctcccagaccagcagccgcagcctcacctggagctgctggaaatgcagattcttgggccccaccccccaacctactggaccagaaactctagaggtggggcccgggattcttgagtttaatgggccccacacaagctgaagtttgggaatgactgccctaggtcagtttgccaaaagacctgttcctcagatttcccaagtttactggcgtgccagaagt

SEQ ID NO: 41020 - DNA, 1636 bp, Homo sapiens
catctgatcaccacccacactaatacttaactaattctgctctaaaggggagtatgaggtgcaacaagagctctcctgagaggatcctagtttagatgggggagagcaactcctctccaaggtagggacattgaagctgaggtgaagagcaagagtcaataggcagacaggaagggccaagcgccacaggcagaggaaacagctgtgccaaaggcctggcggggagtggaggacaggagagggagcacaaggggagcctggagaagtgggcagcacgcaggccctgcaggtgtgcaagggtagcggggagccatgcaaggttttaagcaaggaaggacagcatcagattttcacccttggggtatccctactgctgtgtagagaaggatcagggtggtgttgggtaggtggctgctccccaaatcctgagggctgagcggaaggggcctgtggagctcatctggcccaagcctacaagcaggtagggaggccttccttcgcagagtgtgactgactgactctgggccacacagcaggctgacggtaggacaggcactcagtagggccctgggttccactagctctggcggcttctgaggggcagatggcccctcacagcctgaggaccctgtgaccgttgggtgtcaactccctggaggcttagcaccttgcggctggagaaataacatagtaaaaaccatctggccaacaagtgctgatcacgtgccaggccctttagttctgtggactaattacgtcaacccataaggtggggccgttgtccctgtttacagacaaggacacaggcatggggaggcaagtgccctgcaaaggtcacagagcttctatggactagagccagcaaggaatccaggcagccacactgtgggggtgaggacaggagctgtaggtgcagccccggacagtggacataggtccagctttagagtcccaaggggcctgagttggagccccggcttccccaaagagagctgtgtgacctcaggcaactcatttcccctgagtctcagttttctcttctgtaaaatgggtattcatgtgcctatgagcaacagcagtggcagcccaagctgcttccagccatgaggagagttagtgcccattcctgagctgctcggagactggcagcccacggttcagcagcagccagctgcccaccatcgtcctccggatgttgacttctgtcatagagctggcctcctgactataagaggactgccagggctgcagacacctcacaggagggcatcccaggcagaaagtgagtggtggggtaagggtttcccctgacttttcaccctaagggagtctttcctgggagtcatctggctaatcccctgatatcgcctcaggcagagccaggccacattccccccgaacccccggacccagtgcttcagcaacgacacacgaagctgaagatatggctccctgaagctgggctcatgccctgacacagccggggtcggccagcaaggaaggaggaagactgacaggtggccggatggccaacattccctgccacaagaaatgtgttgggtcatctaaaagctgaaagcagaccttggctgtgggccccgggggcacagcctctcctggcaccatgtggagctag

SEQ ID NO: 41021 - DNA, 1019 bp, Homo sapiens
tcactcaggttctagttttggtctctctggatgtgactgctctagggacctcactaagtgggactgtttggcactcgtccttttgtgactgtactattcgcttggcataacgccctccaggtcagcccatgtggcagcatgtgtcagcaccgcattcctttcatggctgagtcatattccattgcatggatggccgcatacatttgcccactcagcagtgcacacttggattttctggctaatgtgaatattggtgctatgaacttcatggacaagttttttgcatgatgcacgtttttagttctcttgagaatatgcctaggaccggaattgctgagtcacatgtttactggttttgaggaactgccaaactgctttccacagcaacggcacccctttacactcccaccagcaactcgtgaaagctccagtttctccacatcctcaccaattcctaattgtctttttaattatatcctgaaggctcttaatgtaattttaagaagttaaaacactttcttttatgaactcttacacaaaaaatcataggcaggggtgttaatcttggagataagaaccccgggtggggcaggagtgatctgaagaaaggggagctggaagcatggaagcgctggcctgggtctctacatggctgaggctgcgaggggctccggacctaattcggagagcggtgaggctgctggcccgcagcaggtgctaggttaaagccagtcgttgttccttctcataggagggacaggctcagaaggggcaggcttcctgtcccagcgctgagataagaatttgctgggggaataaaaggagtgaaggtgcaaaggagagtgctgattggtaagtacagaatcagcccatttattattgagccaaagcagcccgacagcccacaagcggctgcagttttcaattgggtgtggaattaaacagcgctgcttcttatgcagcctcctgcttttagtaaacattgaagagtccatgtgtgcccgtactcacacggagcg

SEQ ID NO: 41022 - DNA, 1359 bp, Homo sapiens
attttgcatagtggttaaccctgagggagggaggagacagccaaggaagcttctacagtactagtgtcactttattattcttaaaaatatatatgcataatatatgttttaagaaactatacacatcaatgtaaacttcaaatatatttgaaaaacacagcctataatttcatgaactcaacccaatagtttatgcttttgcatactgtcttccacgtatcatttttcaactttctgtaaaatgaagtaaattcctaaacgttgaaagtctgtaccttacacgtaggttatcacccaaaggctcgtttctaagtgaagtattcttaaacacagaatacatttgtccttagaaataatgccggattcctagtccgccccgaaaagttaaggcagtgtgcatgaagctgaaattacctcagtcgtcctaacaaccttcccgtaccttcgtttcacaaacgggggaactgaggctctgcacagggtcctaacccgggtcgaggtcacgcaattaggagagtttctgttttgataaactatcacaagcccacctcaggggacgaccggggagaggagaggacggacggctgacctcaccgccgcagcccgggacccgcgggcgccccggcccggacccgccctgccccgggtggcgtccgcgtggcgggcccggtcgcgcgcggtggaaccggcgagggccgcgcctacccgagtactatggggacagtagctcttgctgaagatcaccacccggctgcgctcgatgaggcccacgaggtggcggcgcagctcctcgcgggcctcggacgagcggctgggcccgggggacgacaggcgggcacggcgccccggcggcgacaacacgcgcgcccctcggacatggcccgagcggcggttgggggcatcgcccgcctttcccggcccgggcgactgcggcggcgaccgctccagagtctcgctctcgctcctggcccggccgggcctgctcacaaaccgaaacgcaggcggctgcggcgccgggacggggcctgaggggcggcgaacgctgccctcgctggccactctcaccacccgcgcgaatccgcgaggcagccgctcgccccgccccccaacaccgccccgcgcatgcgaaattgggtcccccgcccgcccgcagcctaggtgtcacctgcccttcgcaaaggggcgggtaccaagcgcgagcctctttatctccaggttgtgcctgcgtccggagaccacccaatcttggcgatggcgctctgagatggcctctgtgcaatgccttttactcctaataatccccaacagcccctttaaaccaccttaaaatatacgttcttcaatttttatgggaagtgt

SEQ ID NO: 41023 - DNA, 872 bp, Homo sapiens
ggcgctgtaatgccagggccaggtccctgctcgtctggcgctcagcccgtgctgctctacacgtgtttgctgaatgaatggagcagtgaaccctcagaaattcgcctccagatgagcgccttggccgtctcggcgtctcctggcctcagaacatcacccttggctctccctcaagggggagctcccaaagcgagaacgtgaccctgtcctgcacccagccctccactccagggcctccgccggtacacatcttcggcctcagcctaacgcactctagcaggcacagaccgccacgcccccacccctccagacggaaggactgcaatccccacaaggcaccgcgactcagcgccacccgattggtgaagcctctggcgtcggccaataggacgtggctttgttggcgtgtgccgcggccgcgcgagtcctggaaagcgttgttggcccggttgctctggagccgggtctcgggtctggtggctgccggccctgcggcatctcgccatggggagcacggagagcagcgagggccgcagggtgtccttcggagtggacgaggaggagcgggtccgggtgctgcagggtgtccgggtgagcggcgccgcctgggccggggcgggcgtggaggccgcgggcgcgggggggaggtgcggggcggagcgcagggccggggctctttccacgcgtgaggggcgtggggcttgggagactccgggggctcaggccaggaagaggctgagccgagacgcgagcccgaggctggcagccttggagcttcgcgacatgggcttcagggaaggaggagtgaagaactgtacaggtgcgaggcccctgggacacgagggacgccctggccacgtcctggctccggt

SEQ ID NO: 41024 - DNA, 1226 bp, Homo sapiens
accccgtttctgtaatgcccagaacaagccacccaaaacagcgtcccattctggggtgcaaatataagaggtcacacccaaagaaaagcacttaaagatgaacacaaaaatgagggttgtggctgctcctggggagggaggagcggggtgagacgcggagggacacctgggcccggtatgagtccattccctttccctgttaaccatgtgaactgtagagagttcctcttctgtaggggtgacgtgattcacacagcaaaaaccgcacccctcaggctacagatgggggccaagtccccagccgggactcagccctcccacgacggggttttcctggcccatctgctctgttatcgatgctcctgttgccggcttccccttccttggcctggttgcgtccaccgggaggccctcccggatgcctcctgcctgggagtggcggttgtgagtacagtaactgagtgctgggtgtctgcccctcagccttgccatgcaggctgggggtattgcctggacagctctggcccgtcaccctggattctgcagccccacacctcacaccgtgtagatccgctgccccacgctacagccggagttcgcgtctcgccacgcctctgccgcgggactttcctccctgggctgcgtccccagccgggaatgcgccaccagcctggggcctgcagggggcgcccgggctccccgcgcaggtgcccgcccatctgacagagcggaacgcgcgaggccgagagctgggaacacccggccccgcaaggtctgggaactgcgattgcctccttcagcctcagtttccccccccgtgaaaggaggccatgctcctagcctgggcacactgagccaggccctgttcctggggtcgcgggctagcccgctcgagagcggggggctcccggaactgcccgcgcggccccggcgcccagagagttgaggcgggcagccgtatcgccctttgaagacgcgcggtgggcccctgcaggcgcgcggcgcggggcagagcgccctctggaggccgccgccggccccgcccccgccccgcccccgggctctgggcggcgcatgcgcgcggcgcggggctccgcgggcggcgagagcgaggccggtccgcagccgcgcggcgctcggcgccccattcatgctgggcatcggctgcgcggccacgcagcggagcccgggcgcggcggcggcctcggcctgggcggcctacgcgg

SEQ ID NO: 41025 - DNA, 688 bp, Homo sapiens
gagttttatgcagatgagacctgaattgggtgtgggcttcctcttcctgtgggcaggatgataattagggaatccgtatggaggatgttagcttgtgaagggccttagataccagggagtctgggcacattgttgggctaatggggaaactgagacccaggcagaaagccctcaaggccccaggcctcctcccctaacacagggcagcctgtttgtagttctcatgagaaggatattcctggccttaggtcctgctggaaggtgcccttcttggaaaagcccctgccgggagactgcaggtgagtcagggcagtcgctgccagccccgcctcctggctgatggccatcctgcgaaacagacctcggctatctccccgatactgacagttattgccacagataagagcagagtaaacatgaaatcctttaatgcatttgctaacagctgttctctgtttatagacaccaggccaagcaggaaccttggctctataaagccgggatgctgggcacgggttgccgcctgcccgcactcagctgggcaattttagccaagcccaggcctctctgggtcttggtttctccatctgtgaaacatgcggtcccaatgtgacggcctagaaggctctggcatcctgtgagctgatgtgtgaggacagggagtgtgtgcaggtacgtgacgcacgca

SEQ ID NO: 41026 - DNA, 669 bp, Homo sapiens
gggcccaagaagatggaaggcagggatgagcatgggtggccctgggctggaaggaaaccaggaggcagaaccatgagggacacatgcaacctggccaggctgggccccgggcggtcaggccagacacaggagaagggcagcatgtcactagcatggcaaaggatcccagcggcacaggaggcttccccttggcagtgctgtgtttgctgcctggcttaatgtgccgccgcctgttaaacaaatattgtgacaggcccactccatacactcagggacggcggcggcactggctgtcaccaagggtggccagtaacgcgggcactctgcaccacgcaacctctccttccaactcagagcaagcctgctgcctaaacaaacacagggcttggccaccaccaaacacacccagaggagacacaggagtggggcccagcctgactccagcactcctgccccacacatgcaggcaggaggaggcagccccacaggcccctctgccccacctggcacggacacatccagccagcaaacactgagcatctgtcacgtgtggagcactgtcctggaaacagggaaaagggcggagctcccacctaacagaggaggctggccacggacagaaggaaatacagcatgcctggcgacaatacagagccaggagaaaagcca

SEQ ID NO: 41027 - DNA, 1147 bp, Homo sapiens
gctttgtggtaacactcctcttaaacatcaaatacgcagcctcagccacacaaccaaggaggaagccgctcttccaagagtctcccatccttctgtccctcctcctccagcctgaacccctgcccagagcacagggacagcagggctccagagcttctgacctgcctggggtgggggcaggccagggaagggttgtggaccatggccacctgtgaacccagtcctggagggatgctgggcaaagatgaggcacagggcgaaggtcggaggcagcggcatgctggcccttgtgcagcggggcaaggtctggggcaccgagcggcctcacgcacctggctggaggctcaactgtcctgaggccgggcagccactgcaggattgtaagcgggagcaattttgtttaagacatcgccctctggtggccatgtgcaaggtggcctggagagacagccctgggagggctgtggccccagctaaggcaggaggagggctcaatcagccatctgtcacctcaccacaaagaggacagaaggccctgtgccccctcccacccagaccctcacactgccactgtgtgctgagcctgtccctgccccactgttccctcagccctggtcccaacctcactgtgaccttgggcaatttccaaccctcacagcctccatggaagagcagggccccagggtctctcagccagaagatctaccagtcctaaatccacacttctttttgcagagcccagcaaaactgggcaagacaggcctgcacccctcaggagggctgtgtctaccgtggtagtacagctgagcggcctgatttcagcatttttaaacaaagcctccagatggactttgtctgcctgctggggagggctgggcagctgctgcactcagggactttcctctaattggatcccctggaaaggagaacagccccaatcccagccagcccatccatccatccattcattcattccttgagaacccatcatgtgaatcagggccctgagctggggtctgggtgagcaggaagaggaagggctgcacagatggcgcacacacttgggcggggagacccacggtcctaggcaggcagggatccgaagcatcatgaggaaggcagagatccaaagcatcatgcaggaggc

SEQ ID NO: 41028 - DNA, 1904 bp, Homo sapiens
cttgtctctctgggttcaaactcagcctccacttttagctatgtaaccttgggcaggtagcttaatctctctgaagcttggcttcttcatccaaaaaaggagacgcattattgggattattatgagattccaggagatgattcaagaaaagcccttagcacagagcaagtgctcagcaaatgtgagcaagagcagggagttgtgagctgacccgtgtcccctccccaagggcttaggccaaggtcacgaccaacaggccagcgtcccagagaaggccaggctctaggcctcctcatccagagtccacttggccgagtggtatagtcccagactgaggtcaccctccactcccatgtcactgagtccctgccatgtgccaggcagccctgtcagtgctggagggaggtcccgtggagacagagactgggagggtgctgccctgaagttctagggggaaaaaggaaggaataaataggggagtggaacagaaacatccagggaggaattgggactacttggtccatcggggggagagagaattttgggccatcaggagaggttgaggggcattgccagggaagggctttccaggcaagggagccacacgtgctggggcaggaggcaggcacaaccctgaggccttgtggatagcaggaaggctgttgtgcccgctgcaagaggagaggaggggagaggggagccgcggtgtcagctgggcggcagggcattcatggggattctattttaaggtgacaggagccctggagggtttgaagccagctcggtggtgggctttccattccacaccaaggccagcggcaggctcagctcaaaccctgagagtctggctccaaacagctccaggcaagaaaatgaagctcggaggggaactcaggagggaaggattggggttgggaaggtggtgcgactggggagggaggggcacaggctgtggtcaatgggtgcggtctgaggctgggggtgcgagctggggtctggaggtgagacacggactgggtgctggagaggggacataagctggggtactcaggaggggtcaagggaggagggacggagctggggcaaggactgggtccgggggaggggtaggggagtaagccaggcggtgttggcgcagctcagagcagacgcacagcccggggctgggcagcagggcaggcgctgcccagcccctccgaaaggcgcaactgagaggggcctgcggcagtccggaggcgccccctcctcttcccctcctcctcctttccctcccctcctcttccttcccctcccctcctactccaacccctcctctcccctcctctcgctgccttcccctttcttttactctcccctcacctcccctctcctcccctctttctccttcctctcccctccccttgctgtcctcccgtccctttccctaccctcccctcccctcccctccgcccccctccccttccggagcccggccccgcgcgccgccatgcctggtgccgcaccgccccctggtgcccacgtcaagcatggcgcggagcgactgcactgtgcccgggctgcactgggggcgagaggccagggagcccctacggcctccagaggccgggcgttgggggggccgcagaacgtcggggactcccttgggacccacgctcagctccgccctgcccgcactcggctgggtccttggggcccctcccctctctggatctcgcttcacagccaagatcaccagctgggagtggccaaggtcaccagctgggagtggccgacccagcgccaggcgccgtcccgcagcgctgtccccgtccccgcaggccagcaggctgcacgactgtctgagcctcagtgtcctcatctgtaacacgggcatcatcatatccccagcttcaatcttcacgtct

SEQ ID NO: 41029 - DNA, 3216 bp, Homo sapiens
gtttcttccacctgggaggagtctcccagactcacaacattccaggggcctctgcctccctccctcccacccagttgagggacaggatgctggctaggctcaggtcatggtcacgcaatgcaggacccgctgagaacgactgggtaaggccttctctctcctctctgggactcagctttccctgctctctcatctgtgcaacaggattgaccaaaccccacccacagctaccggataggaaaccctggggagaggggccctcagtgcttcccacaccgacgggttgttgagcttacaaaccctagggcctaagggtggtgagaaggggtggagcccaggggtgacaaggtggggaaggctccatagggcagaggccaagtaagttactttgctctcccctgttgtccttcggccttggggctggcaggcgtgtggtccctgtcctaagccggagaccccagtaagatggggaggcctgggcccaatctgacctgcaccttgccctccctgcttgccttccacctgctgagctggtccgttcctcagggcctttgggctggctctcccccagctctctcctgacacctcctctgagaagccttcccttctcagctgtctccagcgcccgagccgcgtctgggtatttactactctctatcccgggagtgctcaggactcggtcccctagaacaaggcctggcacgacacgagccctcaacaggttgttatgacgggaacaactgaatctccagcaccgccaagccccgctggggactggacgaccctgcggcccctcctcactgcagagaagagggcaaagccagcccccacctgcattccccgagtccagagggagcggaggcttcgacatggccccctcacggggcagcaaagccccgaaccggcggcaggcttggctcaggagcacctcggccgctgcgggcagccaccgtggggctggagcccgtgccgccaccccgcgccggaccgggtcgccgaggtccggatctccacccgcactgcctccagccggggccgagcccgacgccgctacgtgcggctccctcccgggcctcgcgtgcccccgcgccccgagcgactcccgactgcccggcacccctcccgtgggttcccacatccagggccttccctcccaaacgccgccttggccgtccgagctgcgcccgagcggaaatgggccgctcgcggagcaaggaggggaacggcggctgggcttcccgccggggcgagggacggggctccccctctagctgcggcaggagacggggagaaggcccctccttacctgacagcccgggccgcgctcaggaccggccgccccggccgccccggccgcccatccgccgccactgggtgtgcgcggatccagcacaggccgcgggactccggcctccagcgccagaccaggcggcctgggccgggaagcgtcgcgcaaggaccgggcgcgaccggctccgtggaatgagggctaggcaggaaaggcgaggcggggtcagctcgccgggccgcgggtctcgcggacaccctgcagcccttcccgacagcggcgaccgggaaagcaagaccgtctttttcgtccagcccaaattgcgaaaacggccacagtcccacaagtcccagagtcccagagtccctgttatcactcaggcccgccctctaacctccagcagcctataggaataagtcatcactgggggaaaaaaaaaaaaaagtgggagagaccaatcaaattcccaagaggcggagcagcccgctgacctcttaaagagacagcacagaggaggtgcagagacaagacgctgcttcacggaagagagaggcctgcgtttctcactcggaaagcgggcggaatcgaagactggaaagctgaggacgcgccacctctcgccctacgcgccttccagctggcagcagttgtcagtggaccagctggcggcagccgcgctccacctcccggcctgggccgcggccggaccgtcggggcggagcctccggggaccgccccctcgcgtgcgggcgcttcgggcgccctgcaggggtgacctggggtcagcttgggggaaggcgtgtcggggaccctccccggcgccacgcgctccagccgcgccacgccgcagggccgccgcctcccagcgccctgctccacgcggcgccgccatgcctcgggcactcctcttagcaaccctgctaggcagtcattatagtcaccttttacagggccacctgaggcttggagaggtcaaataacttgaccaaagccgcgcaatgaggaagcgacacagccaggacgcctctccccaactctaacttccacagttcttcacgcctgttcctctggaaagccctccctgattgcgcctgtcttatcccctggcatcgatgctgcattcaccatactcaagccatgcgggtctctgtttctgtccctcggctgttccaagcttgttcctgctcctggctctacacctgttcccccgcagagctggctccttgccacatcatgtcctctagagggttttgtggacaccctcgctggagcggctgtccagtctcatttccttccgagcatcttaattctcacctgattgttttcatttacctgcctccccgtccagtctccccaccctattatagaattccagcgtcatgaggatggagccaagagagccaagctgcaggatgtcccctgcagcatcctgaggctgactcagagcctcgtgcagattgtaggcactcagttattacaggcaccccaagactcacaccttgcgacagcaccgctgggctggaatgagattgggtcccattcttctccttgctcctgtcctaaaaacacagggagattggggaagaaaccaccttgtgatcctctgggactttcccagcctggaccacacccaaatgtgcatacctaagtttaggcttctatattcgccagagaggctgggcaatgccggcctgcgtaatcacgaatgaccacagccacaatgagccgtggggaatccagtggctcctcaagttcctcccagaaagttatacacatcactctcacgcacattcaattggccaccgcttctagcctccagagggcaggaaactgccaccctaccatgtgccaggaagtagaagtcatgggacatgtgtgaccaggcctaataactaccctctgtaaggttcttgtatcggttcgaaccc

SEQ ID NO: 41030 - DNA, 495 bp, Homo sapiens
ccgggctctgggcggagcgcctcgggcgttgtaggcgggaccggaccctctggcccgcccctccgtgtcccttctggtcgccagtggacgccgacgtcatgacgtcgcgttccgtagggctcttcccgggctttggtgggtcacgtgaaccacttttcgcgcgaaacctggttgttgctgtagtggcggagaggatcgtggtactgctatggcggtgagcgcgctggcgcgtggcgggcgggcgccggggacatgggtgcggaggctgcgcgcttcccgtactctggccccggcccagggcggcgctctgggtgaggctgggccccaggctctggggcgcagctactttctcgcctgcaccctgcgtgaggcgactcgcctacctaccactgacctggggccctgggctccctaaggcgagctcggcccgttcagcctctgtcctttattcaccccacacatacttattgggcgccatctgtgtggcgctgagcg

SEQ ID NO: 41031 - DNA, 1007 bp, Homo sapiens
tcatggaaagcgctgttattccctggcaggtctgggatttgattctgccccactttccagccattaaattagcctgctactctctcctggagtaactgggtcagcggtggaaggcacagcaggcagtgtaggcattcacacatttgcgctgcttgccctccagtcccacagggaagtccccctggatgcagtggttgctttacaggagggggattgagttgggcaatctgccctgcatagcaagcaggaagctcttggccctggagggagacattacctcatcctgcaaggttgctcgctacaaaaattatacggggaaatgagctgggttaagaggagtcaaggattggcagtcttggcacatccagcacgaggtgtgttggggcatgagaggtccgtggagtggtctgcccagcatctgcagcacaaagtaagagtttcataagagagtcattatacttactgaggacttagtatctgcttggcattgtctaggtaatttctagatagcaatgttcctgtgaggtttcatctctgcctgttttactgatgaataaactaaggcacaaaaggttagataagttggccatagtcacatagcaagtggcagagtcagcagcctggcttgagtccatgctcccagtgactgtattgtgccaacagttggtgagtttatttggttattgtgagttccatgggcactctgtgttacataaggcctggcccacattttaaaacattgttacagaaaatttcaaacaggtatgtagaatggtgtagtgaactttgaccatttgtcttagtccattttctgctgctacaacagaataccatagactgggtaatttataatgaacagaaatttattgacttatggttttggaggctggaagtccaaaattgagggctggcatctggtgagggccttcttgccatgtcatcccatggcaaaaaggtgagagttaaagagacagagtgagagcccagagggggccagactcatcctt

SEQ ID NO: 41032 - DNA, 1851 bp, Homo sapiens
cccctccctggcaccaccagcccctttccggcgcaggcactgcagggcctgagcacctgaatacctcaccagaggcaggccctgcgttggtggtgcccaaggatcaaggagaggctccagcagcctagaggcctccccaggaggaagcgagcagagccctagcgatgctccctgcccacctcgcaagtggagtcttcttagggggctgttgggggatcgatgacgtcagggaggccacggggctttgtagtgccaacgactagtaggtttattttgagaaaggagttgagctgcagcaacagaaaagaaggatctggcacctgtggagggtgccgcgggaaccccctgggtggggttgcacagacggccgcgggcctggcgctgtccgggggctggctcgctcgcccatggcctctccccaccccgcctcagtcgcacggcgaggagctgcgcttcgtggagaacggctgccacgacaaccccacgctggacgtggccagcgacagccagtcggagatgcaggagaagcaccccagcctgaacggcggcggggccctcaacggcccggggagctggggggcgctcatggggggcaagcgggaccccgaggactcggacgtgttcgaggaggacacgcacctgtgagcgcagccgaggcgcaggccgagtgggccgccaggaccaagcgaggtggaccccgaaacggacggcccggagcccgcaccagccccgcgcctacccgggccgcccccgcggcctggccctcggcgcgggctccttcccgcttcccccgacttcacacggcggcttcggaccaactccctcactcccgcccgaggggcaggcctcaaagcccgccttggccccgctttcccgcccctgaaccccggccccgcgggcggcgggcggcgcttcctgcgccccgggactcaattaaacccgcccggagaccacgccgggcccagcgcgtctgccttcttgactcattcttatttccggggttggggcggggcggggcgggcggggcaccccggggcaggggcggggccgcggggcggggaggccggggcgggcgggtcctccggacgccgctgcagagcggggcggggcggggctgagcgtgtttacatccgccgggtgcgcggcttcgccgcccgaggtcgttcggctcgggtaccatcctccgcgccatggacaccagcgacctgttcgccagctgcaggaagggggatgtgggccgagtgcggtgaggacctcgcagtcccggggagggtgcgggaggtggccgccctcggaacgcctcgggccctgggacgggcggctgggcggccgcggagaggcgggcgcctctgccgggtcacagccctcggagcgcccccgcggggcagaccacccggacccccgccgcagccccccagcggaagcgcgctggggcggggacactgatggccattgacccccggagggcttcctgtaagaagggactgctcagcggaggcccgaaggcgcagaagtgggcggagagaaggcgggccactgttcgccctggtagggcccggacgtcagaccccccgggcgcagggcgcgggtataggcctgggactccagacgtggcccctttctctcgtgctctctggacctggcgcggggaacacctagagcccataatcggcctccggtccctgaggattcggaaactcctgacgcagctaaagtgaatctggcgctgagatgccccctccatgggccggacgcggagggaaggggtgcccagttgggttctggggcccttcccctccttgggcttccactatcccgtttgacctccttttttcttggcccttcctcccc

SEQ ID NO: 41033 - DNA, 974 bp, Homo sapiens
catccccagacccctttcctcatgtgcttgtcgtctgcactacagactggccccgatatctccgtttccaccatccccttccacggcctttctcttatctgccagcaaccctgttccttctcttcaaagcccaggttaagcatttcctcctgtggacaggtgcccagacaccctcgccaacatccatgcttctctccccaggctcctgtatcttcaccagcacctccttcagtgggcctctctcagagctgtgatagcaacagctctcacctgctagggtccacactgtgctaggtggctgtgcagtcatctggagggatctgaggaagggcaagactgagtgtggcttccaaggtcacactgaggagatggagcggggtccagactcaggtccttttggaagcctgtgctcttcccactgagcctaccgcctctttcccctctgggccactgcagttgatgggcctggctggcagggacaacagggcaactcatggggtgtcacagcctccagctctagcctggctggagtgggaaccctgagaaagtttgttggtgtggtgagctgcctgcagggtggcagaggggagataggccctgcctgactcagcagaaagcttccccggctcgatagacccaagcaagccctgcctaccaggaggcctgagtccccacagtgaccttaccctgccttgggccagccccagctggcgcccagcctcagtggctgaaattcctgaaccagatcagggccatttggaaagaagatgttgctccacattctcctctcctggaagctgcagtgccattttggacagaaagaggataatcaaggatcagcctacaattctgagttgccacttaatcaagggtatgcaaattaatgagcattctttccgccaaattactttttagtatgaaggtttgaactcctggacatcctggcatctgtttgtttgtttgtttttgagatg

SEQ ID NO: 41034 - DNA, 4618 bp, Homo sapiens
aacaaggaaggtggagatggaagagatggaagattgagaagccaacagcaccggccagggagactggggaagaggagcctgtgagaacgcctgggatggtgaggatggagctgaggccagcgggaatgagcacgtcctcctgactctccttcagggagaaaacaagccccaaacatgcggccatggctcctgagttttctaacatggcagctctgcacagcgtccttcctacatttctggctgccttcaagctgttcgtggctcctgggcaggtggcagtcccccctgcactgctcacagcactctcttgtcctgggctcacagatccaccctgcctcaactgcccccaggcggtccccattcaccctgccacgatcttcccttctccaccctgccctcccttttctctctggttctgggggcctcatccacacagaacacttaagacaccctggtgtgatccctgggctggtttctgtttcatttggctccaggtcccacccctatgtttcccacctgtctggaaccagttatgttcccctcccaacctggacctctagctgcaccccctgtctttgtgggggtagaactgcaggttcacattccactcttccgtctccctctgcgtccactccctccagaggcatgcacgccatccttcttgtcctctgccactcccgtagggagcctccctctcgtctactggggctggttccctggccttccagcccttctccccacccccagcccccaatctccctccagcccagtgcattccacaagatccacccagtccatgggcctggggaggagataaccctgcccctccctcctccttcctgaattttcctcaggggacggggtctaggaagctggtccctggggtggctcccagactcctgaacctgcgcaaacaagtgactcagccctgttctcgattgctgatggagccacctgaggtcacaagtgggtcattctgtgtctgcctttgtgtgtccctgtctctgttcccttctcttgtactgtgtctctgtccctccacttaagtggacataaggagctcctcagccccctcttcagtacctgctctttgatgggctgttgggaacatctggagatttggtctgggactcaggggaagtgacccaaggccaccatcccaggcctccaggcagcaaccactcacccatccttgcactcctgcacatcctgggccttgcacacacacctgctccatctgaaacacccctccaccctgtggaacatctgcgtgtcttgtctctcccctagaaaaacccccagccttctcctgtgtgtctagaggtccaactccagtgttatcacaggatggcataatcagggtctactacagacccctgctggactgtgtgctccttaggggcagggtgccttgtggtgtctttgtatctccagcacctagaaagtaccaggcccaccacagattctcaagaataagagaactcatcaggacaagagcttgtggtttcttaagtcacagaacaagaggttccctccagggcagctaagaggccacggagacttgtaagcacagggtctctggtccagcccaacgcaaatgggcacaggtatgatcatttccatcaagtggctgtctacagacttgggaaagaaaacctcaggctcccttgagacaggagcttccacggtaacacctatttgagctcctcagctgctgtctccaaggtgacgcccagaaaccgtgattggagcgggcttctccttccacacctgtggtccctggggtggctcccagactcctgagcctgcacaaacaagtgactcagccacatcctagggaaggggggtcctcccactggaacaggatttggccacaacctggcactcggggacctggtgttgaaaatgagtcaaatggggacagatgctctctcttcccaagtccacgtgagatttcacgcggggaggagccacagcgtctggtattaagtaaaggaaaactcattagcaagagactcggagcattctaggacaagtgttgaaagtaatccaaaacaaatataaaacaacttgcaacgcccctcactggatctgactaacacgggcagggctggtttaatatttttccataaaagcatgcctacccagactagggtggcctcctctccacaccacaaagaggcgcctgacactcagaggaccattcgaattaaatccgagtcattctcaactgagggttacgcatcgcagtctgttgacattgttccatccttgatcattccccagagagagagagaccacacaacagaggtgggagagggaggagggagggagggagagagagagagaaagagagagagagagagagagggagagagagagagagagagatattcctatcttggtgttatgggctgagctgtttccccagattcacaggctgaagccctaacctctagtacctccgaatggatacaaggtctttgccaaggtaatgaagttaatatgggtgggccctaatccactataacccaaatgtacacactagatggggaggaccatgtgaggacacagggagaagacggccacttacaagccaaggagagaggcctcagaaggaaccagccctagcaacacattgatcttgcattttcagcctccagaactgtgagaaaataaatccctgctgttgaagctccccagtctgtagaattttgttatgctggccctagcggactcatacacatagcatcttttcatttacgctccaacagccccgagtggtgtgcagctccctccacaactctcactgccacgtgactctgttcttttgcaaatgtaattctctttgcttggaatgatgcccacctctgcccacctcacaaacttctattcaaccttcaaaacccttgtagatagcacctcctctgtgcagcctcaccttgccctctgcccccttccccagggagtgctccctcttctctgtgtctacaaccctgatcactctcttactaagcatgctgaagcctgggtttggcaatgtgtcgagatgcctgtgatctgggcaaagtcggagcctctcgacactggaatgaggactcctctctagggctggcacagggcctggcgtgccgcagactctccatgtattcattcaaattctcaactcttctatttatttattagtgactgtcttgacttttggatcagaaaacttcatcctggaacctccccattactctgaaataaagaacattttcatcagaacttgggaagtgcagcatctagccaagatctccaaacaaacaccattttctgattgaaagaaataaagcaaatgcttcccagagctttctgctgtaaggaattagaatttacaaattcagataccattcattataaaaggaaaagtgcacagtgccctcttctattcctttacttctagctctcccgcattccacattccatcctttattcatccttactcactgagcacttgctgtgtgctggggggatggtttggcattcagcagtggacattgcacccctcgccagtgcctctcatcctgtggcccagagcagattctagaaagagggccttatacacacccctcatgacaagatcagtacagatctttgtcatggtgggggtcagacaataaacacagaaaatctaaagcgagtctgaccactggcagtctggagggagcgggtatgtggtgcgtgtgtatgtgtgttatgcgagggggtttactgttttagaggaggcctagctgagaaggtgatattttagtaatgaccagaaggaggtgacagagcaagccattcagacatctggggacacatgttcctagcaaaggggacagcaagtttgaagattccaatgggcccagtaggtgggaacagaggggaggccagtgagttggagccagggacagggagagatggggccaggtcacgggggccttgtaggcttcttggggactttgacttttaccccgagggaggtgggagacacaggtggtgggagctgaggagggccatggtctcatctgggctgaagggatccctctgcccgtgtgtggggactagactgcgggggtgagggtagaggctccctgctgagaaagctacttctgtgtcccgttcgtctcctggtgtaatcagggcaccgtttcttctgggtttgctgtggagaaggcatctgagtgacaaggagggcataaaaggtggtctgggacactgggctaggaactgagatccagttttgctcccggctcactgggggcctcgggcaggccacgtgcctcttcatctgcgcagccaaggagacggtctccacatctcccgtcacgcttcaaaggctgcactctcattctctaacttcagaagcagcttatcaaaaaacagagggtagtgcaaaaacgagggagagagaaccatggtggaggaaaccgagaaagccccaaacagcaggtggaggccagggcccctgggactcacagggaacagatgtccattctgttggcaaaccacaggtttcagtcatttccactcccgggcaaacgcacactgacacacacacacacaccactgaaaggatatgccacaaaatggg

SEQ ID NO: 41035 - DNA, 3785 bp, Homo sapiens
ccatatgtcccatgcacacttctgccagaaccccgtaatagccccccaccaactacttttgcttttgaagcatgtctgtctccatggattcctgaggcagtaaccaggtctgtgtgatttcctcattccacacccagcactgacccagcacacggcaggttctcatataatagctgttgaatctgtttattgcaaatattgtatacatttctaattttaactatgtagacacgcaccttattgaaagtaaatcctactcagaaaatactcgtagtgcccctggctcttttctccttacaatctgccaaacccctctcttgagtgggagccccaatccacttcctcagttgtgcacagggtcgcctcccaactgcgcctttctggcctgtttatcagccaagcaggggcactcttataaagggtgctgtgtcctcaaaaacagcatcaaagaactccgaagacagtggctttgttggttcattatagaggattctggaagtcagttgtgccataatcaatgcaaaaccacatgacataaatttttatgacaaaagatatttgtaatgagctcttttctttcaaatatgaagccttagtttacctctttaaaaaacactagttacggccggggacagtggctcacatctgtaatcccagcattctgggaggctgaggtgggcgtatcacttgaggtcaggagttcaagaccagcctggccaacatggcgaaaccacatctctacaaaaaatacaaaaattagccgagtgtgttggcatgcccctgtaatcccagctactcaggaggttgaggcaggagaattggttgaacctgggaggcagagattgcaggtagggccgagattgcaccactgcactccagcccgagtgatggagtgagactctatcaaaaaaaaaaacaaaaaaacaaaaaaaaccccaaaaaactagttaggaaattatcctttaaggcttaccttcctcatattctccatcatcaccatcactcattaccatcactatcaccatcaccatctatgggtgcctgtcatggagcctggatttatctaatctctcaatatttgtactattgcacccatcctgttagatgaggcaatggaggctcagtgaggttaggaaatttcccagggtcacataagcagtcagtggcaagggcagggtgacattcttgcctgcctggttccaaagattgtaaataattaaccaattgtttataattgcagtcataaaatcccatatttcatggctcgtggcaaggatcaaataattcaaaaacacatttggggctggaccttagcttgtgagattctcaagggcaggagcattgtctcattcctctttctatcccacagtgaaagcacatggtaggcactcgatgaatcttttttgaatgagtgaatgaatggattatttaagaaattagagactatcagagccctggggcactctgttccataagagtgtaaaatgttctcaaagaaattttgaagcaagtttaactctagaaacggaacagcaatttgtaaacttatagtctcagaatgatgcttttgacaatatccagtgtggccaggttttagctattaagcaatagaattcaaacacttttcagtacatgtcttcagcaggtaactggaatgtggtgaggccatcagtaataataatgaacaggtgaatacatgctatatgccagaacctttgataaacactccacctaaatgactgtttaatcctcataacaacttatgaggtagaaatttcaataccttcgtttcatagattaggaaaccaaagctcagtaatgttccagtaacttgtccaaggataacagaggatattatggacaagtgtatgccaataaatttgatgtcttggatgaaatccacaaactccttgaaaaacactactaaagctgacacaaaaagaaaaagaaaattgggatagtcctattaatagttaaagaaactgaatttataattaaaatccttcccgtaaagaacactccaggccttgatagcctcactgatctaccaaacattgaaggaaaaaataataacgatcttacacaaattctttcagaactaactaagaaggagcacttcccaattcattttattagccagaatatccctggtaccaaaactggagaaggccataacaaaaaacagactgcagaccaaagccctgcagctagtaaatgactgaaccaggatttgagcccatagctgatgccaaagcccgtgtgtctaaccatcacaccacactgccacttcctgtgccagttgcttctgtacagctggtgtgtggtttagggatcagagccctcattttggggatgtgtaatgactactggagtcatagaaataaaatgttaagaatcgaggcctgacctactttactctgacatccaagatgactaagtaagggagtatttcccaagagttccactctgactctcccttctctctttggcatttccttccccctcccctggatagaaatatcctttcctctcttcttcctactgaagctccctgtcctgtccacccctccagctctccaagccccagtgctcacctctttcagggaacctagcgcatcactcatgtgtctacccctgggcagtgattctagactatagtgtccatcagagttgcctaagggcttgctaaacactgactgctggtcccaccctggagccggagagtgtgcacttcctgcaaatccctgggtggtgctgctgctgctcctgctgttgctggtttgaccagaatcacactttgagaaccactaccatactcacagccctcatatctagagatggttcctttcagttcagcatatggagtctctgggtaaaactctgctagaaagagttggattgtcaggccaggagcggtggcttatgcctgtaatcccggcactttgggaggctgaggtgggcagatcacctgatgccaggagtttgaggccagcttggccaacatggtgaaaccccgtctttactaaaaataaaaaattagccaggcgtggtggtgtgcacctgtaatcccagctactcaggaggctgaggcaggagaattgcttgaacctaggaggaggaggttgcagtgagctgagatcatgccattgcactccagcctgggcaacacagcaagactctatctcaaaaaaaaagaaaaaaaaaagaattggattgtctttgaccataagcttcctacaaatcaatttttaaacaactggcatttcaaaagttcaactaacctgcatcacctagacgctgccctcacttagtgccatagtccacactaaaaccctgtgacggaggtagtgcatcctccccacttctcagatgaagatggcaaggcccagggaggctggtgagggggaggctgccatcagagctgaggtcttctccaggtccagggagtactggaccctgagctgccagcccgggtggcttagccctgagggactgaacatatttaagtagcaagtgagctccaagaggctgcaagctgatgtctgtttggttcagcatttccccagtgcccagacagtgcaggcacatagtgagtttcaataaatacttgctgagtggagggagagcagagcagcctccctgcctccaccccacaacaccccacccccgaagccccgtcagagtgctggggggtctgtcctgaggatggagcggggctcctgtgagtgctcagctcagtgaccggcgcgcgccatggctgctttcttcttccacctgtcatctcg

SEQ ID NO: 41036 - DNA, 623 bp, Homo sapiens
aactaaggcgtgagggccaggtgcagctgcatagagggagtcccgtaaatgaacagtgaatatctaagaatatggaatagtctccaggaggcagggctgtacggagcaaaaccaggccacaaaaccctgttggagtctttaaacatctttaaccacttggcctgtgatccaaggtcagaggatcagtgacttgcccaaggtcacaaggctgggtgtccagggtcacaagggtgagtgccaagggtcacaggctgagagctcaaggtcacaaggctgagcacccaaggttataaggctgggtactcaaggtcacaagggtgagcgtcgaggtcataaggctgggagcccaggaaaggctaggtatctagggtcacaggcaaggtgcccagggtcacaaggatgtgtgtccaaggtcacaagactgaatgatttaccaatttcctctttctctttatgctgcttgtccctgattaggccccagaagcctgcttaaacccccatctgcctatgtctcaaccctacaatttgtgctaaccaagcccatgtaagcaggaaccacaactgctcattgcctcaggcagttaccctcccaatcctgcctccttgaaagcctggctcctgca

SEQ ID NO: 41037 - DNA, 1234 bp, Homo sapiens
ggctgtaatgcagcggcgcaggaccttacataacctcagcaatgcatcaggagccacactgtgggctccaggccttattaaataagaggatttgctgttaaaatgctgaacagcgaaatactataatgcattgagcaacgagatccaagctagtaaaatcagttagcgtcagatttagcatccattcactcctttccctccccaaccttctaaagaaggtttgacctgggttcaaatccttccttcttcacttactagcacatttctcagcaagaaggaaatacagccaagatcactagccaccagtacctgcatcgccagcctgcacaagatccccaaaatggcagcccacttacttggcttccttctactaagcaagccacagcaaaagtcacacacgcacagtcaactgggttcatttcctgaattaaacacttcccttaggcacttgccagagagatttccatgagtcattcaaagagcttgaaacaggtgaacaccaacagccattttcgcactatatttagaatgtcacagagagctctgcctcaactctagatgttattctggaaacatcaaaaggtgggctgtttcttttctccctttattctaaaaaaggaggcttttaaaattgtttctcaaagtgccacagccagacaaaataaacaaggaacaacatttacttaatcccacagatttggccaagttttatccgataagaaggtggttggtgctaagatacaaaatagattcttgggactctagctgcatagtacaaatatccttttccttcacaatgtctctagaacataacgatgatgagtgtaacaaattttaaaggatgcaaatgcaataggaaaaaaaaattcctatctgaggcttttacatgtaagaagtgccaaagttaataatgacacagtccccatactaaaagcctcggagatgatcctcaaatattatttctcaaacagtctcacaaatattactgggacagttcgcaaagcactaaagaacgtcacaactatgataagaaagaattagtcaatactgtcagttatgaggacgcttgtgtatatccagctgaataagagcccctggcaaatcacatttgcagctctttacctacagaatgtcccagcaagcttttcacctcctgtgcagcttctccgtacagataaggctttcccgcatttacaaggacttccaggcctctgtcattgctcccctgtccctc

SEQ ID NO: 41038 - DNA, 1431 bp, Homo sapiens
gccccacacttccacccccaggcccggtcagcaccctgagagcccacctttggacacctggactcattctgatcttcagcttctattgtggtaagtgggtttctccttagtgtctggattcagatcctgcctggaccccgattcagataactcaatctccccttccccctggctgccacatttacatgttcccaggaccttagggtgtttggtaaatctgtccagcaaagcgaaatcaaatcatgttacccttctgctttaagccttccagaaacttcgcattgcaacagaacaaaggttgtctgcctctgaaacacctctccccctctgccctgctcccgagctccgaggcctcctttctggtgcccagatgtgccaggcgatagtgtgctgttaaatgtttaacaactgggggtgggggtggtcctagggttcctctgcccactgcagtgcccagggtggagcctcctggaagcccgcctgtgctgtgcttactggcaccagggtttccaggtgcttcacctcaccccctgtgagcacacccctcctcctgtgagaccttcccccctccttccccacacacctgctgcaggtggagccactgttgccgctccctcctctcttcagacctcttcccggcctggtctggccggcccttcccagcttcctgccctgttgccacgaatacagctggccatgtcccaagctatgtgtgtctgcatttgtctctctgggtaaagggacagaccccagctccaggcttcctgatggaaggtcacattcaccactggatgctgggcactgtgtggaagcttccccttcagggtttcacaaaacattgtgcttctatttctgctccaaatatatacatgactgagcactgagaaacccagatgtggaggaaatgcacatcccagttgctgggaggctgtgaacagagagcaaagttcagccagaacaacctggttggattcccagtgtgaccacgcaggaccctgcgcaagtcgcctgatggcccttggcctgtctccttggcattgaagtagaaagaatgggatggcaacaacagtgggtcctacttttcttcagccgagtctgcaaatgtgaatgtgagcttattacgtgccaggcccccaggacactgagatgaacaaacaacgttgtccctgcccacacacagcttgcagccactcagcagagaacacgcctgtgagtgtgtactgtgaggagcactgtgagcaccatgagggggtcgacagataagggagcccaacctagactaggggagcccgacctagactccagggaatagccagggaaggcccctgagtgtctgagtggctgggagctgtcctggtgcaggagtcctgctggggacacacaggtgtgcctactccaggcgcagaaggaaggccccgagtccagagcgcc

SEQ ID NO: 41039 - DNA, 3734 bp, Homo sapiens
ggtgacatttccaagaaaagttcagatgcatgcaaggttctggagtagtccctaaagtatttatttcctttaaaaaagaaagaaaaaatatatatgtatatgttatgtattttaaaatatgtatttataataatataataaatatatcatatattttataatataaaatatttatatatataattttttttctagaaaggatgaagccctatgaaagtagctggaaggctgctgtggccacagctgtaacccaacaggaagaacccatgcttgtcaccagacagaggcccacacagctcacagccctctatttcttatttaacagagattccttgagagctctgtctggccaggcactgggttaggctctggggacacatctcagaccaagtccctacccttatggaacttccagtctagtgtggacccagaataattagcagatgagcatatgccaggccgggttgggcaccctgagccaagcatgtcagggtcaggagacaggggacatccgctccataccacacagcacaggcctgcttcctataggactggagatgctagagttgcggagtgtaagagatactaggttcaagagtttggtcttgaacttcacttacttaggtgcatacctgtttgctgctcataaaatgcaaacaggaccaaagtgtggaggcccaccgaggcggtcagcagcctgacagccctggtgcccaggtgcaataacaagcaaaaccgacatcctgcattccctaattaagcctgattagcctctcccacactttcccatcctcctgtaatctcctacaggtgcagaaaatatgtcagtgccagtggggtgagatggataatcaccccccttgtactaggctggaaacttagatggctattattactcctccaacacaagatatctactgcctcaaaattatttcatatgctttggggatgcaagctccaggagtgatttatttttaatcgaaaagcagttctgcattataggaggccaagagattaagaacctttattaacatgtgcgatctcttcagatgcctcttctaggccagccggggccctggccggttttgaaaaggttcttatgccaaagggctcctctgaggcgacatttagatcaatatttggaactgcccttctgggaaatcactgatggtctgtggaaggcacatggtgtgacttttagagcagtccattaatgaagagctccacagctgtcccaagattctggaaaaggaccagatgctggtatgactgacctcgcttctgtgcaagagcttggagcactgtctttcaagcctgagtctctctctctctctctcttttttttttttagacagagtcttgctctgtcacccaggctggggtgcagtggcacaattttggctcactgcaacctccgcctcctgggttcaagtgattctcctgcctcagcctcctgagtagctgggattacaggtgcgtcccctcacacccagtttatttttgtatttttagtagagatggggttttgccatgttggccaggctggtctcgaactcctggcctcaaatgatccacctgcctcagcctgccaaagtgctgagattacaggcgtgagccaccacacctggcacaagcctgagtctctttattgctgcacggggagggcctttgtttgctcttgttctggcagtgggcacccacctccaggccgcctgaaggaacaagcagtggggtgggggtgaagatattctggccccacctgcttcttctaattctccttggtgccaaccagcctcacagcaaaccatggccgatgctggtgcactcacaccatatgggatgcttttactgtacaggcatgttccataggaggggaacagtacactcatttatgggatgactttgaatgaagatgtgcatatatgtcagggcaaaaaacaaaaaagaagagagctagactctaaatcacacagagggttgttaaaaaccctgcacatttactagctggtgtgatgagccctgagtgtgcagagcatgagtctctcagcctgtaggactcccacagctggttgtgcctgggatgagttagggaagtttgatgtcacagcatgaaatgccatcaccgtgtaccaggaaaacattactcattccctcgttcatcccattccaatcctctgagtacttaagagagagactcactcaggtgctgacccattttaagcacctctcaggcactagctcaccaccactttcaggacggggtggctcagggctcttgagtgtaccccagtgcagagctgcaatacactgtcgccttgttttctccttgtggtcacctatttacagcccctgacactggtttctacttcttgtgttacaataaaatttcctcttaaaatagatttaaagtaaaaaagaaagttgattttaaaaaaactatgaagaaataatatgaaatttaaatagccgctatgaaaatcacaaaggtggcgtgtaaacaatcaaggtttgggaaaagctgatctggagccatttagcaggaattaccacccggaatgcaagatggctagttaggaggtaacatcaatgggaggaggatggggccgcagagccagaaagcagtgtcgcccaggaggccggcagtgagcagagggttgcagggccacggggcggaccagacccggctcaaatgtcacgtctgcttaaagccatcctggccacatggcagagaccactgatcgcttctgctcacttgtcccccatcccacagtgactccctgagtaggactccccactcctgccatggccacctacaggggaatgagtgagcctaagtcccctgggcctcagtttccccatggtagagcccacaggtcaaactataatagatcatctttagggtgctttccaactcctcagagtctgtgcacatcaacgttaattgtcctggagtggtcagtagtcacatctttctacttcagtttcttaaggttctataatgaacatgtttccccaaaacacagagccagttttattgacaataaccaaataaaataacctaagatgagcaagtagaagaagagcctgttctatgaagaagaaatggtaatagttgggccaggcctgccaccccagagaggcactaggaggaagtgggccagggtccactgggggtctgcaggcacctcgacccctggagaggtctcccacccacacctgaaggacaaaggacaaggccaccagcacaggctctgctgggaacaatgcagtgggagaagcctttcctcacagagtccatgggggtcttggagagacggccattctatgggaacacagggacagtatggagctctttttaaaggctctgcaagagagaatgtttaaaaacggcagctgccgtgtgattgtggacctggataaaataggaagcaagaggcagagataacagggagctgttttagtcagagaagtggtttcctgatcttctataagaatgtgctgggctccatcttatgtaacattcattttctttcctggaaggagaacagcttgaactttccaaggctgcagatggctccaagttcctctgggtggtgaaatgccaaacggatggcgataaatgatcaggaatttattgagaatgcgggagaggtgagacgagcattgagtgatgaatttaaggaaaatggtcacaatttcataggcacaatgaggcctctgcactccattatgac

SEQ ID NO: 41040 - DNA, 9809 bp, Homo sapiens
aagagactttgcggaacatcaagcatgggaataaatggtcagcattagcccgggagagaggcatgttagcagatggacacaaaggtcaacttggggcagctgcaagtgtaggaacacacaacacacagctcttcttatagccctcaaacacacagagaacaatgtcaccccgtttcactcgctgaccaccgcagcatccccacccccatcccctaatgaacaaggctgtgtgaaatgaaaagaaactcctaccaacaagaatcttggatgaccctgcaatatgggacaagggtcatcttgtcatctcagctgtaaaaatttgcaccagtaaagaccatttcctccgtgtatacaatgaccaatagtttggtttgcattcatggacaaagtgcatctgggattaagatctaaacctaaaaggtgccaataaatagacaatggtggacaaaggttgctattcagggagcagcttattctgctattttttttcttcgactctactgcaaaacaaagccagatttgtatcagcagaacattcttacagcaactggaagaaattatcccttaaagaagctgttggaaaactcaactgcaagaatagcagctggccttgcctcttgccatcaaaagatctttgctatttgaagagtatttttaaaaagcccagaagaaatgccctgtttaaaaataaaacaatttgctacgctatcacaaaggcagaagcatcagaaggagaaataacagcttcatacaagaaaaacaaacttctggaaattcttaaaatggactacttaaaaggtgctactaaaatgcaataatctgactaaaaataatgtcattgctagaagatgcatggtagggcccattttctcagagtttaagagtaaattttatggaacaacagacatatgtcaaaggtgcttcacttttttttcctccttgtggggagagggtgtaagctgattccttccttaccttcagcagagtcactcgtgattcatattgattgatattgtaactggtgacgtctgaaatgtaatcagttcgttggccactgctccttctcctcactcccctcctggcttatcccatggctgtgtcaacaaatgacccgcagcttgcgatgatcccatgcatcctccttgccacacagcagccccaccgtgttccgagcaaagaatacattaaaggtgtgtgctgtgaaggagaatcccacattcccacaccctcaataacaccagctccttctgccatcactccagagacacctgggagtcaccctccttctccctctgctgcccatgcatcctcaggtacagtccatgttcatctctccatctcctgctaacacgcggtgctacgtctttgccatgacgcggccttctttgccttgcgcctatattactatgaacctctccatctagctggttatttggatacaaagctggggcccctacacccaccctttggctcatgcttttgtgtttgggtcctctcccccacgtgccctttccgagggtggaacaccatccaggacacaggacagaagggcaagtaggagctgcgacccagcccacactctgctcaccaactcatggggcagcctctgcccagtgggcacctctgtctaatttgcacaaaggctctgcgtggcatagcagcagccctgcctctaggtcctggctgcatcatattataattatccgtgtgttggtccatcccaccccttcatcagatgcatgatctttgccaccctttccccaccctggcgcccaaggaccatgtagacgtcaataaggaagtatttgctgaatgaatcgctgctttggatcctgggagaggagagcaaggagccgtatggggtagccacagagctgcatgcgaggggcgctgagcaggagccaggccgtcctcacccctgcagagactgacagagtggggttcaaaatggccacttgaagggacaataagctgtgtgatttagctgaccccagggagcatctgcgctaaaccagctggctggtgatgcgggaacacctagtcgcaggtggcgtgagttcagaagggctacagggttcagcagctgcggcctggggagatggaaattcacactcccttctacactcaaagatgaaaacaggacctgcagaaggtttcctggaacactgaacaaacacccaaagcagggggtgggggaaagaaagcactcaacagccggctgacaacctgattagaaaacctaagggcggggaaggaaaagccagtcccacctttgaggacaaagtctcaggaaggccgtggggatggaattatgtgcaagcaaatggtgaaaattgttcacctccggatggatccagatggctgggaggggcccttatttcccagagccacaggtgccacacccgtgtctggctgggggctgatgtgaggaggatattacgaggacgcaagaaggggggatgttctctatcacttaaatctacccaggcctcagggcatggcctctcctccaggtaaactggcatagatgggggaagtgcccgaggatggcactgcccattgctgtagacacacacagagagtgaaggcttcatggagaaaggggtcaacatgggcctagaacgggagggctgtgatggggaccatcactgagccccactcccgggagcaagggaaggaactgcaggagggaggagccctgtcttattggttctagatccactgaaagcggccacagttctgaggacttgggcaggttccagaaacaatgccaaatctcccttgctagtccatccacggcctgtgttccccttgcagcacctagctccatgtcaccgacgggaaaatcctgaaaaccatgcaggctgcaccctggccccgaggcagctcagaccggtggagctggccaggtgggagaggagggagccatggtgaggggtgactacaaagttcctggagagaaaagccacgtgaccgaggtctgaggcaagaaaggactagaaggcaaggccagtaaggttcagagaaagggcttatgttccagaaggtctccataaatgcaggggaatttggaacaaaatgctaaacagagatttaaaggaggaggcacttactggaggtgtgagggcagggctctggaggaagtggggagggctggcctcccagtcgtgtgtcttgggacatcagcgagggagggacaatcacactttaagccagttccttcaatacaccagtttttatcatcataacagaagctacagaaaagaaagtgggccagctctccagagttgaggggctgccaggaaggccaagtggcatgagccggtggatggactagcactgaggaaagatgagagtgagatgtgtccactcggtaaccctctactcagcacctccttcatgccgggccttgcagatgaacagcaaatatggtctgctccatgccttgaactcactgcctggcaggggtcagagttgtacaatcatataattacagcctgctctccagccttcctggtcatccagtgtcaaatgaggatatttttggagtctaagtcatcatattgcacaatgttttcagaccgcacccttccctcacctgagctcatgggtaaggaattctcacagttaacttctagacgtctttctatggactgagagccacttggttggctgaatacaaaggtgctaaatatttctcaaaggggcacaagagaaactgtgacttcctagctcaagagcccacaaagcggcttgcccccatccatgggccagtctccatcgccgtgctgatagcatcagtggacatttgctcatgatccagtatccccccctttttctttttttgagatggagtcttgctctgtcacccaggctggagtgcagtggtgcgatctccgctcactgcaacctctgcatcctgggttcaagcgattctcctgcctcagcctcccgagtagcgggggctacaggcgtctgccaccacaccccggtaattttttgtatttttagtagagagggagtttcaccacttttggccaggctggtctcgaactcctggcctcaagtgatccacccgcctcagcctcccgatgtgttgggattataggcgtgagccactgcacccggccaatatttttaagttccagcatgttgaattggataaggcagccagtcaggcaagggcataaattctgttttttgttattgttgttgttgttttcagaagggatacctatctctaatctttttttttttttaagagacagaatttcaacacgttgcccaggctggtctcaaactcctggtctcaaggaatttcccgcctctgtcttctgagtttctggggctacagatgtgtaccacggaacccagctgatttcccacctttgatatattatgagcaaacgattagggagaattaattattctcttcctctttaccctaggaaatgatgtttaccctaacccaaaatgtaagaatttatcaggaaaacactacctataaagaagaaatctgtcctgcttggtggtgtaaggagaacaattggatttggtccatgtcagaagattgcggaccaaatcccactactgccagcagggtcatttggagaaagatactttgtaacattggacctctgtttcctcatctgtaaaatgggaatagtaagaataataatacttgtctcacagattgatgtgaaggtaaaatgaggtcatgtgtgcacagaatctagtccagaccctagaacatacctggcactcaattaatatgagataattgtgccatgccttaagtataagatttgttattaccgtaaacactacagcatgaatttgccttggtactgccaaatggaggtttaagttctgattcctgatgatgaaatacggagactctggcctgctacgttaaaaacagcactgatggtaaaggctaacccaagacatgctttctctttctcagggtccagtccgaggaggctggtgtttatacgacagaatttgcttgcataaagcgggttaagccaggttcccagtgcagcggctgacacctgtggcttagtgttgctccgagccacctgcagagccagtcttggaacccagcaggtcctctgggggcaatatgtctctgtaggtgctcacggcaggctccaggagctggaggtaactggttggccagaaaatctacccaaaccagtactgactaaccgaggctggcacagatccttctgcataataagatatccacaggcccccggggtggcttctgaggtccctagggtctctatgagaaagatagcagaggcggggctggagatgaggtgctcttaacccaggttttgcccacagttggtacagtagtgggggagggttcagtctcctctttttttgccccttgcttttcctcccttctttcttcctaactgggaggagacaggattgcacaaagcgaggccctagttttgctgaagaggggtaaaaagcctggggggaaagattgaagccctggtgacttgaggtcccctccctcttcctaaaagcagagtgaatgattctgtgcaggcaataataataatacttattataatgatgctgcgggggtctcccagatcatgcaagagggcaggcaggctgagcagctggtctcggttatgaagatacagaggtgtttcatgctggctggcacaaacctctgccctgagcccccaccctaggacccccaagactgccccaagatccagcaagcacagggttaacatgagtcatggcaaggggcctccaggacctctgcatcatctccaggggctggaggcagggcaggacaggtaggtaggaccttggccagccccttcctctttggtaaactgaggataacactatggaaagtgttcatacatgctcatggttctgttgctctttctatttcagtgctcctgccctcaatatttttttcccttaaccttttctagacccataggtttcttccaaattctggggccgaactgcctcaaccatccacctctgttcttaagcccatcagcacccaccacaaggcggacgctgacatccaagaggcagctcagtttaaattaagaagttgagttatcatctctaactagagcaaaagcaacggagcagagagggctccctgcaatgcaacttcagcacagagattgtgaaaaccacccgcaggcgaagggagggcagggcagccaacttgaccgtttctaacccactcacccaccaccctccccctgtgccaggactgcagaacctctttatttttgttgacttcgaactaggacaacctcactacttaaccaacaaagccccccaagtctgagactcagacattaaaaacttctattttcaattatttgtcttctttctgtatattgatcaaattaccacaaaccactaatctgttagaaattaatccaagattgagcaattctacagccagttaagtcagagtggagaattaatgattaattagcatcataatgctcaacaacccccccacttcctctaatgcgtatgcacgtacagacacattctttaagaaatgtattaccagaactggtaggaactcttctcagcacgttacccacttgaaaacactagagagaaaccatagccagtctgtgtagctgccctgaagctatgactctatgccgggttttaaaagtccatatctctgtgtttttaacgtgcagctccctggatcatagataccttgatgaagacagagaagaaattttacacctgtgtgagggttgggtgattactggagcacaaagagagacataatccaaccacacaatgatccctaggagacaagaggcctacaaaacaggtaaaatgtccctggaacaggaaatgttcttgtcaccaggccaattggttaccacaaataaattctttttccaaataacacaaacaagcagggttttcctgcttcatccaagaggagggagcagcagcaggagaccagctgtcttgtgtatagtcccaatgtttgcttctaatagcaagacaaatccttgatggaaaatgtacaaagtaattgagctggcaaggaatcagaaggaaatacccaggcccctttcttcctggtgacacatgtatgccatcttcagaagctcagaaacaagcaggaaaagtgagcaaaggtgaagatatatgtattacttcgggtttctcatccatctaggggattttccttaattgtcgggtttgattttaaatgaatgcctgtacaaccggaaatcaactccagtacaaaaaataaagtcatgtggaatttttgaaaattgccatacggtaggatccatatctgagttgttataatgaaaaaagaattcctgcttcttaaatttaaaaattataaagtatacattttagctttgttaacattgctcagcctaacattaaaacggcaggggaagtaggtcatagagaaagcggccccgccccagatggcacatgataacgaccagaggagaagcaggggccatgctcccctgtcacctggggtgactttctggggaagacttacttgggtgtgcctgtgggtttccagtacctgcagaagaggtactgtccgtctgcattgaccaggtgagggaggtcctggtagggaatgctctgcggggtccgcctgggggaactttcctctggcatgctggaagggtcttcaggtcctagaaggaaaagtgacatattccaaagtcagaaatatctcaagaacatgtatggataggagagaaaagtctagttcagagtcagtaacatttttttaaaagcagtttaaaaaacccctctgtttcaaaggtttaaaacatacatacatttcttgcaaacctctccaagactgaaaaatcccatttgttcttaagaaaatgctcactttattttttaagtgcctcattacagtttttcccccttcccatctgtgtttattttaaatcatttcaggaaacttcatcttaaagactattttagctgtaatcaagtggaaattatagtcagctctatgggtacaaagacccagctgcaagaagacccatctatcttaaaatctccaaggaacagtttcaagtgggcacaataatgaggtggatgatactcagattattcctcccatctgaaattccaaggatacatgacaaacctgtttccattatgtgctggcgtttgcattccacaaccacgacagcctggagaatcagaaccaggcaaatcgggctgttccctcatctgggcggccccaaggcagcaggaaggcagctccgagccctcttcccgcacccagaccctgcctttcgggctggggcgctcagccgggagcctgcttccagctcccaccggcaggctctccggggctcccctccctccccagggcggggagcggcgctgcgattctccactactagttcatgtcatcacttttcctaaacaaatcgctagaggggctcggagaagggaggggcccgggaaactgggaaactagctccgcgcacaccgaggcacctcgcagacgcacaaatgcgggtgcccaaggcaaagtcgcccccaaggcttctcacaaactttgcttcctgtgcgtctccgacagcacaggacacgtagccccgaagctgtcatcggaaatgccgctgggaaaaccgggtgggcttcgccgggtgtctgcaccggggaaggtggggactagaaagatggagttgatggggacaagttggtttgggggctggtgcgaaggagcagggagggcgcgcgcgcgcgcacacgcgcgcacactcggacacgcgcgcacacacaccgtgcacacacacacacgcacacatgggtagcgggagcccacgccgggcgtgtccgggaccccagtgctgctccccacccctgacggcggcactggcgggctggggcaggggccgggaggcagttaccggggccacgagcgccgctgtcgcgttccccgagcgcagcggatcctcgtttgcggcgggccagggccgggacgagctgcgcgcgaccggcttcgcggcgacagggtgcggcgtctgcgccgccactttatccctgggccggctcggcggcgggggcggcccgaggtgggtggggacgcgcgggacccggcgggcggcgggcggcgcggggaggcggcgcccggggcccacgtgtgcccggcccgcggggaggagcgggggcgccgcccgccgacccagccacgcactcctctcctccgcgcctcgtggacagccgcgccccggggtggccgcccgaggactgtcagggaggcctgaactgagctgggttcatgggagcctcagcgcgggaggacacaccacacccacgggcacacgcgcgcacacagacccacaggcaccacacgtacacagacaactcgcgcagggccgcacactcaccacacgtgtacacatgtgcactcccaaagtcactacactgcacgcagggacatacagacacacatcccagagataccacatgcatacagacacacacagaccacacatgcatgcacacacacaagccgagacataggcacagacaacccacagagacacagaggtgcacagacatatgcagactatacacctggcccccacatagacacagacacactcacatcatacacacacagtcgcacacagacacactcacacttcattgcagtcagacacatacaatgctggaggggcaattaaccggtcgtggtggcatgcgcctgtagtcccagctactcaggagaatcgcttgaacccgggaggcagaggttgcagtga

SEQ ID NO: 41041 - DNA, 715 bp, Homo sapiens
tgttggatgatgggttgagcatgaggtgcctgcaggggcagatggatttgaggatctagagctgaagaagaaggtcagaccggagacagagatgtgggtgttggccggaaatggcccttgcagctgtgggggagagtgtgctgacccaggagagtgggcaggtagaggtgtgacctggcagcctgcatactgcacctggtcagcaggagatttgacctgcacagtgctttattgatatttggttgaattagtagccaatttctgaaaatcagggcatttcacatagcaatgctggttgtgtaaaaggccaaaggtctggcaatatgggcttccatctgggcgggcagcagcctgcactgaggctggggggaggctgccccctgcaggtggtgcatgcatttgcctatcggcccactctgcctggcccacctccaaaaatgctaactctcagatttctgatttattttactgggtggagcttttctgaattgtgaaacatgaaggaagaaggggaggttttgatggtgatgggcagaagcatgatgtccaattcattcaaggctttctgagttctccttggaacagctaagtggagaggcctgattgccaatggaagatgcagtaggatgctcaagatggagacgaaggtttggaagccgtcggccatttattatcactgaaatcatgggagtgaattcaattgctcaggggatgt

SEQ ID NO: 41042 - DNA, 677 bp, Homo sapiens
agctcttagaaacagtcttgctgtgaacagctattttttgctctgtatttaaaagcacaagggccaggcctattgggaaaggccattaagtacaatcaaatctaccaagatgaaaatataggttcccgcccacatgccatcttctttaaatgcatttggcaagtccagaatgtcagcaattagtaaccgggcccaagcacggtaataagatttggactcaccagtgaaggagaaattcttcccctgactaatctggttagtgaagcagttcaaagttgcacacgctgaaaaatgttccactaaggtcattataagtacaaataaagtagactctgctcgcaaataaaagtggtgggtcacacatgtgtatcttcctacgttattttttgaaaaaagtttttttagacttcttttgaaatagatgcccttgacctcatactaaagtttcaccatcaaaggcaaatgaggtggtagttatgtttaggtggggaaagtccagtgaagggttgggtaactgcagaaactgctacatatgtatagatatttccaggtaatttaggcaaggttgttggggagggaagcaaactacacagcctttctaaacaacagcatttgtgtgtgtgtgtgtgtgtgtgtgtgtgtgtgtgtgtgttgggcgggggtgggtgggtgttctg

SEQ ID NO: 41043 - DNA, 753 bp, Homo sapiens
caatcttcttggattcattgagtactgtgtggcaggccctgtgatataaaagatgcagaatagtggcctttggccccagtagcacactcacttggacaggcagggaaagcacatgcaaaattaaacttctcattcttcattccaacacacaacgtgtcaggcactgggctaggtactagggatgcaatatggaaaacgacaggccagtgagcaagataggaaagcaggtgatggtgaaaataccacctgactgatgcagtgataggcaaagggtataaaatgacactgaaagaagacaggccaggaaacacatgagattaatttctcagtatgtgatacatatagtaaaagccatgagatcaaagcagagttcttaattttggttttgagatcgctgtcaacaacatactccagtatcagtcaccacccaacatatgcagtttgcacagtgactcttccaggacctctctatgtgaaggagagctggtttacctgaggccagtgctttacaggctttttgattagtcacacagaccaggctgtgagtctggatagaatgaggtcatcgatgagaggcgtgtctgcaaatacaggcatgtccctccttccggggggtttacctcagtctcaggagccatccttcagatcaggaaatatggccctgaccttgatgaccttccagtgtggacttgggaggggaaaataaaagcagtgcatagaaatgtgtttcttgtaacagtggataggaaattt

SEQ ID NO: 41044 - DNA, 1077 bp, Homo sapiens
catcattaccatcctcctcccctccactgaggagagacagcctccatggtgcaatgcccagtgccaaaggcaggtgaagaactcagctcacaccctggctctgctggtggggtgtggacaaggccctgaacacacacatccatgtgtgaatgtatgagggggtgctatatggatgagtgtgggcacattgtgtgtggcaggtgtgtatacgtgtgtatgtatagttgtgggtatgtattggtgaaaatcataatctcccatgacacaatcctggatgccacgatctcgagtgttgaaatcctgaaagatcaaaactccagatgttgaaatcctcaaagtcaaattctaggaaaaggattagtgcatttcaggatcattgcatcatgttggttgcatgttgggtggaactattgctttgttatctttgtttggaaattcagtgtggtttaaggagatgtgtttgggtgccaagttgacaagcctggctctgctgtagacttgagaaacctggtaggcattattttgggggtgtctgtgagcgcgtttccaggggagacgagtgcgtgagtctgactggatcaggggaaagatctgttctcggtgtaaacaggcacatttatttattgcgcagataaatccccttttaaaaatgttaataaatgtcttttagagaattctaaaattattttttccagaattacgtttcggggatttttatcttttgaaattttgattttcaagattctatactctagggattttgatctttcaggatttcagctttcaggattatggaatttggaactgtcttttggtactatggcccaaactggtgtgcatacgtgtgtgtgtgtgtgtgttcatgagtgtacatatattgtgtatatctgtgtgtgaatggggtatatgtacatatgtgtgtatatgagtatgtgtgtgtgttgttggtaaacacaaatctagagaaaaaaattgtattttttccggtgcaaagaaagggaataaggcaccccctcccacttcctacttcctttaataaagctgaaattgtaaacgctacctctgtctccttgagat

SEQ ID NO: 41045 - DNA, 3935 bp, Homo sapiens
cctcccgaagtgctgggattactggtgtgagccactgcacccagtccaataaaaatattttaaactagtgattctcctaaagcaatcagtgatttaacacacgtaacttggctgcagtccctgcagtgacacaggccagattgtgtcataatgtggaaacaacaggaggcctgttatcaatggtactgacatcctacaactattagcacaaaccaatgagtttatattaaaatttctattaactaattgtaatatttattgtaattactatactatttaccctcgaaatatttcaacattttaaccatcaatatggtgcagggtgcataatggctaaatatcggatctagtctatatgctgaacttagtccaggggctgccagttttagcttcaggccaaaactccagaagagatcatcagtgggtcctggaagtgaagatgggttgcatttcagactctgaataaagagtcaatgtcttctttttcccctttttggtgggggatggatatcaagtgatgtcacacctagaccacttcactgaagttacctgcctgttcccagtagtcctttgaattttccaccagtgggtttgtattccaaaaaagacttcctgtcctgtccaactttctgagccaagaatgtacaaaacctgattatctgctagaaatgggtgagaatggaaaaatccaaatagttgacacctaaattaaaagcaaaaaagcatcttgccacatatgtaccctcaacttctacctgtcctggtcaaggtttagctccatgaaaccttgcctgatcccacaaggcgtgcccacctcctccctgctaaatgctcacagcattaagtctgtttctcttagatgacatcatacctactgactacagatgcctgaaagtaaattccaacccccagccccagcatcccttgccctacccgttatccccctttcccacaccgatcttaggcaatcacaccgccatgctttgcccacaacagtctcctcaacctgttccctcattccttctcgccagaatctatcaaggctcggcacaaaggtactctcccaggaggccttcctgaattcttctgtgaggcagactacttcccgagctgccccggcccttctccggccaagtctctccagaaactcatcccattcgttctcagatggaaggggacccacacccacgacaagcctccgggtttgcttaatgactcagacagcgagggtgctcggtaagccccaccagcccgcgccctactcagcaggtaatgacggagacctactaggtgacgggcgccgcggtagacgctgggataaggtccctgctccagggagcttacggtctattcactaacgtcaaagagcagtgagtgctgttacgtgtatgggagccaccagggtctccgcctgcctgcagggccacgcgcgcactcgacgcttcgcgcctgcctcagtttctccgtgaggccgcacagccccagtctcgggaggcgtgacacaccctccccgcgcgctctcgcgttaccaagtctgcgcagccgcacacccccagtcccggcgggccccgcgcgccaggccccttcccgacaggccccaggagccccgctgcatgccggggcttgaggtctcggcgaagcggcgcggcgcggcgaagcgcggcggccggcgggcgcgcgtggcaggaagcggaagcgatccgaggcccggccccggccccgccccgcgccgcgccgcgccgcttgccgccgggctagcactgacgtgtctctcggcggagctgctgtgcagtggaacgcgctgggccgcgggcagcgtcgcctcacgcggagcagagctgagctgaagcgggacccggagcccgagcagccgccgccatggcaagtgagtcctgtagggaagccctattgaggccgggacggaacagatcccccttccccacacccgtgcggtcgggcgcccgccggccaaccctgaccggccccctgcagaacgcggcccgtgcccccggcccttctcgagtatccccacgcgtccggggtgcggccggctcccctggcccctgctctcactcgtcgtgggcagaaggcgtccctgggtagcgcggaaggttacttctctgtgtcccaactcttcctgttttgtttctcccatcaaagtcaaatttctggaagtcatcaagcccttctgtgtcatcctgccggaaattcagaagccagagaggaaggtaagtaccccaaatcgccaacaaagaaggtttcaggaaactgtctggactctggaagtttacagtatgattaaaaatggcttcagcacggcaatggaaactctcccttctcttcccttggagtgtagttgtgctctgttattccggagagctgtcgaaaggtgacctggttgtgtggaaatttccactgaaatcactgtgctttatttggagcatctttggtggatgttgctccgagaacaaagcctccggttgccctgtcccaaaaatggatccgggccatgaatgaataaggcctcagttaggatagcagattgagttaccctccctttttcacctccaacgggagcagatcacgggttggttttttttcccaggagatgccctttgtatccagctgctaaagggaagggctgtcactttagtatttacaaatgattttgtaccttttatgtaggctgtcacaatagggggaataaaggctattcttttgtgaagtctgctgcttttcacagacggtgtattaaaacaaggaaagattaaatttagagctgtgctgaatcagaaattgtgtggagtgagtgttgccagtgtaactacagctgtcaacgaaaaaaagtttcattaggttcctaggttagagagtggggaataaaatgtttgtgtcctcacattatttttcaaactgttgttaaagcattcacatggacacttgggtgcttggaatccactttcatttttttacgtaaaatagtttcatataaatgcccatgtgctgcttttaatggacgaatttgtaaagctttaccccctcaattccagtgtagcgaaggggcatggctctggaggcaggcaagcctaggtcccaccctttacatagcaccttaatagctatgtgaccttggccttgtaactcagtgtggtagacggaacaagggaaatacgtgcaaggtatagcagtggctcaggaagggattaactctgggagacatgatgtcttatggtggttttgaaggagaaatagaagtctccttgaagggacggaaaggaattccaaataaaaggagtatatagtttgcaaaggcattggtgacaagagtgtagcatgtttggatgggaggttattagatgtagttgctattgatagaacataattgtaggtggggaacattaggagatgaataacaagggccagacatgagaatgtcactttggaagaaaaggagaggactagagttggtttagaggcttttcacatcagaggatgaactgtggtactgagcaagaatggatttaggggctactaagaagcagaggagacaggacttggataaagagcttttggggttttgatgttaaatttgattgtaaccaggagagaggacttggtgattagaaagggagttttgaaaaaattgtctgctctttgtttcccatcaagattcatttcagacaggttactctgaaatggcgttgccttctcttggccactttctaatttcttagtgtggtgggatggtaggtgggaagaggaccattctcaagagaagaagagtcctgtgaatgcccccagctttggatggagtatctgaacactgattcacccactgttgtgtggccgtatgactgtgtcctactttgcctgcatgtatagttagaggactgtgactccagttctggccagagggccaggaatgctgactcagt

SEQ ID NO: 41046 - DNA, 1514 bp, Homo sapiens
attcttgcagttttccatgtgatatgtttcataatgagtgttgggaaggtcctgtgagtgtgtgctgcctcacccaggtcctggccatctctagaggaacacaccggtgtaaggcaggcgcttccggaaagggaacaggaggcagggggcaggtgtcgaggtaggttttcacggtacacgcctttggcaattttgcatcaaaaaactaagtgtatgcacattttttttaattgaaagcccaactcagccttcccccactgctccttccccgcatgcacggggggacacacgccttcctccctgcctgccgggacttcaacctcgcttgctgggaagtcgcgcactttcgtcgcgacttcccaagtcgtgctgggtgtgacttggaatctcggatccctgggctaggcctggccacgcccccatggggggaggggcagcgcggcgggggcggagcctgggcccgaaacgccacgggcgcgactctgtgcgcgtccgcccacacgggggcgctgtgtcctcgcaagctcccgcggggtgcctcgcggccctggaacgctgtggttttcgaggggaaaagtgagagtggctggtcctgcctccgctgccgcttggccctgagatccccactgcccacgggataggccccagtccacccagccggggccccccccttcccctcgtctcgctctccttggcagttcggacttcgggtcagtcccacactcgcgcccggctgtccctgctgcgctcctgtcactggcattgggaagccctccggccccctctctgcacacctggcacacggctcctccctggcggcatgtgggtatttgggttgggcgagcctctccctcccgattcccgagttccgagtgggtcccggcggaccagcgctattctggaggggcagtgcctcagaggcaggtcgcttcgagtggggatttgtgcgctctggcgcggaggaggggggtgggaagccggctcttgccctcctcacccggtggggagcgagcagggccaacggtgcgctgagagcgctcagggcgtccccaacagcatgacccgacccagggacgaagctctgggggacgggaccacttgcgatgacagctaaaggagcacaggggggcggccggcatggagaggcggggccggcattcctgcgggcctgccgggagggtggggaacctgggatttagccatgggacctgtggaagggttttgggtcggggtcctgaccgtctagtctgggttctcaaagatggttgggacagtgggcaggcttgcaaagaccgaagaggctggtggacctggtggctgaggcctaggccaggcagggatcgcggtggggaggtcacagtaggtgtggtccctcctccccccacccctcaggcctaagtcactcaggcccttgtgtcacggtggcaccgggacctccacccactacatacacacgcgcgcgcgcagccccgtgaaaacctgcgccgtgtgccccagacctgcagcccgcatcc

SEQ ID NO: 41047 - DNA, 3504 bp, Homo sapiens
gaaggaggcagtatggcccccaggagttaggaacacaggttccaagcagcctgatttcaaatcctggttccatctctcactagctggccaagggacttgcctcctctgtggaagtggtcttggaagtgggctagcacacctatcccagtctcacaggctactgtgaaggcaacatggaacgcagagtgtgaacacagtccctggtgcaataagctcttgctgcatctctcttctgtttgtctaacatggctcgagtggggaggctaaagacaagcgcagcctcagaggacactggcagccggcatgggccacatgcacagctgacttcatgaagggtcccaccaccactgctgtgcatgccagtgtctcctcaggggccaggccgagggagaagattcactctggcagcagggacggctggggcctctcaggctagatggaatccccagcatcatctccgccccctcccactgtccccttgacatgactacaggggactgtccctaatggaaggacaatgctgcttgccccacaaggagctcatagttagtctgaactaaagcactggaccaagatgaccatcctagtcagccctgcctcccatatcattacagcacggagatccagtctgaactagcacaaggagcaagtgctgggaacagcgtccgggtacttagccccacctcaggcaccacggagccagcagggaaggacaggcctggcaagggcaagaacgcagctctcatcctactgggaaggcacattccagtaaggtgcactgcccagtgctgcacttgcccttgctgcttacttagtgggcgaacgcagagattcggccagagagatagggacacttcagagggacacttcagagatagggacacacgagccaactgacaagagctctcactggccaaagctggctcaatttgagcaacaaaataaatctactaaagtatacaatgaacttccgtaagtccattctgatacaatcttccatgcagaatcccaaataattttggtaaatactcagttctctagaggtgagcataacccctgccacttaagtgtgggctgcatatagtgacttccttccaaagaattcagtatggaaaggcagcagagagtaactttacagtgagaagacccgacaaacatgacctcagccaaagggtcaagctcaccatcaacgatgagtcatgttgctagcatgtgatgagaaccacacatgatacgatgtgatcagaaccacatttcacctctagtcttcctctccataacccacaatcccagtctactcatgagaaaagcatcagacaaaccccaactgagggatgttctacagatacctgatcagtcctcctcaaaactgtcagggtcatcaagaacaaggaaaatctaagaagatgtcacagccaagaggcatctaaggagacatgacaactagttgtaatgggttatcctggatgggatcctgggacagaaaaaggacattaggtaaaactgagaaaatgtgaacgcagtagaataatgcatcagtattggtcattcacggtgacaaatgtgctatctgatgtaacacgttaacaagaagggaaactgggtacaagatacatgggaactccctattgtatgttcacaatgactctgtacatctaaaactgttctgaaaagtttatttttaaaaaacttagagagagagagagagagaatcaaaataacctatgaagatttatagaaaacacaccaggtaaggaagggttctttcaaagcaaccacaggaacagttacgataacttaaaaagaaatgctttccacactgaactgacagcgctgcagaccacgcctgagtggggacggcagccccaagcccaggggcaagcgcccacaggctggacccaggccaggcacacctggggagtctcttactgctgaaaacctcagccatctcacttcatgtacttatcctgctggtcagccaggattttggcggaggacttggcatcatagaaaagttcactgatctcttcgacatgctctttctcaatgctgtccttcccgttgattttagcaagcaagttggccggggtcagcagctgcactgagtacctagagtggacaggggccagggctggagtgaaactggggccaccgaagaaagcaccttccccccacatcagtaggcagcactggcaccaggagcagagcccagtgctgggcttgtgccagctgctacgaacacagaaaaggggagacaaagttgtcacttctcagagagctgcagtcattatcccatcagagagggtccaggagccaccaagaagacataagtgctattccccaaatctttagtacagtctacaaatcctccagtaggaagtaatgtcactgctactggaaaaggactgcaaacttatatgtatacaggtgtccgacagatagggatatttaacatggcagggaaatgaaaacatagccagctggaagtacatgcccatccaaaggcatgaagactctgccgttttaaaaagtaccccttcatccaaacctcacagcttgcatttctgccttcaacctcaggagcaagaactgactcaagggatgtagggaagggctgaggactgtgaagcaatgattttacaatgagtcaggccactgtgaagggacatgctctgccggtcctgtgtttgagccgctggagaacaattaggagaactgtctatgtctgcgctcctccctggctctccatatccaccacccagacattttttatttgcttgatggttaaataaatcaaaaaagttaaagatttaccaggcctcataacaccaccgggagaacaggagccagggccctggctaatgagctaccacatggtccctgctctctagttctgtgcatcttctctgccacaagaaggcccagggtcaaagcactctccaccagaggggagcatctgctgcaggacatggggacttcacccttactctagcttgttaaaaaccatcagatagatcctctgcatttgaaactcaagtgccctggcacccatcgcgccaggaagagcggatggatagagtcccatgccctaggaagggacctgcctttattgtccagaatgaccccagcgagggccctggctgtgctggggaggccccggcgggcccagggtaccagctcacctcagtgtggtcttggtgccaatctcccccaggtggttcagtgcctcctcactgatgttgattccttccgtctgggcacggattttaatgatcttttaaaggataaaaaacatgatcaacggtgactgacctcaagtgccccatttctaaagtgctttaaagacaatgttgctcagatttctcactgtgcagcataagagaaactgagacctgggttggtgggcagggagccaacgcctgcccagcactgccggcccggcaccctccaggaggcatgtgcggccctgcagtatgcatgaatagcatcacggccagtgtgctg

SEQ ID NO: 41048 - DNA, 913 bp, Homo sapiens
tgtcctgatgtctagatgtcagcaacttgttcaaacatttcacaaacactgcataggccacatgaaacgtatctgctgggctcatgggtgaactgccagggtgtgagctccactgaaacaatcttagcttatgcaggaggggcttcactgtctgaaatccaaagctaaatgcagctgggcaaaaaggggccctctgaagttactggatggtacaaggacaaccaagaaaaggagctgggagggactcacaacagaactcccccctgaacacagcttcaaggtaaaaacggcttctcactcacagctgggactgaggaaaccaccaggtcttgccaagaaaaatgtccccagatgaccttctgaaactccagggagatgtaaatattgaatcctggagcctggtcataggagacagcttaagctaagtgcctcgccttcagtgagatgcactgaatctgtggctcagcttccagaatgtcagggacactctgctctctctctctcactagagagagcagcaggtcagagcaatcgtgaaagcgtctgtctcaggctgctcgaaaatggacagttcataaatgagatctttaatcatttaataacctgcagggatagtttatgagggtgtcggcttggattgcagagtacacaagttacattgagtttgtttaaaaacctagccccaggctccagtaaaaatgctgaggttatcgcctgggccagcgggaacaaagccacgagtcctgagagaaagcctgaggagaggccctcctgacagagccaagacagccccagcccagagttggcctggcaagtcactgtcctagaagcacagtacagaacattccagactgtttgggccaggagctctgggttcgaatggcggcagcaagggtgaactagctctgagtgg

SEQ ID NO: 41049 - DNA, 1773 bp, Homo sapiens
atgtccacagagcagaccaggcaggggcatgaaatcagcttccaagagggcaatactctagggctggcctgggtgataactttgcactcactttttctactcttcacataattctgcaaaaaaggtgctgatattcccatttcctgatgaggatggtaagattcagagaggtcaaggaactcgcctgggtcatgagcttccacgtgactccaatgcctgtaatttttccatgtgggaaccaggcttgtgctgaaatgcatgctccataaaacacaatggccatcagagagtgggctcacttctgaggctcaatccacaagggtcatttacacagggaggggtgagcggcaagaagccgagagggagcgtacactacctgggaaagaacactcctaggaggctgcattttcacggcaatctgttgtcagcatccaacagttccccactgccacctccaggcagcaccccgtcaaagctccatccccgctcacagcccagggtccactgggaagcggtgtgggagagcagtgagagcatggagtttggacccagacgttcctctgggctcaggttccagtggcaacactttctagcctatggcctgggcaggtaacctcccatttgagtctggagataacctcaactgctcacagggttgtcagggtgtcctgggaggacatgagatggcccatgtagagtgctctgtatagtttctgacacacaggaagccctcagttagtcacctcccttccccctctctttccttcggagctctagagatcagatgtggttctggggggtaaggaagccctgtagttcccctctaggggtggagtctgtgggaagcatatcagatggctattattgttggctattacttttttcattaccatgttgacattattatcaccactacaacaaatttcctactagaacatagtgccaaaattctcttccaaagcaaacaaccgaatctgcgttacctgagccgacctgcctaaaaatccatgttctgagtgtcttccttccacttgagtaactacagtctagcaaggagtctccacaacctctagcagcccttgatcaaatcagcccagatggggctggggccaaatctcccgggtctcaggctgaccagagctttgtctccactgagcaggttctgagatcaaggccacctttctgtgcaccttagtcctgagtgggatgggactgagagaccttacttctgagacgagagatgccaggctctgcaggtatgggctgggctgggttccctactgtggagggagggaagcctattagcagagctccccagcagggggcaccatctgtccaaggctgagccctttcaccaactgcactgtcaggcttcagcctggcctagccaaggctaagcaagtccagacagccacaggcatgccaggcataccagccataaggcccacatgcatctgtctccagaagctgcccaagtagccatgctggatctggcacacactttctctccaagacttaggaagcacttatgacagtggtcttgtctagagagcatcacggacggggattcagagtagctacaagatgctgccacatggacttgaatcacgcattcgattcctaattgcaagtgaaagaaaccgcctgagggggaagggctgttgctatactgcagtgctcacagcactacagaacccccattgtggggcttacccagagccagcaacaccagagtttgcatgttttgtttttttttaattatttttagagatg

SEQ ID NO: 41050 - DNA, 554 bp, Homo sapiens
tataagctccgtggggcctgcccagcctccttttccagccctatctttttccaaccccttgttccttgattagccacacaagactaccagccctgccctggacacccccaagcttttttatgactcaatgcttttgagtctattccatctgccaggaatgccattctccttcctagaagttcccagtcattaaagttcacgtcaaatgccctctagggcgcatctgaccctaaccggactcaggacttcctccaaatgttcctgtgcctttggggacacatggactataagagtaagtataaagagcaagtataaatataccatgattatattgctgtgcctcctctcactagatttgaccacaggcttgcatcagcctagtccttacttaacttggagctgatcatggctgactccataacaggttcaccactcacctgcatcctcctgcgggctcctaacagtgcagtcagcaagaggaagaggctggtgtttggtcatttattcagcatttagtgatcacctgttggttaccaggccctgagacacagaag

SEQ ID NO: 41051 - DNA, 1735 bp, Homo sapiens
tggataaaccagattgctcttctccataattcccacttctctccctcagttcccggatcctgggaaccaaaatgagcttttaaagtttagtcaattccctactttaaaccgtcccatagcctgccactgcattcacaataaaatccaatttcctgaccgtggccgacaaagccctgcagtaactaaccccaccaagataagataattatttttatttattggtgtacacgtttatcgtctctcactacactaaaatgtaagctcctatcttaattcccgctgtatcccagtgtcgcgaatagagcctggtacgaattaaggggacggggttgtgtgggtttatatcagcacttgtccatgagttggcaaaccgtcaactgcccccagtggatcgtcactaggtatcctggggcggcccctcacccagctccagggcggcgcccctccccgagcccctggcccattttcacttccctgaggaaataatggcgggagacccctggcgcgcgcatcccgccccgagccaccgacttcagcagctctctcgccgcagcagccctgcttgcagcccccaactccctggtccactggccacacctctcgcgcgttctcctggcccacaagccctgaggccgcctgcttggccaagccgctctcgtccagccccagccctttcacgtggctgtgggaggcgatgcgctgcgtcttcgtagtgctcttcacctcctcaatcttcattttgcagacgccgggagctaaaaccagcgtggaaaaccagcagctaggacagtgcgcccggcgcctgagttaccatgcggccgttactagggcaatttgcaaaggcccgcctagaccggctttccattggtggaagcgggaacacctccgctctccataggctcacggctgcgcccatcgcggctgctgctagagctccggtcacccacttccgtctgtgtctccgggttggcttcccccgtagccggcgcttcctgccgaggctggggtcgggagcacagtgggaccacgccccggatttgatctagggctggggcgttgcacgaggcagtggcccccgggtaccactcctaatccttccgtcctatccattagcacatttgaacgtcatactcttacgcaaatctcaagttattatttccgttttggaaacagaagaactgaggttcagagcttaaactgggattggttactaaccaatgttttctgactcccatacctttgcatctccctggaaaggcccagctcaacccaccaccgtttccgtggaattgtcttcccctgcttctatcctccatcctccaccgagagataaggttcctgctgagttcagttgactgtaaataacattttgcagttttcaaaattccacagccctgtaaggtagtgtaattacgcatgcagctacaaacaagcggaaagaggcccatccgcccaagaaagcatcacaaataatcagaactagaaatcttcaggcttcaaaacctatataataatgctcatcacgtcccatgactccagctgagacaatcagccagcaaattgtcccttcaggtttcataatgatattagcacaacctgcaccacaattgtacttgccatccatccatccatccgttcaacaaacacgagccagacaccacaatgcactggggatacagggataaaagtcttgatgcgtttacttcttgcttagaaaacttgcaacgtgagatgt

SEQ ID NO: 41052 - DNA, 1160 bp, Homo sapiens
tgctgggattacaggcatgaaccaccgtgcccagccaaaccttttttcttttcattaccatttcaggattctgtttaaaacagaggtaagaaatgaggtttatttgaagccaggccctgtacaaagtctttgttagttgaaatatttctcagaggtacataaagcctctaaagctcttattacctatttactaaccctcccttttaaatacgtttactgcttttactactagattttttttaatgggaggcgtatttttacagtttcctatttgcaaggtgggaaaacggaaacaaagattctgttctcttcttgtaaggaccctaatcccatcacaagggcccgctctcatgatctcatctaacctcccaaacgtcccatctccaaatactatcacactgggggtcagggtgtccacatatgaatttgagagggacacaattcagtctatgacatggactctgttcctagtggagagtggtggaacgaaggaggcagttactgcaagcatgaatacatccgcacatggtctggctcatcacagagggcaaaggtaagatcctgtgaactttgtgctccaccgccacagtgttacaaaaacactctcttctccagaaaaatggaaggaggaggcaatgttgggctagcattcctgcctggtatcactggctgagactgagcagtggcttccctctttgcacaggaaaagggctctccaggtctcccaggtccccaccactccctgtcatcttagactcttttaacttctcttctttgatttacccaccacctggccagagcagacacttaggtttgttacctctggttggtgactatggctgacaaccttttttgtggttctagacacttcagaatctagtgagagttgtcgaccctctgtctagcaagagcacatcacaacacattgtgcgttcaatttagaggtttgtggcctctcctaagcccaggctacagactctcagggtgagaatttctgagtcagagataatgttgtcctcttccatcttcaaaccatcttttcccatggttggctccttctcaacactggagtttcaactcaaacagcaactcctagatgtcttccctgacccacagttaggtagctgtccatcctccctctcctgctcctttttatctca

SEQ ID NO: 41053 - DNA, 968 bp, Homo sapiens
gcattttacaatcctcttgatagctatagaaaagttctccaagtctccactcacccagaaagtccaaatggcttcacttctcagaaggatccctccatctcgggctcctagaggcttcaggcaggaggagccacgtgagagagaaaccctgcctacggtgacctccagttcctagaccacccactcggagcacggcgctcggctgtgcccgtgagcctcaggagggcggaagcttccgggccggaacgggtgtgcacagcgcgccggttacgggggggcaacttaacgggccggaccgcggcgactaccgagggaggtgaggggcgggccgggcgggtgtccgaggcggcggcggcggcatggcagggcggcgggtgaacgtgaacgtgggcgtgctgggccacatcgacagcggcaagacggcgctggcgcgggcgctaagcaccacagcctccaccgccgcctttgacaagcagccgcagagccgcgagcgcggcatcacgctcgatctgggcttctcgtgcttctcggtgccgctgcccgcgcgcctgcggtcgtctttgcccgagttccaggcagcgcccgaggccgagcccgagcccggcgagccactgcttcaggtcacgctggtcgactgccccgggcacgcctccctcatccggaccatcatcggcggtgagcgcgggccggggcgggagccgggctcagggacgcgggcggagcgaccgggccccgtgtccgaattcgctcgagcctttgccgggacgggaaatcgccccacctcattggtggggctcctgacgccccaagaggcggacgtgacttgcctagggctccgcagcaagtgagcggaggctttgagattcagcttttcccatccagcagaaccgagctgcaaggcgccttccttaaaaaaaaaaaaaaaaaaaaatcaaaaaatccctaccaaatgtgtttataatacatgg

SEQ ID NO: 41054 - DNA, 1104 bp, Homo sapiens
gcaaagtagtttaactcatagcagatttctgccatgctgatggttaatttcgtggcccacagagggtcagcacactaatgccgggaacacggcgacctcagtgcagctcaccgcacacagtgagggcccagcggccctgttgttttagagaagcagttctcaaacatccttctgattttgagttaacaggggtgaccctttcaagaacatttttaaaagctataacatagatccctcccagatcgtatattttcctttctccatgcagttcaaaggggctgagttgtctcataggtttttgccggcaatcttcagcttgaccctggttgtttaaatctgccggaggaaatttgaacaaagttgtactttggtaattcttctgcctctgtgaacctttaaccttggggtttcttttcgagccagggctgcattgtcaccagtcgtccctgctggggctttcaaagagcattgtctagggcgtctgttttcactttgctactggagttcttttgaggaagggtattaattcagacctgactctgagacaggacgagcacttttaaacttgccccagagcttggggatggggaaatgagcgtaatgcaagcctgtggctgatgccagtaattgttctgcaaatagtctgtgagggtgaagggagaagaggccctccagaggcagaggaatgtgccagctgtccagtgggaggccacagctttgcccagggtttgttgactacatgacaaaaagaggtcactgtctctgatcactagttctgggtccagagttcctcctgaatgtaaaattcctggagtgccaggttgctaagaacctgggaggccagaggtgaacctggggctccatataccattaccaagtgcttgcatggtaaaaaaaactttctggggagagagaggaaggctccctgaggcaagagggtagagatttgctctgctgctgtcctggtgctggcctgagcctttctgagtgagtatccctctgtagaccaggtcactcacctccatcagctagccagtttcaccctttagttcttcttgtgtcttttcacaggaagcccaagacacccataaatgtgaaatgtca

SEQ ID NO: 41055 - DNA, 545 bp, Homo sapiens
gcccgcctgtggggcacagttgtaggcctagggctttgcatggtctggctgtaccaggccctcaattctttttggtggagttaattccaggtgatttgtttgagtttaagattgagacactgaatgtttccttaaagttttaaatatgctaatactaaaggctaaacttggaaaatgaaaaagaagaaatagaaaaatagagaggagaaaaacatccttagcacagggtaaccttcctgttgctgttgccagacctcaaactcaaggctgcctctccgtcccagacagactgtaccttgacctctatttcatggttagaaagaagcttcataacaaagagagataacggccagtccgtgcacttgttcttcacacaggcagggcaggcccccaacatccctcgctggcctactctctgcctgaaggtgggatgcatcatcccagagtggacctggagcccagagctgtcactgctccccgtgccatacagtctgtgcagacccagccaggcttttgttcctggggaagggggaagggggaagtga

SEQ ID NO: 41056 - DNA, 706 bp, Homo sapiens
ctcagacccacgataagacccaaccctgtaggtttcagagctggccacaggggccaggcaggcagcgcaggagagtagcccgactgggggactgcagtggggagcggggagtgtggtgtacagggaccatacatcctgtctgaaggggcagcctgtgctcacctcaagccacctgctgccctgggaatgcaggcccacattttaaaatgttgacaactagtccacaatttttaaagcacatgaagaggccaaagcaaacatacctaagggtcaactttgacccacaggcagcagattgtgagtgcggctgtggcttgcagggtgtcctcccacacacagctcagtgagcttgccatgcaccagtcccgatgagaacaacagtggacactaacatttactacatgcccagcacgtgctgactgttttatatgagttacctcattgacttatgagttccattccaccactcactggctaagcttggagagtgcaagggcctcacccggactcacgatctggctcatgaggctggccctctgcccgcagccctcagctccctagcctgaatctgggcagaggaacaagaggcaggaggctgaggcctggggcacgacactgataggcaggtcagcccagaacagtccaaggaggcctggttctaagggagggaacatcccacggtggaacatgagcagcagttccccaa

SEQ ID NO: 41057 - DNA, 468 bp, Homo sapiens
ggtccatcttcctcattaggttgccaaggacatgggacacaggcttaggggccccggggttcggggacaaggagtgaggtgaggctgcacagacctgagtgctcagttgaaccctctgaaccttttcaagagatctggaaaattctactgttcttttttttttttttaagaggcggttttgctctgttgcccaggctagagtgcagtggtacaaacatagctcactgtaacctcgacctcctgggctcaagcaattgcaccttggcctcacaaatagctggaactacaggcatataccgcatgcctggctaattattaaaattttttgtagagatgaggtctccctctgttggccaggctgaactcctgggctcaagcgatcctcccacctcggcctcccaaaggtctgggattataggcatgaacctctgtgccagatgggaaaattatattttttaagtaatatct

SEQ ID NO: 41058 - DNA, 1187 bp, Homo sapiens
gtttgaggccactctgaccaacatagccaaaccacatttctaaataagtaaatggaagcgtggaagttgtgccctactgagagtgtgtatgagaagcacctgagaaccacagctaatgaactgcccacaggctgtgaggagtttgcaccggtcctcattgccttgctcagggtcagcccaggagaggggccgccccacccaacgctgccacacaggctgggaaaagccatggctctccaacgggcatccacactcccggctaagcaaaggctctgcaaagctggggccagacagccactcagtgtctgctgtttcctctggccctgaatcgcaggccgcgctggatggctctggtgccaaagggtggcctctgaacaggaacctcggcctgggaatgtccctgggaccccacaggacctgacccggagccaccactagaagccggagctcccaggccagggctgcgggaatggccccgggtcctctgcccagggcctgcaggtgctccaggtcagcgggcgactttggccgctgcagagaccgagatacgcggggtaacagcccgttccggagccggtcatcaggcgccaagccccgctgggctcctcgcagccgcgggacctttctccgcccttcccgaggctgagtttcctgaacgggaagctgccggcccgcggggcagccgggagcagccagggcgtgaggacgtgggttcccgtcacccccggcttggaacagcagcgccgcaacaaccgctggcgttcatcgagcctctcagcagccctgcgaggcgatcccggggagaatcccacgccacagccgaggaaactgaggcaggcagggtgacacacagcccagtagtggcgggcgggcgcccaggctgccaccgcgctgaggaccggcccctctgccagccgggaggtgcgcgtggcctaggcgggggcgccctctggcggccgcgggttccaatccctgccggcctcgcaggcgtggggcaggacagccgcgctctcgccagggcccagagccccactttgccaaggagctgtcgctggagcggtgactttgttcagggccgagaaccggaggaggaggccagacttgctgctgggcagctggcacatgggacatggggtgttatgactccagcatttatggagcgcctgctgtgtgctctgcaggtatag

SEQ ID NO: 41059 - DNA, 1688 bp, Homo sapiens
ggccttggccagcccagctagccctgtggctttccagggcagctgagagcccaggtccccatggctaagcccctcagcagcccagtggtcctgagcccgccgaccccagacccagtcctagtccggccagaggaggccgtttacgagcccacacccgtaggtggcgccacagccggagaattggctttggttctgttggagccgcgccgcctttaaattagccccacgcatgcgcgacttttctagcccgagcccgccgtctgcgcctgcgatttcgcccatactccccggtgcccgcctcgtgacgtgccgcagtgttacgaagggacaccagggcgcaggcgcagctcgctcctcaggcctgcgagaggcccgccggcccagcagagggcgcccaccaatctgcacgcgggcccagcgagttatcttgatttcggccaagctttctgactgctccaaaaaacgaagaaaaagattcagggagagtaagaggatgaagagagctggtgaagcagctgaccaaatggcccgaggtggtatgcagccgcggtaaagcagggcccctccgtgaggcacagccgcccgggggttccctaggggaagcaggggctgcggcagacgcctctcgggcaggtcagggtatgcaccctcccgcaggggctcccaaggccgggcgtgcgtgaggccaggtccacgggcacaccactgtgaacactgattaaacgtggcctccacggcttccaacccccaggacaggaccaaccctctgcccccggctcaggccagagctcggcgagaccgtcgctgtttaacaagcatttgctatacgccaccttgcattatgacagcatgtgacccacacagccatcctaggaagcaggtaacagccctactccattttgcacggaaagacttgcctgaggtcacagagagcggcaggcctgggatttccatccagggatccgactgcagagcacgactctggagggtcttccttcttgctcctcccatccttccactgtccttggatcccccattttccccctgcacaatctcctaatccctatgttcaacttctcattttcaactggatctttcccaatggcattcaacacacttggtgtccccaaccttagagtagaacattcaagcagcacagcctcctgaaggccctcactcatccctttcccagcctgtttgcgaaatgctttgtcaggactcaaagttaagtctcacttccgtccaattcccatccccacaccaacacagttctcaagtcaccaatgggtaaaaggcttcagtgatccactcctacagccaaaaggcactgctcggtctcttcagcctcagatggttcactcctggaaacatttttccacttggcttcatgacaccacagtcctggtctttctcgtcccaggtaaggagagtcctggtctttgtcaacccaggtggccactattactttgtcgtcttaatattcagttctggatctcttcttattctatacccttcctaggcactgtcccctcccacagcctccttctcaccttttccataaccatgtctaggcccggcagccccacatttaccacttgcacaccagaccttataattccaggcctgaatatccacctgcccagggacactcccacttggatgtcccgagcacctccattttgccatgt

SEQ ID NO: 41060 - DNA, 2661 bp, Homo sapiens
agtgtgagaacacacaacttacggaataagctggagccctgacttactctgcactgtaagaccgcatgtaaggggctaaataacttaacctgacagactacagcctccttgcctgctatatgaggatttataccttaaatggttgctatgagggctaaatgagaatatatttaaaatacccaccataatatctgacacacagtagagtcccagtaagaaagtatcttaccacagaaacaaacaaactaaaggacaaaaggaaacttctggaggtgacagatatgtttattacccggattgtggtaatggttacaccagtgtatacgtattttgaatatactaataataggcagttttttgtataccaattatacctcaataaagttgggagaaaaaataaaaacaagataaaataagtacattaacctagctcgcaggcatgatggcaggatagccgagctcctgctgtggtccacttatactgtaacaagctcattaaatcacaactggcttctataaagaacgggatttaacattcaagacattcaaagatggcaaggcaaatttacatgaagttttgatctatctttccacaagcctttgagtaaaactttatttcatcatggacaacgcatgaaagaaaataggagtcatttcagaaacgtaatctctataaacccatctttatagctccatattcagtcagagaacgaagtgtgcttagaagaaatgtgacactataatgactattctctcaacaaataattaggtaatcatttaatgaaattgtttaacaacaatagtaataaaaaccaaacctctgtgtatgtacattccctttactcccaaacccaacattttctttggtgatcactgaaatacctggaaacatttaagccaaacacagccatttattgccgaggtgtaagaatgagaagcagcagggggaagggagaaaattggactttccttttctgtacagcataagagaacttatattacgtgcaggagttttaaaactaactttaaaaagagttttaacatttagaaagcgttcactaggaaccttaaaatgcatcacattcatagggatttcaagtgattaccaacttaaaaatgcgaaacctgttacatttctgatggttctctatgtctagaaagaagcacctacaacggaccagatactgaattaagagaatgaaattcactttaattcatttatttgtcctctacttgagccacctcgtcgggccgtgagaaatgaagtctggcgcccgctggcaccgggccgaggggctgccgcgctcgccttacggaagggaggtgcgttctaccggcccgaggtctcccgagcggtgccgagaacggcccaaacaggggcaagctccgaggctggtcggccgcggatcccagcagctgcccacgtgagcagcgacccgcgcgggggcaggccggtgctgacgtggcccaggcaggagggcgggcgcgcaccgggggcagcggaggcgccggggcccctggccacccaggactcctcgcgggccccgaggcaatcccacggaccccctgtgccccgcccgccgcccgggtctccgcatttcctgaggcctagaggggcgcgggcggagtcgggggaccgccaggaagggaggcgggaagggtcccgggagcggcggcgaggggtcgcccacactcacctgcacgcccaggtgcgccagccgggcctcgagctcaggctccaaagccagcaggaaagaggtagctcgggacgtggagccgccgcccaggtgcgccaggaccacctcggccgtcaccttagccaggtggctgcttaggtccactgtgcgcttcacgtcctcattgatcagcggcggtgcctcggaggaggcgctgcccggcgccggggcccaagtcccaagcaacaggagcagaaacaagccggcggctggcgcctccatgaccgggaagagcagtgcgccagggcgggtagggcccgggcgcggtagcccgccctcccgccactgagcagccgttcattgggcaagggctggtgacacaagatggcggcgccgaacaaggaaggaccctgtctccggggcaaccgggaagccgacccggcgcctgattgctaaagccctctcagagctgctcgggatatccttctgttcgtagtgcgagtgtacttacttttttttttttttttttttttttttttttttttttttgagacggagtctcgctctgtcgcccaggctggagtgcagtggcacgatctcagctcactgcaagctccgcctcccgggttcacaccattctcctgcctcagcctcccgggtggctgggactacaggcgcccgccaccacgcccggctaatttttttttatatttttagtagagatggggtttcactgtggcctccatctcctgacctcgtgatccgcccacctcggcctcccgaagtgctggattacaagcgtgagccactgcgcccagccgcgagtgtacttattattactagttttcacttacctaatttttacaggagcggcccttgcctaggtctctactctctcctaccattcttcctgtccaataattctgctcgttttgctccttaaaacagtgaaattttgctcagattgagaaagtaaaagttggcc

SEQ ID NO: 41061 - DNA, 2026 bp, Homo sapiens
ggtttggcaaagtgggcaagtgagaggctcaaccatgagcttcagttcctcctctgtaaatggtaacaatggcactgtcacaaagaggaccaagtgagaccacaggaggcccgtgtgtgtgcgtgtgtgtgtgtatgtgccagagacagaaagagagagagagacaaagtttcactcttgctgcccaggctggagtgcaatggtgcaatctcagctcaccgcaacctccacctcctgggttcaagcaattctcctgcctcagcctcctgagtagctgggattacaggcatgcgccatcatgcccagctaattttgtatttttagtagagatgggtgagttctccatgttgatgaagctggtctcgaactcccgacctcagatgatccgcctgcctcggcctcccaaagtactgggattacaggtgtaagccacccagcccgggcttttttttggggggggacgagtgtccctctgttgcacaggctggagtgaagtggcacgatctcggctcactgcaacctctgcctcctgggttcaagcaattctcctgcctcaggcttccaagtagctgggactacagacgccaccacgctggctaatttttgtatttttagtagagacggggtttcgccatgttggccaggctggtctcgaacccctgacctcgtggtccgcccgcctcggcctcccaaagtgctgggattacatgcttgagccaccccgccggccggccgttcttaaacgcacgactacttccctagctttccagcaccaaatccagcggccccacccggccacgcccccacgccaggccatgacccccatatggctcactgcgcaagctcacacccagtcccaggaagcgagccccacgtcgccccagctctgcattcacagccgccaagcggtcccggaagccgaatgccggataggtcaaagacagcgccgctgctccggcactgccgccagagggcgcggagtcgccgtgttggcctgcacctcccttgtcacgtcagccgaacggctacggcaatggaggattttgccgtatgcgacgacaggatgactgcttcccctgaagcttcaccaaacacggagaggctttcctgtccctgggagacgcggtgatgtgacgcagcggttgcagcgaaggtttcttgtaaaagatggccgctgcggagttgctaggtgtctcctggcaggcggcggccgcaccacaagatggcggcccgccccagggtcccacacgcggggctgcggaggcggcggccccgagggtccccgccccttgctggccctgtccccgcgtgcggggctgcgacctgcctttgtgtgcgggtggaagtgcgggccgccttggggccgagttgcaacttcgcgacactccactggagtgcgatgagacgatgagatgttacctcctaacacttcgggaggtgggcagcatggcaattcctagtaacctcaacgcgattcactcagacttcctttttcccatcctgagccgcaaaaccaggaactggtgaaataaatcaggccatctttcagaggaatggcctgccaccgttaaaaagagcaaagctgcagtttatgtactaatgtggaaccagctctgagataaattaagtgaaagaaagcaaagcacaggaaaatgtgtatagatatgcctttgtgtttttaaacaagaagacccacataaatgaagatatgaatgtgtaagcatagtatagcggtaatggtaatagcgatcgcccagcctaaggaagggaatggagagatacggaacaaggatgggaggagacagttttcatctaagaccgttgggttttctgagctttgtaccatggacaggtgttaattttaaattttttgtaaatatttaaattatggcttaaagacaagttcttttgtaagggtataagggcagactagcacatagaaaaaaaaagacttttttaacctggaaccaagacatttgataaacattcatgaaactcaattttcaaggataaaaatttcaaggtc

SEQ ID NO: 41062 - DNA, 681 bp, Homo sapiens
aaacagaatacagcagaaatgatagaatgttacttccgatattaagctgtgacacgatggctcccatgatggagactctgggtccctccttctctctgttactcgcatcctccccccagggaagctggttgccgtgtcatgtgcatgagcagccctgtggagaggtccatgtggcaaggaactgatgtctccagacaccaaccagcaggcaggggatgaactgctgagcttcaaagtggatccctccccagtcagggctggagatgacctcagattgccaaggcaatctgtcagaggaagaaaaagttggagggcttacaccaccagatattaggacccgttatgtaaatataatacacatattatgtaaatatagtacagtgtggtattggcataaggacaggcaaacagatcaataggacaggacagagtctagaaatagacacattaacatactgtcatctgatttatgacaaaggtgacagtagttgggaaaggagtgtttttgtttgtttttttttttttagacaaggtctcactcttgcccagactgaagtgcagtggtgcaatcatagctcactgtagcctcaaactcctgggctcaagcaatcctctcaccatagcctcctgagtagctgggatcacaggcacgtggcagcatggtcagctaattttttattt

SEQ ID NO: 41063 - DNA, 2453 bp, Homo sapiens
cttgcatgaaccaaaataagaaaagactatgagagggcattgttgaagatggaggcaaaaattctgagtggatcctgatgtgttcggatggggctggtgcttgggaggctgctctgtgcttacaagaagagttctacccggtccatctttatcacatcttctctaatactaagttcagagaggctttagctcattttccattttcttgggctgtctcctctgccagacaaagtgcctatttctcctgtctctatcaccgagccacacaattgctgtagtcatttgcagtctactagaacgataacacatattggcatcagacagatcttggttcaaaacctcgctccaccagtttctgtgttgagctagaccaagtgacatgatatactgagtctcagttccttatttgtaaaatggtgataataatttttggttaagtaattaaagtaaggataaatgatgcctttcgaagaaggacacaactggaatggccagtttaccccttgtcccctcttcggtggcattatttattctggagtaaggagggatggctgagggaatctgtctgtgggtccaacatggcgccgtcctgctccttgtatgagcctcaaagatggggacaaccatttgggggcagacatgtttgtagcacgagatccaggctcagtcccgaggcagccggaacgtgacgcaaggttgaggcggggctcctcccccgcaccctggcgtcgagcgtctcgtgacaggtacttccgctcggggcggcggcggtggcggaagtgggagcgggcctggagtcttggccataaagcctgaggcggcggcagcggcggagttggcggcttggagagctcgggagagttccctggaaccagaacttggaccttctcgcttctgtcctccgtttagtctcctcctcggcgggagccctcgcgacgcgcccggcccggagcccccagcgcagcggccgcggtaagcagcgggcccagcccggccggcggcctggccccatcccccccctcagcccctcggtcgccagggcctcgcgtcctccctgtcctcctgggcaggctccagtcccagccctggccacgcgggcacacccggcatcgctcaggcccccggagcaggccaagaccccacccggcttggagaggtcggaggtcgtcgggcgtgacctctggccgggttgcccgccccggccacccgtctcggacgctctgtttactgttggcctggatctcagagacccgagagggttccttgacttgggcggccctgcgccgcggcaggacgcgctggccagtggagttccttagcgcggcgagcaggagggtgtcagagcccacgccgcccgccgccgtgcccacccggcgggcatgggtcacaggcgctgggggccgagccgcgttcccatccggttcttcagttgaacagcctgaccctgttagtgggagttccctgacggcaactgagtcaaggcagtgagtcaggtcacgtgcgctgggctcgcctcgacacttgtgtacattgaggcgcctctggcgctgggagacagggagctttttgtcctaggcatgttacggtaaatcctgagagaagtttttcaacttaatcgaggaaagatggtagttggatgtagagttgtgtttccattccgaccgtgtttggggcctctttctgcattcattttaggcttgatacctaatggggtcataaggggaatattgagaatattgacagcaaatatttgagcgtttattgtatgctaggcagcgtggcaagaccttttaacagatcattatgtttagttctttgaacaaccctctgaagtaccactgttgtgcccacttaacacagtgggaagttgaacagagaggctaagccatttggccaaggtcacacagctaataagttacgaagcagagatgcaagcccaggcagtcagactccagagcactgtattaaatttctaggttgtactgctttcacgtacccctgaagcttgctggtttatcttttgctacctggtatctgtacctcagtgcctcccaccacctcctttctttctattgatgtcatttgaaagtctttctggtagcatcagttctcccttaaagccataagaaatgccgtttgcgacttatcacacatattgtggtgtagtgtcaccgaattaggagctcttgaataccggcagggtacttaactgaggtttgaaaaattttgcaggtaggcctggcaaacctgcctagtgaacctttcttacaaccttagttgatggctgtccagccggctggttcttccctattcaaaatactgcatctttggtttcctaaagaacggactcttgtctctttcttgtgacttaagcagctgatgaagcacatgatttctcatccatggatgaataaagtctcctcttagtgtgtttctctcttcaaacttgggaa

SEQ ID NO: 41064 - DNA, 2529 bp, Homo sapiens
gggcccatgtgccacgttcagagcactgttgggctgtgaggtgccaggcatgccctgcctcctacgtgggcccctatggcctggccttgaaaccgccactgcaaaattataaccgagacaatgaaagagatctgacctaaccaactccatcttgcttctaacctccaagctgtccttgttcattcctgagcgtaggctgaactaaccttgggaaggaatgagtttatagtttaacttcaaaacaaaaatagccctttcccgggaaaacaacaacaacaacaacaaaaaacaacctcttcttgcctgggaccagttggcctttggaggactaacaaattagctataagattagaaattacagtttagaggccatacagcctttggttgcaagagtctgaacgtcccccaaattgttcctgggaataacatcactgttgtaaaacctaccaacacccagactggtaatctggctcaactagttctgcaatcccattcaggaacagaagacagcaagaaaaactcacttcggccccctatcagtccatctccaacccgaccaatcatgcacctcccacttcccgagcttctactcgccaaattatccttaaaaattccgatccgtttttggggagaccgatttggctaataaaactccctttccaacacacccggctctgcgtgaattactctctctctattgcaatttccgtcttgataaatcagctgtctagtcagcgggctgtaaccttgggcggttacagcctggcctgtcccatcccatccaatagttcccatctcttctcagctctctctgtagtttctcttcctccgcctgccttttaagttagtgtttcccaggacagaggtgactcagttgtatccagaccgctctgtgactgaacacccactttcttttccttttccaaaaaatatatgtaacatacatgtcaactaggaacaaaacagtatctcaggaatccaccatccagttaaaaatggacccttacccttaccgtgcccctgcagagaccccaatacagcgcatttccctcattcttttgcttttctcaagttttaccacggcctcgtggccacaagtgacaaaagagacaagtggaggcagctgagccggcctttaggtttctgtacacagggagatttcccatggctggcatttatggaaacaaccgctggtatgtgaaaaacaggtccgtcaccgccgtcacgacggccagagattatacccgccgagatgcccgcggcccagggcctacaatttcctccggccagctcctttggccgcgcaagcgcagtggggccggcgggaagcgtaggcgtgtgacgtcatcaggcggcgcgggccagccaggtgcacgtgactaaggccttgggcgcggcaggtggtagccttcccgcccttctggcctctccatcccctgctgcgggggaccgcgcaagcgcagtgagtactgcacgttgtcgcgggccagtaacgtcatcagacgtgtgtgtgtccctgcggcgctaagaaggggagactgaggctgaggctggggaacatcgggcagcatgagcggctgcgggctcttcctgcgcaccacggctgcggctcgtgcctgccggggtctggtggtctctaccgcgaaccggcggctactgcgcaccagcccgcctgtacgagctttcgccaaagagcttttcctaggcaaaatcaagaaggtaacgcgagccctgggcgaacccttgctgtctggctcccgcttttcaccctcagctgcaagactggtgttgaactttgtgagattccccaaacctgccagagagatacaccctgcggccgaggcgtgttaacactccggattcctgagttccaggaaaaccttcccagagaaagggtgagacatttccaagacgggggacccttggaaatgtggtggtgacgtgttccagctaaattttgtcaggggaattcggaaaactctaggctaggtaattaacaaagcagccttcatctcagctggtctggtctggaaatgtgcggggcttcctctctgattcctaaacagcttacaccatgtccctcctcagtcaccttccagcgccctggggcttccttccccaggtgagcccagcgcctctccctgccattgaggttcctcagaaatctggctccaagatgcttcccaagggtggcacaacccagccaatagtaacagtttggttataaaacactcattgtcttcttagagttggaagacttgggtttggtcttggctcgttgactttgaaactcagttgttttttttgagacagagtcgcgctcttgtcgcccaggctggagtgctcactgcaacctccctcctgggttcaagcgattctcctgcctcagcctccggagtagctgggattacaggcgcctgcccggctttttttttttttgtatttttagcagagacggggtttcaccatgttggccaagctggtctagaactgacctcgggtgatccgcccacctcggcctcccacagt

SEQ ID NO: 41065 - DNA, 929 bp, Homo sapiens
atcatagaattgaagaaatcatcattaaagttacaatccagtggatgggtttaattgcagcttggacacagtgttggggaaaagctgagtgttgggaaaaaggctgaggcagggcttgcatgtctgacgtaacgtaaaagagtcttggaacatgtccggcgtccagggtctaaaaccccttgtggcctttggaacaccaagctctgttccaaagggtggaaggctgccctgccgcactacaatctaagcccagggcacaagccacaagggcgtggcttggacggaatccagggaacagcgcataaaacccctcgtggcctctggaatgtgtctcgacttgttggctccttgcttctagcactccaaggctcatagatcgattgtgtcttaaactagaagaatacgtttcccattatctcaagtagcagaacatgttccatatgcttcaaagaaaattctaaaccatcacagctgtagatcatgcacttgatacactgctttctttcaacccccacatcctcaccacctgcttctttgatcaccaataaatagtgtgggcttccagagctcggggccttcacagcctccatactagtgttggccccctggtcccactttatgcactcttgtctcatctgtttgactctgccggacttcatagtccccacagcctggagttgggtctgatcaccccaacattcctggcgcccaatatgaggcaacgaacaccccagtgaaggaacactagagtgtgtgaaagaggatgcatcatcagaggacacccgaggacgactgaaagaagctcagcaggaaagctgagcactcggaaggaccagggtaacaatggcacaaagtgaaagcaaacattctgctcaggatgttttaatacagcttcttacatacaataatgctaatgcagtgtcaaactg

SEQ ID NO: 41066 - DNA, 780 bp, Homo sapiens
agccaggcctagatgcatagagaggcggagaggggcagtcatcctacaaggtttcaaaaaataggagaatcgaacatttatgcatagacttcacatcttccactctcctttagccttttttctataagagcttctttgggattgttcagatggcctgcaacacattaaaaatgttttctgggaaattctaactaatgtcctctctctcaacttctggcaaaaaaaagaaaatcattccattgaccttaatttgctctccccacggcaaaaaatgtcctgtaatttcacactgtttccactgggtggcaaatgctgtccctgagaggaaaaatgaatggtaaacggttccaaagcgcctccaagcatgagctccgggagtccaagtttaacttctccgaatgaacccctgccccctcacggcccctgccgtgggtatttgccacatcttcccatcatctgtgctattacctgtgttaaaacacacacacacacacacacacacacacacacacacacacacacacacacgtatacatttagaagaagagaagcctttatttcctgtaaaaggtgccagcctacaaggtggccatctgcaggctgggaagtgtgccaatggccgagcactttgaaagaggaggggttggggcaggagctttatgctgacctgtctggctaaacatacatattcaactggctacaggaggagctatgaatattcataaaggcactgtgcctcctatctgtaatcctagcattttgggaggctgaggcaggagg

SEQ ID NO: 41067 - DNA, 637 bp, Homo sapiens
ccacctcacctggcccccagatgcattttcaatagcaagaattttccctcttccttctcattcctctccccaccccacttaaaataaagttggccctaaagtgctggatgaagaaaggaaaaaagtcagcagggcagaaatcatcattacaaatactctggagtgcaaagaattgaccctgtgtctgaatgtcccctggaaaataaacattggcatccgtgtattagtcagcgttctccagagaaatgaccaataggaagcgtgtacagagagagttgaaggaattcgttcacatgatgatgaaggttggcaagtcgaaaacctgcgtgctggaccagcagtctggagagccagggacacagaatcacaggtcaagtccaaaggctgttgctgcagatcccctcttgctcaggggaggtcagtctttttgttcttttcaggccttcaactgactggatgaggcccacccgattacagagggcaatctgcttttctcaaagtccactgttgaaatgctaatctcatccaaaacaccctcacagaaacacccagaataatatttgaccacatatctcaatactagggcccagcaaagttggcacacaaaataaccatcacagtctgtaatgtttgtttg

SEQ ID NO: 41068 - DNA, 983 bp, Homo sapiens
atagtctatatagcgttcagtaccatctgaagtttcaggcatccactgggggtcttagaacatatccattgaggataagatttaacctggtgctgtgcagttctaaagctggccctctttccactatctctccaccagacatgctgtctcaggattctaagaaacctcgagaggcaaggtttattttgcaattaggatggctgtccctggtatcaagaacagatttcttcagaaaatcagcacgacctagaacttctttcttatctaacagtccttttgctatttctaatgaaaactgaaaaagtcaaacaaactttatccaaataggaaaagaacagatgagcagaactagactcttgattggaaggactgtgaatgcaaactttaaccagaaaccatttcctcttatcccgccctgccccctctttttgaagtgccaggagcagctacaaaaacaaatttgactcctagggcaaggggaagcttgagagtcaaggccaaaggtcctgaaatctggaggtccaggcccaagggcacagactttacctctatgaaggagagatctggcagcatccctagcgagcagacagtgagcctgagagagagctgaatagaggggtacagttccataaggctgacctctgcgctggacttgaggccggtgtgcctagtgatctgcaaaaacgagtttacataacaggcctttgtgttgtcccagataagagtgagtagaggagcttcagaatgttttaaggatttagagccagctgagatttcctgaggacactgaggtggggaggagggaggggtgggggaggggcaaattcagacctaatctgtctcatctagggaggaaaacagtaactgcagcaataaaaaaatatatatttataaatccttgtttttaaataagaaatgagtaacactgatggcttcttcttagaggacactgggtggcttacgggacaaacacggaagggaga

SEQ ID NO: 41069 - DNA, 3341 bp, Homo sapiens
tacactgaatccctgatgtgcacttgctttccacagaaaaaacaacaataagctctggttcatcaaggctttcagttaaaatcacactgctgaaactacagagacaaaaaacagatcgggggttgccacaggatgaggtgaaaggaactgactacagaagaacaaaagaactttctgggttggtggaaaaattctccatcttgatagtgatgtggctgcttgtctgtgtaagtttgagaagttcatagacctgtaacacctcaagtggtgaaggtttaccgtgtgtaaattagacctcaaaaaacttgacttaaaatcacattgccaaaagactactcagaggcactttacagatggaggagggaaaatggcttgctcctgctgcggcagcggaccccaggaagcctgactcgaaggacagtgttccctcaagttcacggctgcccagctttaatttggagcctctgcagtgagttagacttcaggttttcctgccggcaaaatgaggtggtaaacaattgccagaggcttccccaccacagacaacgggattctgaaaagctgtccactatgggggagaaatctgctttggagtcagaaaaactgggaaaaatattcccacctctatcacttcttagctgtgtgcccaggctccatcctgtgtgagcgggggtaagaattccctccagtcagcagagaatgcacctgtaacccagctgattcccaacagcctctcaagaaggtcagcggctataacttggagaggtgtttaccacagctacacagctcttctgctccctgggccccgggctgcttcctaggaaggacaatctggaggcaaccataaggaaagaaaataacgaactgcctggccctgcattgcataacccgtgcgcagtaaaccaggagctctgctgggacacagtctgttatctcaacaggtaaacaggaaccctgccccctccctgaccaccgtcagcactgggccaccacagacactccagacacagaccgatagcacatgaggaggacaccactgctctttagcctgtattttcacactcccatttccctgcagctgctggcatcatcactgggcacactcaataacggacactccacccactccagcccttccctggctacctgctccaaaagggtggtcccgagtgactcaaagctgccttctgcaccttgctcttttccatccacggagaccaaaacacagaccccagaagacgattaaaatataataataataaaacccctcaggcaggagtttctgcttccccgtcacatctactgagaggcactgtggacacataaagactgttgacttacttttttctccaccttggggcaggagggaggcaacacccagaaattatcccaattttatagaaacaaagacaaagagctacatatcctagccaaaggcaacaaggagcaggcctagagccacccggagaggcagagcccagcagcagcaaggctccagtgactcccatctccctggcagagatcgtcccagccctgtgccctgagggtgtcctgaagatcatgggggctcgaaaccatgaaagcaagcaaagatttctgtacagtgcggttcagaaaagttactgagtgccttcagcccaggatctcctggttgattagggagtactaacacctaggttaagaaactctgatttcattcatcacaaatatttatcaaaccactgccaggacattgtggcaaccacatcctgctgtttttattcggagccattgccaaagcttggttctctcccccaccttccggtatctgtgaagttttcagtttctatcaaactccagctgggggagggaaccggggctggccctagtcgagtaaagttccaccaccaggtccacaaagagactgcagggaggcgtggccaggccggaaattctgacaaaaagttttggccctctggtcctaaaagcaactacttcctgatcgctcctagtcctggggtggggatgcagttctctggctgagtgccccgccggtgggctgagctgggggctgccatcgcggtggatggaggtggggggtctgatctccgcactccaaggcgctccgctagtacctggaacaggggagtctaaccccctgccttccaatggctaaagttattttggagcacagtcccctcctagggtgtgagctccggagggcagggccgcctcctccacactccctcgccccccccccccccagcaacccacggccggcgctttgaggacttgaacccggcccagaccccggggcccaggcctgctccgacccgaggaaggaaaaaggggaagccaaaggaaacttcagatggacgcggggtgcgctcgccgcggccaggggctccgctgcccccgccccaccctccgagggagcgccttccaggggccctggccggcctcccaccttgacccgcttgccctggatctccagcgtcttcatggtgaagtcgacgccgatggtgcttccctggcgctccgagaaggcgccggtcttgaagcgctgcaccacgcacgtcttgcccacgcttgcgtcgcccaccagcaccagcttgaacaggaaatcgtactgctcgtccgggtcccccgggcctgggcccggccctgccatggcctagaagaagccgaagggccggcgctctggacgctgggaccggcctgagctcacgcaagccgcgggccgagctccgcccgctccagcccacgggccgcctggctacgtggagccgccgcaacacctgaacccccagcactgccgaccgcctgcctcggcctcggccccgccccaccccggctggctcccgccccggcccggctcggccccgcccggacccggtgccccgcgggttcggctcccccccggacccgccaagccgggccctccgcaaagctccggccggtcctcagctccgtgccacaccagtctggcctgtaggcccgccccagcccgcccccgcccgcccccggctccgccctcaggctggcacccactccgcccccagcccaaccctcgggcccacctcagcccgacccgggttccgcctacgtccccgcccccgactccgccctcagctccgacctcgactccgcccccaggcccacctcagcgcgccccgactccgacccgactctgccctcagcccgacctcgactccgcccacaggaccacctcagcccgccccgactccgccctcagcccgaactcgactccgtccccagctccgacctcgactctgccttcaggcccacctcagccctccccgactccgccttcagcccgacctcgactccgccctcaggcc

SEQ ID NO: 41070 - DNA, 1107 bp, Homo sapiens
gtaagaagcttatactagatccaacaggactgggcttcccagctccgaagatgggaaggaattgacagcaccccttacccctctagacagcttccttgtggcactccaattccaggtattcaacatatttaatgaatggctactacaggcgggcattgtcctggggccttgtaatgcacctgtggacaaagcagacaaaaatccaggagaaaaggggaaagtcttcaagctgaaggagacttcgcagagagcaagtcccccagtgccactgtgaggaccccagccaacctttcaggtcaagatagaaagggactgaatgagcagtctgcaaaggcagaccccgtggagaaggcagaagagttgtttcttctgaaagtttgaactccactcccatgggaaatacccaacagaatcagacaggaaaccccaaagtgccactgaaaagcaattgagagccccactttggtacacctgatgggagcggagagttagagaggcaggaaataacctccactccagggtagaagtagacaggagatgggatggaaggtttctgcatgctgggactagctcaggtcaaagtccagaactccagaaaacaaggcctgcccccagctcagagcagctaccacagcacaaaatggtgtggaatccaggagccaggatgaagcgtaggggtagacggtggttggatagctaactggcctttccactgctctagcctggaactggttgggctggggcaggggacatgttggtctgagtatagattttgtcagaaaacccaggcaccactcccttgcctttgcggggtgattctaaaattggactgtggtaagggttgcacaactcctcaagtttattaaaatcattaaaatgtaaacttacaacctgtgggttttatggtatgtaaattatacctcaataaagctgtctaatatctgcatttcctcttttggtggtaaattcctgagtagcacagtggcattttatttgaaatggaatcatgctaatttgaaatgcagcaattaaaaaatatttatgtttcatttaatacaccaaatttgaaaaaatgtatattgcactttttttttttttgagacggag

SEQ ID NO: 41071 - DNA, 990 bp, Homo sapiens
ttgcctatgagtcaatacaaatttctaataacaaagaaaacaccacggacttggaaagagagaaggggtcttgtggcgagtcaggagtccactgtttgctgggctctgccagacaccgtgcacgacccattccctgactggctcccagtggggatggcttcaaaagcctcttgaggaacctctcatccactgctggcacttggagaaactggttgtatctaacactaaacacatacctaccctgatctggtggttccactcctcagcatgtactcaagagaaacactgcacgggaacaagaaaattcccagcaaccctatctgccaaaaccccaatctggacacaacacaaatacccacaaacattagacacaaaagagtacacacgactcacatatgtaaagttcagacacaagtgaaatatatgggtcacaagaggtcaggagggtgacccctgaggcagtagtgagcttctggcgctgtggtcctgttctgtttcttcactggtatttgctatgtgtgtgtgtgttcaccctgtgaaaatccagtgacctacacatttagcaggtgtgtacttttctgtatatggaacaacactcagcagtgaaaaggaatgaactattgaactcaacaaccagagggatggcaagggcatcatgttaagtgtcaaggccatcgtgaaaggtgactcacagcatgatcccatttataaaacattctgaaatgacaaaatcagagatggagaacaggttagggttcagctaggagaagagatggtgaggacagggaggtgtgaactgtgaaggggtggcaccagggatctttgtagtaaggggacagttcccaggctggagtgcagtggtgcaatcacagctcactgtaatctgaaccccctgagctcaagcaattctcacacctcagcctcctgagtagctgggactataggcatgtccaaccacacctagctaattgtttttatttttggtagaaa

SEQ ID NO: 41072 - DNA, 3062 bp, Homo sapiens
ggggcttcacttaatgaaaataatacagtagccaatattacgtagtgccggtaccaatcatctttgtaccggcactacgtgtattcttaaatttacacgtcgtaaatgcttcttgaagaaatgaagaaaccaacaaatgacgccagaccacagagagcacaccctcatagaacactttctgtctatgccattcatttattcaatagttattgaacatctgcaacgactctgtgtcagacattaaggaagcaataaggaaaagaccctaccctcgtgatgtctgtatattatggagcagactgagaacggacataaatgaaataatcccagaaacatatagtcacaactgctcttaatcttctctgtggtatttagggacaaacagccggcccacactatgcaccgtaactcggagcgggacctagtgcttctctgtgtcttaatttccctcaggttaacctaaagagcttcatcgggattaagacactgtccaggacagtaacgcggctcccgagtttccagttttccaatttgtgacagctaatggaggcaggaagagaatcccctcgttacaccaaggaacttgaagccctcagcactgcacgtctgagcctctaccgaatgagcgccccaggtggactgggcgcccccccgcccgcccgcccatccactcgctccctcacccgcccaccctactcaccatggtgtcgctaagggcgccgtcctggagccccgcggcccctgtccaagaaactccacaggcccagaagacgccgacgctcacaggaactgaagattccaactacccacagacactgatgttttgccggaaacgtaaaagacagggaccggaactgaatgggagtaccggaagtgcccagacgaagcggacgctcacagaaactgaagattctaactgcccacagacactgttttgtcggaaacgtaaaagaaagggacaggaagtgaatgagagtactggaagtgcccggacgaagccgacgctcgcaggaactgaggattctaactgcccacagagcctgatgttttgtcggaaacgtaaaagaaagggaccggaagtgaaagggaggaccggaagtgaaagggagatccggccggggattgggagagaaaattctggcgctccgtcaggcggtcttccggtagcgccggcacgcggcgtcatcacacgcagacgtgtgatggggctttcgcagagggactggcggttttcggactcagcccaggcggcgggtcttagttctggaaacaggagtactaaatgtcttgtgttcactattggtactgcgggagcaggcggcgctgggcgcggttatgtggaaggctgagtgattgccgctactctaatcccaccggcttccttggttcctctgtgagagcaaatatccccttttggaaattactcgacctcatctctgcgacgagggatctacggccccgacagctcccctagtgggagctggagtgtgcgtcctgcaggagttggagctggccgggcttcgtaaactccttcacttttccttgtcacctcttagggccatttctagtttttctgagctggtctgttggaatcgcggggcctttcagagctggacgatgcttgaggtcatcctcttttaaaataaaaatttaagttccaggcaaaaagtgccacttaggggaggagggtggttggagaagtgcggtcactgtcctgagcacatcgctgggaccagaagatcgttagacaaagaccaggaagacaggagaggtccctggtaggagacgttctgatggttactcccgcatggtgtcagcaatgaggggaactgtggtggggaattcaggtgagggcccgcagcaaattcggttacagccgctttcccctttcaagcatggtgcctcagctgcagggactccctccaccacgggacctaactagtgatgggcaccctagcagcagccaggaggcacaagccaaagagagaagcagctgacatgtggttgaggatcagacaggacaggaaaagtacttagaatagtcagcacaatctcatacctgaaatgtgacaagttttaagtgggcatatgaccacccactacagaccccatcctcccacctgtctggtttatgattatggccaataagaatcgagtcaaaggaatgtgtgtcacttagatgaagccatgacaaaaatataatcccttgcccttttcctttctctgctgagaggtgtccatgggatcagccaacctgaattcagaaatggaagtattgtgaagatgccagagttccccccctcccagctctggaaaactgagctctgcaaaatgagaaaaataaaaacatgtcttgttaaggcctctgcatttgggggtcttttgttcaagcagcttcacttttaccttaaatagctgatctgaaacaagcagggtcattcctcactcaaatgaggccttctcaacatgtccataccacctttatccattacgtccctgactctaggatgcagagatcacatattagcaggattcaagaggtgttagctatgttgtcctagcatctgctccccctacccacttatctcagttccatttggggagccctctggttgtggggaaggcaactgcatccccagctttaagtatggatcaagcactagattaagctaatccatccatccagtctccctaggcatagtgactggtgggtttaagacccaagctgacctagtcagaatgagtcttgagatctgcttgcaatgctggagaaaatagatcctgctggatgtcagacaaaaggcaataccaactgtcagccactttagagctcaggagacaagatttagtgtttggtgacatcattgggtggatgagaataaggccttgcctccggcccacttaaatctttagttatgtgaagatttatgtaaaattgtttagggttgcaaccagtaagaatcagacctatcttgccagtctgctaaatggccttcctttctctgctcacactgatcttgcctttcttcatgatgctccttttgcctgcagcaccccgtcct

SEQ ID NO: 41073 - DNA, 3779 bp, Homo sapiens
agctacttcggaggctgaggcaggagaatcgcttaatccgggaggcggaggtcgcagtgagccgagatcgcgccactgcactccagcttgggcgacagagtgagactccgtctcagaaaaaaaaaaagaaaaacccctggtcttccactgatttggttcaaaatattttacagactgcaccatctgaaatacattacctctcctgttaccaatatgaaaaaaaagaggacctttggttcctcagaaaaacacaaactgttatttttttaaagaaaaacttatcaagagatgaaatcggaaaaacttaagtctttaattctgcccttgggaatgtaataaattattccttttatattccaatacacaaagaactcttgtagacaagaatcaggctcaacaaactaaaaacagcatgtacctaggatcctggcagtttacaggtgtttgattatccttaaccagagtaactcattagaagcatttaaaactatttaggaggggggagggggaagcccaggagataagtactatatctcttatctttttgaaaccctcaaagctctacactccagttatactgcttgaacaaacaaataacataaaattgctaatttaaattcgaatggaaatagtaactggttacgtttcactccaaaattgggtcaaacaataggaaagggggaaaaatctacttttaaaaatgtaatttaaaagcaagatggggatattcattagacctccttcactttgagaaagacaaaaaacaaattcagttttggcttatctcacctgagtccttctgaataatgcctgaaacacactagctaaaatcacagacgattactgagcaatgttctctttttacaagacccccaagaccagaaacagtcacttcctttggaagtgccctgtggctgaggccatatggttaacatgtgggaacaagcacaagccttacccataataaaatcaacacctaaacccaaatgtggaccattatgccattctaaaacaggttctcacgatatggaaaaatctagatggaggggagctagttgaatttcgtgtctcgtttgtaattacatctgtttcattaatccaagaaatgatgcagactaccgcccgctgctgtggttttggaggtttgacaaattcgtgttttttctggtaatggcgcttttaaaggatcccagcaacttaaatagtgttaactcttggaatgtgagccccatcagccccttttggaatggtaatgtaacacaagcaacttagtatttaaatgacgataaaaattcaagaatcggaaaactatcaaggatagggagtataaactctaaaagctcccaagtcttccagcagtctcgccactccaaacacaaaggcttcttcaggaaccctttgttgttgtttgtttgtttgtttgtttgtttttttaagacggagtctctctctgttgcccatgctggagtgtagtggcgcgatctcggctcaccacaacctcggcctccggggttcacgcgattctcctgtccagcctcccgagctgctgggactacatgcgcccgccaccatgcccggctaattttttatttttagtacagaccaactttcaccatattggtcaggctggtctcgaactcctgacctcgtgatccgcccgcctgggactctcaaagtgctgggattacaggcgtgagccaccgcgcccggcctaagaacccttttctaaggcccccaaaacccttggcacatggcccgccaggcgcacgaccccagcacatggcctgcacgactatacccaccccatccccccttcatccgcagccgggagcctttccccaccacacggactccttccagtgagttcccgccaaatccaccctcggtccctcattccgcgaccctcgaagcgtcagggcctcggccccaagggcgcacgggcgggcctcctctgccctaagcctgcggcctggggtgcggccgtggcgccgaaagacccgcatgctcggcgacccagctttccaggacgaagaaaggacagaagtgtcgtccgacagcggtgcgccagaaacccgggtccgaggcggcggcagcagccgagcttcccgcctgacgcagcagaggcgcaggccaaagtgcggccgccatcgccacctcgccgctccctaccctctctgtccgccacagacccgacccgcactgcggctccgtcagcgccgggcccctcccccagccctcaccttccgcgtcggagcgggcccgcagcggcggagactcggacgcaggcctggggaagacggctcgcaaggtagaggctgtttattttgagggtccttgcctgcgccacacgcgggtctgcacacggccccacatacgccgctgcgcacggctctcctccgcctcgcccacgcggccaatcagcgcgcggggttcggcagtccaatcagagccgcccgcggcagggccgcccactagagcgcggcgcggggcgggtgtttctgcgcgcagcgtcttttcccgccgtgccccgcgcgcggcctttcacgccgggatccgggtcccggtgcttctcggttcattcccagctgggtccgggcccggccagactgggtggaaatctggctgaccttggtggtctgtcttggccagctggagcaaagggatgccaggggacgggtctcggtgcagtgactgccattagcttggggccgcagaaagtttctcccctttctcgggctcctgccaggcccttggctttcagagccaggcccgatttctagataacatttaagtttgcagaaaaggggatgccaagtcacggtggtcacggctgtgggatgcagcctctgagatttgtattaatttttgtgagccggggaaaggccttgctgctttctccgccaggactgatgtgtcttcccaagatgaaagtgcctggtaagggcgaggggcctccctgggaaggtcatgagcatgtaaggtaatggggcctagactgtgacttttggcacgtttatgagtgacatcccccgggagggcaaggataaccatttgacctggtctgtcatattcaggaatagacttcagtttagttgtggtattttctccaaaagagatttgtgtatatagccctagatagtcttgtcaagattaaacccaatttaaactgttaactataaaatattttagaattttgtctcattctagaatggctttattcgaaacaaaaaaaaaggaagagtcccaagtttcgtctcagtgaaacctgccagttcaacactatgatttatttttctttttttctttaattttttttttttttaagagtagggtcttgctctgtcgctgggtttacaggcataagccaccaatcccaaatcccggggctatgatttttgaaatcatgttcgtgagaaggcagagcacatgtgttgagagtcagactttaaacctgggttcaaatcattagtgcttaatcattgtaaagcagttaggaggttgcgttcaacatagcaattatcaaagaatgaatgtataactttaaagaccaatgatattttaaacttttttttttttttgagaacggagtctcactccgttgcccaggctggagtgcaatggcacgatctcagctcactgcaacctccgcctcctggattcaagtgattctcctgcctcagcctccccagtagctgggattataggcatgcgccaccacgcccggctaattttgtatttttagtataggcggggtttctccatgttggtcaggctggtct

SEQ ID NO: 41074 - DNA, 2160 bp, Homo sapiens
caggtttcctctttgctattttgcttatttcttctgttgggttgtctttttcttactactttgtaagggttcttttttttttaagacggagttttgtgcaatctcggctcactgcaacctccgcctcccgggttcaagcgattctcctgcctcagcctcctgagtatctgggattacaggcatgcactaccatgcccggctaattttgtatttttagtggagacggggtttctctatgttggtcaggctggtcttgaactcctgacctgaggtgatccacctgcctcagcctcccaaagtgttgggattacaggcatgagccaccgcgcccagcctaaaagttctttatatgttctgcatagcaatcttttgtcagttatgtgaaactttgtgttgacattttggtggtcattgtttctcaacgtgctgtaaagtttaggaatagatgaatgatttctgaaacttgaatttggatcactgatgaagtgaccaaggggtttcatttggggctgcccaccttgtggagctttgggcctgctgcaccttacatgtagcagtgttttctttgcatccttgcatgccagcgatacactttaattggtggcacgttaggttctaggcacaccatatcaaaacatctacctgcttgagggcagatgtcatgagcacagatcctttgcctcgtttttttggaacattcagatacatttattgcattgtaaaaccagccgtgttttctggcattttgaccagccctcggaaactgctgacatcatgatgtactccttgcctggtgtttccattttccccagcactgcagctagaatttagaatcctgactcacccttcagccagccacagagcatgctgattattctggtacagtcagtgctcacgaagtgactttgcaaggggaaatagcttttggacaagtcaaagccagtgcaatttcagataatagcccagcttttcttttctaacgttctcatctgctcagatgctgctgctttctcccctgatgggaagtggaagccatgattctgcagtcctggccataaagctgtgaattgtactagctggcacagccagtactgccctactgagttcagtgaactgtccttctgatctacactgagagagcctggctgtggtgcaatgctcacagtgaagccgtctgcatagctgagctaacaattcaaacttcagctctcatttcaataaattaccttataaaacactcactgaccaagattaccttgagtagcttatttatatgaattttgcagttaccccaaattagccatggagaaactgatatacaatgtttcttataatttcccctcaaaccatagcaaaaacatgaagggaagtactaggatttctgggaatatggaatttatatctatgccccacaaacaatgttaaagaaaacgggctttggatattttcaaaggcctgtggtgaggattaaataaggcataatatatgaaaatgttttgtgaattccaaaatgttttaccaagataaaagatttttaaaatcagtttctgtcagtttcatacatccaatcctgaaatcaagtctacactgatttattacatataaggaaatatttttgacgtgaataggcaatcatagaatttctattgtattcgaataatgattgaaagtaattttctttttgagattttgacttccccatttgaggtaatattctcaagggactaaatgttactgatgttgaagatttatcccaaatgaggtttgctttgggtgacagaattcaaagctagctctgaacaaaactgaaatggtggctaatacgatcctttctgtgcctcccttttctttccttttggatacttcaaatacacagctagtttccttgggacatcctagggcagtcagggtcatttccttctctctccaagactgacctgccacaatccatcagggactatgattttgttgtaaatatttagaaagatggtgcacaacaatagatttggcaaaaactgagctgatggcatgcaagtgtagccaagtgtgggaatccatacttggaataatctaaaggaatgtttaacggtggtaaaagagaagtgcaggagatggggcagcattttcagggcctctcacctaatgaaatattggcatctt

SEQ ID NO: 41075 - DNA, 1414 bp, Homo sapiens
cctgtcttaaaaaaataaataaaaggggacaaattcatagagacagaaagtgggagttattgcttaatgggtacagagtttctgtttgtggtgatggagaagttttggaaatagttatcagtgatagttgcacaataatataattaatgtcactgaattgctgcctaaaaatgattaaaatggcaaattttgttatatacatttggccaccaaaataagaaagaaaacaaaccaaccagcccttcagtggctctgtagctttgcagaatgaaaactccacagccccatgactggcagggaggccccatgctggctccactcggcctctgcagccctctcttcccaccagttgcctcctcggatccttccggtgcagcttctaggctgctcttggcctgagtccaaagccgactggccctgctccatgaagtcttcccaggttcccgttctaagagcctttctccctcttgtgaataaccaggcactcctgcaccacccactaccccaccctgaccctcctaaccctcagctctgagtcacctgggcttgcccagggctttctgctcagtcatcttaaggaccaggagaggaagccaagcaggtggaggcagggctggccatgaccaggccttaggactagagttgcattagtcaggaaggtggcagaacttagcgtctctgcctccagttcattggtggccctggaagagtccctgtctccctctgagtctgctttctcttctgcaaaatgagagactggattgggattgcaagggtgtttttcactccaggtttttgtttgtttgtttgtttttgagacagattctctctctgttgcccaggctggagtgcagtggcacgatcttggctcactgcaacctccatctccctggttcaaacaattcccctgcctcagcctcctgagtagctgggattacaggcacatgccaccacccctggctaatttttttgtatttttggtagagacgagatttcaccatgttggccaaactggtctcgaactcctgacctcaggcaatccgccctccttggctcccaaagtgctgggattacaggtgtgagccaccgcgcctggcccattccagggttttgtgactaaaattgggtagcaaagaactgcagggtagaggtaaccttcttcagaggagaaagccttcttgaaatgttcagttgatgattttattcttattggggcagtctttaaagtttcttgagagaaaaatggaaacaaaatcttttttttttttttgagacagtctctttgagtcacccaggctggagtgcaaatggcatgatcatggctcattgctgcctcaacctcccaggaagaccagatcttccagcttcagctacctgagtagctgggaccacaggtgtgcaccaccacgcctgg

SEQ ID NO: 41076 - DNA, 2039 bp, Homo sapiens
tgcagtggacaaagtgtagatataaaatgcaaaaattaggccaggcatggtggctcacacctgtaatcccagcattttgggaggccaaagtgggcagatcacaaggtctctaagagacagagaccatcctggccaacatggtgaaatgccgtctctactaaaaatacaaaaattagctgggcgtggtggcacgcgcctgtagtcccagctactcaggaggctgaggcaggagaatccaggaagcagaggttgcagtgagccaagatcgtgccattgccctccagcctggtgacacagcgagactccgtctcaaaaaaaaaaaaaaaaaagaataaaagaaaatgcaaaaattggctgagcatggtggctcacgcctataatcccagcactttggagaccgagggggatggattgcttgagctcatgagttggagaccagcttgggcaacatggcaaaaccccatctctacaaaaaaaaaaaaaaatacaaaaaattagctgggcatggtggcaggtgcctgtagtcccagctactcaggaggttgaggtgggaggatgacttgaggccaggaggtggaggttgcagtgagccgagatcacaccactgcacttcagcctgggcaatagatccaaaccttgtttcaaaaaaaaaaaaaaaagctgttaagtaaggatgacaggcttatgaatattttttttcaatttcctcaaactttatgtaatattgcactgcctttagaataaaaagtaactcctaccccataaaaagctaggtttccttttttggaatttattacagaagagaagacagaacagaaatttgtatcctgctacaattacagtgttatcaaactatagtcctatatggatgaggactgaaggaggaatgctgagactgttgagggttttaaaatttttatttcctttcctgttatgttccaaaaagatacacatcaagaatgggaggaacgaacttttaatttattttctcagtttccggatgctctatcttctttttcaaattataaaaattctcttttttaaatacaagctgactgggttgtccctgaaacacattagctcaagcttctgacctttggaaagcaaatcagagactatgttgcgaaagaattgtaatcagcctcggtgactgtgagagttatttaggacacagcctcttgctcagttacagctccagcctagggccagcagggcactgggacatgctggcagccactgcatactgggcaccggaaggaggatctgcagcaagctgggacgtggaaggaagccacaggacttcctctgcaagctctgccaagccaaacgagtattatctgccctcgagtttgtttttgccatggctaaacacggactgcaagttgaacgtaatccaagcagatcatttccctgcaattttaaaaagcaacgtaaatcctagacttgacatggttcaaatcagctggagcagggcatctcagggagtaagagagacttgggctacttctaattttgtttattgatatgaagaaatagtaaatacaacttaaaaattttggtatgctgtattttatttatgaattgcttttagagacagggtctcagtctgtctcctgggctggagtgcagtggcacaatcatagctcactgcagccttgaacttctgggctcaagcaatcctccttcagcctcccaaagtgctgggattataggtgtgagccaccgtgcctggccaggtaagcttattttaaaatagtaatatacattttttaaacctttagtcaccttttcaagtaaagcacctctacatttaaaacaatggagttagccagtcatggtggctcatgcctataatcccaattttaggtaggctgaggcgggaggatcagttgaagccagaagttcaagaccagccttggcaacaaagtgataccccatttctacaaaaattgtttttttaaaaaagttagctaggcatggtgtatgcctgtagtcccagctactggggaggctgaggtagggggatcacttgagcctat

SEQ ID NO: 41077 - DNA, 1263 bp, Homo sapiens
attagctgggtgtagtggtgcacgcctgtagtcccagctactcaggaggctgaggcaggagaatcgcttgaacccaggaaggcacgggttgcagtgaactgagatcgtggcactgcactccagcccgggcgacagagcgagactccgtctcaaaaataaataaataaaacataataaaaataaataaatacatacatacataaaaagggtaaaaagaaaaatggcataaggaaaacatgtttatgaagctgatgggacaccccgggttgtctaataaccgtgtgtccaggtcaaaccttgattttaccccgagctctccttttagttgatggcttgtgattcagggtaagtagcagtctgtggaaacccaggaaactggtttgattcccagctgtgtcattcagttggcatgtgtccttcatcaatgtacataatgtctgagattcaggtttgtgccagtgaagtcagcatgatgtttactttgaactttcattaggtgggctcaggataaaatacatgaagtgcttctcgcctggtgagtccttgataaacgctagcacttgtattgtggtcctcctgccccaataatgatcacaccttagcacaatgttgcccttcacagtttgcaaaggcgggggcgcttatattcatgatctcatcctaaaaaagtctaatttttgttaacaacagctcatatgtatagagtacttgctatttttacaagtattatgtaacagtgggtgctcaacaaatgccgaatgagtgagggcatagtttcaaaagtgggcgtgggtggacaagaaaacaggtgacttactggaaaactcattttatgaggctggaagctgcctctaaagcaagggtagtcctgagtctccctgttatattgaagggagttagtccccggactctgaaactgccctgggtcaccctagtggacagacagggcctggcatgggggcttcaagcctcttccagctgtgccgtcgctaaaaaactagaggtaaaattaaagagttggtgccacctagagggcaagagagtgcatctcagaagagggctgcggaaatccttagaatatggaaggtggtggtggttataaagaatcataaaaataatctctattggcctggcatggtggctcatgcctgtaatcccaacactttgggaggccgaggcgggaggatcacttgaggtcaggagttcaagaccagcctggccaacatggtgaaaccccgtctccaccaaaaatacaaaaattag

SEQ ID NO: 41078 - DNA, 2119 bp, Homo sapiens
ccccacctccccgcgtaggcagcgcatctagttggcactccataaatatccaaagtatttacaaaataacgtagaagttctatgctgtttagttagatctcttaaggttgataatgtacaaggcaatttgcatcaggagcagacgagatagggcccggcagatataaattaaaaatgcaattgcacgcattcattcaacgagaactcactgagcaactactatgtgccaacattatccactgcagtgaataaaagacaaacaaacaagcaaataacaaaaaaaaaaacaaaagagcaagaaagtggccgggtgcagtggctcaccgctgtaatcccagcactttggaaggtcgagaaaggaggatcgcttgaggccacgagttcaagaccagactgggcaacatcatagtgagacctcgtctctacaaaaattaaaaaattagtcgggggtggtgcgcccagctctactcgggaggctgaggtgggaggatcgcttgagcccaggaactgtaggctgcagtgagccaggatcgcacaactgcaccacagcctgggcagcagaacgagaaataaataaacaaataaaagccagaaagtaaaaataaagtgttagatggcgattcgagctgaggaggaaatcaggcaggggaaagaatctgaaagcgaggagtgagtggctggcaaggctccttcggaaggtggcaataacagtcatagaccggtcacatcaattgggtgtttactgcgggccagtgtgtgccaccaacctcacacccgaaagccacaaagactcacgccacaacgcaacgaggcaggggctcctcctcctcccttggtatacggaaagaagcgtagggagcagagttgggatgctagtcagtacccccctgcacctagcccttgcccctccgtctggctttccccactcccgctccggcggagctaaggttaacattagacgaggctgtggctaccggaaagagcgcaggcgcagagcgcggaatgcgcctgcgcagagcgctgggcgacgtggccagtcggggcccggaagtggtccctgtagaaccactgtggcaccgctactccgtgccgcgcccgtcgagcattgcgttgctgcattgcgccccaccgactccactatgttgaagaaattcgacaagaaggatgaggagtcaggtgagggggccaggcctgggtctgagggaggccggacccccacccgccgagctttccttctggttctctgtcctgacccggaggctgaggcccagtgaggggcaggggcttgtgccagggtccacagctagtcagtggcaggcctcggagagcccgagcatgcgcggctgtctcactcttgtaagctcggactgcaattttctgggtgaccttgggcgcgacaaacacccccccccccaggcctcaatttacccatctgtcaaaggaggggaccatgccgaatgttctcttgttactttcttcgtccaacctcttgggattcgctggggctacgttggtgctggccaaactggggtgtaacctgcggagccagcgtcctgtgactgggaactctgaccccatcattcatttattcagcaaagtatattgagcagttactgtatgccaggtactgtacggtgtcctggatactgcaacagagcaagtgggacactcagtgcctgagctaggaatattagaatggttgcacccacgatggaggaggcagacatcaaccagataatcacacgtgtaattatttgcaaatgtgtcatctgctatgaaggaactagttacaacgagatggtggtccctggcacatagggacttagttaattacaagttatataaatgaacacaagacatggcaccatgagaagcacaggactgtaccagggctgctgggagattgtgagtggtttggggtagagtggagcccacctgcttgcaggagactagtaggatccctagacagattgtagaggcttgattgccattcctgaggagtttgaactttactagatttcctaggaagggacatcttccctttacctatgtctgggagagttttgaagttcagagtcacaacctaccttctccattgtccttgaccgtaggtggaggc

SEQ ID NO: 41079 - DNA, 469 bp, Homo sapiens
gcatgatgatccgggtggccagcaagcagctggaagaggaggatggcaggtaacggctctcatctctcaccagctagatgatgcctcactcatcctaccatgctgggccacccccaacgttttcttgccaccctatgttcttttgtagccgtgacagcccactgtttgacttcatcgagagctgcttgcgcaacaagcacgagatggtggtgtatgaagccgcctcggccatcgtcaatctgccaggctgcagtgccaaagagctggccccggctgtgtcaggtcactgggcattccttcacccagcctcacatgtttatgcttgctgggaactaggcctgggttcccgggctaggagaaagaaagaaaatgctcttaacaagtgttaaggagtctgtacctaggaagcacctgccccagacactatgctgagtccccacttgtatcacgttttggtggtgggctgctg

SEQ ID NO: 41080 - DNA, 2138 bp, Homo sapiens
gaacagccctctagagcattctctgttggttgcagatgaagaatctccggtttaggtcccaaggggagcaggcttttaaactcaagccaggctattttaccaactttgaggccaaagtacacccgaaagggctgttttaaaaatctgggcctcacccttagagattcagctgaggggctggggcaggaaaggcttattctagtgcccaccaatgtttgagggcgaagtgcgcgattcctggaagttcttctgactttcatttcttcagtgttcctccatttttgcctcgcactgtgaggcagctggcaggactgtgaagtaaggagtggagtttcctggtttcccgccttccatgaccctgtgccctagactcagcgcggcgggaaccttccctgccagccctgaaacacgctgggggcggggaggaaggttaaccccgccagggaacggccaatatggaggaaagtggagtcccgagaagcttgggatcgatatgtctcccaaggcagtcactgtctcctggggaaacgggagaaaattcatcccaaaccggaggggagaagacgccgcctccggggcccgagggcaccgcgggaaccaagggcccttgggggcggggcctggcgccgggagcgcgggctgaggcggggctgacgtgaggggcggtgacgcgggtggccaaagcggagcggagcgggggtgaggagagtcgagggaggtgacgcgcgctgccggggcgaggtgaggggaggggaggcgacgcgggcggtcggggtatggcgaggggaggggaggggaaaggaagcgacgcgagctgacagaggggagcagaggcccgagcggacgcgaggcgacgcggagagggcggcctgggccgaagtgaggcgacgcggggcggcggagtctgagggccggagcggagcggaggcgacgcggggaggggcgagggatcgcggccggtggctgggggccacctgctccccgagcaccggcccccgctccggggagcagagtccggagcgggatccgcggcccacaggttcgcaggtcgggcccggggacgctgcggactagcgggcgggaggcggggattctgcaccccggccccgggccgtccagtggccgccctcgaggtgaccggttgctggccggcgtgggtcgctgaccccagcggggactggggggaaggacggggagttgggggcaccaagtcacccggaggaggcgaccccagctagctgcgcttgccctgcttcgctggactgtgaagccccctccgctgcggctcttcctgcgctcaggcaggcatttgcagagctcctctcgggacttgcctcagtgccctgcacggagctgggcagtgggctcagggagcgaagcaaacgggcacatccttgtctttgtgggactttttggggaagactttagacggtggtcacggaggggcacggccctgtgggaacggaaagagaaggcggggactcaaggaataagacctaatatttgagatacgtaagccttttccttacgttttgtaatttaaaggttgcgaggggcggtgttgaagaatgtgtgggcgaacatcctgtcacttacctagagatgttctcacgagagcttgcgcctaccaggatcggcggggccagcagcggctcccggagtggagggaccctgataagtactgcccctcttacaacaagagtcctcaatccaacagcccagtgcttctgtctcgactgcactttgagaaggtaaccagcattgcactatgctagcccctcgcccagcctcgtgatggtcatctcctatttggtttggtgtgtgctcagcctcttgggatgacattaaaaaccagcctttactgatatattctgacttccagttgagaacctctcttggcctcatgaaagaagttttatcagtggcttctaacactgataaagacgtatttttcaggctcaatttaaatgcctttgctatacatggcatactagccttaatatatgccaaatttatatgagctttgtgttttaaaatagcagctttcactgatcatcagggtcattggagtatcttaaaaatataataaaaaaatttaaggccaggtgccatggctcatgcctgtaaccccagcactt

SEQ ID NO: 41081 - DNA, 1425 bp, Homo sapiens
tccagcctgggtgacagagcaagactcagtctcaaaaaaaaaaaaaaaaaaaaaatcaaataatgttcttggttgaatgaagccatttatatgacatagttatttttgtgtcatttttagaggatgcatacttccctattgaaactttttgttttaaatgagaggggaatcaaaataaaatattctggagaaccttgaaggggaaaagagagcataaaacatatttcaaaggaaagcataacttagagtgagaatagagagcaggattaagtgtatgagcctggccaggcctggtggctcacgcctgtaattctagcactttgggggaggctgaggccagagaattgcttcaggccaggatttcaggacaccagcctgagcaaatgagaccctgtttttaacaaaaaaaaaaaaaaaaagccttagtcatttatatgacctccttagaattatagaaagttagctggaagaaaaatttgtctaacagatgtaaagatagaagtatacatagattatgacttgtcctaggttacctaatcagtgagggacagaactagaactgagatccagaccaccgtccccactccagtggatgcatcctggaaccaggaatggggaaggtggagccactagcaaatacagccctcatttgggccagtggtatgaatttgctgatatagtatttgatttcacatctctaacaagttttattaagattgctatggtttcttaattttgataatatttgatatctcatttttctcagacctataaattataaagcaaaattagaaccattttagcagttcattcaaatcattaacagcctgcatatgtatatagatagcaacattttcatttgaaaccacagatttgcaaattacttcctgtttcatttatccaccccagtgctaccaggtgttctgttcagaagtccaaaagggtagaggaaagatgactaatattgagcaatggtcttagtattttggcttttcaactactttctattcgtcattctcacatttggatttggtttacagttgtcaagggtacactctcagcgctgatcagtggaatttgtgagagcagaattctcaaccttgacactgttgacagttttggccaggataattttttgtcatagggagctattctgggcgttgtagagcgtttagcaacatcctctaccagctagatgtcagtagcatcctccacaatagcatcccccagatcagagcaaccaaaggtatctccagatactgccagaagtctctggatggtggggaggggtgtgtcagaattgtcccgtactgagaaccacagattttttcagtattgttgtcttgcaaatttctgatgaaagatcatttagttgaccattgcgtaatgttgtctcattctcatttatgcactgagctgggggtc

SEQ ID NO: 41082 - DNA, 479 bp, Homo sapiens
cactgcccctcttcaggtggagtctgtgtcttccagttggctagaatgctctacctggtctggaagccctcctcaccaccccccacacccatttttaactgtggaattgggagggctttgtaacatgccaacttggcctggctgaaccatattttccagaactccctgactagtatattttccatcagggtgggccaggaggcagattctcatcagatttggaaggaagcaaccatttggactgctgatctgctgactcacctgattggcatgaagcagcacctggacctgcaattgctgtgcttttcccggactctccttcagttttttctgactcctggggcaggtgtgtgcacgtctagctctgtggctaagggttccagcttctaccttcatcagtgaggtcagagacaaaaagaatagacacaggtttcagtctgttgtcacgggtcctccctgtgctagtggggtttcagtat

SEQ ID NO: 41083 - DNA, 779 bp, Homo sapiens
agggcaggtaggactcccactggcacctggctctgcagttcagtgaggcaggaagcagcagggaggaagccacaatgggttatgaagatttgcagagggaatggagtggcaactcacccaggcggcagagaggtctgccaggcccagatcaggggtagcagcaggcctgggctcctctccagcaatgctccctcctctccagtctatggccaggaggtcctgcctccacctgtagtttctgcaatttcttacacagagggtaaaacgagctctcctgcattctcacctaactccagtcactcacgctggtatgagtatatatccactgtttcagaagcttccctgtttccactgcccttgggggcctgttttgcagttgtccatttttagggacatctgttagaatagaccttgacctattgcccaactggacagacaactatcccacatgctggataccagaatgtcccagggctggagatccttctgctcctactaattttcccagcaatcctttgggtcccgtttgcactctagcttaaccaataggctcagagacagcaaatacccttctgagaccacacgttggattgtggtcaggaactccactctctggccaccacacttcgtcctggtcacatctcactctaaccctcgctggagtcagaatgactaagtttacaggccagtctggtgtgactttgtaagaactacctctctggaggccaagtttaggtccctgaccattaactctgaaaacccattaatcccccctcctc

SEQ ID NO: 41084 - DNA, 2367 bp, Homo sapiens
cagccctgagcccggagcgattgtttgtcgcgcacccaaaggcaaggagggtggggagctgggaaaggatgcgcggcctccgcgtccccgcgcgcctgggcccggccaaccagcgaccccgcccggtgggcaggcgcggcctcggccatcggcgcctaggggccagtaaccatgacgacggccgttgccaaggccgagagccaatagaggcgtcgccggggctgtttcaaaaacctaaagcaaacaacgaaaaacgctacatcgttgggggaggggaaagactgagaggacccggggcccctccctgaggctcagaccaggcctcgcggccccggccggcgtgagccgtacaaaatctacgtcacttggggtagaaaaacaaaaacaccgaaaagcccacgccggccgctctgaccggccgacacgctcacttgcggcccttgggcactttggggacgctgggcttggccgccttcttcaccttcttgcccccggcggccgccgtcttcttggccttgccgcctttgtccttcttggcgccagcgcccttcttgtgcgagcgctgctccggcttctggcccctggcgggcttcttgtccgcgcgccgggagccggccgcgcccggggctgccttcttcgctttgtgcgcggtgggggccggggcggtggcggccgccggggctccgcgccgctccccgccgccctccagcttcttgcggttgagcttgaaggaaccgttggcgccggtgcccttcacctgcagaagcgtgtcgttctgcaccagcgccttgatcgagtacttgaggtaggtgcgcccattctgctggtcgaaccacggaaccttcttggcctcggtgtagatcttggccagcgacgagccgttgcgctcgcccagcctacggatggtctccaccaccagctggctgtacttgcccggctggttcttcttcttgctattcttcctcttcttagatggggacaacgccgccgagccgccagccttggtcaccttcttggccattccctcggcggtcgtcactggcagggcctcctcgagctccacggacatggtagcaagaggattggtggcgggcggcgcgcggaagccggggggccgcgccgggaagaggaaggcgaggggccgagggggtgcaggggggctgggggcgcgcggcggctccaggcgggagcggccgcggccgggcctggggccgggcggcagggctggggtgggggccgggccgggccggagcgagggttggggggcccggagccggggccggactaggggaccgagttgggggtcagagaccgagtccgagccggcggctggagctggggacgtagacctaggccgagccggagcgaagagaaatcccgccgaacgcgagacaccgccgccgcagcttccactggcgcctctggaactcgctgggcgtgcgcgctgcgctctggcgggagggcgcttctctcggctttttatagcttcatggcggaccacgttgagaacaacaacagcctggtccggggccagcgccaacttgtgcttcttggagccccttctccggccgctggcttctcggaccgcgcctctccagcgccgccgcgcccgcagcggggcgccccggacagggcctgagctcccggcgcagtggagaggcgacttgcgtcctggaagggctcagcaaaggcgaacggagaggtgcaccctaggctgcgggagcgcgagaggaggggggcacctcgtttggaggccaatagcgcgggccccagaggaggccccacggccgggagcttggcggccggcaacccagagaacgccacgggcacccgagccttgtcccggcccggggggctccaggcctgcccgcaagaggagctttaatttgtccaaactaacacagggcgcgccctcacgtggtcggctggggcaacgtgaactgcgctaggacatcctcgggggttttccgccccatccaaaggggatggcggatgggaggcactctccagctgcaccccgggttctggttgtgcctctgggagcctaggcacaacccggggaatggaggactacggcaggacctctctagggacactgcctcgccgctccccccaccctgttgccgctgatgttcccagggcctcattttgtaatccacaagtagctgccgccggtccccccaaagccaaatgggggctccagggtgggacagggtgggcgggggtgaggctgtgacacccagaggaattcctgtgagaggatggggaagggattcgctcttagttcctgggtgcacccctccccctctcccgtgcacagggaaatgatggcgggaacacagcaaaggagaccatgtcctggagagg

SEQ ID NO: 41085 - DNA, 1884 bp, Homo sapiens
ctcttatctgaacccaggcattcctttttgttgattccaagtctttagacaaactcaaccaattgtcaaatctaccaacagcccggaccaggccccccaacacacctccctaaaatgtacaaaaccaagctgcaccccaaccaccttgggcacatgttctcaggacttcctgagggctttgtcacgggccgtggtcactcatactggactcagaataagtcttttcaaatactttacacagtttgactcttttcgtcaatagacgcaaagcccaaccaccaccccggctgcctgcttcactctgttcgtgtacgcgctccagcaagccgacaatacccacagacacagagtggtagggaaggcctccttaccaggggaccatagggccagatgaagcctgcaggaacgcagatggccacggattaagactcactcaggccgggcgcggtggctcacgcctgtaatcccagaactttggaaggccgaggcggacggatcacttgaggtcaggcgttccagaccagcctggccaacatagtgaaacccactctctactaaaaattcaaaaattagccaggcgtggtggtgggcgccggtagtcccagctacttggcaggctgaggcaggagaatcgcttgaaccccggaagcggaggctgcagtaagctgagatcgcaccactgcactccagcctgggaagcaaagtgagactctgtctcaaaaacaaacaaacaaacaaactcaccgagcaggaaaaagaagcaccaaggaagagagaagggatgagagagcgccggggctgatgggaggtaacctctgggtcctgacagggaaaaggcaagcacttccggctccgggtccttaaaaaaaagacatgtcaaagaaagagtgctgcagaaatgccgaatttaactgttttaatagagagtaatatctaagaatgtaaaggaaaatttatcttacctgcccttggcactagttagaaagttggaattctttctgagttgagacctggtgtagggaggaatctacttccgccagaagttgaagccaatctagcgtttgggctatttccgcccttgtttcctctactccgaagtgcgcttcctagcggtcaggagagatcaagaccgacttcccaaaattccctcactgaatttacatagtaaatagtgatgagaccggaaccgctaacgtacgatgggcctaccacaattctataatgtaacctattattgtctctattttgcatatgtggaaggagaattttggagattttactccaagctccacgcttctaaccattagtctaaactaccttgctttgttttgttggttgttttgtagagttatggttttactattttggccaggctggtcttaagcgatctctcgcctcagcctcctgagtagcggggattacaaatatgagccattgttcccagctactgtctaatttttaagcttgttcttgatttgcttagcttttttttttttttttttttttttttttttgagagggagtctcactctgttgcacaggctggagtgcagtggagtggcaagatctcggctcactgcaacttctgcctcccaggttcaagggacaagggattctcctgcctcaggctccgtagtagctgggattacaggtgtgcgccaccacactcgactaattttttttaattttcagtagagacaagggtctcactatgttggtcaacctggtctcaaactcctgacctcaggtgatctgcccaccttggcctcccaaaatgctgggattacaggcgtgagccaccgcgcccagcccttagcttttgtttttaagattattttgaaaatcaaatttcaggaggaaaaaaacctcctagattccactcct

SEQ ID NO: 41086 - DNA, 667 bp, Homo sapiens
caggcttcattccttgtccaatgcctctaaactcaaagtcttaagcgcgaaccatctgttatctggaggcattttaatgtggtgtttggagtacggcccctgcagccaccctagctgggttcagatccccactgcatcacttcgtagatgtgcgactctgagcatgatatttaccctgtctgtgcctcagtttcctcctgtgtaaaatgaatatgcttagtgtcacttcgtagggctgttgggaggatctgagtgagtgaacacatggaaagccccagagcaatgcctcctggccctctctgtgttgtgtcactgcctctcaggccagggcaccgagccccagctgttgtgccaggagtgcagagtcccagttgtctcaggcgaagctgcccctcctcccaccttccttccttgtggagttagatgattgccacagacctggtaaattcctcaaactccttaaagcgcattttcttgcttttctttggcgttttcctagtggagaagagagaggcattttgtgaggagagtggaaatccaggccaatggggctttagggagtaggtcagggccgcaggggtggacccgtttctaagtctcaaacgagagctctgaaagaaaaatgtcttccacctggggtggaccctgactctgtgcctccatgctc

SEQ ID NO: 41087 - DNA, 3262 bp, Homo sapiens
actccagcctaggcaacataaggagaccccattgcatgagtctccttatgttggatatgtgtagatggatggatagatagatagatagatagatagatagatagatagatagatagatagacagactgaccgaccgaccagatcgcctcattcccttggcttcccacagcatttagaccaaaacccagagtcctctccctgggctacaaggccctgctgtaccatctggcctcagctgccttcccacctggtccatggcataccattcacccttcacccattccacccagccaccctgaccaccttctgtctcttgcaagctatcctaccccagggcctttgccttcacagttctatctgcctagattgtgcttcccccaagactagttcctgtcaatcactcagatgtcagctccaatgtctgcttctcagagaggccgtccctgaccaccagccctttaggtgcaagctcatcgaaagctggggctttggctggcccactgctgtgttcccagtttctagaagtggcacatagtagttgctcaacaaagattccaatgaatgaaagaatcccattgtccctgccctggttcagaccttcatcgtctcaagctgaaataatatcctgaccttaccaccttctattgaggctgtgaacaagtggctcagcctctctgagctccagcttcctcctcgtaaagcaggaatagcaatcctgacctctgcggacataaaggataaactgagatcattctgcaagaatgaagaagagctactgcaagaagaactactggaagaaggcacccctgccaagacgctcaaactcttgcctctttagacaaagtgagagacacccggacagagcaggagcaccgtcatctgggacaaacaccgccactttaagttccagctccctttctagcctcatgcatttcaaggaaatcacttctcttctaactataagcagccagaaagagcagacagtaaaacacagacaagacagctcaggcacagagggaggtcgggggaaagtctcttgggtgactgccaaacttcaccctcatacaatgggccccagtaaaactgtgggccttaataagcacattcctttcccttcaggtgcactaagatagggaagctaaaagcagacttgggggatatgcctgcagctgcagaaagatgtatggaaacagacacgcaactctgcctcccagataaacacaacaaagagacagagaagcagtccaagcctctgataaactcttccactgtgaatccttaaaaactcttagtctgtaagagaatgtggctctgacctaactcagccagcagcccctctcaggtttgttttctctaaaataaacctgtctttgactattgagccacctttcctgtttctttcctctttctttaattcttacacaccccagtctacctatcttacccactattgctcaccagggaaaaagaactcagtgatgacgccaaagtagcaccatgagagcaaaggtctgctgcttggctttgtgtttacttactgggaaataacaggacccaaaatatctctgctgcgaatatgcatcacagcacactgtggtcattgaaatgactcacagccagctacacagataatgataagcttggtaatttataacaaaaaggcacaaagagtatcagagggaaagcagcccaacttgaggtgaccttaaaaatgtgctggacataaaggagattactactgttggggtggtgacacatgcaggagcgactgttggggtgctgagcttccctgagctctgagagaggcagagaccctgcttgggaggtgatagtttctctgcagggcagctggttgagactggacattgaaaatctcctggaggactgaggaatggatgctctgagctgcctgctgtccccaaatgagccactccagtgaggatgctgagtaactcctcttggtgtgactgtaaactccaacggcctcaccccagatctttaccattgttaggaaacccctccactgcctcctccagggctcctgtgtgactcagggaggacaaggaagccccaaacatgcatgagattaagttcctgccaacctggtagatgggaacagagcaagatttgtttcatttagaaaaacaaagctgtggctatgtttgggaagggtgctagaatgggtgggtggttgtaatggttcttttttgtttgtttgtttactacaagaatggtactaagatataaagaaatattatacaatgcacctttgtgttgtagagtaaattcacagccagagctttagcaagtccatttctaatttgcctctgtgccttgtctggacagatgtggccccacaaatgtattgcttggcagatggaacttgagccatgtacaacctttacaactgttgacagcaaccctgccataatacccctgatagcagaataccaaaatacactttccagtaaactgtaaacatgtgctaattctggttctgaacaagaattttatcaataagctatggattaatagtgaggaggccttggacccacacacacataaatgtctctggaaaggcttgccatttgggtcagttctcagcctctcaggtgggctctggtgggctgagtatcctcctctaagaacaagggctgggactcatttgtctttgaatggacacagtggtagctgggcactcaagggaatatctactccttagttaatctctgggcctgaaaatttccagaggcttggccaaaccacagtcggccaaaactggggaacacactgaggaagtgagtttggaggagaggccaaggctgcctgcaccatgcttgctcccaggacggggaggtggaggcacaggatggggaggggtacgcacgctcccttgcagtggccaggctgctcctttgctgagccatagaccactgcttgtaggtattggccaggatatccatggtgatggtgttgtgcttcccaagagagctgaggtagatcactatatcctccacctcttggttcttcagagggactccgacctgaggagagagaagaccttcagactagcaggctcccatccaaacatcctgctctgatggccaaggccttaccagcctcctcagacccccatcctgcttccagtttcatcctcaaccactccctactatacccaaggtccctgctgcagctcagagccctttcccggtccttgaatgaactctgcactttgttacctttgcctttgctcaggcagttc

SEQ ID NO: 41088 - DNA, 637 bp, Homo sapiens
caagctgagtgggcagcataccaggccacccaccagctgccaggatgaccaccagcatgccacaggctgggcatattcaacagggctgaagcaggacccagtcaccacaaacgtagtctgagaccactaagagaaacccaatatgcatacattgcaggcccaaaccttcctgctttcctgtagtggtgtacttttgacaggaggaaaaccacgtcaggcttagagatagcacacaaatagggaatgacaggaacagggccagaggtgacaaaccactggagatgagtcagaggccacgccgctggactggtctttgtggacttgggagcgcctactgatcaaaaaccccaaaacccacatgccacccgcttccccgcagccaggaacacaattgtttgtgactgtaatagcatttgtatccaataaatagtcttaaccataatggtggacttattttgcctcagagaccaaatgtgctgaattatggatgggagtgagcctcacctgcttccactcattgacacaaaaaattcggtaagagtcgttgccatatttaccaatcccatgaagctcaattggatacttccactgctttgtcaggtattcatctgaagaatacaacatcccacattatcag

SEQ ID NO: 41089 - DNA, 1068 bp, Homo sapiens
tattgccattttgcctgggaagtaaaagtaactgaatgattacaagactccaggtgggctgatttcatgttcaagtagtttctcatagaaatctcatccagagggtttttttttttaaagaaaacaaaaaacaaaaaaacactggtgagaagccattatctgaaccagcaaccactttcagaatcaaatgccaaaactgctaatatattgggctaatagtccaaattatgctgaaaactggccttgcatgattagcttttaaatgatcagatcagcagataatgagagtagaagcatatagaacacaaggtacattcagtgaaaaagatacttttaaacacacatgaaagagggtggagaaacgttaactgattttcactgatgatcaaaaagaatttggaagtataaaataaataaaatctacctctttattctaaaaggtctgttggatgtcatccagtctcatttcctcataggtgaagagtttaagggtgaagggggaatgccctatcccaggtgacacactcaaaatggactttgaacccaggcctcaattcagtgctttctccctaccacactgtctctactaagacaaagatgataataatccccaaacctgaggtccgattgagaaatatagtagcgatgagaagcttccatggatcatgaaaaagtgtttcttgaacgagattaaaaggtgaccgaggaggtgtccatttcttaaaggctttacgtcgtggggggctaagagctaaacaaacatagtgcatcagaattgaaaacccaaaatggaattagaatttgctgttctgattgggaaagggataccttctttgttatatttgctggaaaaatacaggcttgttttccttctttctatctgtgttcgtgggatggtatcttctgaaaaggaaaagtaaacactttatggagtctatggtttagcttaaagcaatattgagggatgcaaataataatatcaacactattacaaagcatgccaggcactattctaagccctttacataaatacccaattaatctaactaatgacccatgaacttggta

SEQ ID NO: 41090 - DNA, 2131 bp, Homo sapiens
gggtaaaataattttgaggagctggatggatcttatgaaatgatattgtttacaattttagagataaaaatactgaagcctggtggaatcagcacaaactcttaagagactggggctcaaattccagctctaccagctgtaagtttagcagcaagttacttaacatctcaaagtctcggtaaaagactctgtaaaaagaaggtgatgcctctttcaaagtagttcttagtattaaattttgaaaaaagtaggtaaatcttaacctcctatcacacacgtagtctaatgacttcctaggatcctccaaccccaaggggacctctttcacaaaacctcccggctcccccccagtctccctagtcatcttagatgaggaagtcgagcgcaccccagggctgatcgcacaggaagagcacctgggctccagaccctagtaactaaacccgtgggcttcgaggtttctgccgaccctctgtcaaaggttagaaaggcccacacactgtccactctcccgataccattttacaggtggtgaaactgaggcccaaaaggggacagtaacttaccggaggtcattcggcgggtctgggactaggcgctcactagaggtgacggtgggggcagctccgcggtcccccagactcagactctccagcccagtcgtgcccatcgagcagggtccggctgcagcaacgagcccagcgccgcaacgcccagggtgtggggcggagtaagatgtgaaacctcttcagctcacggcaccgggctgcaaccgaggtctgaatgttgcgaaagcgccccagacgccgccgctgctttccggccgccccctcggctacagccgccatttccacgctccaccaatcaaatccattctcgaggaagacgcaccgcccccacacgccccgaccaatcgctcgcgctctggttgcgctggcgccttaggggctccagtgccaccattgcttttgctgcttttctggctttccctttcggacatgcgcgctcggagcaaggcgccctcgcactcagcttaccgcgcatgtacgttgccaggggtaacgcaggtagccaaagtggcttgtggagtggcgaccgttagtgaggcggttgctgagacagacgctgaggcgggtaggaggagcccgagccgtaagggaagccgtgatgagggccgtgttgacgtggagagataaagccgagcactggtgaggagcggggcggttcgcgaagagcaggaggtcgagtcctcgcggggagtgcgcgagccgctgcagcgtgtttgaggggggcagcgggcttgctgcctgggccgagggcactgaaccccggcctgggagactgcagggtcgccctcccgccccttggcggttggagaaactcccgagggttggagagcggcaaagggaggtgccgcgcctgaggtggtggcgggtggaggcggctcttccctcacggtctggccctgtcgctgccttggattcatctcacacccacgagacagcacgaagctgctcaagcttcacagttcttgccacatccacatagtacccatactcttgttttcttgacgtttttctctaaattgtctcatttattttaattatgatttcacattttacaaggaaactttattactccatttatgaaaaccagtgtcacttgctctaaatgttaagataaaatcagcgtcgcttgctctaagtgtaaaagtaaaacttaaagtagggagaaacaaaactgaacaagctgtagctagctattgttgctagggagcctttaaacctgagatctcgtttctctaaaactggagatgggcaggtatgatcagaaaggtgctcaaaatgagcaccaaacacaagctctcctaattgggaagtctgaaaaagaactgaaggggaatgactttgtcaccttttgattcagttatttaatgtcctattccattgttatcgcctaaatctataacatagcagtctgttttgtcatattcttacttatgggataggtcttggcctgactttgaaaatcattcagcattgttgtgaagcctctgttctggccactggagcaggttacttgtctttggttctgtcccttctgagatctttctctgtgtaaagcatgccgt

SEQ ID NO: 41091 - DNA, 473 bp, Homo sapiens
atcattttacttttaactttattataaacgtacctatagcacaagctgatgatagctggcaactgaacatttggcttcaatgtcagagtaatagagtgtggcaaactgcagagctcatgctcggcctaaaaggggcagctgctgctcagctcctgccaattaccaccatgcaggaatttggcctagtgtgctcagctcttcctgtttttaccagaagctaggaatctgggtttttatgtgaaatggcctaatttttaaatgttagcatccactctgaaaaaaaaacaaaacaccgtgtgggccaaataaaacatttgctggccgaatgcagcctgatttgctctgttttcaacccctggcacagaattttgttcatttctctcttgtggtacttccagagtctgttgagcataagagttaattttttaaatctgtttaattcagaagtctaataaacccgttaaaggcaatgg

SEQ ID NO: 41092 - DNA, 1584 bp, Homo sapiens
aaatgcattcagaatatggtgattttatcctgagagagttaatactacttctctaccttcaatggctgaggggaggctgacagttattctttaaattgtgtggaaaccaagacagtgaatggtgacctttactctggtaagacatcagagactacaggaagggccccagcaaaggaaatggtaacaagattgggagggcacaggcataacttggtgttgctgcctttgggaagccttcccttggtgttgctgcctctgggaagccttccctgactcaccctggcagagacagtgcagttgtcctcacctttgtattgacccacatctatgtttatgtgaaattcttcactgttgcggttctacttcttgtgcaatttgtcgtcattactggtttaggtggctgtagctgtcctccctgaggggctgaacaccttgaggagttcatcctggccacggtcccgtgccagcattacagcactggtgtagtactggcacaaaagaggtgtcagtaaaatgtctgtggagggaggaagggagtgaaattgggcagaggcttgtaggttatttccattaatggttgattctgttttcagctctatcagtctgtgttcgttgctagtggatacaatgaagtcactagatgaggagtcagaggcctaatccctctcagtgttccagttcccttatctaaaaggagcatgctactcactgtgtctcactgatacggttctggttctgaggttcaaaagagagaatggaattgaaagccaattgtataaatacatggagaaaggcctgtcatttgtttaacatattttatagcattttcttcatgtgaagcactggtctgtgtgcttacactggaatattaaaaaggcaaaatagaatccctaccctcaaggagcttgtggtcttaggagaaggtgggattaaaaaaaatataatattaagtactagtatttattgaatgcttgcagtgtgctaggcactgttctaaggattagaaatgaatttctatttgagctttatgacagcccctgaggtgtcaggtattattctcattcccaccctactgatgaaaaagaggtagaggtcccttagctagtaagtggaggaaccagggcttggactttagaccaggtgattgcatacagagcctgctctgctaagcactgctgaaggaggcccaggaggaaggagtttcttccagcttggggctccaggcaggcttagtggaacacagataacatgtgcacacgtcaaaatgtttggaggaagcgttctggaccaggggaaaggcaaaaaataacttgtttgatgttgcacttggccatgtatttgtgcactggagttaccttcttgattgtacttcgcaacttggcaaatagaagaatttgcttatgttgtctagacatacacttgctatgaggcactgagccagggcatctgggacaggggggagcaagccttaggtgaccagtgtgccatgggagaggcacagctcagatagagtcatgtgttgtgattgagacctatgaaagaaaactagattttcagaaagcatcattgttattttaaatgcta

SEQ ID NO: 41093 - DNA, 1046 bp, Homo sapiens
gaagaccaaaagaggtgtgtgtgtgtctatgtgtgtgtttcagcactttgtaaatagcaagaagctgtacagattctagttaatgttgtgaataacatcaattaatgtaactagttaattactatgattatcacctcctgatagtgaacattttgagattgggcattcagatgatggggtttcacccaaccttggggcaggtttttaaaaattagctaggcatcaaggccagaccagggctgggggttgggctgtaggcagggacagtcacaggaatgcagaatgcagtcatcagacctgaaaaaacaacactgggggagggggacggtgaaggccaagttcccaatgagggtgagattgggcctggggtctcacccctagtgtggggccccaggtcccgtgcctccccttcccaatgtggcctatggagagacaggcctttctctcagcctctggaagccacctgctcttttgctctagcacctgggtcccagcatctagagcatggagcctctagaagccatgctcacccgcccacatttaattaacagctgagtccctgatgtcatccttatctcgaagagcttagaaacaaagagtgggaaattccactgggcctaccttccttggggatgttcatgggccccagtttccagtttcccttgccagacaagcccatcttcagcagttgctagtccattctccattctggagaatctgctccaaaaagctggccacatctctgaggtgtcagaattaagctgcctcagtaactgctcccccttctccatataagcaaagccagaagctctagctttacccagctctgcctggagactaaggcaaattgggccattaaaagctcagctcctatgttggtattaacggtggtgggttttgttgctttcacactctatccacaggatagattgaaactgccagcttccacctgatccctgaccctgggatggctggattgagcaatgagcagagccaagcagcacagagtcccctggggctagaggtggaggaggcagtcctgggaa

SEQ ID NO: 41094 - DNA, 3381 bp, Homo sapiens
ctgccaccccatctcccaaaacacagggtcacagggtctcagaggcagagcagggcctccaggggggcccgtggatgtgggtggtccaaccatgaggactgcctacctgctgggggcacaggctgcagccacccatcccctcggcttcccacgcagcacctgtgttcaccgcccccttccccatctgtcttccagtgattcctccagaggctgcttgtttgggaagaaggctagatggctaagcaggtaggaccaggtggaaacacagcccatcactttggacttggggactctgccagtgcctccctgctccagtgtctgaggaggacttgagcataggaaggtgcgtgcctgctcagtcctgggactcgtggggtggagcattcacctggggactcgtggggtagagctggggctgggaccactgcctgcacctccatctgggagcaggatgagggaagggcaggaaaccactgggaggcgctgggtgggagttcgctctttgctcagtcaaccctgtcttgagacagccctactcccacttgaaaggctgagacagaaaagactgacaccaccaagtgtgggtgaggatgtggagccacaggggcaggggtgaaatgtgaaatggtgcagccactctgtaaaaccttttgctagtttcttcaaaaaaagtcaaatgtggctggacgcggtggctcacgcctgtaatcccagcactttgggaggccgaggcgggcggatcacgaggtcaggagatagagaccagcctggctaacacggtgaaaccctgtgtctactaaaaatacaaaaaaaattagccgggcgcggtggcaggcgcctgtaatcccagctactcaggaggctgaggcaggagaatggcatgaacccgggaggcggagcttgcagtgagccgagattgcgccactgcactcctgggacagacagagtgagactgtctcaaaaaaaaaaaaaaaaaaaaaagtcaaatgtagacacgtgcatcctggcaatcccacgtctagatattggaataaaattaaaacacaggtccataaaaacctgtacagatgcttgtcacagctccattgataatttctgcaatctggaaacaagccaagtgtccctgggctggtgaagaggtaaacacatggaggcctccatacaatggaacgaaaaggaacagcctcttgatactccgacacaaggatgcatctccaagccaggctggaaaggctccacgctgcaggatcccatgtacatgctgtttggaaaaggccaggccacaggacgggacacagatgggtagttgccagggctagggctggggctggggggagggactgactgggaagggccaccagggaattttctggttgctgggaatgttccatgtcttgttcagagcatttacagggtataaacgtgcaaagtttaccagacttcacatttgagatctgaggccacttctcctgatgtaaattataactcaatgaataaaagtttttaaaaacaacccagttccatactcgccagcctgtgccaggttcttagcctggggacagagctggggcggggcgggtccctgctttctgaccggcaggggtgggaggggcccaggctggggtgctgcgaaggcaacccagggagggcgcccgagccccgcccaggccaggccccaggctctcccgtgctcccgccccgcagagagaggccggaagcggccccggagggcccattgtccgcgcttccgttccggctccgcctcgtcctcccgcggccagaggtgcgacctctgagcccctggccagctcccagccggcctaggggggcgggggcacggggcggaggtcccgcagcccgtgctcgtcccgcctcgcttggagggagcaagggctccgagccctgggcccaggtcctgtgcctccgcttccccggctgcgggtacacccccagcttcccgagccccccgggccctcgctgctccacccagaagttgcggtgactgcggccccagcaccccgttccctggccgggcatcacttgcgcagcatgctgcccccagaggacagggctacagttagtcgcccacacctcattcacccccttgggcccttgagcgtcttagaagccgcagatgccaaggaggggacgctgcctcgcggatggtcacttgggagcaaagctggggactaaaggaaccagggacagagattcctgctctcgccaaattggccgctctgggccaggcactgaggacacaccgcgaagccggatagccaggtcctgtcctcagggccctgtccggaagaggactgggcagcctcgagtccgcggcaatgaatgaatgttcaattgcacagatggggaggcgaaggagggagggagggagggagggcagtcgcttgggcggtcattggaggctctgggaggctatgcgccggcaagaagcagcggggtggaggcagccctgcgggagtcggcgagggccgcgtggatgtgctcggtggttttgaggccagtggctggaggggcgtgagagtgggagaccagacttgaggggagtggctggagttgagactcaaatccaagaaggaaacggtggggcttggaccacttgcctactgagaaaaatggaagtcgggaaggctttagatctagtcgcgcttggtcacttccgtctccgggcctcagcttcccaggttgtagaaagcatcagggttggaggctctgaaattctggctcctctcaagccaagattagtatgacttcattttggttgtgcaagaaatgggcctgcagcggttcgcagaggcagagggacctaagcttgaagggcaatcaaaccggcgtaggcaggaacgtcgggagcccagaccccaggcagggagtttaaggtcttggacacagagggtgcgctcctcgaagcagccacaaagcggtgacagagaccaggcttacgttttgttttgaaataatttcaaagtaacagaaaagccgtgagaatagttccgagaactgcctcccttattaatgcagattcaccaagctttaacattctgctccccagcccttgcatattcaagcccccattgcaagcatcggagagtaagttgcaggcgcgatggcccttgaaccctaagtcctccaatgtgtattgcccaagaacaaggacattctattgcacaaccccagtggttttcaagatcgagtgatttaaccataatacaataatttaatctgcacaaccttactcaaatatcaccaaatgtcgcaacgaggtcttttatagcacatccccttcccatccccatccaggagccacgccaggatcacatttgtaaatttaattattattatttaagacgagtctcgctctgtcgc

SEQ ID NO: 41095 - DNA, 1366 bp, Homo sapiens
agcatcatctaggggatgaaaagaaccgttccacatagctgaagagggcgtcccagtgcttccagagaaaggcaataaaaaccacaaggaataaagtgctgaacgtcctgttgcgagtcttcatgagggggaccacacagttggctacagtggagacaaagaccaaaaggactgccatgacagccaggaggatgttgatgagtttgcccagaaggttccgggcagtggcattctccagcccttctagctgcaccacctgctgctgctgctgctgcagctccatcttggagatgcgcgtctggcatgcctccagggcctcctgtgggccagaacagggaagagttaagccttctgctcacaagtattctgagatgctgacatgccccctgggcaagccagatgcatcttgagcaatgccaatgattttataaatatgctggagccttgaatgaatgtaaaaggctagatgtataactcactattcaagtgattattattcccccaaattgccctccactgcattccagtgggatgagtcacaggaagcagtggccacacttaacatttatttagtctagaacattttaatgacaagaccacaaatatatgctcttttttcattgaaaattaatctaagttgcacagaatatatttgttcaacataaaaaatttcaaataggatagtctctcttgacatttccttcaattccaatccctgtccctgaggcagtactgtttgtgttcacccttttatgtgtgtaagtgtatgcatatatgtgtcaaggaaaatatacggaattattatttttatttcctatctgtaaactaaaaataaaatcctaagacccccagccaaatgaacggactccctcttggccaaagtggaccccaaagaaacctgaaaaagtgagttcttggcaatgatgggaaagaggctggacatgccttattatatcccctccctttttgagttgtggcacaaatgaccagcattaatgtgaaaatagagatcataagactgacagaatggactctttgtggcagtaagacatcaaattataaacaagacctaaggccatgccagacaaggttaaatctcaccctataaaccataaaatctcatcagtttttaaaaaaattaactggtgttaatgtggctttctttccaacctgactcaggtatagcatcacatgacagacaacagactccgttaacttaggcatttttgtactggcttcaagtctttacacaaagcttaactctttcaaccgactgccagctaaaaaattcctaaagcccactatgacttgttagcccctacttagagatggcccacctttttgggccaaaccaatgtatactttc

SEQ ID NO: 41096 - DNA, 3580 bp, Homo sapiens
caccagtagcttattccagaactggccagctcactcacccggatgtttgcgattcagagccctagaatgccagagccagaggggtccatcatccccatggccaaacacaagtgtctgggacacttctgtcaacaaatatttactgagagcctgctatgtaccaggcatgttcaaagtactgggaatattgtggtaagcaagacagagtgcctgccctcaggagtttgtactctaaggagtgggggaggcaagatgatttcccatatggagaagtaaaacaaagaagatcagtagaggtataagacagagtgccggtgatcgcctgccttggtctcccaaagtgctgggattacaggcgtgagccaccatgcccagcctagaaaaggtttaaaggatgagatcagagattctaggtggaaaaatgaatgtgagtaaagggctggagagaaatggatgataaatgtacagaataactagaatagtgcatctatgttggaggaaaaaatgggaaatctggaagatccgaagagttgggattctagaattgatattaaatgagcccaaagaagactactgagcagaggagtcacatgatgaatatgtgtttttaggaaaacgagtcttctcatagtggtgaagaagaccgactgaggtaggttgtatgtggagtcccaggaactaaagagctaagtagataggagaaaggttgaagactccacatttaaaaaacactagaaaagggaagaataaacatatgtctagcttctggtgcctagaatggaaacctctctgtcaggcagagggcagatgggtagctctcatcccaacagggaatgtactatcactcaggtagcatacatttaacattaacaccagcatgtgagtctcaagggacttcatactaaaagaataaaaatgccagaacaaactcacacatctaaaactatctcctttctttcttctttttaatcacatctataatatgtaaacaaacttttaaagaatataatgaatttctgtgtttaaggtaatttttatgttgcagcatcataaacattctcccttccaataattatgcaataaataattatatcctaaactccactgcttttctaagaaacaaggatttttttaaaaggcattgtcttaccctttttacgatgttactaaactctatttagttcttctttatccttgataggagtctctatactgccttcttttatgctgaaactcttcctgttattgaagtgactgaacaggctaatgagaaagcagtcctacttttgatggataactagggtcaaagttctctgtgactctgccttttcctttcatctgctgcccagagtacgtgatcaggaacaggtcccatccctagaattgattttccaccaaaatttaagttcacaaaatgccataagataatgttaacataatgtcttttcgtgactgtcctatgttagcccactcttctgtggtgttttcggtgtttgatagtttcatcattctctctctttaccagagaggggccagagacttttttaaagccgcattccaaagtgctggtctcttgggatttaagggaaaggttatatctggcaggaaattactctcctcaactaaggactgttgggtggcagggaggggagcagggtggtggtcaccagcctacatcttgataaaagcagacacatgtgggatctctgcatgtgtcccacaggctaccacacaacctcttagcctacaaatttcaggcttcttaggaatcttatttgatattaaacatggctcatacataccagtagaacagattaaaaaatagcagccacagcaacagtttaatcagtgcctactatgcaaattcatttcaacaaccccaagagggtagaaggtattatctgcattttatagatgaggaaacagaagctcagagaagttctaaagtgaattgcccaagggcacaaaaatattaagtagggcagcaaggatttgaatccagttttgactttaaaatccaagttcttaaactttacaatgtgatgccattttgaaactctacaaacccagatcaactaactctcctcataagtaagaaatcagagtcagagtgctagcgatccaaatcacttagcaaaagtgagctggaaagagctacactgatgtgatggtttggagtctgatgtcaaagtggagttgatgggagaaggaggagtataataaaaaattatgaacctacaattaaaaagataagagttggtgagggcatggagaaatctaaaccctcatatactgctgttgggaatggaaaatggtacaattgctctgcaaaacagtttggcacctcctcaaaaagttaacagttaccttatgactcagcaattctaccccagatataactgaaaagaaatgaaaacttatttcttctatacaaaagcttgtacatgaatgttcacaccagcattaatcatcattgccaaaaagtataaacaacccatatgtatacgagtgttcactgtacaacaatatatcatcttggctgttcacaagtcaagtatcaatattttgtatcctaatctgcttgtcatttgccacctggcaagtttctgttcactttcttcctttctccttcaatcgatggatgctcacagaaacattagaacataaaacacaaatgtgaacacagttttgcttttcactacatgtatgcatatgaagatcccgagccctaggcaaaactacaaaataggctgacttatgccttcactcccacaacatggacttccttcctactgcagaaacagttcacaggagcaggaaggctgttgttatcctttcctcatcttctcacctgacctttcataatatacagacactctttgacttacgatggggttacttcctgaaaacaatatttcccatttatgatgggcttaaatcaaaccattgttagccagggactgtctgtacaacaacatgtatgtcactctagcaagaataattcccaggactggggcctgagatattctctagcagcagcctgtgggctctgactcggctttgaccttacctgcctggccttttttgttcagacccagtatgaagacagcaaaatacaaggcatgcttatctttacaaataacatgaggcaagaaagaggtgaaacagcagactgaattcaaaatgatattgacagattcaagtgcagccaagactttaccagggattaattctatagaaatagggaactacttcctactgctgaattcaggtatcaagagctcatgtaatgagggggtagcttgttctttgtaactccacagaactaaggagtaagtcttacaaatagtttggtctttagttcaattttagaaagaactttctaatagctatgtctaacaatgaaaaaaactatcttagaaaatgagaccctgctaccagagatattcaaggagaggctgcttgtcagggatgttgcagaaataaatcctctattgaaagagatttaactagacctctgagatcttttctaacacctagagtttgattctttgtagtcagggaacctgttttccttttt

SEQ ID NO: 41097 - DNA, 2623 bp, Homo sapiens
tcctaaattgttacaacccaaagagaacctggacacttaaatatggcatgagcttaactatcagcaaacagaaagcctttgcactgtaagattattttttctaaaagcaagtatcatattttggtagatgaaattcatcccccactggaagcaaaacctgttctatctacaaagtattaaacacatcaagattttgtcgtaggtaaataattcataaataaatactaaacttgaaagtgttttggtcactaggtcaacacagtagtcaacttcctagatcagagatgagccaggggccttttgtgtcaaattactgatgaatgggagcctgggtgagtacacagcctgggaatgctttgacctgaagcattcctctttgggtgtggctcaaaagtttggagccatctctgagaaccaatggtgcttccctagttcggcaataggtcactagcacaggatagctgaagaaacttgtggagcaggtattgagagaaacaggaagaactaggtcccaggaaaaacacccacaggcaactatgggagaagaatggactatttcccaaatgcataccagagacccaaaatagcttctgccagtgtttgaccagagtagagagacacagttggggtagggagtatgacttgcggtgggagtttgaataggttcctagctgaattggggagagtggatttttttctccttaccttttgttaccttttttgtgttgaagcctgaaaagaagctaaaaaacactgaactagccttcagctgaaaagggaaaaagatatcagtcccccacaatatttcaagggtaggcaatgaattatcttaatgacaagaaaacagtaaatatctaaataatacaggaaataaataaaaactagaggggctttctgggcaacttgcagacttggtaatgacagctttctaacattctggcacaacccagatctttgtattcccctagaaaaaatggaggaggagggagcatttgttgagctcctactctaaaccaaacatcacactaggtacttccatatatgttatctcctttaataacttcaacaaccatgtacaataaatatcattacatttttacagagggagaaactgaggctcagatgagttatgtaatctactcagagctggcaagcaaattcaagtttgtccactccaaggaataagggttaattaattaatcccctccattcctctttagcggctaaacgctaaactgggatgagctcacccataaatctcttttatggaagattgtatacgtcatatttcctaattgggattttgcttctctcataaatgaagggctaatttgattcagtaccctcagtttctatttcaaacttattgtccaaatctagcctacatatcgtctggagattctcagatcacttttcagttgacaggtctcacacatagaataaaggggctaaaacaggtacctctgagcatacatctgagcatacatcattgggttatgtccaatgatggtcaaatcaactaaaattatatttaaacaaccatttgtttagttagaactctaacagcctgtgcctaattgggtcagcctagttactaactgttctactgcatgtgacaactgctcagggtgactgtctcctgtatttttgctcttatgactcagtgcaatttaaaatatccccgggtttaatacaaactttctcagaagccgatttccaatggacagtaatccccttcaaatacaagctttcaaaatggcattaatgctcatcaacacctggggggtttttagcctgccctacatgacactgctttatacaggctacagtagctcagtaggattccaggccagatcccctaagaaaaaaactaccaaagaaaccagcaaaattctcaattaatgttttcctagctctctcttattttcagtacattttgccacagctgaacttttccttttggtagcctattaatatatttacactcactacaggaacaaaactaatcctcagtttctagcagcaaattaaatatatgtaaaaccattttactgtgtgacctggcaaaagtcactttatctttctgagcttcagtgttctcaactgtaaataagattaatctagatatctaagggtcccttctacttctgaagtactgtgaacccagctgccactaacaaaacatgggatgaagaaactaactggacaagaatctgaagttggcacaggtctcatcacttaaaaaaatttctaaaccttgtctcctgccttccccaaatacatgatctcactcatagctgaatgcacaatggtaaaactcaatacctagtcactagtcaaaggctgaggtggagttcagatccaagctctgctacaatggcttcctgggctaagtgcatgtgggcaatgaaaaaataatgtgtcagtcatggtacaattatgtgggtgaagagagagagactgtgctctataggctttggaatgcttctgattattccagagttaggcagatggtcttgggcaactatcttcacttggagctactcacttgggtagacagcaatggaaacacattaagcgaaggacattattgagaagggattctgagaaggggaaataatga

SEQ ID NO: 41098 - DNA, 498 bp, Homo sapiens
atgaggaaaagcactattacagtaggtttcacatgccaagaaaatagagaatttggaattttatcataattgagatgaaaacagagttaaagaaagtagcaattcaaaaagagaaaaataaaaaggatttatctattcactgcttcttagaattgacttggttgaaaggttttgatcatcttaccaaaaaggcttacggaaggaacagaaggatgctgagaggaaaaggtcagtaaacagggaggagggcacctgccagtaacctaatggagtatatggagagttgtatttacaaggcttacataaccaatgagtcagcaaaaagtcaggtgtcaatggatctcttctgtggccactctaagcagctaggaaacttggctctccgagataggaatataccttccagtaacacctgcctaagttaggatgaggaaaagtaaactttaatgtttagaaaaaaaacataagaaataagatccaacttaaagcaaggtgatt

SEQ ID NO: 41099 - DNA, 2516 bp, Homo sapiens
caaaaccggtccctggtgccaaaaaggttggggactgctggtttaatctacactcactcactcaggtactaactatattgttttgatcatactgtctctactcttataagttaatgcaatcagcaaataaaatcaattaaaaatatttaaattatgttttatgccctcccccacctgactatcaataatggaaaaaaaggagttaacttctcttttactgttagtctccacccactattcctttagggctctcctatgaatcctttccttctgatcaccccactcaccctgggctagcattcttaataaaatagataagtaaactgaccttttataacctcagaacaaacagagatgtgtcaggggttttgaatccaagatatatagcaaacaacagaaaaagagggtacagaccagaggcacaaatctgcttaaaaagttggcatttaaattatcaaccataaggcataagagggtaattcaatatcaaacttcacagtgaaaaatctgtttggatcttaaatccaactgctcaatagcaaacaatatgaatgtacattaacttcagaatcaggcaaaactataaagaatctcctttgctttagtatttatctcttagaaaatatgtatcatttataagatcaactaaaaaatggcaaggtcaactaaaaaaaatggtaaaatcaaactataggctaagtttgtactcaggactatggatgaaatgtgaaaatggtggttgtgttgaataaagctggatcatcctccaatccagttttatctcagagatttgttctgctgatctggagatacaagtttcacactgagatatgtgtatattgctttacaattcagaaaatttccaagtccttgggaaaaatactttgaaaataagtagctgagcactaagaaatctttttctttttttttttttttttttggccacctagatccatcaagaattttttttttttaatttaataagtattccaggtggctctaaatcaaattcctatttgttatgcatgcctggcatcttcgaatttaacccatgtttttcccaagcagtccaaggcaaatgaaactcttgttcattgaaagaaacactgattttccagtaactatttcgcttgagaaagtgaggatgacacttactctgcaatgaagcagcccattacacacaagagacgggacactccaggatgatctgagcatgtccatacagctacagagcaccctctacattctgtccaaatagctttgggtaaaatgaacaactaggaaacacatattatgcttctccattattacaaccttacacaagtcagtcctaaaatagcaaatgcccctggctgagatctactgctgaaaaacgctaagtttcagcagctcaggctatttcctttgtctgtctattcaaccagcccccacttaaagctgcaggactaactaactataggattcaggatgagatttttttttttttttttttaaaagacagatacacacacatatacaacatacggtttccgaggagagtgagggctccatgcttgtgagagaggaggaggaggaatatgccgaataaccctcaggtttctcccagatttgaacatgttgtactgtggcatgaggtcagcagagacttactccagccctgtgaggctgaattctaccctgacaaagcagtatcactgtaatatgaagcaagaggattcagggcatgttggcagctgtacagaatgcctgttctagaaagtaatggcaattccaaaacaagagatctatggtgtcacatgagataatcttcagcccagttaagcaataagcacccaaaatactttgaatcccaaacacaggcagctcaaaagtttaatggtagaaaagaacttttctccttgaccctattttgtgtctggaggaaataatcaggaagaagaaaactggaagaatcattagttaatttgatctgtatcataaacaacatactgattctgatctgatctgttcctgggcactacgacctagctgaagaaccccaaaccacctctgtgactttactatggaacagggagaatattctggaaatacatttttggtaatggatatatgccagaactgaaggtgtgaataacctcatttttcatatgtgcccaaaaggcaaacctaatatacatcatcatttctttttagttcaagaatgtgtgcctttagaaattcttcctccaaagaagaggggcactaaaaaaggagccagaacatgaattttctaccaagagaaaacagggcaatgcagacattcctttacattttatggtgtcccttatactatgaaagttctattctagaccaaaagtgacccaatagttttataacaagtaaaatttagccaggaaacacaagacaatggagataaaagaaaactgtactacagcactaatgggaaggtaaatctataagaagttcttcaatagttcagtgggataaggagggataaggaataaagaaataaaaac

SEQ ID NO: 41100 - DNA, 2138 bp, Homo sapiens
caatctcctaatatacagagaaaaaaatgtatctacctcctggaacaaatcaaagttttgttttattttaaagcagctatctgatatttatgccctggattttttttttttaagaacagaataagctaatttaggaattcacacctttcgtagagatgcttatggtacaggtacctctgacggctaggctctaccaacactaacgtgtaacgtgtcacaaaagccaacgggcgttgcgggggccgggggtagccaacagctcaagtgggctgcttcactccgtggcagattcacctggggattcctcaccaagaatgttgttaagggacgaaccaaaccaaccacaaatgatacccctttaccgaggctgaaaaagcagagattcgcaagctataaacgaatctctggccctttagggaaggtgcaactcgctgcacctctttcccctatcctacaggggttaacagggggcatcctgaggccgagaccaagcccagccagctcctcctcacatcccacctcccactacatattctccccagtacgccgggctccctcctcccctcgaaagacagttcaaaatcaaaacaataggtgcaaaactggtttcaggtggaaatggctgagtcctggtggctaacttctgggacgccatggcgatcgagggctcctaaaaccccagattccgacgggaaccggctcctaaacagtccctcgggcctcggcccgacttctcacacgcccctccctcacctcggccctgggatgctgggaagggaacgaggcgaggggctggaggggaaccccaggtcaaaatgacagcggaatgagccgggaaaggaaagaggccccgtgggatgctgggggtcgagtcctaggcccggggcttcaacctcgaacgggggcgacggcaggtcccagccccgacaggccgcgagcgggaggccaggcccgcgtccgctgcgccgccaggccacgctccctcacgactgtccccacccaccgcggagggccgtgagggggccgcgaccgccgccagcgtccggggcgggggcgctcactcaccggcggggaggggaggagcagccggcgtctccgccagcgccgtcgctcgagctcaagcgcctgctccttccactgcggccgccgcacccggtccatcccccacaaccacccccccctcccgaccctccccccgcgccgcctcagccgccgccgcctcagtcaccgccaccgccgccgccgcctcagccccggcgcgggagggcgaaccggcgcgagagagcgagcgcgcgcgcgcccccgccacagccgccaccgcccacaacctccgcccccggccggcggcgcacgcgcaagggagcgggcggacgggcgcgcgcacgccgcaggggcggggatgggccctggaaggcgtggcccctcccctagcccgccttcccacgcggtctctgggctggttgagctgcgccgctgcaggtagtgctgagttgctccaggtaagctcctcctctcaaaaagctctaggaaccgagccaccctcgccctaggagcaacgcccctgagtaatatggggtttcgtcggatttctgcccgccgctctggatcacacgtttgttctccctatttgagtcgcaaggccttccttcattccacctagcaggctgcttggaaaagggcagagactcattactttgcaccaggtattaccactgaagggattgtaagcagccaccagcccatccctttataattcccattttcctaatttattttatttttattacttatgtaatgaggcttcttccgtgttcaaggagctgggagtaccatatggggtcaacggagtccctggtctcatgaagtttgagatctggtggagaaggaaaacattcatgggagaatcagacaaaattaagttttcaattagtaaaaatcttctgagaggtatatggtactaagagaatctttatgggggaattgatttagttgaggatgaagagggtagaatctgaggaattgagttgggaggagttagttgctccaaggggtgaggtcttggcatggccagaatggggagcgctaaagaatattgaatgtggagtagactgcgagtgtgggaagaggtaggcgagaac

SEQ ID NO: 41101 - DNA, 546 bp, Homo sapiens
ttttttacttttttcatgatcatattccatctaatccattcattcagcaaatcttgttatatccaggatctgatcatttcccaccacctcatactgctaccaagcgaccagctcttgcctgattatttaatagtcttctaactgcttctgccctgctcctcttcagtctattctcaacataacagccagagtaattctgttgacaactaactcagatgacatctctcctctactcggaactcttcaaaggctccccacctcactcagagtcaaggtcaaagtcctttacaacagcctacaaagccatatctaactggcccctcttactcctccacctcgctcactttgctccagccacaaagacctttctgctgttcctcaaccatgccaaacatgtttcttcctcagggcctttgaaatgcctgtttcctctgcctggaatgtttttccacaagatatccatatggctttctctcacttttttcaagtccttcctcaaatgtcattttccctgtgaggcattctctggttaatttatttaaaatt

SEQ ID NO: 41102 - DNA, 632 bp, Homo sapiens
agatgcatctataaattaatgcaaaaataaaaaacaaaagatgtctgaaaagaaaaaaacaggtacagtaatttccaaaaataaccgggaatttgaaagtttttcaaagtagaaagtaccctttcctccaaaacatatgatagcatttgcagaaatatcaatcctgttgccacataggtttcttgcattttatttttttagcaaacaaaaatcaaacagcaaacctttcctagattattgggaaccaaaacttaaagtcttttttttttttttgagacggagtctcgctctttcacccaggcctgactgcagtggcgcaatctcagctcactgcaagctccgcctcctgggttcacgccattctcctgcctcagcccccctcccgccgcctccgagtacaggcacccgccaccgcgcccggctgattttttgtatttttagtagagacggggtttcaccgtgttagccaggatggtctcgatctcctaacctcgtgatccgcccgcctcggcctcccaaagtgctgggattacaggcgtgagccacggcgcccggcccttaaagtcttacagcttctgctgcctcacaagaaagtctggacacagccaagctttctattgtgcagaatagtc

SEQ ID NO: 41103 - DNA, 1568 bp, Homo sapiens
taaatgataaactttgatgtgtcttaagagaaatcctggatttctgggcctgaagttcatacctgtatggttatagaaaccataaataaataaataggcagagataaacataaataaaaatatatgtatgaggaaacataaaaacacgtaacaatcaccaatcactttgtgggtgtgcctagagataagaccagagtccaaagaccacttttcacatgtttcattaaaataatgacaagcaaatcataaaatgaatgaactacatttctttaaaaaaaaaaaaagacaatatcattaccacacacgtactatttacaaagacttcaaaacagaatccctgatttctatcagattatattatagaaataaattatatatattcagtgatattatatatattcagtgatatttctcatgcagaaataagctttcagaattaatttggggagctagaaacaagaatctgtatcacctgattttgagtgagacaggcaaaacaggtaggtgtgtataacacacccacctcatcataaagaagatgtatatcctaaacagtacagtaactgggaaaacaaccttaaacttcagtaagttagtatgctaggttctttcaacatcaaattatctagcaaaattaatctttttcagcagcaatagattgttgtatgctaaaactgacagtcaaataaccatatttgtcagagaaacttcataaaggcctaaagacactagatcagaagcacatacttgtaaacattagtcttattccaagtcgaatgtagtattcctaagaaaaccacaaaattccatcacttgataattctgatcatttcaaaagtgagagaacacacaaacgttgattcccaggaacagagtaactagaaatattatcaaaatgtacacaaatagttcaaagagcaaagttcatacttgcaattctcaaacaaatcagaaaaacaagcagtattatagtcattaacttaaaaaatatctaagtggctaatatttggacaataaactcttaccagcataggctagtctaacgatagtagcatcatcttgggctaagtgggctatgcctggcagaatgtattccggataaatattgatatcattacgaggaacctctttgacgagagcaagaactttggtcaacgtcctcaaggcttcagccctcaccctaggaacagagtcattgctgaaatgcaaaagatatggagtaatacgatccaaaaggatttcaacacttaatcttggagccaaatgaagaatcagttccaaagcagctagtttggaatcacagtatttaagggtctgtaggcaggatgttataacagataccaagataaccagcccattttccttaggctctccttcggctttttctggcagatcatgtccacagagattgtgaataatgttgcccaaatccttccgtataaccagaatacgctcatctgcagaaagaaacgtttccttggcaaactgggccatgtagggctgaagaaaagtgtaaaatatttcaggaaaggcattgccacgctgctgttttaagtaatcttctgcct

SEQ ID NO: 41104 - DNA, 1368 bp, Homo sapiens
gcagtgagtggagatcccgccaccgcactccagcctgggtgacagagcgagactccgtccgtctcaaaaaataaaaaaaaaaaaagaaaaactgaaaactgaaaaggtcaaactaagatctaaaaattcagttaactcctggacacttcctgcctaattccagtgtgccctctcacccagctaaaagaaggtgcaaacttcgctggtctgcaacaagaaaccttgccacagatgttaaagaaaagcagaccaaagtatacactagctaaacgtaccccagggttctgctaactcaggttttgcaggaaataaatgccacacatatacacacacgaccttgagcacacataaacatttaccctaggcctcgggaaagtgtcaaaatcgttcagaggctcacaacgaggtcatagtagactacttcggggacgggacgggaaaacgcgtcagcagcggggaagttgtttctacgaagggtctttcttcatagacaggagatgggctgttggtggaggggcgcagaaaagtcccgatcttcaggaaccccggtggtcctgggaggagaactgggaaagctctcggggtctcagcagagagaagaagccacgctaaagagtctccacaagtaccccgggatttgacccctccagccccctaacctgccctgggggacatgcgttcccgggcctcgtcttcctctagcgcggatcgctacacccgtccgagccctcctcgagggcctcaccaccgggcggggggagatggaacccgggagagaagtgcagaccgccagtcccaagaaaacactacacttcagctgctgcagccccagcaaacgccgaactcccgggaaagcaaccggtctgacctcacttcctgtcgccgagcggaagtgacgaaaaagagtgagccttgaggaattgccagggtaggaaaccggttgctaggaaactagggaaggcgtggtcttactttgggcgagtctacagggagaaaatgatgctctgacaaagatctattccccttcctgctcttctacctttcattcacgaacgctgaggtttctgacatcccctagaatctgctcagacacgccttcactcccaggacagcagaacagagttaagagaactcaagaatatttaggaaaactaatatatcccaagctggatttttagagttctggtgagatataacttacataccataaagttcacctgcttaaaatgtacaaagcagtagtttttaatacatctatcgagttgtgcaatcatccctataatctgattttaatttttttttttttttttttttttttttttttttttttttttttttttgaggctgagtctcgttctgtcgcccagg

SEQ ID NO: 41105 - DNA, 1119 bp, Homo sapiens
cggagtctcgctcttgtcgcccaggctggagtgcagtggcgcgatctcggctcactgcaagctccgcctcccgggttcacgccattcttctgcctcagcctcccgagtagctaggactataggcgcccgccaccgcgccgggctaattttttgtattttttttttagtagagacggggtttcgccgtggtctcgatctcctgacctcgtgatccacccggcctctcaaagtgctgggattacaggcgtgagccaccgcgcccggccgctagtttttgtattgtttgtagagatggggtttcaccatgttggccaggatggtctggatctcctgacctcaagtgatccgccgcctcgacctcccaaagtgctgggattacaggtatgagccaccgcgcccagcctgcctgattttaaacattttcattaccccaaaaggaaaccctgaaaccattcggagtcactccctgttctcccccatttctcctcccccttccagccctaggcaatcattaatctactttctgtttgtatacacttgccttttctggacattttatatataatatgtggtctttgtgactgactttcactttgggtaatgtttttgaggattatccctattgtagcttgtattagtacttcatttatttgttgttgcaaataattttgtttacccttttgttagttaatagacatttgagttgttttacttttacgttattatgaataatgttcctatgttcatagcattagtctataagtctttgtgttgccatatgttttcatttctgttggatagatactgaggaacgaaattgtgggctcatatggtagctctatgtttaacatttgagaaactgccaaactgttttccaaagtgcaggcaccattttacattcccattagcaatatatgagggctctaatttctccacattcttgctgacactgttattatcttctttttttattatcctggtggctgttaagtggtatctcattgttgctttaatttgtatttccctaataaccaattccgttaagcatctttcttattgtgcttgttttctattcatatatcttctttgaagaaatgtttatgatttgactatttttta

SEQ ID NO: 41106 - DNA, 2511 bp, Homo sapiens
agaaagctgtccagaattttcaatcctagtctagtaccacttacttgggaacaaatatagaaacacaggcaaccccgtccgttaattctgatgttgaacgtgtggttagagagcacactgcgatatgttacaggacctgagataaaaagcaaatttgtaaagtgtctaagtgttgatggagaaaaacacatctagcatatacggaaattttcttttgagttctctgtaggatgatcaccaactcagtaggtgaagccctgccctctagtggttatgggtgtgagaggacttctgttcaacattatatgtctggctcaccacggtttattaaaaccaatcgttcattaaaaagcacttattaggggtctgggtaagatgccgagcaagtgaaatgtttacgtgtgaaaaggcattgacactggacaaaggtacagctgctaaaagaagtgctcgttcattggcttcgacagctgtacgactggtttctaattgctgttccagcctctccccagttccatataccacaaacgaatgaaaaagattagctctccctggagctctctgaggctgaaccttgctctctcattacacatggtaactaagcacaccccttaaagaattttgggaagtcgccccgcgattaccggctcccccaagaaccaagcagtcagtgcagggttttgcaagtgagagtgcgagactcgggaggctgctcacggtgctccagtccctggcaggagcatggacacctcgccccttccttccgtgggcctcaacgttgcctgctgagattgtgactgccaccccgacgggagcagcttcccctacagactttgtagagagcgcttaaacgcctcggggacagcggccatgactctcagcttgggccgaccccgcggccgccccacgggaatgcgtggccgacacggggcgtgggcgaatctccgaccctcgcgttcagggggtgcatataaacgggcggacaccgtccctggggtaagggaggcgccagcaagaacaaggcgggccaccaaccccgagcgacctcctaccggacggatccaaacccaaacattgtccattccgggccgaagtctcggccttcacttcacttccgccttcccagcccgtgaacacgaatgcgcctgcgcgcacctctctcagcggaagtaatagtgacaaagctgggttcgcggctggcccaggagtgcggggcgcgactgggcggccggcggcggggaggggcggagcgcaggagtcggaggcgggagcagaccagcacggcctcgcggagccggcccggcggaccgtgacgggtcccctcacctcctcttctctcccctccccgcccgccctctctccctcccttcctccctcccgctcgcttcttctcacgccgggagcaggctcccgcctcgcaccgctgccccgcgagcagctcctcttctcccgaggcgcgcggggcgcccccgcgagccccgcggctgagaccccgcagcctggaggagggctgtccggggctttgggtgggtaccagtattacctcctgcccccatttctagaaacttccaggttctgaaggaaggggaggttcgggtatcccctggatgggggggcatctctagggcgccgccccgctggcgtgagctggggacgttgcgggcacacgacggggcgggtgcgggatcttggggaggggggctcccgagatagtggctgggcggggaactccttcctcagcctctcgtcagcgccgcttctcctggtttctcttgcagatgctgctgctaggggtggtgggagcagccgtgggacgcgtggccgggagcgggggtgacagcctgggattccgggggcttctcttccttgtcctcctcctctcctctctattcccagtgtggccgtggctgacactaaagactttgtagccatcaacccgagtgcagtttcgatggaaaatgaaggtaaaggcccctggccgaccggttgcaacgcggagttgagggtgtggtggtttgcttttaagttgtctttgtttttccacctttttattttcgtgagcttatttatttactgtgtatgtgaagtgtccaaggatttgcttacttagggtatccagcttttattttggtaacatggggcatttgagagattgaggttctgtgggtgactgagcttgattcagctttcttgaggaattcctgctctcttcagcttagggaatgagagggaagttttcatttcagatagcgtctgtgcatgtttaaatagctatttgaaaggaattactcgaggggaagtggaaatgggggacaaggggatggggctgcatctctgtatattggcgtttcaagcctcgatgtggtgtgtggcaggattcatttataagaaagcaagccatgttttattatgtctagcattggggaaaaaactcattatttttcaattcacaaaaaaaacccagtgaatttaatgaaatgttatgagatgagtgcttttcttaaagttcca

SEQ ID NO: 41107 - DNA, 1316 bp, Homo sapiens
aacttaccttgattactgaattttattggcatccatttacattttacacttatctcaccctagttccagccctgtcagtatctcagaaccttatcctgtatagtacttatttctttgcaagatagttttgtaaagcgtccataagcagagactgtgtcaaggcgtcctacgcaaattacaggaccttgcacagacagttgcatagagctgcataggggaaaggcgggcaaaaggtctgacctaagtcttcaaacacaggccttcatacaccgtgccacctcggccctcacaacccgccgcccggacctgcagcagagcccacctactctgtcctcccagaggagtagctcctccatcagaagcccgctagagcccagcgaggactggctcctgcacgtgagagtccaatctcaagagcgggaatcggaagtctcccggtgtgacgtctctgggaagtacagttccgtgatgccggtggcgccagactgagccaaggagcaggtgttctcgggcccagaggcgctaagtagctaaagagggctgggacgtacgttccgaaatggctgctgtcaggctaggaaagcttggcccgccggtcctcctctgctttctccgcctacttgggtcggcgaacacttccgccttggtgccgcctcgccccgacttcccagtatgccccgcgccgtctccctggccacggttccaaacagccgtggcccgcggtgtctggcgctcggtgggtgtggttgcccctagtttgaggcctgcccgattacccgcaagacttgggcagccccgggcgccgctccgaccacgacagggaaaggtaaagcgaactgtcctccttggggctagccaggctcccctgcgagggggaaggtaatggtttcaagctgcccgggctgggttccgaatctctaggacgccatggctgcgatctcctcgctttcctggacatcttacctccggatgtactccagtctcagtgcccctcaataaacgttaacctgctttgccaaaatgtaaatgtttaaaaaggtgaagaagcaaggaattgttcgttttaccttaaggttaagatttactttaaaggtagatttgtgctgtagcagaaactggtgacaaattgccttcctcttattacctgggaagataactactggttttcaacttgtgataaatactccttccgttgtcttttgcccccagccagatctgtttcaccgagaacgggtagtttgcacaaggtagtaactttctccaagttcccatctagctttcttaactaaccttttttctctcctttgggcggcagt

SEQ ID NO: 41108 - DNA, 1211 bp, Homo sapiens
aagagcagttgctgatcacgatgggaaaagaacctactctccagaaccatctctaggcaactatcaaaaagaagcagaagttcaagtggacaaatttatgtgaaaattcatttaacatataagctgaactctattatggggaatggatacaaaagcagagctcccatcttgactttcaattcctcatcagaagtactggcttctttagagagtagtaagcatggctgcctatgcttggagtcataagtgttatttggactataccctgagataagcttatagatcaagtttggctcccttgaaaagcatttctctcatgtgcgccctcagggcttccagcaggattgagtcaccctgacgatgaccggggagaagccgtgtgctcttcattattttcagctggaggacagagctcagtgcctgactgcctagggtctcatggactgtaggcagcctgccagtgaaggtcactggactctagcctacaacatgctgagctacagcccagaagccagacatgcctgtcttagctgacctgtttttggtccacttttgcccttccatgactaataaggaagatatgtgtgtatttcatacacacacaaggacctggattaaaaatccaaaaagtgattctcttctatgatttatttcaaactcatccatagataattcaagatttgtattcaaaataaacatagttttcacagttacaaaataaatcacctattttatcttttccttatgtaaaactttcttattgaatgtaacatatccatcctttgataattattacttagagccagtaatatttggttaatttggtgcctgttgggtactagtactgtgcttagtagtttaagggccttcattggatcttttcactaacttgagagagatagagtgaaagagagagaaagagagagagagagacaacagagaaagagagatgctcaggttaggtaatttgcttagtcactcagctgcaagaagcagagttggcatttgaaactaggtctgtcgcattccagaatccatactcttaaccagtgtctatcagaattttcaaccatggaactatattagatttgcttgtgaagctttttaaacatagacacatttaaatatactgttaatgaaaaaattattgacacttattgaaatggcaaaaagactgtaatcaggactattttgataggtatcaacaatat

SEQ ID NO: 41109 - DNA, 1532 bp, Homo sapiens
tcaagacagttgtcagaccatggcgcctctccatccccatttccctaggataggccttggtgtctgaggccaaccctgcctcatttcctcctaacccccacccaggccttgtgctttgtgtaccaccacacccaaccaaaggtagttattacttctttggctcccagcactcaagtgagcgccccagctctcccttacctgctggcacactccagctgactccagattctgacgtaggcgtttatgtactagcctttctccaggttcagggcgctgccacaccttcagccccgccccgccccgccgcaagcccaacccagaggttgcttatggtttccctaaggttcctgggctctggacatcagtccggtctgcaagccccgccctgattggctgcctccggcaccggtcgctgcgccctgacctaaggcgcccaggttcctcccccttatccctgcagggctggtgccttgcggcaccgcccacgctcggattggtccgaggtgagattcgcccttgtgccctcgtaggccttcggaacagcggaagagcagtgtcgggccatggccagggcccgcaggctggagctggccgaggccctggcgctggggccaggctagaggcatgcctgctatgcgctcctgcacgcgccggaccctggaattctctctggccgcctccctctgcgctacgccatactggtgaggagggcgcgcgcccggccactctccgctctggccttgcaccttccttgcggcgctactctcgggtgtccctgccaatcccagcttcctcctctctcagatgcagatgcgctttgatgggcgcctgggcttccctggcggattcgtggactcgcaagacagcagcctggaggacgggctgaaccgtggtctgctggaactgctgggcgaggcggcggccgccttccgcgtggagcgccctgactaccgcagctctcacgccggatcaaggccacgtgttgtggcccacttctatgccaaatctctgacgctcgagcagctgttggctgtggaggccagcgcaacaggggccaaggaccacgggctggaggtggggccagtctgggaccctgccccatatcttattccttttccttccatgtcttcctttgcctcagcaactctttttggattgaggtccccgtctgtcagaacttgccctcttccccattttcttggtggagttgggatcttggtcttctcttattgaatggtactgccaacctaggcttcctgggaagatttccacccacctcgccctttactgggctctggagagatttttctagaacacacatatctacatctctctgctgctctctattgataatgtgaaaatggccaggcatctaccctagtcccttattgttgggcctctgtttctcttaggaagaagatatggccctaatacttaaggccctaatacttaaggccagggagacagattgtatatggaggtagttctcaaattttgtcaagtatcagaatcatctctgaggcttataaaaa

SEQ ID NO: 41110 - DNA, 1566 bp, Homo sapiens
ctcccagcactcaactgagcgccccagctcttcctcacctgccgggacactccagctgactccagattgcgacgcaggcgtttacgtaccagcctttctccaggttcagggcgctgccacatcttcagccccgacccgccgcaagtctcatttcctcctaaccccaacccaggccttgtgctttgtgtaccaccgaacccaaccaaagctagttccctgacttgctcttttggctcccaggagcctttaggtaccggccttgcgccaggtttagggcgcggccacacctctagccccgccccaccgcaggcccaacccagaggctgctttcggttaccctagggttcctgggccctggacttcaacccggtctgcaagccccgccctgattagctgcctcccgcaccggtcgcggcgccccgcccccaggcgcctaggttcctccccttatccctgcagggattgggccttgcagcaccgcccaggctcggattggtccgaggtgagacccgcccctctgcccattgggccttcgggacagcagaggagcagtgtccggccatggccggagcccgcaggctggagctaggcgaggccctggcgctggggtcgggctggcgtcatgcgtgccacgctctcctctacgcgccggaccctgggatgctcttcggccgcatcccgctgcgctacgccatactggtgagaagggggcgcgcccggccactttctgcctgagccccgcaccctctctggtggtctcctctggggcgcccctgccaatccccgcttccccctcccgcagatgcagatgcgcttcgatggacgcctgggcttccccggcggattcgtggacacgcaggacagaagcctagaggacgggctgaaccgcgagctgcgcgaggagctgggcgaagcggctgccgctttccgcgtggagcgcactgactaccgcagctcccacgtcgggtcagggccacgcgttgtggcccacttctatgccaagcgtctgacgctcgaggagctgttggctgtggaggccggcgcaacacgcgccaaggaccacgggctggaggtgggaccagcctgggactctgtccctttcccaatttcctcttctcccaaagctttctctcccccaagaaagcatccctggagaaaagtctttgcccctctgaccttgccctctccccagctttcttggtggagttgggatcgtgatcatctatactctgaattagtactgccaacctgggctttctgtaaaggtctttcccaccctttaccaggagagatcctttctagaacacactcatccatgtctctctgctgttccctattgacagtgtgatagattatcacattatctaggtgtggcaacctaggttttattcttggggtttgcttttcttgtgtaggagatgtggccctgatatttcaggcagggctagtagatagattatgtatgaaggtggttctcaaaatttggcaggtagcagaatcatcggggcgtcttattaaaatagcgatttctctcagcattcctgcattggtggtggggcgggggga

SEQ ID NO: 41111 - DNA, 1568 bp, Homo sapiens
acatttaaactgttagtcgttaccctggagaaaaaaattcatcttctcctcgcagataaacatattccccaaaaaacagtcctacctatagacatgaaaagccactaacccatttggaagtgtaccttaatagttttacattcagtggaggtggcagaaggtggcatgttgatctttgtctaacaagctcacctcctccctgcaatgacatggcctaggttcagagaagtgaagaaactgggtgtgcaaagttaaaagatccacaaaaggcatgacctctgaacaggtgaacataccaagaaagaccttagtgggcggaggtcaggaagaaggggtgtaattcttgcatggagggtcagaacagaagtaaagctttctgcagtctactctccttttgtagtcagataaattcaggctagattcctaattttccacttattagttgagtgactttgggcaaattaactcacctccctaaccttcagttttatctgtaaaccttatgatagcagtttgctcccgtgaggctacataaggcacctaatacacttagcagagcgcttagtacctggcaaacgctcactaattgtaagatatgattgctgttaatagcgttcgctgctagtggctggctcataagcgttttttaaaaatcaccacttcaatccccttagaacgtgcttccttaggttaacggcccttattcttctgtgtcccacgtctcaacagagccccttcctcctccacccaggggaggcccaactgcaccaggccattccactgcttcaggacgcaactgtgcaggtaggacaccctcacaccttcctacctgttccccgggcccagggcagcacccaggccgtccccgagtcgacccagcacctgggcgccgacctgcgtcagcagcctccaacccggcatggattagcccgggaagactcgactcacgacttccgggcgccctgccgctctgctttcagggagtccccacgccaccgccacgtggacgcagtagccgtggggaagttttcgcaatggccgccggaacggtcgccggccgatgctctctgcgacggaaagaaagccgccggacccacttccggtgcgttttacaatgaactccgggcactcgagtcgctccccggaaactatagttctgcttccaccgttgtcctactttggatgtgagttggagtaggtaggggtgggaagggactgactcgcctctccaggggtaaaataaaagggatgttcagagtttaaactttagaagaataaggacagacttcctgaggacgctaaggaaaatgaagacacttctaaatagtgcccgttgtgaggcaatgcattatgctaagcagcgcttcataatcctatatttgttaatcataaaaaacggtcctgaaaggaagtatttatttttctattataaatgaggaaactgactcagaatttaggtgctggtccaaaacaacacatctggcagaggagcagagttggcactgaaacagggttggcatgtgttatcaatagactacacccatagaaatgatgtatgccttctaggg

SEQ ID NO: 41112 - DNA, 469 bp, Homo sapiens
cataacttgtgttatatttccactggatggcactagtctaaagtcctgctataagagggtcagggttgcagtctctccctctgaaggccatgtgccacaaaggtggcagctcttctccaggcacacttgcagaaggttgcagtgctcccatggcttcctgctttaagtcctgacttctggcctgcagcctgcctggcccctttccatctggaaagctggaagatgactcagcagagatgggaattggaggaaaggtgctgtactcagcagcacagggaagccttggaaagtgctctggggcctggagaaggatgacccattggaggtcatcattatttttagtcaacatgagaggcatcatgatggcctttactggtaagaggaaagagaagcagattagtcagatgcagctcaggctaaacagaaaagaactttcaatataatcctgcaagatgcctaacatttatag

SEQ ID NO: 41113 - DNA, 2777 bp, Homo sapiens
aggggacgccaagaaatcacaatttcaggactgccatgaagaatgagtattcaactccttatcagagacctttaacccttatacaataatgtatccatgcaggtcaccctacactgcctctactctgaagtctgcagcagaatcactattttttttttaatcactaatttttaaactgtggtctttacggctcagatctgggagtggacattgacctttcttatttaaaccattgcccacagataacacataatttctagccgaatcctttagtcccaatatcccctcttttcactgccctgacttccctctcaggtgaggttcaggaagatggttatctagagggcacaggttctgggttcaaattacttgggtgcaaacatgaaatccactactctgaggctgggcctcaacttatctgcaaaacgaggatgattcgtatctcagagagttgaagattaagcagctttaagtaaacttctaaacacttgatccggacacaataaatggggctaccagaactatctttccagcattcccacctgcaaatgccttaggcgtctctgagaatttggtctctgagaccttccagagcatccataacttaaaccctgctctgctgtcgttcaggacgtctcaatagtaaatgaacctgctggctcccaatccagccaaaccaggagataggctgaggcttcagactgcctcgcagatgctccatggcacttgacggcaagagctaaaaagaggtgatttaaaacaagatttcctcggacttaaagcttaagtaccgggttgcgaccctactctccgcaggacataagcggaggggcgcggccctaaggcacacgccggaggggcgtggtcatgggcacccgccggaggggcgtggtcatgggcacccgcgcgcgcccaggggcgtgtccttttcagcacccaccgaggcgccagccccctgacgcgctgcgtggaatccaaatcccacggccggtgtcgttactctgcgcatgtgtagctgctgggggctggccggaggaaagcagaatttcagggaaagaacgatcgggacggggaggacggggagggcggggcagaagacggaagagttgaaatcagctgactgggtctcgtgacagcctgggcggtggcgacgcaggcgtattagagcgcgctcgctcaaagcctgagcgaagatggcggcctccagagtgaaactctgagaggcagagggaggaggcggagggggcggggaggcagcgccgcggcggcaccaggaacccgcggcagcggagctgcagggccccggcgggggaaaggggaagtggtgagggtgaggaggccggagggcgcctcatcccactctggaagctgagccggcggcgggaggagctagggctggagcctctccagcctcccgcgaaggtaaagccgactccgggcactgggctctggggctctgccttactcccttcccacgccgtggggactttgtggggctcagggcagggaaaacggggtggtcttggctgctgcagcctgcagctgctaaggaagcagattacccttcccccaggctgctggtctggttcctttcgttggacgcccccccggctttgagtgacattagctcagggcgctgccctgtccagccccaccccttttttttgcttgttttatacctagtacgctcctccactcgccttaacatatccttaccccacaggctcttcattcccttgtgggttccgccctcgggattcccttccagtctcctagtctgagcacccttcctgctggatgccggcaactcttgtttccttgggtcagcgaccctccttccgaacaagtcctgcagactgactttctttgctttgtttcgttttgttaggaaatgagcatccgcgtcgtctgttctccagtactttttctaaaatcattttctcccctaaggcttttccttcctgcaaggcagcttattcacgtggcctttcctccgctgctgtgattttatctttgaatgtggcctttggagtgggtaaagtaggacttagacgctcagtgaagtggctgttaatcacttgatacttaactatgtttaagagtgccttcccttaaattttctccttttgtagcgtgttccgttaaccacgtttgtcttaagattgtttcctgtgtccgttgcttagaggggggaaaaaagtaaagatttcaccctaatgtggcggtggtctcccaaagtaattatttctcattttccctctgcttttcccttttacgttattctgatttccctcaaaaaggaggttctgtacctgatgctgttgcgtcctctatgaagggctttatagtgtacagttatgttgagccttttgtaatacagtgtcttggggaaaaaagtagaagttcagaacctgcccccagtaattctttcttactatattttctttctcagtttatggacttgataggtttctaggtttgaaactactgcctgcagggaaaattacagtgataaggttttataatatattaccagtactttgagtttatgggagtatgaaacagaatttgccttaaaaaaataaatttatagaaaccacttgtcagaaattcggtatccagaacacagttctttgatttttggaaagtactttattggcttatctatcatataacgtaaaaccttgttcacattttgtgtaatgtgaaacgctttttaagctactatatctcagacttggcttgtgctgttagtatcacaatgcattcaggcaaca

SEQ ID NO: 41114 - DNA, 774 bp, Homo sapiens
agctgggactacaggcgcttgccaccatgctgggctgatttttttttttttctgtatttttaggagacagagtttcaccatgttgcccaggctggtctcgaactcctgacctcaagtgatccacccacccaggcctcccaaagtgctgggattacaggtgtgagccaccatgcctggcccattttgatttttgacagaaatgttgatgtctacagatttgtcacattggtgactcaaataccacaattgagattattagcattgtcagaaaagaacagggttaataaagtataatctcttaatttacattgcagccacattcctggaaaaatctctgtatattaaaccctgcaaaatgtacttggtgagttatatataaaacaattagagtctgggattcattcattataaataggtttttgcctacatgactaaccaactaagcatttggacttctggacttttttctttttcctttttttttttcttttttcagacctcactctgttgcccaggctggaatgcagtgacacgatcatagctcactgtagccctgatctcctgggctcaagcgatcctcccaccttagcctccttagtatctggagccataggcacgccatgcccagctaacttttttttattattattatttttagtagagacgaggtctcactatgttgcccaggctagtctcaaactcctgagctcaagcaatcctcccacctcagcctctcagaatgctgggattacaggtgtgagccaccatacctgg

SEQ ID NO: 41115 - DNA, 1548 bp, Homo sapiens
aaaaatatcacccatcaatctgcatacaggtgatattgtgtagcggacgaaaatgtcttcaacaatataaagagaactttgaggggcatggtgtaattcctagaaagcaggctatgctggaaaatgactgaaaggacaaagatgagttaggtagaagacaagaccacatgctgagagtgggaaccgagatgggacaagaaatgtgagagtttgagaagaagggaaaagatttagaaaagccattttttaaatgtcacaggttttactaagagatgaagttacagcctagataaaatcatgtggcataaaaatgtcccagatccaattaaccttacttcacgactttattctgcagcaaaaatatgaggattcaagtttagggctagaaactggttaaagtcaaggggtgatggacatcccctgtagggttattagaaaaaataaaaagtaaaataataataataatgatgatataaagtcagggtgggaagattctagaataataagtaacctaaggtcaggacactttataattcttacattacttgcatacatctatagtcaaaaaattattaatgaaattgatactaaaggtagtttttgagatgactgattatgaccatgtggcttatgtaggataagaagtcaagtgaagtcatgaagggcttatggattctaaattaacagcaatcaaatttgcagtgtctcagggaagatgcagagaaataaaagaacagaaggtaaagagggtgaggtcaaaaataaggggtttcaatttctagatcactgaagttgacaagttccaatggatgtttctaattaaatatatttttcaagttgaaatgacaatatgcagattttacattaaactccaagatcttaaacatttctctactggtaaaatttatatttggaaaatcaacattttccaggaaaactggatttcttttcaacattgcagtgagcctattgtgctactgaaatacttgcccaaacatgctttaaatactttgtaaataagtaacagaaaataatttcgttttgccatatcctgtagtttcctttactggcttactccacacattcctggaaggtttgtcatttaaaattgtttattcttctttcttaattgttgtgttttctgatgacaaaaattaaacatgctgttgttttaaaaataaaaaccaaaaaacatcaaaccctaaacattacagaaatgtacaattatgtctcctataattctatcccctacaaccactgtttaggttttcgtacatattatgaagcatttacttataccctaatatttttctgaagaagcttgacaagtagtctaagaaaagtcagagagaaaaatgaaggggaaaaaatggaaaaatgagggtacctgaaataaactgagcatcattgatgtgccaggtaccagctagttgctccacattgactgtttcattttagctgcccagcaactcagaattttttttttcaattttaaaaggtacacaatgtcaatttcctggctttgataatgtaccatagttgtataat

SEQ ID NO: 41116 - DNA, 3733 bp, Homo sapiens
attgcacatcttttacttaggtaatttatatttttgatgctcctgtaagtttttgaaaattacattttaactgttgctaaagtagagaaatgcagttgatttctgtacactgaactttgatagtcttttactgtctatgtagattattggctctttaatccatgaatcacttaatttataaacatgtatttgttagctatcttctgttaaacttttggtattaaaaaaacacatattccttttttttttttttttttttgagtctcactctgtcacctaggctggagcatggtggtgcaatcttggctcactgcaacctccctctcctggttcaagcgattctcctgcctcagcatcccaagtagctgggactacaggcacgtgccaccacgcccggctaatttttgtatctttagtagagatgggggtttcaccatgttggccaggctggtcttgaactcctgacctcaagtgatccacgtgcctcggcctcccaaagtgctgggattacaagtgtgagtcactgcacctggccaaaacacacattttcaaaatataaagattgattcttttgagtttctgagacttccttcatggcctatgtgttttcaatttttataaactttttcatgtgtcctagaaatgaatgtgtgttctctgtgggatccagagttccatatatatttattaaaccaagcttatacaacatttctggaagcaatttttataccacaactaatttacaactaatttcattttttgaacacggttatggtttaacattcagcttggttcagaattaagtatctttcagttatgtacctcttcaacactcctacaatatgaacgttactatctcctttttgccaaagcaggactagatgttcaaagggtaacttgtccaaattccacagcaattgaaatagttgaaatttgaactttgatctgtttcagtttgttacaacacaaggcttctagcctagaaatctcagctattctttattccacctttcccttcatcttccaatatctattgggacatgggacctttaaattctacaccctaaaatgttccctgatccatctcatttattattattttcattttcaccaaaatcagtagtcaaagaatataaatgctagtgataaaataccactagcacactatgttgttgcaatttttacgccctttcacctatattacggtatttcatttcattaataagactaatcaaaataggtattacaacttaggaaactagttctcagagtgtttatgtaacatatttaaactcccagacagcaagtgacagatccagttttctgaatgataggactctttctgtagccctgtattagtaacaatgttatttttagaataaagttttaagaatgtattatctattgtaaaacatcagactaaagccagattcccggtggggaacgctactctcaggatcctctcactcagttccattacctcacttcaaaaaacctgaggcccaaagtggtgctgtgacctcctaagtggaaaagctagtactcgaattcggatcctccatctggtgtcattaactcagcctcccggaatacggccaatcaaacggaattacaccagcttctcagaaaaagatctaatggctgtatcacaaaagaaggcatctatttctcagaatttgtagccttaattgccttggtgaatcctcaagggacataaatccatcctttaacaaagattcctttggatagtagaatggtgaacgttattgcgcttccattaccgccctccaattgggaagcccccagcatcgaattcggagggccggcaatagcagctcatgcctgtagggtgcgtccactgactgcaggaaaagcaatcagggtgggagaaacttaggaaaccacccagggccaaaggaaggaaaactcaatgtacaaatttttttccgctggaggcaaaggctgacatccatacctgtactgggcaatggtcagcgtagcctcacgttcggccccaaagccagacaagtgctggtttaggtaggcctccagggacttgctgtcgaacttgtgctggggcagcacttcggccaaatcggactcgccagtagcacctggcttcatgatcacccccgcaggccacagcaacgcggcatccacaggtctcgagtgccgaagtccttcaggattggggcaacgtcccctctagagcatgggccgaggccggggtggggtctggctccagccaaccgcacacagcctacgcgccgttgctgagcaacgcttgcccgctgaatcccgaggttttagctctagtcaagtgccaaaagagcccaatgtgtgttcgggtttcaattctccagtcagcgtcagagttggaggcctcaattttaaagaaggcaaagccatggtcatcgttgcgggtaaggaacaacgcagaagcctcttccacccccaaatttaatgcaacagcaggcggaagacctgcagggtcccgttcagaaaaagggccgtcagactgtcgagcctaagaataaaaagaccctgtttctcttagatacccggttagcaaggcaacatcgctggcctcctgccctggacacttatcaccccggtgctgctgcggccgggtttagccggcccagcgaggaaggaagccgaaagagccaggtttttgatgagggggagcgatgtctgcgacgcaccggaagcggctccgaggaaggcctgtgggagtctcggagacgtgtctgtctgtgaggcgctgggtgcacgtccccagggctctgggctaggaaggcagcggcgaggtgcctccccacgtacccctcgcgggcccagccgagcaacgtggggcgaaggcggcggcgaaggcccgggctgggagcgttggcggccggagtcccagccatggcggagtctgtggagcgcctgcagcagcgggtccaggagctggagcgggaacttgcccaggagaggagtctgcaggtcccgaggagcggcgacggagggggcggccgggtccgcatcgagaagatgagctcagaggtggtggattcgaatccctacaggtaacctgcgtcgccggtcggaggcaggcgcgggggacgaggtcaggctccgtgaggtcagaagtgaggcgcttcccacgtcccgctcatggggacgcccgccacccttttcttggtctgcgaatcctgttcccaaatgggcaaggccacatcttagtactgatcggaagatattctttctcttttttaaaaacctccagtgagtcagccatatggtgctgctcctgtgcctgctgaggacgtgtgtccagtttcctatcacccttgcctcttaattagtccgcctcgctgtgtataagactgatagtaagaactttcagaagatgagatcaaatattaaacctgctaaggtaaactttgagtttcattaaaggcttatcaatgcatcttaaatggggtcggggcgggggagagcggggttagctctattctgagatattcgggtgctccttaacatctcaaaccattcgacattaccaagactgcccaggcctctcttttcttctttcctaacaaagcttatcaattcagcagatggaatatagtgcaatggttaagggtaaggactctaccgccagactgattgcaattcaaatctaactactctcttcgtaactgcctaacctttggcaagttgtgaaactttccgcttcagcttctca

SEQ ID NO: 41117 - DNA, 1359 bp, Homo sapiens
gggcatgcaataattgcttttagcgtaaattaatcaaatggactagggaaatttgactacatctagagaaggttttcaaccatggtgagatcaggaggcttccagaaattttcatgtcaagaccattaaaatgcaagagcgatgaaactttacaaagaaaccgacacttgagccccactttggagacccacttaaaatttttatggtggggaggggggtgaaactcctaggaagagtttgctgagttgcttcaacagatgtcaccagccttctgagggggtgggcgcgggggcggcagtggagctggagattggcatttgcctcctcaggacactttccggctaatttcttctaggtgcctcaatgaataaaccagaaatagaaaagcggggaccaggcgcggtggctcactcctgtaatcccagaactttaggaggccgaggcgggaggatcattgagcccaggagttccaggttgcagtgagccgcgatcgtgccaccgcagcgagaccctgtctccaaaaaaagagacagaaaaaggggagggttaaggaatcatttcagactcgaagagaatatggcctctcaaattaaaatgggcagtttccgccgaactttcaaagccgcttggtttggagagggagcaggacggccgtgcttcccaagggtctcccggcgtcgcggcccagcccggcgttacctgcagttcggcccgcagccgcttgttctccgtgtccagcttggcctcgcggcggcccatggacaacaactcctggttcttgctgacgcgaaagatctcgtactccttcctgagccgctcgtactcggccgccgcgtactccagctctggcaccgacgagccagtggacttgaagctggcccccagcagcccgcccgcgcccaccccgcggggcagcgacccgggcccggcccctgctgccgcccccgcgcctcggcggaacgagttgcgcagcaggcgggccttgggcttcacctccaccgggatctcgcaggcctcgccgccgcccgccccgtacgtgtcctcgatcacttccccgcccgcggggctcacgagcgacgaggcggtccccatggcgtccgttgccgctactacctagtgagtaccagcaggactgggcagcggaacggaacgggacggggtggggcagaggaacggaacgggacggggcggggcagaggaacggaacgggacggggcgggccagcgggatggagcggggccggagagcaggactgggcggagcagcgggacggggcggagcagcggaacggggcgaggcgggggagcgggatggggcggggaaacaggaggggcggggcagcagaactgggcggggcgg

SEQ ID NO: 41118 - DNA, 719 bp, Homo sapiens
ggggtggggcaactggaggggcggggcagcggaacgggacggggcagcggaactggggggatgggcgagggggacggggcggggcagcagggctaggcgggacaacaagaggggccgggcaagtggggcggggcatgtgggcggggcagggcaaacgggggtgggtcgagaaagcacacagggccaggcgggctagcaagaagggcggggctagcaggaaggatggggggagtggcgactgtgcaggaccagcagtggaccggacgctggtggaggggtgctccgaacgctggtggagtggtgctccgacatagggcttctctccgttgtctccgcccggctcgaggctccctggcgggcgtgcctcacagggagcacaggcctgggtcccagctgctctacaaacgctgcagctatttctttcgctgccgccgtgcctgaccggaaactcctttctggaagcagttgggaaatctgaaaaatttatggagtgcctgctatgtgcttcccgcgatatctctctctcagtatgcatgtagatagaatgaccagcaaggaataatgccagcaaagaaagagcttttagattttacagtctgaaaccaccagggacaatccttagacaaggttaagttttttaactcattgcggcatgggacattggagaccgcacaccagtctctccttcattccctccatcaaagtggctagtcatctct

SEQ ID NO: 41119 - DNA, 666 bp, Homo sapiens
cccaggatcccagaattagtgagaggcagggctgggctgagagcttgtagcagctgtcttccagcccagtgcccttgtcatgacaccactctgcctcaaggtagcctgccaatgcctctagcaacctggcaccaagacaccgtaggtcaatgtcgatgcttcaaaatttacagcctccaactagcaaacccctcaccttcctctttatcttccatcctctttcttgtgttttctctcctcctgcccctcttctctccttctgtctctcttctcctaagaaagaaaaagagataaagctttcatctggtgggaagttctatagctttggcaaaaacctagttcttgcagctaaattaaggcttgagagttacgtaaactctagcaactctccacccccaccccactttatttgttcgtaggtgatgtgagctgattgcattgtggaccttgtccttagtttttgccctcccaaggccaccagcttctccttgctgctgcctggcactctgtgaatgaggagtcaggaggcattctctctgtattctccataaagaatctggtacaacctctcagaactttagggatttcattatgtcttccctcatgtacttgagctttgattcttatgattcttagagtttctctgatagccttgcaggaatcctc

SEQ ID NO: 41120 - DNA, 577 bp, Homo sapiens
cgcagtgaaaacaggagtagtattatagaaagagataaagtcctcaccatcatggtacaaatgactaggacttttcagatgactatggacaggaaaaacaaaggaaaaaaatatatatgtatatatatacatatatatatatcaagccactagatggaagtcttcattcaactgcctgtgcacttcagaaaagtaaagcaggatcagtgccagactgcacaaacccatcaaattcattcgacattcattgaacaactgctttgtacaaagacaaataacaatgatgataatggctaccgttcatgcaatatttactctgtgccaggcaatctgctgagtcacacatacgctgagtctcacacaccttggctcatttaattctcccaggaggaagggagtattattatcttcattttatgggggaggaaaccaaatcttagaattacttactctaagcaactgacccatgcttgtgaatggaggagccagtttccagaataagaaaacactgtcgttgtctacaaagtatttatactaaatgtggtaagagagggataatgtgccacaggggtgggct

SEQ ID NO: 41121 - DNA, 1180 bp, Homo sapiens
atataaaattgctataatagctactagtacagtaactccaagttggcatcaccagccacctggtcacctcacttaaacccagggtcctaaccattggggaaaaaaatggaaaaataatttacactctcaaccagaaaacttcagagtagtgccattctgtctatgcccatagcccagaacaggctgcctctgttccctgctggttctagtagattatcgttctggtcacggggccttgcagccaaggtgaggagcacagattgggacaaaataggtaacaaactctcatacagttttcagatacaggaagttcatccagccattcctgttattctgtcagagcgatctgtgcacacacaaggcccccgcagcttatataagcttcagacagccaagctggcgagactttcggccccctttgccaataaggcactatttgcattggaagctaggcacaaataatggtgcttgagacctgctgaactctgtgtccagtcaactcaaatcaggaatggaattcaaggccagaagtcacagaaggtcactattttactttctggaggattttgcaatcccagaaagtcccttcaaatctccagagacctgcagaataagtgtgcttctgtgatctcagcttgtttgctggtgctgtctgcgtggctgactgagccagtgtacttgcctgcaacagtagcctgatcatagtcactccagctcaagcatctctgggagaaccaggcatcctctctttctgccataatgtcagggacttaggtggggaagctggattcggactttaagggtgagatggaagacacatataacctttggctggggttccaatgaatgccctgttggcagtgggtcctaagtcaccatggaaaaacctcaggccacatgaagaactcacctagaagatggagcaaaaactatagacagatgatccaaccgtgattctgtgaagcgtgttcccaaatcacagatgttacaaatccaatgtcaacaacaactagtcacaagttaagtactttcatgcataaacaaagagagaaaacccagggaggttggaacaaatgatgctcaaagtcaaggtggccatttctgcatcctcactgctatagaaaggtttccagattctattagttaaataataaccctagaccagatactgatctagatt

SEQ ID NO: 41122 - DNA, 612 bp, Homo sapiens
ttaaaatagaagacagctagattctcacatctgcttctgcgttcaatctgtgagataaattttagtttatgtatattaaaaaaattccagcctcacatatacatagtagaaaaagaggagtattttaaaagctttttccagataattgtggatattcctctttgatactacatctaaactggacaagtgatcatttcttaaaggttagttttgcagtgtgaaatctgaaaccatatcagtgaacttttcatattgcattacctcaaaatccattggtttatcttgtactttgaatggaccttttactcatacatgattttgtaacatcatcctttggtcatttggaaaatagtagttcactaagttatacagatcttccaaatgttgacacattttattatgcaatacagatttgaaaagcctacatttgttaatatcaccaccagcagtatcagaagtcttcaagtagtggaaagatggaaagttcataatggcagatacaagttttccaaaattctaattttcatctgaaagcttgaatattattattggcaataaacattgtccatttattttccttaaagtgacaggctcactttgttcaagaaaatg

SEQ ID NO: 41123 - DNA, 1056 bp, Homo sapiens
agaacctgagctttgcattttttacatactttccaaatgattttgatgccctaaaatctgagcaccactagctggaaaggactgagaggtgagagatgggagagtaaatgagggaggctgacaaagaccaaaaagccaccaccttcctgtgcccttgtgaatacccttctctgctctctgaatgggagggagaagctggatttgctttcagatcgaggtgccagctggggctgcttcaaggttatctgggcaccactccctgtgcacagaactataaagactggtcctgaaggacaaggaccctcttatgcccctcagcaactgtgtacagtgtttagcatttctaagtgctgttatttttttctaataatgcttattatggctacttttttgaaattggaaaatttcaaaaatagcaaatcagccatgaagcaatgactgtttatgtgagtttaagcagcattaggcaatgcttcctttgtgctgagaatcaacattatttactttgggaatcttgcccagatttctgttaactcattcatgtacagtttctcctcccaagccttgtgactcaatgtagttgttcccagctggggcagggaacaagaaaaagcaccatacacagacccagccttgtgcactgaactcatcaaggccattgaaggtcccctactccagccactcccccaggaaaggaatctcctcttcagactctgctgggactcatccaagaataagtagcttccccattttggttatccattgctgtgtaacaaatcttgccaaaacatagtaacttaaaacaaccaccatcacattcactctcaccactctttggattggctgagcttgactgagcagttctgctccctgtgatgtcagctggggctgcagccatgggggagctgaactgggctgagaagccctacatgacttattcagatggctggttgttcactgggagctcaactagggccattgactgaaatgtctccacctggcttcttcgtgtggcttgagcttcccacaatatagcaatacagcagctgggctttg

SEQ ID NO: 41124 - DNA, 1356 bp, Homo sapiens
gcaatggcatgatcttggctcactgcaacctccgcctcctgggttcaagggattctcctgccccagccttccgagtaggtgggattacaggcacgcgccaccacacctggctaatttttgtattttaagtagaaacggagtttcaccatattggccaggctggtctcgaactcctgacctcaagtgatctgcccacctcagcctcccaaattgctgggattacaggcacaagccactgcgcccagccttccttcaacttttaagttcaggggtacatgggatgttctctctcattaccagcctattccatgtggaaagaccacatggaggagaaccaagactctcctgctgacagcctcagctgagctccaggccaatagccagcaccaactgccagcctggcaagtgagtcattttggattccagccatgttgaaccctagttgactacagcttcaaccaatatcatggagagcagaagaactgccaagctgagtcctgttaacccacagatatgagggatactaaaatgattgttgttttaagcctaggtttgggggcaatgtggcagccagcctccaagatggccccagtggtccccacctcctggtattcacaccactttataagccctttgcactttgtaccagagctggcctgtgtgactaatagaatacagcacggtgtgttacttcctggattaggctataaaagaccttgtggcttctgtcttggtcactctttcagatccctcttcctgttggaaacagcaccatggagaggcccacatagtgtgaccaactcctcccaggacttcccaggactttcccggttcagcactgaaagtctcacatcctgagaactccctcaatcctggacaaaccaggatggttggtcaccatatgcccatatggtaaggaaatgagacatttggacaacagccagcaagaaactgaggcctcctacacacagtcatgtgaggacaccatcttgggagtaaaccctccagccccagccaagccctgagctgcctgcagtcccagctgaagctcaactgcaacctcaggagagcttctgagctagaactatttgcctaagctgattatggaatcctgtccctgtgatgtattattttaagctgctaaatttgggataatttactaaacaacaataatagatttttttttttctcgagatggcgccctgctctctcgtccatgctggagtgcagtggcacaatctcagctcactgaaacttccacctcccaggttcaagcaattctccggcctcagcctcccaagtagctgggattacaggtgcacgccaccacggctaatttttttttttttgtatttt

SEQ ID NO: 41125 - DNA, 1979 bp, Homo sapiens
gaatcttcataatacctctgtgaggtgaatatttctggctagcttttatgcttgtaggaaataaggcacagagaggtgaggtgactttaccaaggtaatccagtaaataaagcattctattctagctccacggattctaatatttcttcccctatgttacctctcatcccagtgcatggaggttcacaggcataatataaaggaacattttcctctacaatggtttgctaatagcctctatatctaaggtagtcagtcaagattatgagctaagtcagtggcccaacctgagactatgacaggcagagttctgttcccataagagtcagctcctgccaggttcagaaagctcaggccacagaatatgctgttaatcttgagaaagtccttcaggagaaggaagctgtctctccctctttttctccctctctctcccctgctcctacaccacacacacacacacacacacacacacacacacacacaatgcttataagagtcttcacccttgggacaagcaactaaccattgaaaagagatcggttatataagacttttctgttcggaagcctgaaaagtgaaaaccagctgtgatatggtttggatctgtgtacctgccaaatctcatgttgaaatgtaatccccagtgttggaggaggggcctggtgggaggtgttgggtcaggttgtctaaagtgcgtggcacctcccctactctctcttgctcctgtgtttgctgtgtgacgtgcaagctccttgctttgccttctgctgagaataaaatctccctgaggcctccccagaagctgagtcctgatgccagcacaatccttcctgtatagcctgcagaaacatgagccagttaaacttcttttactataaaccacccagtctcaagtatttctttatagcaatgcaaaaacagcctaacacaagctgccaggcccagttcatagttccccagcaaaccagtgctagggaggattccaaaagacaaaaatagaaagaaattccaaaaatgcaaatacctcagagaggaatgcttttgggtttcttcatcaggatagaaagaaagttagagcagcagaagccttttgctggagctttctctgatcctccctgtaccacctctgcccagcggctctccacaccacagcttagtcctgcagacacctggggagaacagacatttctgtagctacccaggggcctcatctggcacttagacaagttttgttccacctgcacacatttttaagtagttgctaaaaattttaaattatgagattttacctaagcttttggatttttgttgttttgcttcttttgaaaaatcaaaggttctggccaggtgactgtattcttgagtggtgtgagctggagttgggtcatggttgcctcctgattatttttatgcctagaccactaatcttgtctagtccctgcaagaattcgggtttttcacttcaggccaactgtgacctcagctctgcctgtcaaatgaaacagatgtggctttgccttggcattcaaaaatatttctaagcatggcttattcagacttaccactcatgactacacttcgttcaaaatttttctactccttcatcctctaacagatatcttattttcccacattaatggcttttctagtgatttttatttcctctaacatgtcttctttccgaacttggccttggaactcttccatatcctttaaaatccatatgaaggccttgcagaatctcccaaataaagttttacgaactttctttccttcgatgctccaaaacaaccttttttttaaatttttttattttttactcaggctggtcttgaactcctggcctcaagtgaccctcccaccttggcctcccaaagtgctgggattacaggtatgagccaccccattcccagcccaacttgttattctttgaagtactcactctggattttcataacttcacatatttgcacatt

SEQ ID NO: 41126 - DNA, 3389 bp, Homo sapiens
tgtccacatttcatcctcacaactccaggaggcagttgtgcttatcatccatactttacaggtgaaaaaacctgtgatgcagagaagttaagtgacttgctaggaggaggcagagctggtactcgaacctagatttgactctagaaagcatgcgcttgaccaccaagtaaaaagcaaggtccccgagagaaagtataggatttgccttccacccagcacgcagaaggtttccctgcactccctgcactctgaccctctctctgctttttgtcagcctaaagaggatgacaataccattgacctagtgacctagtaaccaggaatacggaggctctgagtcagaagcagaaaatgccagacaatctcacatgtagctgttggatcatgaagtaagatcaagaatggagctagggtcaggaacagaataatcgtgtcttgcccacgtaattataccccttgcactctgtgatcaaaacgattgagtcagaatgtcttgctttgtgccagagtcgtttgactggctcccaaagtggccacccagagtagcttttccttggcgaatttgccacagagctgaacctgggtcatagtcatatcagtgtcctgtcagggttcatctccctgaaaaagcctgactcccagcaatccaactcataagaggccaaactatataaccacatacataccaatgtattcattaacagtgttagtctttcagtaactggaatgttcctctcccaactagggcacccttttcccaatatcagcagtctcagagagtcaagttagtcatcaacaggctggttggtgagtgtatcccaagagttaaggaaagctgaccttttgagggctatttcagccaaatcagggtgcggtctactgaatcatctccaccttacagcagggcacgtctatgtgaaaacaaatttcacactgctctttcttggacagtggtgggtaataagtgccaacttctggcctcatggctttatcctatttctttttccttcctcttttctactctccaggctcttccctcatccttcagttcacacattctccatacaataaagttgattcggttgctgatcattcaattgtcatcacattgcagcccttccctcaccgagacactcaaggaggtcaccttgatggataggttggttgttcccaagcttttcatttatttacagaactttttggtttattttctaatatgttaggtttaaccttttgaaatgattgtttttggcaggtcaaaaacagtcaaatagcagcaattttatgtggttcaacaatcagcaaaccagacccattgggggtggggttaatgagtctgactcccttctcaagccatggtggtgggtgtatgtgtgtgtgtgtgtgtctgtgtctaggagaaggggggtgtatggcagcccttttctctttctggaaataagctctcctggatagttgctgttgtctggggcctcctcttgctctccatgtatcctccaactaggaccctaatgtcaaaaatgagctaaggaggaacttgaggttgagggagaaggttgaattatttgttatgtgtggcagagttagcctatgctcataagccaacaaggaaacacttttagagtccatgatttgtgcagtcctctgttaatgtggaaaactggagattaatggagacatttttcattttacaaacatcagttaaatgcttgtgtgatataggctatatgctcaatgccattcctgccttcaagagttttcaatgtgcttttgtaggtgttcctgtgtgtctccttctagttaccagcttagtgtacaataagctctgtgaaggcagggcttatctctcctttaactcctaacatagggcccggcatatagtaggtgctcattaaatacatgttttatatacttgagtgaatgaatgagagtggttaaataacaaaccaatcatgcgaataccaggaaggcatcaacgatcataccaaatgaaaagactctgggcctctgaagtttaggaaatcaagctgcctgtagagaataagaaaagactcccagaagagatgacctgtaagtagttgctccccagttgaaaaggggacagttcaggcagtggcatagttggccttacagatgttagagaggaaaccagaaatgaaaagaagaattctagccacccatttcctggtgaacactttggccagcatgagctgcattcctttgagctgagcatgagtggaatttccagcctaggtagcagaatggatcttggatcaaatagctcagcagaaaagaactcagaaacaatggggctgggctcaactgccctttgccagctcttgagctcatggaatattggaactcagcaggccttgttgagggagatatatgatgtccttcggattgcaccacttcagaggacccagagggaaactgccatgttcagacagcattaggaaccttggaagatgtgcagaaatacctgggaatagtctgcattactatacaagttttccatctggcaagtacaagtgaaagtctgtttgctttaagtatgcagacggtccaaacacattggacagcagaggggaagacacctctgtcaagagagagctggaggagccgggcacagcggctcctacttgtgatcccagctactcaggaggccaaggcagcaggatcaattgagcccaggagttccagaccagcctgggcaacatagcaagatccctttctctaaaaatgtaaaaaaaaaaaaaaaaaaattcagctgtacatgatggcacctgcctgtagtcccagctactctggaggctgaagccagaggattgcttgagccccgcctcttaaaaagaaaaaaagagagagagggcagaaggatgcttcaaagatgagggggtgtctggtaacgatgataatgatagcatgattcagggcactgtgcaaccaatctggagaagggtggtaggggaggtttaaaaggagcaactgatgggaacagatgctgtcaattttagggcaggtgattcaaagaggaagggaccagcttcacagaggagagaattactacaaacaatgacacaaccacaaagacactggtctctctactggcctgacctgaatttcttacacatgatcaagttctgggatcatgccatcaatcacactgaaaaatgtagtgggaaattctgcagcgtcagccctcaactactgttccttctgtgtattttctcaagtcattaattctttcaagacaatgatgaattgataaggacttaagaaagatataaataactgaaacttatttatatctagatcttctcttctagattataagggaattgaatgcaggaatcacaaattactcacttttgaataaagcactttgc

SEQ ID NO: 41127 - DNA, 3427 bp, Homo sapiens
cgcgcccagccagaagttaattctttaatagcagtgtaagtagggggtaggaaaagagaaactttaatggggtaactgtaaaggaaaagacgaagaagtctctccatttactggctggattctatctaccccatatggctaccaacatttgtctgagtcatttcctcaatggttgtgacagctccctcttctgcttttagaaggaggaagtagaaagtttaagagcttactttagaccaccttttgcatatagaattcatttcattttcaaggccccaagggtatttaaatgggctttaaacccatttaaacctggctttcgcctgggcattttggtctccacccctatgataagacagtcccctccttttatcagggatagaagctaaggataaactgtatcatcatctagactcaagtcagggcgttaagcaatgtgctgagcagctaataatgttgactctcttccctccatccccctatcttgtaagaaatagtatacccactttacagattagggacttgacgataggatttattgaacttgaccttggtaaacataatccagagggtggagttcagacaaaatccctttctacctaccaaccagcctatgaaagatcttttagtaaatgggacctaaacttcaggctcactgctcctctcactttcacaatcaaccggtaaagaagaaaagtaatggttgccactccagagggggtggaagtacagaagcgatcagaggagaggaacaatctttaacacagttggcttaacgcagtgcctgtccgtttcgcgacagttcaaacgactactatggggccacggtttgttctgggccaggaaacacacgtgcatcctgcgcatgcgtccaaaaggaacccactgcccctcctgctggacctctttagccaagtcatcaaccagccctcaacatgcccgccctcaagactaaaccctcggccaatcgggaaaccggagtcgcccggcacgtcacttattttgcatatgccctcctctccccgcccccatgcttggactccgccccgtctgggtcagggattgtcacctaagagcttcgtcctggcacctgattggctctctttccagctccgcctccatctcctcccgccgcccgccccttggcgatcccacagcggcaggcagagcaaaatacgcaggcgcaggcgcttcctctctcttctagcggcccgccctccctcctccctctccctcccctccccactcccttcccctcctctccaggcctgcgcgcgcgcctcttcctccggcacgcgccgctgctagccgagcactctcgccagaacctctggctcgcgcgtgccttttcccctcaggttgtggggagagcggaatcctgctccgccgtcgcagcagcagcggcagccccggcagcctcgggcgacagcggcggcgcgcgagcccccgggcggaccgtaccaccgctcgccagcacgcagggggagccgcccgtctcgccgcgcacgcctcggcgaccccgcggggctgaggcgtcgccgcgcccggcagcgtgagcgcagagccggcctcgaccccgagctcggagccccgcgggccgcgcccgccgccggccccacccatccgggtcgaggaggccgaggccatggctgagacggaggagcggagcctggacaacttctttgccaagagggacaagaagaagaagaaggagcggagcaaccgggcggcgagtgccgcgggcgcagcgggcagcgccggcggaagcagtggagccgcgggtgcggcgggcggcggggcgggcgcggggacccggccgggtgacggcgggaccgccagcgcgggggctgcgggcccaggggccgccaccaaggctgtgacgaaggtgaggggccgggaggccggcactcggggcccgggccgcgcgccggcgccccatgtgcccgcccccgcctgccggggaagcgtccgggaggggccgcggaggccgggcggacgggcgcgggccgccacgtgacgcaggctctccacctcgggctgggctcgccagggccgggaccccttccgatatccgcggtggagccgcccttcccaccccgcgtcgctcggcgttagccaaggcccgggcggcgccaccctccgggggcactaggtctggggccgcagtgcccagcacagagcagcgtttatcgggtgacgtctaggctgagtaattccgtgtgctgacctcagcccagtagtttgagctgaattttcgctttcagcagccgcatttgtagcagctcttttgtgatgacttagtctctaagcccgtgaaagaaaaagaaaactctcggtggcaaggttgaagtagaaatgtagttgtgaaattcctattgacttcttccttcggcttttcttagttgcttaaagtaacagctcccatgcaggaacccagcggaagtatagtgttagcctacgagcatgtttgtcctccatttagcctagtttgccccagaacgaagcaagggctttgaccagaagacaagtacatacttagtttaggttccagccacttgatccacttttcgtagtgtgttatttgcttagttatatgtctacaaatagctttaattgatcaaatggcgtttgttttacaggacgaagatgaatggaaagaattggagcaaaaagaggttgattacagcggcctcagggttcaggcaatgcaaataaggtatagtctggttacaaatgtgtttagataacctttgggatagatattggatacaagttaggttttcctttggccccaaagcagcatcatagtagccttgtgctctagatatgcttattaggactcaaatgggttctgtctactctttctcactccatggaggcagcccttccgtgtgctcatgaaattagctgctgactctaaaatcctgtgagagcttgcctacttccagttctggttaggacttttcatttgagacagctaaagtggattttgtcgcttcaaaatttttacttttaacatcggtgattgtacttagttttggtttcaaaagtaatgtggatgtttttcacatcctctccaataagcaagtgaatatatgtttttgtaattgaagtatatcatacttacagagagatagaggttttatgtgttcacacagtgcaaccaacctgtgcaataagcaccaggtcaagaaactgagtattactgatacagaacaaggttcccctcctaacacatactcactgcattcaccttcaacataaccactattctaacaccataattttttctaaaacttcataggaatggaattatatttgtaaacatgttattttttaaagttcaaaaaaatagtaatttttaaaaattgggtagtttagaagatttgaaattaacattttgtcaagtccagtctatggcagtcaa

SEQ ID NO: 41128 - DNA, 1536 bp, Homo sapiens
gcctaaagacagacattctggctctgcccgtgaattcgtcaacggcatttctaagaaatcctggaacttggacaaagccaaggtaaaagatgacaacaccaatccttgcaaatcagacagcaaaattaacccgaattgaatacactgaggaaggccctgctatgaaggctctaagccctttaggccaatggacattcaattgcacttgttttaaggatacacagagtgtatctgtccctgcggatacccacggcctgcgaggtacgttcatccctcagtaaacagattttaaatataaacatggaagccagttagcatggtcttggccctgcataaggctagatgctccggttcccatctccaggaaaaggcctggctctgggatcacggaagccacgtcctctcggcgtcaaaggcccacccgccggctccagggccagttaccaggacaggaaaagagggtcctgaaggccacagaaggcatcgcgaaccccagttggggctggggaggagctgtgtccccactccgcgcctcacttacctcgttggagcctcggggtctccgggcggcgagtcgggggacgcgctggccgcagggcggtggctggggtcgggcgccagcccggcgcacagccccctcccccgactcggcgccgcccctaccccaaagcaaacgctggagaacccggaaattgcccagaacgggaaccgactttcgcgccaaccgcgcggccgcgcttgccttttccggtggaagtgacgccatcggcagctgcagcagaagagcggaaatgtcaaacgtggaggtgagcagtctgtgggcggtggggcttcagggaaagcttgggccggaccctttgggtttagggctttgctgggcgggcctagtctccgctgcgagtaggcccagcgccgtcggttcaagaggtaggaccacaggccaggaatactcctttactgttaaaaaagccagggaaagaaaggatttcctcaatagatatttattttacacctgtcttataccaggcatgcacgggaaaaggtattatccaaaacaattccgtgaggcaaatagtggtagttccattttgtagatgtaaaaacggaggaagttaaatgatgggttcaagggcacacggctagtaggtggtagaattaatactgcatccaggtcttctgactacggactgggtggtttccctccaacacagcaggaatagaatcaccgcctaacacagccacaagatggcaagggaagaaaggatgacttattacacagctaatgcaaagggatctttgtcaagatcttcaatggtctcccctcctcctccccttcagtggacatcgccgttctctttctctgcatctgcctcagtactggggagattctgggactgaacctaagattcagatggcagagagcaaagggagaggggataagatgggcctgcaaaccttagtgataaccagcggaaaactgattcgttgttgcttcttttcattttattcttttttaaaaaaattttttcttatttt

SEQ ID NO: 41129 - DNA, 607 bp, Homo sapiens
attaggaaacttccagctgccagcatctgtgttcattgcatgaaggcattctctggcaccaggaatctgctctgccacctgcacagtaggccagagggctagaggatttatgacctatagggaaaaaaaccccttaaatgatggctgacaggagttggtgcacaaaaacccttgtttgcatgtcccgtggatgggacatccactctgactctcatagtttcctcaggggaattaagtcccagtgtccacagtggcatctgacttgttaacacattctttggatgcctttctccctgtctcacatctctattttcttttttctttttttttctgagacggagttttgctctgttgtccagggtggagtgcaatggcgcgatctcagttcactgcaacctccgcctcccgggttcaagcgattttcttgccttgacctcccgagtagctgggattacaggtgcctgcgaccacacctggctaattttttgtatttttagtagagacggggtttcactatattggccaggctggtctcaaactcctgacctcaggcgatccacccacctaggcctcccaaagtgctgggattgcaagcataagccaccgt

SEQ ID NO: 41130 - DNA, 1376 bp, Homo sapiens
aaatgtatgaataagtgaagggagagccaggacagttaaatccaaccaattctgaacttggaaacagtttaaacaaacatggtgccccatgccgttattacttcaagatgccttggaaaggggaaagtgtgaaattgctccagagacaaatgtcagaggccacatgagaaacagcatggactatggaagcaggctgcctagtttgaatgccagcttggacacctactagctacctgaccttgggcaagtcactggttaacctttctgtgcttcactgtctctctgtacaaaaagaggatggcaatagccttatggggttactatcatttaacatttgggaagcacttagtacaatgcctggtacacactaataaatctataaatcccaagttttccaaagaccatctttgccgtgaagttttaaaactgttttccaccatacaagcatctaaccttctgctttgctatttatgagagcctgtaccaaagcacagaaatgactttagcactttggatgtcctatctttgcaatatcactttgtcccagtacacacgaagttttcagagtttgatctaatctagggtcgggggcacagtggctgctattggatttaggctgtgttagttttaggtgaataattaaccttagaaggaatgatcacctctggactttatttggtttttgtccataggcctgcataggagattgctcaacccacttttgagacatttgtgtgcatttattgatctgtttgattttttgagcccaatactatagcagacagtattttccaaccttgtgttagaatgttggacaagaaaaaagtgatctctgcgctcatagatcctatttcctttcaaatgtatgagtaagtgaagggagagccaggacagttaaagatgaaccactcggcacatggccagggggaatctggctttacctgagcagagggtcactgctggcttacagagaagccagccgaactgatggcagtctcagggctggaaaaacagaagtggaggcaagatcccattgagaagggaggagcagagaactaagcttgacaaagggccagttttctccttaagatacttggcacaatttgaagttccatggaatgggagataaaaagataatgccacaccttgaagaggctccaataaatatatcaagtatatgaggttcctgttactactgtaacaaaacttaatatcttacagttttggaggtcagaagtctgaagtggatctcactgggcttaaatcaagatgtcagcagggctgagttcctttctggaggctctgcttctacatttaaagaacccttgtgaggatattggcccacctggataatcaagcaatacatttctcaataa

SEQ ID NO: 41131 - DNA, 656 bp, Homo sapiens
ttttggggaactggcagatcctgactagtgagggactataacaggtaaaattagccttcgagtcacagcaggtttcagcagctgttaactacacctggtctcagtttacaacaggcagtttcagcagccaggcttgcgaagaatttcacatgtggagcagtgctatgtgccctgagtgcttttttgcccctgacttctcactgtgttttagttgggtatgacaaaaataacccacttctgtatgatcaactttcacaggcttcaaggtcagagttgaggagttgccacagagactaaagtatttactctttagcccgtgacagaataagttcatgacccctgaactagaggctgttgatctcgtttacagtgaaagaaatggggttagaggagagaagggattttttccccctggggcttaagggttattattaagtgagggggaggagcaggcaggacacatgtcaggtgtgcctaacatctaaccagaagggtttttctcgcctcaaactggacagtgcttccagtacttttaccatacaacagagaggtagagagatataggggaaaaaactatcaccatagaatgagatccacctgtcactcactgctgtgtgactctgagctctcccttgacatctctgagctggtttcat

SEQ ID NO: 41132 - DNA, 1157 bp, Homo sapiens
aggaactctcattctagtaacacacacacaagcatgcatacacacacatgtttacatacaatttttgtgcattcatagcttcagttcagtgattcttctgtgacctcacactgcctttccctgagtggtagaagtgtagggatggagatttgttgatctgattttaagtagatgctaccctagggggttggtaagtcttattaaattgtacatgtatacactttacatatatgtacttaaaaggcctatctgtgaggaatatttaaaacaactaaaagggtaaaatcattccattgtagaaaccaacagttgacaccaattatttgcaaatctgtataggtcagagatttactttggacagctgagaaaactggtgaactttgatcttctttttccatggaccctgaggacattaaacaagggagtttgctctggaggcagtagaaggatcagtgatcagtttactttggccctaggagcactggactctgttcagcttaaccagctgaacagagctgattcagctcatgggcctatctgaaggtcttgggacttgacctgtcttggtgaaggagcaatgggaagtacaatccttaaataatgttggaagaaattgtgaataacacttttcaagaaagtgtgttacaggacagtggggacagctcaggctattgagttcatagtcctagattctagctttccatcttgctggacagcctaccagttatgtcctccagctgagctcagcttttgtctctgtaaaaccacttctctatactaaatggtctctcagggtgtattttgccaaaggtcccagcagcaatggagggagacataaagcagtcacacagaataacttcattagttcactgagtgtgtatttggtatgtagtctatgttgggtgttctgtaataatgatagttgtcatcaccatctattggtgtcattaccatctattggtcagacagagcaagcaatctaatagcaatgtgagcaatcttcagaatgacaaggtagacatttgtactcctattactaatgagaaaacagagcctcagagtagttaagtaacttgtccggtatgatgcagctactcagtggtctaacatccaaacccaagagtctttgactccaatcccatgcccattttattact

SEQ ID NO: 41133 - DNA, 875 bp, Homo sapiens
gtgaacgaccaagccactgtagctttagtggtgtcttcagtcagggagaaccagggccaggatcttctcttgtcctaattcgtgcagttatgatcttgtcctgtgtttactgaatgccacttctaccaacgctatgttcctgccttgcagtgtgaagattatttccaaattcagatctaggaataaaccccacttctgggggcccattcatctatcagaatttattcttttgtttaaaatccaaattatttgacacctgttgtcccagcccactttatgccatgctgtcaaaatttcacagccttcctttccactcccgagcatctactatctcacctgggagaggggcctgtggaggaaggggctgaagcagctgctgtgacacaggctgcctatttcacagtttggggcacaaaactcgtgtgtccccatccctgactactaacctccttcccatctttgccaagcctgccgaggtgtcctgtaaatagtgtgtcagggaaggctagcattcctgcacacctgcctttgatcagggacctttgttcctttacacatgagagttcccagagtgcgctgggctccagggtcagtggcccttctagctgtcagcctggggggtcaagtggaactgggtgagattgaaaatatggtgatgagaaaaggggtttcttagccaggtacatctctgtcttaaaatgagaacagacagctcctggtctgtcccagttgtagaagaaggactgagttaaggagaaggagcccttggctttgtaacattgaacaatgctgaatatctctgctccgttattcctccattctgcacacaatcctatctgcccttcacagtcctgtagaggagatgattaaaaggc

SEQ ID NO: 41134 - DNA, 1207 bp, Homo sapiens
tcaagcaatcctcctgcctcaggcttccaaagccctaggattacaggcatgagccaccacccccacgctgtaattcttaaatgtttgatggaattcattccacctggccctggactattcttcatgagacaggtatttttgcagactcccctgtgaaaagaatggaaaccttgagaatcttcattgtccaaggacttctgagaggtagaacagagatagagaaagggaaagagaaggagagagagagagagaaagagagagagagtgagagcgagtgagcagtggtgtcatgtggcatttcaaaatgcctggcattttcctaaaagtaccctgcccagtccccaaccccctagccatacagcccgacccagcgggcttgcagggtgactgatttcgtgaatgtcggttctcaggctgccaggctgctgcttctcaaggatgacccagacttagagaagtctctggtgtcaggcagaggacactgggtgggggacaggaggaactgctcaaaacagacagaggctctttgtttgctttgcttctgtgtcaactgggcaacatttggaaacaacaaatattggttcagaggcccactgctttcttacccacctcctgctggtcagcttttccagctttcctgcacgtacacacaagcgcagctatttctttaagggccaactcgtggttgaaatttgagagttttgccctgtttgcggtgaaagatttggctcatgcttgggttggtctagaactggaagcttcctttatgtcctctatcaatctctttctctttctctttctctctcacctccctccctctctttcctcccccactaaataaataaagagaaggtcaatatcaagaaggcagctgtggtctggagaagggcaagatttaggaagtttgagttcaggtctcagagctccatgaataaggacccatcatttgactgtaatgaccacatgtgataaatggaggtactgatcttatcttgcatggctgccccaatgatcttgccccaggacagtgcctgacacatacaaggggataaaaacatgatattttcttccagctgagcataatcaagccagtccatgtctaaggatctgcagttggtactcagacctctcccagactgaccagcccctgtgctggcaaagccctgggggctgtgtgcttttggagaaatggcaaggctgggagtct

SEQ ID NO: 41135 - DNA, 2011 bp, Homo sapiens
aagcatatagaaggcacaagttcaatatttttcatgataaggatgtgtaattaaactggttaggagactcatcgactagagggggacatggtggccccaggctgtaagaacaggccacaccgtccactgggccgcttgctttgtgctaagatgacactttgttctgagcctcacagtgtcttgaccatgttcctggaaccttcttgttggagggagttcatcttcccctatgactctgtccctagtctaaggtgtcccacaggaagcttgagggcgggaagttttccagcccaggagcctgagctcagcggggcaggaagagggagcagctcctccgtgggggacctttgagagcccaggagcaggatttcgagggacacctggtggggagcaaaaggtgctgagtctgtctttgaccttgagcccagcttgtttctcctgcatcctcccccaaaaggggctttgcctgtcattctgcagttctagtgtggggtctgggcgcagttcttttccctctccagcctcggagtcttcctctgtggactgcgcagataggactggtggcacggaccagctctgcagccctggagtcaggagcagagccccccggctcccagcccgccgtagccgctcctggcaccgagcgagccgcgatgacaatggctgcattgtgcttcatgtcccttcccatcaacatttctgtgctggactccttccactcgcgggtcgtctccagagctcagaaaatgaggtgatcagtgggacgagtaaggaaggggggttgggagaggggcgattgggcaacccggctgcacaaacacgggaggtcaaagattgcgcccagcccgcccaggccgggaatggaataaagggacgcggggcgccggaggctgcacagaagcgagtccgactgtgctcgctgctcagcgccgcacccggaagatgaggctcgccgtgggagccctgctggtctgcgccgtcctgggtgagtgcgggcacggggtagcaccgcagagtcgctggcccgcgcgttccctgcaacccgggcggccaccgcgcagcctgcatgcactccgcgctcaggctggaagcctgggtgtctgggtgcctttccattgcctctctacgccccacccctggcctttgcttgggcttctagacacctttcactgcactcactgtcttctccccctcctcctctttgtccagtaaatcttgcagcagtgaaatacaataaatcagagcacgtctaaccaggttatcaaaaccctttgctgctgcctcttgtcaagtccgaactccttagcatggcattcaaggcctcccgggtctgaccattcccctttcagaggctgatgtcccctgggtgccctgggagctgtagatgtcctgccaaggaagcggtgccatcgagcggtcagagcatggggtttgaagccagacttcttggatccaagtcctggccggctcctcaccagggagggggtcatcacagcacttgcctgggagggtcaaatgagggtcagcgaggtggcagatgctgagtaccagtggcagatgttgcacacatcctgctatggggcagtggctgacgccacactccccgacctcctgaggtggggcccccttcatactctaacttctgcctgccattcatggggcatttgtcacactgttggggcttccacgtttagttttctctccccataagctagcaattccttgagagaggaccccacgttacttgcctttatccccgcacagagcacttcacaggctgtgcaaggtaatgctccactgaggacacattctcgcctatgggaactctggaggcagggctttgtggaggggctgccacaggcttatgttgcctcctaggatttcccatgggccaagagggaaaatgggggtcgctggggtggccatccctggtggcccctcctcatgcatcctggagagctgtgggcctcctctccacaggctttgtggatcttcttcagagccagtgagt

SEQ ID NO: 41136 - DNA, 516 bp, Homo sapiens
aaaaggctcaaataacatgtatgtataaacatgcttaaaataaatgtgtataaaggcttctttttctaaacatgtcttataaaacttagctatgaagtaaaatgtaccagactgataaaaagactccaaactccaaagaaaataaaattaaatcaatatgtggcacaataggtaccccgtcttctcagctagctacccccaaaactcttgaaccgatgcagtaataggcaggttcttttccttgaagcaaggggattaaagtacatggagagcagggttcagtccattgtccaaaagtccaacccactcggctcattgaggagggccttgtgtagattttgaagtacacactagttcatcatctgtgtggtatgccctttcaaaggactggaagacagtcaaaattaaaattagaaccctactaaccagagtttattttgttattatttcttttctgaaacttcttggggacttgtagctcagagctgtgttacaacccccattaccacacccaga

SEQ ID NO: 41137 - DNA, 1522 bp, Homo sapiens
taactcattcttcaggactcaattccaatgtccagaagcttttctctgaactcatgatggactccgcgtcccattatgtattcccacatcgctccgtacatccatctgtcacatcccttgtcacattaaattcagattaaatgtttgtaggatgcttgagttcttcacaagtctcacgtcacttagcgacggtcgggaactcctcagtggtagtttcgggagccattcattcattttattcatttcatcattctttcaacagtcataacgtaggtgacgacgactgactcatctcttaaaagatgtgtgtgtccctcgacaaataacctgtctgcccctatcgttctgtaggaggacggagtcccagagaactacaactcccatcaagcacttgggggatcgccgcggctgagggagagactatggcttaggaaccaccattcgcgtgaggctctgctccccgcgcctgcgcagagtgcagggccacgtcgcttttgctgtaccggggaccacgcgtctcatccatggcttccgcggactcgcgccgggtggcagatggcggcggtgccgggggcaccttccagccctacctagacaccttgcggcaggagctgcagcagacggacccaacgctgttgtcagtagtggtggcggttcttgcggtgctgctgacgctaggtaaaaggcggccggtggtcatggcgggtttggggcgggcagaggtccgggctttggctgcaccgctgcaggccggggacgcggggctgagagggcgccttgagggcatcaggagggtgagacccacccagtctacaccccaccctctctcctgaagcagcggcagcagctgggcgttaagggggatgccgggcaacccccggagttaacgtcctggtccttggggcgcagattgctcttcgtcatctgccctgttacgcttgagcgcgctgttcctcgccttccgctgttctcactgcaaagactcagggtcttgacaccaactttcagcctcccgtgtttgcgtgcgggcgctgggataccaaggtagtgagatagcacctgagtcccagtcagagtaaggactgcaaagaaaagttgacagttgacagtgcctggctctcagtggatccctaacaacagcaatagtaaccattatgataaaagtcagttccaggtgaatgaggtgtttcgtcacagacttctgtgaatttccccaccccagccatgcacatatactgattcccaaggcgtaatttttgttgtttttctctgtctattccacagtcttctggaagttaatccggagcagaaggagcagtcagagagctgttcttcttgttggcctttgtgattccgggaaaacgttgctctttgtcagggtaaatgatttcattgacacccctgttaagcttaatagaaaattttatagatcccagtattcctgtcatctcacggtttattttgtaaaagaagctgatgctgttaaatttggaagttaattcttgacttacttgggagaaca

SEQ ID NO: 41138 - DNA, 655 bp, Homo sapiens
cctactctcagacaatttgattcaatagcaagtctggtattgcctcaggaatctgcatgcttaataagtcttttgtcagtcgcatggcacccctagagatgatctggcctggagtgtcacgtgtgcctttactttgtttttaaagtctcttggggcacacaccctgctgagtttttctgacagggtcaagtcagcaggcatgggaactctgaccttgcttcttactcctgtactagtagcaggcattccgttcttgtggctttgggccaggatgaggtcatggtgactagtctttgggaactgggaagggttttgatgggaggtcaaatgtgctctctccactcaggtggtgcccttttgtggccctgagggcatttgactaaagtaggcccatttcatgagatgggcaggtgtggccagagtagaaggatggatgtcaggtcttggagacgggccaactaggcacgactgtatgacatagatgagacttttgagcttgaaacaccttgggaacatggcagtgtatggacaccgagacctcctaggacagcagctgcctaatgcaaatgaccctgttccctgctaaggctgcagtgagatgccctcatggaggggcagctgtgatgagtgagccccaggcactctgttggtgaat

SEQ ID NO: 41139 - DNA, 762 bp, Homo sapiens
tttacttgtaactacttaaatattagatgcatgaatggctggctgtcgataaaagtcaactacatcaaagatgggttttaaagaaaatgggttttaaagaaaatgatactttaaagaaaatgtcaagaaccattagttaaggcaaaaaaacaaaagtgatgtcatagaaagagaactaaagcagagttcacagttcttacttcccttcccctggcttcaccagtaggtagctgaatgacctttggcaaccaattacttaaccgccctctctagacaacaattttctcaactacaaaacaaaaaagttaaaccagatgatgttaatgtccctctcctcagccgcaaaattctattactctatgatatcatccatggtttcctagtgtcagccaaaacactattattttattatatcatccacagtttccatatgccatttaaaccttaagtaaaaattcatttagtcaagataatcttctagattctgaggacagtggtaatatgagccattaatcagagaaaaaaccaatatcacttaacatgtattaaaccactgaatacattttaatgaatgctaaaaggaaagtaaacaaggagctcttatttcaaatgctcttaggttatggaaagtaacaagctgaaatcgataaaataacagtttgttcatcagaatgtaataaatctagctgtggtcatattatgcctagaaaattagctgagacctaatgtttaactacattataagacaaggaattaaaatat

SEQ ID NO: 41140 - DNA, 1208 bp, Homo sapiens
atgagacctatgaaatccactcagcattatcactgctgaacacacaaaaagaatcattcaacaactgtttattatgtaactgagcaatacacacacgtttattttggcacattttaagaggaccttcacaaatgaatgctgtttaataaaatttttattagaaaatattgcacttgatttacatcaacaacgcacaaaaatgtatacctttaagtgtgacataattttagagtagctaatggttctgtttcatgtacaagtttttgttttgctttaggatgtgtagctggcaagatttttcagaacattggcgtaactgcatcaaaacaccaaaagtaatgctatggaacttctcaactcaggtgcctgaataaatactcacatgtttgatttgtcccaaaagtgattcttaaaatccaaacagcattttaggcagcacctttggaattgaccagtcaactcaggatgtgactcacaggggacaggtttagccataattggatagagttctctcacatgtgtagcatgaggaaaaaaaacaaccctcaaacccacaattgcacaatgtctctgcctgtctcccaatgaagaacacatggattcaaataaataccaactccaccaaaacgcctagggttaaggatttgctgcagagtgctaacctcccaaaaacccacccaggatctgggccctctggcaggttatgccagactcatgggcagaggacaccttcaaccctccacccctcctccccaccaagcatgggctctgagatttaggagagaggggtgctgggaggagaggaatacatggttcatctcctttttctttcccttgaccaaccacttctcccaaaaggaaagggtcctttggttcagttgcccaaatctgaaaccctagattcctctgtgactcctcccctttctttagccctaaagtctcttctactaagtcttctccaaactcaccaaattcctcacaaatccatcccaccccttcaactgccttagttgatccctcttatcatcacaaggttggctctatctcatttcccagatccagcatttcattctccaaagccatccttttcactggggccaaagttatcttccctataacccagacctgactgcgcactctcctagtctgcattctttagcagctcactgaagaattcacctgtaagagttcaaattcctactctaacc

SEQ ID NO: 41141 - DNA, 1680 bp, Homo sapiens
agaatccacaaagtcctaacataagaccccagcaatttttcaaattaattccccaaacaacaaagctaagcaagtaaatggaaccacaaaccgacccaagactaagttcttgtttcccttcaagatactcaaaagtaggagagtggcccagaagtacagagtcagtccaaactcccaacacacccaatgcaaaaaccaaaaaggtattgaaactaaaaaggtctgctacctggcgattcattcactaaaaatatgcttagaatctaagcatatgctccaaatctacgtcccaagagttggaggctgccacgaacatttggtgcccttataacctccccttctttctctctcgttttttttttttttttttttttttttgtaaaagggtaagcacagagcgtggcctctactggagcatcaaaaccacagcaaagggtttgcaagttcagtctaaaacgtgaatttcgagatattcaaaatcgagggccctagagtgacacacatagaaagcgtcaaaaaaacttcgtgcagcaaggaaaaaaagttgtaagggtgactgactcttctagggagaagggctaaggaggcagtgaggaggatgggatggggtgaatctgggtctatcgcggcggggcagcgagggcggcacgaaggctgacccagagctggggaccgggcagggaccacacctcccagccagcacggcaggcagagaccgggccgcgaggcgaatccgggcgcggggggcggggagggtactcgcccgaggtccacggctcgcagactgatccgccggcggccggaagctgccccagccggcccgacctgcccgccccggcctcggcggccccactcaccgatcagccggcgcacctcgtcctcgctcaggtagagactcacgctgggccccgcggaagccgactgcagctccgggggccgcggggcgggggcggcggcagcgccaggcgcgggcagcagcggcaacagcgcaagcagaagcagcagcggcggcggcggcggggccctcagccgcgggcccccgggaggcaactccggcccggccgccccagccgcgccgcccacgcatggccgccgccgccgccgccgaagaggagcgtcggccgcccgccgcaccgccgcccacccccggccccgagccgctcacagccccgagccgggggcggctgcccagctcatcgcaccgccggcccgtggcagccagcagtggcttcagacctccggagcgcgccgccgccgccgcctcctcgctgcatcgtccggagttgggggctgcccgcgggacgcgcccgtgcgcgccgccgcctccccgggagcgcgcacgcacctttcgctctgggcgggccggcctgggcaacgcgctggggttttaaagtgcctcggcgggcgaagggctcgggtcaccctctccgcaagagccggtccccgccccacgcggtcactgcgtctaatgtttgcttgtctattgtctgtaaccctcctttcccgacggacgggccaggctggagccaccggccgcgcctgcagctcagtgggcgccccaggtccccggaaacgcctggatgcggccgttctggttgcgaaaaagcagcatgctttcctgtttagtgggaaaactcaaataaatagaaatcatcctttatcttaccatcggtgatcaac

SEQ ID NO: 41142 - DNA, 992 bp, Homo sapiens
acacacaggctcgtactcactacacctgtccaggacgtgttcactgctcctccgtgtgtgttagctcaggaacaggagagttcctgtccacaacctctcactatctctccaggtctgtgtctagaaagatgtttcagttgcctttcagtgtctgcaggcatcaacatcaagcgtcatgaccaacatcatagcagaggtcctgcctatgtgctcgccactgtttactgcttttcatttatcctttcatttgcttctagcaacaaccctaaaaagtaggtctgattatccgattttaatgctgaagatactgcgactcagagaagctaatttgcccaagatcacacagatgagcccagataccaccccaggtctttgcaacacatcgctgtataaataattacgccattatactagagcatcaaagcgagttcagcaaatagtaaaggaaggagccggggttctgaggcactacatgttagggccaccaggggacgctgtttctctatacttggaccaggaacgcagccactcccctgcagacctcaggaatgcagcctgagtgtggccttgggaacacaagggagtcccacaaattcacacccagtagggcccaccccaccttgcttcagcacagtcttcagcccaccctcacccccacaacttggcaggggagcatggggaggctggcggttgcagataccaaagtagaagtctgaattggaacatgtgattcttctgctctgtcagaaattcttccagttgtggggcctggccgcctgattttcagggaaatggctaactgctggggcgcttctgatagcagaaagcttttcagagatgggctcctggggtgagaggatcctggttaggtcagtggcctccaaattgggatatgtaagatgatctgttgggggtgcaggaagaaaataacagaacctttatgtgagtatttataattttaatctaaaaataagagctgatgcggtggcatg

SEQ ID NO: 41143 - DNA, 794 bp, Homo sapiens
acataaaaatgacattctaaacagaccttttagggcactcatctcccaaatttaaacctgtcaaaattatttgaaattatatctattatcacttacaatgaaccttgctgtaataataaaaaatcgctgtgccttgatacagtaatagccagtgacagcagcacaggtacatggtatgtcaggggtgcaggccaaaccctatttgggggtggaggcacagatcaaaagaccactggagtatgccgcagccaacagttcagcgttcctgtctttaccattcttagtttgttttgggccaagggcctgagctgttaggtttgtgaagacttgctgacattgcttaagggctaggcattggaactatgacccttggggactttggtttcaattccagttgaggcatttcaagtcaggtggtttttgtttgtttttggtctactttacaagtgtccaattcctgtaacagaaaggaggggaggaagagaaaagggaggaggaagggggtgggagccttccactgcgtggtgctctgtggcactccctggagtgtcgactttgtgggcatttccccatcttgcacaatggaggggcctccctctagatcccgttccttaagttcttcctttcaggggcagatttaaaaatctcgtgggatttgtctgaatcttgacagaaagatggttcttatttattttcttattctgagacagggtcttactctgtgagtgcagtggtacaatcacggctcattgcagccttgacctccctggctcagcgatccacctcagccttcc

SEQ ID NO: 41144 - DNA, 4908 bp, Homo sapiens
tagagtcctgggcctcacttatggcctcccggctcagactatcagctggcccaggaaaaagaattttcaccaaacccctctgcccatgccccacaaactagggattttgagaaacgttattctgtataatgacatttttgaaaactctagtctttcaaagagtttattatttgaattaatttctcttaatatgggatagggaaggcctgggggtcgtttattcattttaagcacaaggatgaagtgagactccgaagaggtcagccattcacctaagtgtgcgggaaaggtcatgggagatgggggctggtcctcccttggggccaagccctccctgcccagttctgctgcacacactggacacacctgagtgtggggagtgctatgacacttcacacatcagtgaggagggccctgactttaagcaactccaagagaaggggctgaatttctgaggccaattcatcatcgaaaccagacccctacctgggcccagtgggaaattataatcccactcatcttcagaaagggaccttggaatggaagccttaaatgctattcagtccaaccacatgactggcaaaatccgtggaggttctttagcaaaacatcagcacaatggcatgttggctgcagaatactaaaaaggactctaggctgggcatagtagctcatgcctgtagtcccagttactcagaggctgaagcaggaggatggcttgagcccggtgtatgaggctgcagtgagccaggatagcaccactgtactctagctgggtgatagaggaagactgtcaccaaaaaaaaaaaaaaaaaaaaaaggactctagaggccagaaagtttcttctcctggcagagcctcctccctgcccctacttcccctggagagcagctccttccagaaggcccacccagaggtgggttcagtacccctcgtggtcctcaaattgcacactggggctgcttttgccttgtcatttatcactctgcactgaaatggccaggagtctgcttcccgcaggggaccgtgagtctcttggaggtaggggctgggttcagtaagtgtctgtaaaatgaatagggtcctcactggggcttctcttgtgtctgacttagtcatcatcacctcgagcaccctcacattccactgaggcagagccttggcactgccatttgatgaactgccagggtggtgtaaaatgtctagaatgtccatcttctgtgtcatggggaagagacagaccttgagcgagggctacaacctcaaatcagggctgcatggccacttgccacctgggcactctgggcctacctccagatattgcaggccacacccctgccaggtaggaaaggagccattttattttcctgctctcagaggttacgaaaccaaccaagcaaggcaagtcggccatcaggctcagcctcccatgaagcgctcctgacttcccacccttcctccaggccaggagtctgccaatcacaatctgggttctgttttcccgcctttcctggcagcacaaaccacggctccggatggtgagcaatgcaagttccaggcatgccttgctgcattactgggttcccaggtgtcacttcatccagagggtgagtccttcacaggtctgtgggctgataaacatgcaaatttccccacgcaaatgatgttaggccgtggcacctttcccactgagaaagcgccctgtcaacaagctgggaaaatgggtgaaagcccatgctttgcccgccctgggtagcacacactggccaagaatctgggcaaggccccctgcaggggcaagcgcacatcgcacactcccgcctcgagtccctgcgggaaggcagggacttccgcaggcctgtggtctggctttagggaaaagtccatttgctcacttgattccgtggtgtttccacgtgagcgcagctgtgtgtgtcagctgatgtgtgtgatctgagtggtttctataccgtcgtggaaacccccagcccagtggttatggactttcttggggcctcaactctccccaagagcgtgatcctcactacgggggagcggcgctttatccggcggggcgggtggacactcctacagacccactttgacccattttctcacagtttccaacccagagccgcagggacaggggcggactgcgtttccttccctgagccctccgcagagcctctgggcaaggcgggcagggcccaggctgcagcggggcctccggcccgaggcgcctgcgtgggagccgaccctaggcgccgggagccccggcgggagctccagggggtgcgggcgttagagagggctagggccgcgcccaggcggggtgcggggaacccgggagatgaagccgcccaggggcgggggtgtttgtcaccaaggttctgaggggccgtggaaggtttttacctgttttcattgggagcaaataacaaaactaaaagcgatggaggagtggggctgcagaaatggaagcagcagtgtggggaagccggacgcttcccggggaagagggagaggggacgctcagatccaaaaggcgggctgggagcggagtggggcagccgccggggggcgcccgcaagggctagggctcggggccgggtttgggggcgggtaggggcgggcaggggcggggcaggagccggggctgcgagctggccgcggcgcaaggaatgcggcctttggctggtcccgggccggcattccggccggcgcaggaatgtgagcagggtgttcactgcgcgctctgagcgcacaagtttgttctcctctccttggagaacgccggcccgctctgtgccaccctctccccaagcccccggtacgtccgtctgtccgggtggaggacagggccccgagggccgcgaccaggagggactcgcaggaggcaccggacaggggtgcggcgagaccagtcgcgctggaggaaaggagggaagcccgcagtggtccgctgaggcactgagaaagccaggccagtagctcaaagaggagataggacgtgcccctctccatcatcagcctcaaggggcacagggttcagatcccaaaatgtgcccatttagggggcacattgtgaagggcaagacctggggagagaagagggaaagcggacaatctagtttaggattaggtgctttctgatcggccagggagtgactgaatacctaacagcatttaactcattcaacaaatatttgctgagcctctgctccgtgccagttcctgagattaattctgggggcacagaggtgaagtcatcctgtccttgaggggctgacattctgatcctcaagacagtctctgaaacaccgagggagagttgggggaagcccagggtgtgggggaacaccgaggaataacacagattgggggtggagatccaggagggcttcctgggagaagctgcagagtgacacggaagatcagtaggagtcagcccaaaagatgggagaagagtattttagacagagggaaccttatgtgcagaggaagagcctgtgctgcgattggcccccaaacagagcataagtctgctcctggcctctccccatgcctgccaaaggcccagctgagtcacagtaagggtcagggtgtccatctcagtccactcatgatgttggttggtctatggagcccctcttctgcgagaggcacagcagtggcccgtgaagagtgagaagagaatcaggactcagcacgctgctgtgggagtattgtggggactgatagataatgcccataagcatctggtgtggggcctagcacctagtaggcgctctgtgtacattggctggtctctcagcaccttgcctgattgactgactcctcttccccttcgtagtactgatttctggttccgaaaaggcagctgtccagctcttcatccctgcggaggggccttcccaaggggaagaccatgtgggtctggtcatggaacttcctgctttttgtccttccctgatttgggggtggtagcatgcaggacatgagactggcatggaagagggcatcataaagatcctggaatacatccagggcacccaatgctgtgggcaaggaggaattggagcagagaaggaccttgcttgcaggtgcagcatgggagattggcccatgggctgagaacaggatgaatgaagcaaggagggtcagggccaggaaggctgaacttgggcagtatccagaaaaggactaatgggagctcggagggcagggacagaaagcagagctgggaggttgtcactggggtggtagaggagatcagacccttcagctgattagctgaaaggtggggccaggactgtaaatctcctactagatcctcactcggcttgggtcagtatggatctgagcacatgaggccacacgggatcttagtctctgtgtgtcacaaatgtcactgagtgatggaacagaaatgtttatatccagaagttctttgtcccatgaatgcactgggacctaaattcttatgtgcagaggaaaagtgcaggccttggaatggcctctccagcattgttccttggcaaacacaggaagatgggtttcctttagctttgtggtgctgacatctgaatccggacccctcccccagcctttggggtcagggagggaggcagaggacgaagcagtcgatggaaaataaacagccacctctgcttttttgacttatttcatgttcttagaatttcctctcttggattctggctttgttattttaaaattccacacgttggttagggttgagaaaaccccctgttgctattgctatggagaggcagctctacgctgggggcacagagtctcggcacccctggagaagtaagccggccagcgggcctgcagcccagtctccaagtgagtttctgagtcagcctgtgcgagggaggctcttg

SEQ ID NO: 41145 - DNA, 3238 bp, Homo sapiens
cctctagagagaaggtagcttgatgaatcactcaggaagagccctacttgttttgtttgatgagcctgggatgcatcagatatctctttaaagcactggttctcaagcatggctgaatattttaattacctggaaattttaaaaatcagagacgcctgggtcctacctccaaagagtttgattggattgttgtggggtgtggcatgggcactgggactttgacagctttccaggatggtcaggtggtgagagcactctcctgccaggcctccagctcacgcctgtcaggctctgacacttcccaggtgtgcctctcacgccctcctcctgggctggggccaccccggaaggggcgctggcctctcttaaatcccactcatacacctggcctcaggttcccaggaggatttctctgcctgctttacattcaagcagttgcaaggtagtcccctgagccacaggctgcttagctttccctctgcctcagtgcccctcttctggcgctttcctggagctccaaagaagcagtggatgagttccgtgtggtccagctgtggccacttccagagggccttgggctgagcttcctgagggcacgtctacacacacccgctgagcaggggacctgtgtgctggccacagaggtggcaccggaaggggattttctctcgctgcatttcctggcattgagcagcgccttttgaggtagtctctgctgagtggtctcaggaatgccattcctcattccagggaattctgtaggtggggctgctggtcaccagccagtgtgtctaatggcgaacatgcaccagtcacaggtttgagccccctcccggaggccacgactctgtttcctcttcagcagtgcagcaggcattcgatcggctgcaggaaagaggacgaagggttgacatgattttctggcaagaaagattgctccactcgggggtttactgtcaaggcaggagataaaatgccctggctcttgaggccttttcatttagttattaattcaaaaacacctttagggattttgcttttaaatgatacatattctttatttaaaaaatacaaacagcaatgtacccagaagaaatggaaaaccactggctagagaaaactactgtcatcaatgctttctgggcctctgaagaagcccatttctgctggcactgagtgtgtgtttctccgggcaggagctggtataacatgacccttgaaagcactcgcagccctgggcttacataagtaatgtgatgactctctccacagagcccctctagagatcccaccactccgccctcttggaaagaacattcagtgtctcccacaccagaacccatccaaggagagaggatgccgaggtagtggctcatcttccttggtcccagagaggcctcggagcagtcctctcttgcttcacagccctccaactatgctaagaatgcgaaccatttcccatgggactggcaaagccatgaagcaattctgagcccaacctccccaaatatctgctttgcaaacagataaaacagagaagtatcctgaaaatgtgctgttgggccattcaccttaggcggttgtggtgtctgcttgcctgccaggagggtttctgcttccacagtccagcctggagctgctggggagccagtttgggatgtggccatgttccctgaggggcaaaacacagaaaactctccggaaggggcttctcaaggaaatggggaccaagcaaggctgtgggctcttttcagggatccggctcccatcccagtgctggactcattgctgaccagtccttggggtcacctgggtgccctttggctcctgagatgtctgggcatggggctgccttcaccagctgcaagagcccaaacccacctcaaccagcctttggcatctccagtctgcaccagctgcaattttgtggcccgggtgggtgaaggcagtggcaggggagtccatgccaagcctggcagtgggaaggaagaggaagaggaagaggacttaactttctcagcagcttcagccttctgagaaactctagaatgccttgctgcactatggcaggcataaccaggtcccggtgacctacataaccttccagacatggggcaagtgggagccctgattcatgtcaggggagcctgacagaggaagggtgggggcagggaggatttacaatcctgagacggtgaaaccacctaaatatttagtgatgactaagtgagtcaccgcatgtccacagggtggaatattatgtaaaagtgattattataataataaagactatttagcaatattgcaagtgtttatgatataatattaagcgaacaaaaggaagatacatacctttacggcacctgaacaagagaagattggaaggggattttaaaaaataacagttgctctgctacagtggtgtgattagggaccttattcttggaaaagaaagcagcagctttacagtcagacagatctggactagtagcttagatctatttcttacttactagaaacgatcttgacaggtggcttaaatgcgattggttttccatctgtaaaatgggtacagtaattcctgctttacaaaattcttgtgaagatgaatctgattgtgcatctcctcccttcttgccttcctttcttcctcctctctctctctacatattttcactaatactgcacaatccagttgcccacaaaggatcccacagctgagtcatccttgggtctgctgaaatctcttttgctttagggaaggtgcctttgcctgtttctgccctaagcggagctgtggatgaggaggggcgctaatgatgaaacagtccgggtgggcttggcagggggaggctgggctggtcctcactctcagagcagccacagtgctgtgcgttgccagcccaagcaaagtcacaagagccttgaaggtagaagcaggagtaagggagcctgcctggcagataccacactgagcagagcccgctcctgtctctgcttccatggcctgactcaagctctcttttaaaaaattttatttttgtattgacaaatacaaatcgtatatatttatggtaaacaacattgtgtttggaaatatgtatacatcgtggaatggccaagtagagctaatgaacatatgccttaccttatactaatcattgtgttgtgggggaggtggcggaggggaaacgtgtaaaatctattctcagcaattttcaagtatacaaaacattct

SEQ ID NO: 41146 - DNA, 1049 bp, Homo sapiens
ccagtatcctggtctgggtaaccctgagggttagtctctggtttggctgaacgtgtccctttcccaaaaaccagggatgggctccaggaaagctgggatggagagcagactgcactaaggaaagagtgccatcctgtgttctctggagtaggggggcacctgccagcattttcctgatgccccagccactgctttgtgccccagaggcaccacccttctttaaaggcactggggacagtccctggtgagcagaaaggtggtggccacagatggcttagctgaggagcctgcagtgagcacaggaacaatggaaagagcctggtgcaaggttctcagcgaggacaatgtgaggttgtccacaggagtttgcagggaagcagagatgacagagatgccaggccaaggaggctgcgggaagggtggccaaggcaggaggtggcatgggctgtgtcagagctggcacattgcagcaggagtgaattgagctcacagggaggaagaaatgcctggaatcccttctgctggcagtgaatccaggctagaattgtttgtgaatttgatttagtcatccctgtctcaagtaccttctatggttctgatagctccagattccagtccaaatccctcattgcctacaaggcctctaccaccagtactgatttcctttcttggcttcttccaagcctcaggccctatgatccctgcacttcctttaaccgtggctccttcctttatgcctttgctcttgtcttttgttcttttcccacctttccttcacagtaaaacactaccacttcctggaagccttcctgaaacatgctggcaccgttggtgacccagagcagctctttcatctgggagtgtcccttcttgagccacagacacattaacataggtgatccaaggccttaggtaatatgcatggaatgaagaagtcttttgtgaaggctggaggacaggggagcttagcttccccattctccttcacccatgctcatgtaaacctccaattaaaagccaatcttcccaaatgcaatcggaaaatcaaa

SEQ ID NO: 41147 - DNA, 2073 bp, Homo sapiens
cataatcttgcagtatatagaaaatcctaaggaatccactaaaaaactgttaggactgataagcaagctcagcaaggtgacaaaacataagatcaatatacaaaaatgaattttattttcatgtactagaaataaaatatcagaaaatgaaatcaagaaagcaactacatttatagtagtattactaagaataagatatctaagaataaatttaataaaagaagtataagacttatacattgttcctactacattctagtggcaacagttgagaaaatggagggacgtcagcttggccaggccacattgtcagggaggtacaggcacacccagcaagaattctctgtcacagccttgggaattcatgccagtttgcagctgctctgcccgacttcagcgcccttttgccccatttaggaaggtggtgttggctgtgatcacagccctgcaattaatgtctctatttcaagttatgtaggtgatgggaactcagtggtacaaagtccagaatggcctcttattttgagaaactttccaggggccctggcctcttcaggccttatacacaggctgcaccttggaatgttggttatctactgcttcctgctgctggcaaaaatgcaaagtttaaaaaataagtcttttattttaggacagttttagatttgaagaatcattaagatagtataaatagttcctgtataccctgcacccagtttcctctattattaacacttttgcattagtaaagtacatgtatcacaattaaaattgtcattaactaaagttcatgtttattttctgtcccaggatcccatccgggataccacagtacctttagttgccatgtctccttagatccctcttgcttttgatagtttaaaatgcaagttttagcttcaacatgaagatgttgagaaagtctgagatctggagtcagacaagccttgactcatatctgagctctgcccctattagctgaagacctagagtaatttatttaagccctctgagcctcagtctcctcatctgtaaaatggaggcaataaaatctaacttgcagggctgtatcttgcaagataatacatgaaaaacacccagcacagtgcctaacacactggtgtgctaaaaaataacactattcataatgtgtcccctgcctcacccgtccttcccagcgctacagtccctggtaagccactgccctcttcttctcctagtctttgctgtgctgagcaggagcccttgccgctgacacacactccatagctccggtgctgcatagacccaacctaactcactggtatgggaaggcagcacctactaacactggctgtctcacaacagctggattttccccaagtcttttccagtcaccgtaggtcccagcatgtgagccagtgctccttgtcatggtgacctacttgtcaggaatgcacaaggctgtcggcccctggctttgagtcagtacccagaagctctgagtgttctcctggccaaacctgatccccaccctggtcttgcccttctgaaggcctgctggtgaagggataagcctgctgcctgctccttcagggctgtattggtagggccaccaggacacatgagtgaattttgtcccattcatctgtttgccattgactgcagatgctgggtgtttgctcagaatagaaattctcctgtaggaagactgagtccatgtttaggggacccatgtgtgcctgcctgagggggtgtgtgttgggcgtgggtgtgcattcaagcctccaaaaatgtgtatgtgtgtgcaagtgtgtgtataagtgcgcatgcccatattgtttacctggaggcttatgatgggtgtttgtggcaggtgtgcatgtggacaagcccatgagtgtatttcatgcctgtgtgtttggtgtgaaagtgtatgtatgcatgtggtgtgcatgagcaggcgtggaagtgcatacaatggaggaaggaatcttcatcttgccacatgtctcctgtgccatataacccgggctcagatgcagaagccagtcagatggatagaaacttcctcacagtcatggccctgtgcct

SEQ ID NO: 41148 - DNA, 3141 bp, Homo sapiens
tgaaagtcttgtgagaagacatggagagaggcggagccaaacacacactacaatggtggagaaaggaagagagaggggcctgtttttctttttaagttaaaaaaggttattgtgttttcaaggcaaacctagccgtggtttttgtagtcactctatggttgagattttggtatttttgccataatgcaatatgctgtgaagatttccatagtacactgtgttgagcaagaaaggcttcagaagagagactgggcagggctcttttcaaggctcctgaagcttcaaaagaaggccaacttgatgcaagaagaggcaaacctgtgcagggaaataaccaaattattgcccaacacacctggaatgtgcccccaggtaggagcctttggacttgcaagaggcatttatctcaggacagatcatgacaccaggttggctcagaatcaaaagctgatgggcccacagagtagagtagaatgtgtccctgttgcaatcaagtgcaagtggcatggctctccagggcaccgagagccaactgtcagatgtgccccactcccactcctgctgggggctggaggtttggctggtgggcgagagcagggtgcacatgagagtcatttacagtttggtcctcagcaaactggtcagccctttcatccaggctctgtggtgataaccccatcctgcgcctagaccgcaggctccctttgtgggtacctccaccctacagagggggctgtttttagtggatatccagtaccagccacttcatctgcagaagaaaaactgcaacttcattgacttccagatccaagcctcacctgggagagacaaggatgaacccaagtcctgggtacttcccagggctccattcccatcagggaaacacaatgcccaatgcccagacagacagatttactgtgaagctaatgaatcttgtacctcggggtgctcacttgaagaagccccttccaaaactctagatctaattttgtattcaccactttgcattctttttcttcaagagggtcctccaaattatacaggcttcaggcctcacaaaattggaccgacccctgccaattctccttgactctggcaaaccttagcaaacatgggtgccttgggctcagggctcatgggcctcctttccaaacctcaggacctccaccctggcagcctagggaatgaaatgtgggagattccagctcagagcagatagtgtcctggctgcagcccagcagaggtactctggggctgctgggcccaggatgggtgaaaggggactctctgcaatagaaagttcaaagtgtcagcctaggaaagaggagccgacaagtgtgaaggcagcagatccaataacacttctaattgtgtccacatggcccactggtggggcatttgctgatgacccgtggttgaccgctggcttaaagtagatgctgtgatacaaaacaccactgaatggtgcacttcaaaagggtgaattttatggtatgtgaattctatcttgtttggaaaaaaaaaaaagatgcttagggttcaattgctgtggcacttcacccatgtgttagatccaggcatggcacgtccaggaatgcactgctggttgcgggggtttctgaaccacctccagaggggtcggtcgctcccagcaaggcctgatcagggacagcttcatcctggccagccccttacttgtgctagttgatggcagagtggtactgcaaacaactttcctgtctagctggagttcttcgggtgcagtaaagcggctttggctatctctgggtgactgggccccaatttgctgcccttgtcttggcatattttcaccaagcttgctgagcctggtgcatacttatgccaggggaagagttaacaattaaccaggaggtgagaggagggagagaggctggggcagccactcataagctgccctccagcccttgcagccatgggctgccccctgagccacatccccagccctgttggtggggacactgggtggaggcagggcaggcaggttagggctgccccctcaaagaggaacttggcctccaaagggccccgctgagccacctgggctctggcccaggctccaccccttcacaggtgttagacacagaaggcaaacacctccctccacaaggcctcaccatccctgccacagcctgcagctccactagttctgaaacttcattagactgcatttcacagggcaccgagcagctcactcatcccctttcccgagaggaaatgtcactcagatgcactggtcaccatgtggcaggagagcacccatgccctgcagggacactagccagaagatattggtgcccctcacacctttctctgggacacatggtcaggcacgcatgtacacatgtgcacacaaatgcacatgcacgtacatgtgctgggtacactgggaccgatttcttattcctcctggtctgtgccaaggaaacattaaagtgactttccacagactggatctcacagaaggtgcagatgctttggaagcccctggccaaaggtactggggtgagatggcactgttgtcagggcttattgttcacaggtctgagttgccaagctgtcctttggaactccctgccacaggcaccgacattttgttttggacagcaagtcagcaaatgtagccatgggctgctgtggcccagggaggagcagctgtgggagggtgagaaggagccctattgttcaggccgcctccatgcactaggcctgcatgtcaggtgagtaacctatttgtgaagctgactctagttcagggctcaatgggagaaaggctggcatagatagtgccccagtggcaggaggcaggctggagggttgggtggaggtgtggccatggggtgggtttgatgcctctgcatggagagctcctcatccagtgggacccatcaccatctgcaaagttgctagaaaagtttctggatgtttccaattcttccacctgcttgtcttcatacttgtgggctggtaggccagctcgggaagacaccttctctaggatctcaacttagttactcatcaacatggctcccgagttcccacattggccccgaagacacttcactcacggccatggtgggaaactgttcctgtcacatgtca

SEQ ID NO: 41149 - DNA, 3406 bp, Homo sapiens
tgacatcagtgtcaaggaagcccatcttgacttgggccaactggagaagtaaggggaggctgttggttgagagacctggggcaggggagaggggactgtgagcctaaagtgctgggagattatatcggagaaaggagttcccttctaagcctgggctcccagtggttcatggactggaaatctgcctgcctctctcacccagcttcctttccacagcctcttccaacacaaatctccaaactgggatccagggaaaactaaacagaatccacactgccacaggtcctgtgtgtatgggcaggggttgggggggtgggtgggaggaatgtggcccctcctctgccactaaactagccctagtgtcctgcttcagtttgggctatggcatgttggcagagcagccattcccgatcttttccctctccccaccccagtactccagctgcccagagctggggagtgggggatgagtctggagggcacctctgtacccatccttcctggcacccagtcatgcgccccccacacacaacgaggggtagatgtgcaagactccagagctacccgaggcaaagcaagcaaatgggattcaattcgtatgggattcagttcgccctggagttttatctgcgggcatttcctatgataatcactctctgggccgactcccacagagaaggcaggggagcggcaggaaggaatgcggagccttcctgacagattccaggcgctccatagtgtgcccggactgggagcaaggaacatctccaaggcctctcatcgcgaatttgtcccggccaagcccctcagattcacgtcctttcagacatcaaacgcctgggcctttacaaaaacctgcttccgcgcccccggccgcgaacctctgctgcactcgcccgctgcgctctctgaaggccgcctttctaagccagcgcgcgtctccagccttggcctgggctcctgctcgcctaaggaaccaaagacagtctccaagctaggaggttctggcaccccagccagggctcccgccccaccacgagcccgggcggacctggagcaccggtggccgctggtacgcctggggcgagccggtgagggtagcccgaggcccggagaggtctttaagcatcgcgggtccgcctccctccctctcgagccctctttgttttccaaatactctaacgctgacgtcaccgggctggacagcaggctgcattctttctaagtgagggccaattcgtggctccagagaggattttccaaggaagacaaagaggaattcttggactagttgggggcaaaggcacctgtaacccccacctaaccaaatcagcccgcaggaccctgcaacttgagctccaagcggcgcctccatccctgtcccccgccacccccacccccgccgacctgcaacccgaaacactgtggctgttgtctccggagtcggccctctcccctctcccccagccccaagagacccgcgcgtttctagagccccgcaaagcccagcgcgctgcgctccctgggcagagcggcccttgccaggcactgcggctgcctcgaaagggcgcactgcgccccgaggacgctcgatcctcgaggctccgactcccggaaaaggccgggttgcgccgagactccagctttggctggggcacgtttctgtggcctcgcgcgctctcccgagcgccgagcggccttccttaccgctgcggcccgagggtgcccagcgcagtcagacaccacaacctccggctcggcccagctcagctcggcggcgaagatgtgttctcggccgtggcgccgacgctctggctgttcgcgccccagcgcgcagccccagggtcggcccgcgccggaggcggctgctatgccaggaatgtgagagtttcaggttccccctcgggatcaaagcgaaccacaaataacctctcagcgcaccgccctcctccgccctccgccttctcccgctccctcctcccggcccccgccttcctccggggaggcggcgctgctggccgagcgccggcccggcccccgagctccgttcctccgcgcccagcgccctccaggccgcggtgtgtccgcccctgccccatgctttgccttcggagctgctggagacaatttaatccaactctgcccattatcgcctccactcccagtcgccgacccgctctcacccttcatccctaaacccatcgacgggacgacagcaagggctgtaccacgcgtgtcctggggttgctgcgggaggggactccggctgtgtgtgtgtgtgtgtgtgtgtgtgcgtgtgtgtgtaccgggggaggtgggaaagggaggagggactgcaaagacatccatatcctctgggctgggacagtgccccgggctaagtgaatgcttccagccacagagcctctttcccctaacccccgctgttttcacccccagcggcaacctttgaatgcacttttgtttacaaacaccttcgccagctattttacgaccgtctcgacaggaagtgtgaatctgggttggaaaatccggtcaatttgacccacctacccaactgaatcacccgccgccaggcgctctgtccagttcttccccaaggtgataataggcgcccctttacgcagagtgcaaggtgtgccaccgctggcttttcgcccagtcatccgattcagccctgccaagcaccctccaacggagttctgttatcatccctgtgttgtaaatgaggacaccagggctcagagagcttaagcagcgtgcccagagtcacacacagtgagaaccaggtaatcaaccactgggctgcttggtttctcattctcaaaacccctccctggctatcagaatccaggctccctagatggacagggcagacactgggagccctcctctctccacttaccctgtccttgctttagtctcttctttacctccccctacacccctgccagccaggggctttcccctgtacccacttctgtggctcctgcatggaatcctctcctctgcccccaggacacttccactgctagatggaaaccccttcttcagaaagctcgctctgacacatgctgtccccgttccccatcacacaagccctctctacaagtcagttggggtgaggtgggggcagtcaggcccctgtccacccagagagtcagggctgatttctacccctggctgggtcctcccatcagcatggagtttgcaagtcccaaattcactggagggaaacaaggacaaggaaattctgcaagcttaattgccagggacattgttaatttttaataaaactcacaaaaagtgtgtgtgtgtgtgcgcacgtgtgtgttttacttggaagtcaaatactgtgtttcaaacagtgattggatctgagatgattgagcaaatggatcatttg

SEQ ID NO: 41150 - DNA, 2480 bp, Homo sapiens
ggtgagccaggtgagggcttaattaatccagtactcaataattaaccgagtactacccagtggataactcaaagcaagacgaagttttggttatacttttgaagtccctgtcttacaagtgctccccactttcctgctgctactcctttgtccttgctgctctgtctcctgggatacccttctcactttcctcagctgatccaaacctgactttcggaggcccacgtagattttccacctttgtaaagttttctcaaatcactcgagcttcagtaggccttctatccttgaactcttgcttcttgtcctaacttaatctactaaacaagctaggtcagctttgtggtcaattgctcaggtattattgcctccaactgttacgtgtacattttgtacccatgattccttagtagatctttccacatttggtctcaatctttttcacctgtcccttctccaaacacctccaaccctgtcacattttccagccttgacagttaaaacccccttttccacatcactaatgccactcttcctttcaagataaacgcaggcgtcagctcttgaaggtcaacatcccatttccgggattaggcgcgaaggtgccttccctcataaggggctggaaggatgggaagcatcaagataatcaatgcccagggcacactgattatcttgtgtattaaagccaccgtcccaagtactcgtcacccagtacgaccactgtttcctgaacaaacttttcttactcacgtgacagtcccgatgcctgcaatgctctttgtttcttcctttttattccagtgaacccacagtcagtctaaaaatcttaggtcccaggtcgcttcctataggaggccgcctccaaaccccaggctgagtgcggtcccggtacccacccctccaggggtctcacagttccctaagcacagagcatggcaccaactggggagtctgtcaaacagcccagatgaatgtctttccaaacacgcggtgcctgcgtttccagggacagggacacgtcttatcaatttctatatattacagctttgtaaacataatatttataaaatcaaagcgggaaagccttgttccttgctagaaatgagcctcgcaggccaccaccatccgcaccgtacgacaggccgtccctcagctgcggcttcctgcctcaggcaggatgtaccaaacgtggaagcggagacggggaggtctgggggtgccacgcaagtccctttcctcccgacacgagtgcagtaaagaaaaacggttatgagcgtaaagtgacagcctcggccgatgggaatagggggaagtccgacactgagcaacgaacgcattcccgcgcctccaaaacctaggccgggggcgctggaaacccttaccggcacccggccaccgcggcagacgcttgctcctgccacgccccccccccctcccccgcatcacgtgtctgcactcgctttcctcggattcccggatgtgggtgagttcatttgctcgcgtgcaggggaagtctggagaaggcattgtttcaattattaaaagtgtgggggcagtgggcggaacaaacgcgccgactacagaggctggacgtaagcttagcggtggcgcgcgtgcgcagcgccggcccgaggtaacggcgggaaggctcaggggcgtgcttgcggcaaccctgtaaccgccggtgcgcaagttggaggggcaaggggctgccgtgtcctggtctggaggcggcccaggctgccttggtgattctggcttcgcggcctcatggcttgcggccggtttgcgcaacggcctgcgaaccaccaggcgcgtccccgccggcttgggtccgccccgaagcccagtccctcggcctggcccgctatgccctgcacactggcggagtctggcgtggcgcagcccggcgtggggttcggccccgccaggtggtcagcccttcctcggagtccaggtggctgggggcgcttcggagagtggccaggtgggcgagcgagctgcgcccagtactcaccttccccggcggacccaccttccttttcagcggagagaccccagtgcggcctccctgccagggctgctgtctagctagcgctgttgggactacttcattcacggcacaaggggacccgctcatttagtgtggcatgttaaggttggcagcttttaaaatagtgagttggtttaaacggttatgttagtacaagaggtacggaaatgtggcataaatcgtggactgaaattggagaaccctgaactaacggctccatgcacacaaatgagggatagaaagaaataaggacggtttcttaggaacactttaatcatggagatacttgaagacagtacatttaggcttataatgtggtttttcttacgtcccttacgacatcaggagagtaaagatgagtatgatgtcagagacaggtcgtcttttacagtttcagcaccgtacgctgatatgcacagagtag

SEQ ID NO: 41151 - DNA, 1392 bp, Homo sapiens
ctccagttgccctgaagtccatgtctcagcccacactttgctgggggactcaaaccaagatgaaaatgtctgcgtatctaatgtgtctagttaaatagttttaaaagaaaatcctctttctgtcttatctgtatgtgaaaagtgacagaactaggaaaaaacagatgaagccacaatcataggggagaattttaacacatttttcttagtaactgatggaataagagacaaacataagaatatagattttaacagcatgatcagcgaacttgacttaatttttatatatagaatattatacaacagaatttcagagtacacattcttattagcacaaaaaatacccttaccaaaattgaccatatgctgggccataaagtaaatcttgatacagttcaaaagcttgacgtcacaggtgtggtctctgaacatagtggaaataagttagaaaaagataacttgaaaatctgcatacatttggaaattaggacatgaagttctgaataattcatggatcagtgaggaaatcacaatggaaattagaaaatactttgaattcaaaatgaaaatacaacatcagacatacagaatgcagataaaatatctcagagggacatttatagccataagagcatatattagaaaagaggaagggctgaaaatcattgaggtattgattcatctcaagaggttgggaaaagaacttgctaaatttgaagaatgtaaaaagaaggacattttttaaaaatgaaagtaaaagcctggaagtgatatgacatgagaaaacttccaaaagaaaactgatgtaactgtattggcatgagacaaagtaaacatcaaagccagaagcaatactaaagatctagggacacttaaaaattatgaatgggtcagttaaccaggttgctttaataattcaattctataaatacttaataatgtagccttaaaatatacaaagaaaaatgggcagaatcaagggaaaaattaagtacatggtaatcatggaagacttaacaagtagctctcaattaatacaacaagcagagaaaacctcagttcaggtgaagatttgatcaagattaacaaacttaacctagttaataaacttgacctaattaatctaaatagaacattgtacctagtaactgctgaatacacatccaagtgaatatggaccatttaccactactgccgtaaagcatgtctcaacatatttcagaggattagaatcatgttttttgaccaaggtggatttaatctagaactcagaacaatgaaagacatccagaaaaaatcctcaaaagcttggaaattaagcaatacacttctaaataacccatgaatcaaaagaaatcaaaatgaaaattagaaaatattttggactgaata

SEQ ID NO: 41152 - DNA, 911 bp, Homo sapiens
aaatagacaagaatccgaaaatggtgaccccattttaatgagggagagaccccacgataaacaaaatcgattagtaaataccaacccatgctagagagtgaagagctctggaggagaggcacgggtgcgcccctggagttgctctaaacagggtaggcagggtgctcttgtcacagagaagatgaacgaaggctcgtttgatcatttaaagcggatccagtcctgggtgggatgtaagggcacgaggcctccccagctccttcgctgggcaccctatggggggacagggtgagttgggcgggccgctgcggttctccgagagcaccacgagggggagcccggacccctcctagcgccttccgagccctcccgcacagccttgcaagcaaaagtttttcttaaactaacaatgccagtgtaaggaggtgctcgcgcctgattggccgggggaattttgcaggtttgattccttgattggacaggaggtgttaggggtggggagagagctgatggtgggggatcccgctccctcccgcgtcagtctggccggctccgtcctcccgtaggctccgctgtagctagcaatgtgacaccaggacgcactcgctctcgcgcgctctcccaggctcgttctccctcgccctctctctctcacacacgcacgcacacacccacctctcccataaacacacacacacacatgcacacccacacccacgcgcgcccgcaccgccccacgcgcacacactcctgcccacgcccacgcagcgctccgggaagtccggtccgggcgagagcgcgaaaggataccgagaagccacccgcggagagcgcagcggcgccctgggacgcggcgctctcccggcgctgctgcctcggcttggtctcggcctgcgggccgtcggccggcg

SEQ ID NO: 41153 - DNA, 1325 bp, Homo sapiens
ctggaggcccccttcctgccttggccagaggggcggggcgtaggctgggggcggggccggagagtgggcggggcctggcgcgtgggcggggctccgggcgggccggccgccgagggtggggccgaggaggaggaggaggaggaggagaaggaggtaggggcctgcgggtggctgggcggggcgcgctcgggcctccgctcttcacgcgccgcattcgtagcccgagagtccgcgccgcggggaggcttggaggcaagcgctgcccgcgagctgagccgccggaggaggagccgcgggcaacgaggtaggcaaaggaacactggccgcacggcctggagccttcagctccctcgtcccggcccgagggggtggcgaggctcggggcggcgcgcggaggccggggcgggcggggccgggacctgggggcggggaccggcctggccagaggggccacacggagctgattgggctgtggaagtcggaattccagtcggtgcggtgcggtgcggtgcgttgcctcggcgcggccggccggtcccgggacacggcaccagggaggtgtggaaattgcctgccccaggggcgcccgcggaggagggtaggcgggggcggcctgggccctcccacttttcagggctcctgggccagttcgcccgcacagccctcgggaacttgttaacaggaaagcctggcagagaaacaaatgccagcgttttggaagaactgagagtcacgtcgttaggcgctgaggctttcttttccttccccgccccctgcccaacctcggcccgacttggccaaagaaggatgtgtcaccagctccgggccgcggacgggattcccggcccgccaggagccggggtacctgaaacaaaggtaaacggaggccgggcggcccctggtcctgcaccgcggccgcgctggagcgcctcggtgggtctctcccgcgccgacctggccgccgccgccgcggaggggcgttctcctgggggacctctcgatggaaaccagctggccgggcttggagttgatgttgcatccgaactctgttgtgctcccgttattcccagtcctcccactctggtaaagcttaaggaaattttatccagtcttggtggtcagcaaatgtaggggaagacaaattattgtttgtaaattataaggtattttctaattaggaaatggcctgaaaacattaaattcttaacacgtaagcaaaaaaagagtaattccttccaacatctgaggaagtattcctcctcaaatcttcatttatgtacaaaacatcccccacacctttggtgccaggcatttttctttgttct

SEQ ID NO: 41154 - DNA, 2136 bp, Homo sapiens
taaaaggttgaaaagaaaaaacagcaaaaatgtcctaggcagggagtaaaatatgtgactgtgtgcagtgattttgaggcaggaaacagcatgttggggagatttttaaagcctagtatggccagaatatagtgagcaacagagggagatgtggttacaaagtctagcaggggccagatcatgcagggcctagggaagccactgaaaattgttaagcaagggagtgatataatccctaccccttaggttttctgaagattattctgccagattagtggaagtgcaagaacagaagtagggagacaaataaggaagccattacatacatctgaatcagagatgtggttaattaattcaggagtgaataatcagaaaacctgtacatgacatctcagattaaaagatgaacacaagctagccaaagagggaagggcatttcaggcaattgaaaaacatgtacagtggcattaggtcccaagaccataacctattccaacactataaacagcctggtatggcagtagcaaaggatatgtggcaagagtgtaatccaaacaagaaagtatggtaccctgaacttaagccagtggtggtagggaggaagaggcagggttgtatccatatggtcaactgtagtgaggtgaggaaagaggaacttgggataaccgagtttctggctttgagtgggcagatgacagtgccattgactaaaatagggagaaccagggcagtgggaaagatgagttcaagtttatacatgctgctgttctgaaagagccatctatatagtaggcagctggatatatggagttctccagcttagaaagaggctgaggctggacatagtttggaaaccacaggtgagtaggcagtgagtaaagccatgggaaagactaagcttaccagggaagtacaaaacgagaagagcttattagtccagaacctgggacgcactggcattgaaggagcaagagttctaagatgggtaattttattgtgagacatacggcacattgtaggatgtttagcaccatccctgcactctacccactagatgccagtaggacccactcagtggtgacagtcaagacacagacatgtctccagacatgcccaaatgtcccctggcggcgggggacaaaatcaccctagttgagaaccaccaaaattaagaggagtctccaggatgctgacaaaggagggttattgaatgaacttccttttgcaaatgttttattcaaaaatgacatacacaaaaatgtataatccctcccccaatataggattaggtgtcactcaccaacatgcccaaaatcacattaagtgatcaaacccagattggaacctgacttttatagtctgactccaaagcctgtgctctaagcctaaatcacttaacccctaactccataaggtctccattaggcttcaagtgctgtgaggagagggctgattcagtctttttcatcattataatcctagcatttggctctgacacttagcaacaggagttcaaatatttactgaatgagtcacacttcacacttaactctgaaaatatgcgttattcatagacctacactgaggtatttaacactgatagcttacagacaacacgttagggcaccaaggggaagatgctcccatcctgacaagaaatcagcagcattggttttgagaattttgttccccagaacagaggctctgccatcaaccatttcacttgcattagcggaaagttcctctcctattgcctccttatccagcacatcccatgccgcattgaggcctcaaggagatgggggaagaggagtggaaacaagaatggaatggaatatttttattaaatgaacaaattataacttttgacagtatcataaactggtagtcatagggaacaattttctatcaagtaagctttttaaaaggtttaaacctctaacctctattcaaaaatgttggcctaggctgggtgcagtggctcacacctttaatcccagcactttgggaggctgatgggggtggatcacctgaggtcaggagttgaagaccagcctggccaacatggcgaaaccctgttgctactaagaaaacacaaaaaccagccaggagtggtgatatacgtccgtaatccct

SEQ ID NO: 41155 - DNA, 4042 bp, Homo sapiens
tgaccttaagtacctgtcttgcaaaaaacaccaccgccacctcttctgcacccattcagtgtcttgcttcaggatctagatagagaatgctggataaacctcaaatgaatattatttctcccttcagccacaactgtcccaaattactcttcttcctttatctacttttaaataaagtggaaaccttaacgtgcctgaatttcccaggttctgactaaacaagtggatcatcaaaacttcaaaatttaggatagaatattaagtggagcatgcatattactgctttggcagttgccctttcttttgtattaacgtttcagtccaggtttttcgaaaagcaagtaattattacacacgcacagttaacattcaaattatcacttttgagatattttccttagacaatttagcatatctcttctatcttaaaaattaaagtatcctacccaccacgagttaattttttttaacaaaaacatctaaaataaccctcgacaaagccaaagtatattaaaccacaaaatgaaaaagtggtaagtaaaagtctcaccagctaaaaagcacttcgagtaccaacagccttccccggctcgctgttaaccgtcaaaccgtcaaagcatttgtggaggaacctggggcaaagttccgcgccgggttctccagctgtgggttcatcagcttagcccaccactcccacgtaacaccagtttggggaaatgcaaacacgccacatgtgcccacatgtgcatgttttgatcatgtttaaccacttttaaccgccgtaggtacgtaatcagctcccgcggcaaaggtttaagaaaaaaaaaaaaaaagccttgtgcatgcatcttacccccacttaaaccaccaccaccagatgaaccgaggcgaattaaaccattttgaacgttaacgccgctgcacaaagcggtatgaaagggttctctgcctttctgaaacgccgggcaaaagtccctcagcaagtttcaaaactaatgaccgtacagcgctgcacaaataacaaaagcttaataccaaccaccaggccgtcaacccgctcacgttaccactgcccagaaggcttttaaaaacaagcattgaaaagggaacaataaaaagcgtctcaccgcaaacacagcacgaaagggactgtcggaagtaaggcaagagcctgttaatctcagtaaacgccttggggtctccggggtcgtagttgagcactaggcggctcgcggaaatgtagagagcagtagcattcacggggttcattgcagacacttcgacaccaatggctcccggttgaaaagaaattccggatccaacttagtaagcagccagggaacgatggcgaatttgcaacaattcggaagaaatcagagccgaaccattggccaaacaagtaaccaaaatccgtgcaagtttgtggagctgaaacaatcctcccacacatggggccttggcgcccctccgtccctgagacttccagaccaaaaatatgagagagaaaccagcgttcgagttcgtccggagcgaccacagagcgcagaacgcggcggcttgggcgctcggggcgggactcggagctcagtctagccccgcggctcggcaggcggcctgcactcgagctccatctccggacacggaggcgcctcctcaagtcgagctggcaggcgcgggagcaggccccggccccgtctgaggcgcggcacgcttctcccgggctgcagggcctcttactccatcccagtacagggcgcggaggcggcggcgacggcaaggacgacggtcgggcagcggcttcccggatctagtgcaagacgccgcggcggcgacgaaggttgatgttgcggctggcggacgccgccgccgcgctctccatatcggacgcggggcccagactgcgccctggctctccgccccgtgggttgcagcccgcagttccccgaggtggcgaggcgggcgggagtcctcaacccggaggggaaggccggggaggaagtgcgcgggccgccgccggcgggcgggagggggcggggggcaagcccggccgggccgcggcggcgcccctcgcgcctcagtcgcacactccggggtcaccagactcaagcgccgccccctcactgcccggccattttttcggcgccacacacacagacgactcctccgccgagcacgacggccgccgccgccctcagcactccccggccgcggaaggcaagcgctcacaccgccaggccccgccgccgcccagcgcacacagcaaggccccgccgcaggcccctcccccgtgcctcgccgccctcaccccgactccacgcgccactccagctcggtagggcccgggctgctgcggccttaatggatcccgcgggctgtgtggcgcctcaggcctctgctggcggcgacgacgaccgttaccccaacgggcaaagccactgtcatccccgagactcccccgccgccgtcgtcgctagcgctcgcacgcatgcgcagagcacactctcacccctcccccctttcctctcccttcgcttcccttttcccttgcttctcctctaacaaccccctccacagcctcccagagctaccggctcactccacgcatgcgcaagctgctacctagctccgccgcctttcgcccttccgcgtgcgctttgaccgcccacccagaaaaccggataaacacatcagcctgctcgcgccagtccctcaccgctgccaacccaccctgggctcactgcgcatgcctggctctccacttcgactctcagaatggagcatgctctctgcgagccgacagctctcttcgcccctcccccacgtgctctcaaattccctctcccaggcatgtgggctgtggtgaaacattcgttagctggcacatccttccccagtgtgggctgcaggcttcccgcattacactgcttctgtgcccgccaacgccggggcccgacttggtagcgccatgtggcgctctgcactggcctgaacgcggcctctcgtcctgactgaccgcggtgtgaggaaatagccgcgccaggccccaagccccgccctcgcggcctttctcctggaaccgctcatcccgaccgcggaaagggcgcagcctcggctggctggcaggctctcgccgagccgggaaggctgcagtagtcaacgtggctgcgcgcccagcaggcgtgcggacggcttttgccgggtcggggccgcgttccgcacctctctgcggtggttcgcagtcagagggctctaaggccctggcaggctgtatgtaagcgtggaggctcgaacccactgccccctcctacccgtcggacccgcgctgttcccacggcctctggcccttggactcgtgcggcctcaccttcatgggtgccgatcaggacttcaccgagctctcaccggaacagagtcctgttttaaaaacaaaacgaactccttttttttttttttgaaagacctagcttttttaaaagacctagctcttctgtgtgaacagatgtcttgaagaatgcgtgatcttgctctagaacaaacccaaatccttgcaaatgttttgttttttaaaacaagcttttgccttttgtttttgcaggagatcaagggcactgggatataaataaacaaaagcctgacttagtagatgacttccctcccatctcaaagtacaaaacctttttttgagtagcacaaatagtaacaggccataggaagcatttcttatctctgtacacaccaaagctcctcagcataatttttcatgcacagtaggtactctatacgtttgcaaagtgaaaattatgatgcgtgtaaatctattgtggcacatgttacatatgtacacaggcacgtatatggaacatgtaaatgtggtacgtgttagttacaagctgccacttgaggtgagtaggaatagttaagatatcaagggaacacatataatctcgatttataatttctattaccatttgaagacaggtttttttttcacaagacctaccatattatcaacacttaaatattaagcagtaagaatataact

SEQ ID NO: 41156 - DNA, 697 bp, Homo sapiens
aggtggaggtggggtctttaataaacagggcttcccttccacttgtcttcttccccattctccagttgaatacagacaaatctagggatgatgaacccacaagacagaagaagcctgggtccttaaatcaccgcaagggggaaagctgcccaccgtgtggaagaatagctacactagaatgtcagggtaaacaacaagcttctattatgttaagtaacttaaaccttggggtttgttacagttgctagcattattttaagcaatatagagatcatttgtccttttctaagatctttctcatgctggggtgtgagcatgttactcagtctctgccaatttgatgttcccactcaatattataagtgggggagcccactatgcaaagatacgcaatagtatgaaaactattcacagtggccttgcaaatccagaagcagtcacagcaaggtctgtcaatagtggtatctaggtcaatgtccactgttcttgtggcatgagcttagctgtgtttttctgcttctagattatcttgctttttgactcttttctatcccccttgataattccttccttccaataattcattttcttctttaggtatccaggatcagttctcatgtacattgtctttcccatctattctggattctctttccaaactagagtgggattatcacttttttttttttttttttga

SEQ ID NO: 41157 - DNA, 1885 bp, Homo sapiens
ctcatctgtgaaatccagatagtaagctagtgcatggtaagtgcaaaaagcaacacctggcacaatgcttaataaatgttggttaaatcttataatcattttctgtaggaagtgggacgacaaagttaagggtctaggtggtcagagaagagcaaggactatgtcccttttttgtgcagccaggcaggccctgtactttttctctgcgcgaccctcctcgggcagcaccgggtctcgaactctcacgccttactcccaagcaggttctgtagtccagcccccgcggctccctacagccagccgatgctgcgcaagcgccgtacccacgctttagcacatgcgtactcaggtgcgccggtaggggacgcgccggcacagcaaaaatggcggcggcattacgggtggcggcggtcggggcaaggctcagcgttctggcgagcggtctccgcgccgcggtccgcagcctttgcagccaggccacctctgttaacgaacgcatcgaaaacaagcgccggaccgcgctgctgggagggggccaacgccgtattgacgcgcagcacaagcgagtgagtcctgaggggcctaagtgagtcccgcccctggcgtccgcgacctatcactgcgtgcccggcttgcggcgtccgaggcctccctgccaatccgcacggtgcctggaggggccggagcaagggtgttcaccttgaaaacctgtagcgtttctcgtggaggcgggtataaccagcagaagcacctgtgtgctttttcatactgtttaacccttgggatttagacggatctggctcgtctctagccagctcaacacttaacataagcttttgggcaacttattaaatctctgtgggtcattttaataataattcttccttcacaagtgtatcgttagaccatagatagcaaaatgataggcgctcagtaaaaaccatgtgcttattctcgtgccccatgaaagagtgatggtaggttctttctcctttgtggaagcaggaaaactgaacttgggcatactccactaacatgaaatgggggatgtgcgcgtgcaggaacttgtggaacttctgcccgcagaatgcctggtcgagctctttagggccttagcatgcctcgccttgatgggtagcaaaggcacgtgtcggaagcaggtggcctttctgggagtgcgcaggctactctcgatgtttggctggactgagcagttgaaacactgccacccaccgcctgggttttgaggcgagaatccagctggccttcagagataagctgggcggcccattttggagaggtgatccctgacttgaaaccaggcttgcccagtgtgtccgtgactggtgggtgagtctggaccgttgtgctgaacgaattaaccaacgggaaggtgcagaagtgaaactcttacagatgaagagtattcaggcacaactcacaaccatgagggaggcactgggggagggatggggtcttaaagtgaggagatttgaacagctctatatttgtctaatattgattcagatgtcataaattcgcatttgacaagggtccaaaggtaacagttccttttgacacttgagagtgaaatgtaaatttagtgatggtttgtggtgctaggagtgctttctctcccctggggctacttctaacctactctgttagggctgagggagatgttagatcatcctctggaaaggcctgtcagtgctcctgtacactctttctgttggggcctattgctcaattcttccctggaacatcgcctagccctttcccaggtagatcctactaggtttagatgaagcctccagaagctgtttttcttttgccaaagttaacttaggaggctgatttaatatgaaccccctcctgcacccct

SEQ ID NO: 41158 - DNA, 1022 bp, Homo sapiens
ccaacttttgtaaaaatacaaaaattagccggacatggtggtgggtgactgtaatcccagctactcaggagaggctgaggcaggagaatcctttgaacctgggagacggagcttgcagtgagctgagatcatgccactgagctccagcctgggcaacacagcaagattctgtctcaaaacaaacaaatgaacaaacgagcaaacaaaatgtaaaacaataaggtaatgacaacaacaaagtcccttcctacgcttcatctttttttttttttttttttttgagacagagtctcactctgttgcctaggctggagtgcactggtgtaatcttaggtcactgcaatctctacctgctgtgggttcaggcgattctcctgcctcagactcccgagtagctaggactacaggcatgtgtcactacacttggctaatttttgtatttttagtagagacagggtttcaccatgttggtcaggctggtctccaactcctgacctcaagtgatctgcccaccttggcctcccaaagtgctaggattacaggcatgaaccactgtgtccagcctgaaacatggatttttcttttttttgagacggagtctcgctctgttgccaggttggagtgcagtgatgcaatcttggctcactgcaacctccgcctcctgggttcaatcgattctcctgcctcagccttctgagtagctgggactacagggacatgcccatgccaccacgcccagcaaatttttgtatttttagtagagacggggtttcgccatgttggttaggataatctctatctcttgacctcgtgatccgcctgccttggcttcccaaagtgctggaattacaggcatgagccactgcacccagctgaaacatgaatttttaaagtttgcatgtgtcttaaaaattcatgcttttgaagattatcacttagagaaccattttaaaattatagacagaactgatgtacgatgactactgaatataccctggacttttaaagaaactaccaacaac

SEQ ID NO: 41159 - DNA, 654 bp, Homo sapiens
tattgtactagaaggcagtataaaaattaatattctgtcttgttccataaggaatatgaggtagttaaaaaataacattttttaaattgagaagaataaaaaacatcaaggctacaaagaggaaatataaatatatggaaaagagcagtcaatatggtggttaaagatgagttttaaatctgcctaagctccctgtaaggtaaacctaaaagataaatcaattcaatctagatatctacatagtacagagtccacattcttcaaattctattaggttaagtatacttttctcagtaagccatttagtaggaccttggttaagcagacaagggcacagagaattcgtattctatactgctgcttaagagtagattcgtttgctttggagaaagatagattcgtttgctttggattaaagtagattcgtttgctttggattaaagatagagcttagctccttgccaaggaaatggaatgctagtaatcgatgtcatatagtaacttgggaaaattaatcaagctattgctggtggctgattgtgataaagtaccaattcaagcacatgccttgaaagcttacatggctgctgaatttaggaattacggcaataattatggctgtaaaggcagcagggttaagaaagatccttttaa

SEQ ID NO: 41160 - DNA, 1872 bp, Homo sapiens
gtgcccagccaattattggaatctaacctacagctgcaactgatgaatgaataggaattttaacatgaaaggtggtttctatttttgttcactttaatgagtaggatgcaagtaaaattataaagacatttgttgaaacttcattcattagtcaatggtgtgagcaacttctctgctgactcagataagggctgaggaaacatgcttcctcaattttttgttattgtattgtaatgggtatagaccatccgatacacctttaagttgaatctgcattgttaacaatttctctatcactttcttaagtctataatcaacaaaacaataaattaagcattgatttttatcatttgctgattttcacggtgtacatattcctaccatagccaatttcaaatgaccaaagtggcataaccaaagtgaggtgggaagtgacaaacagtagtacagcattaaaacatatttctaccacaaagacacaacaggtttaaataacaacttcaagagcataaatagtaacatgaaataattaggaagtgatgaattttgagtatttactatttttatttttcatatgacatttaatttaagcttatataagttaactttttaaaacagatatgttgtgtttagctaccttgcaaaattcctaaaaatttaatatttaactctcacaggccaatacaagctggcttcaacacagcattgaaaaggtttagacagcatgaacaagaatctcttcactaaattctacattactgcataaaattgtaaagagtaggaaaagtacatagcaaatggtaagtccaactcacaatctactatttctcaatctccttcaccaaatgctcttttaggctcattccctcttccttaaagctcaactgttaggtctgctcttctccatttatattacactcccttggagatttcatccagttaatgtgtaacttctatgcaaatgacttcaataccctatcagtacacctgaccgcattccagatctctgactcaggatttttatcttgcatgcatgacatacttacttgaatgccacctcaaattcaccaaatgccacatctaaaattgaatccaatcctgacttacctctgactttctactcacagagatacaattaattaactgatttaagttatgcatacgtatgctttaagttattatacaaatttattgtcaccattatcctgtctataaactcgaattgatagaatgatatcagtcttcttgtgcctcctgctaacataatcctacctcagccatccttctcagaacaatataatctgtttctcactctttccaggattattaccacaatcaccactccccatgataatctcaatttatctccctactgctgcttattcaagccattctacacaccgctgccagtaatattctcacatcattacttacccacttgtaaatcttcaaagttatcatattactctaacttatatatctttaaagttaatctggtatttaaaaccataaataagactgggcgcagtggctcatgcctgtaatcccaacactttgggaggctgaggcacgagaatcgcttgaacccgggagatggacgttgcagtgagcagagatagcaccactgcactccagcctgggcgaaagagtagaactctgtctcaaaaacaaacaaaacaaaacaacaaaaatgaaactataaataatattgtaaatgatgtccagggtcagcaagctttttcataaagatccatacagccgggtgcagtggctcatgcctgtaatcccagcactttgggaggccaaggccagcagatcatgaggtcagaagttcgagacctacctggccaacatagtgaaaccccttctcta

SEQ ID NO: 41161 - DNA, 585 bp, Homo sapiens
ttattaagctcaataaatgaggcagtgatattggtacaaggctagacagactaatgtaacaggataaaggcccagacacatagcatgcatctatggacatgacttatgaaaacacaacactccagagtgatggcaaaagtttttttgtttgtttattcataaatggtgctggaacaactggatatccatttgaaaaaaaaataaaacttgacctaaaaactacacacacacaaaaatctattccaggtgaattacatattacatatctaaatgagagaagtaaataaaatttatagatgatgtgaataactccattacctccaaggaagaaaaaaaattttaaaacagaacacaaaaaagcactgtttaacggaaaaaaacctgacgtatgtacctattcagataactttttttgtttgtttgtttttgagatggactcttgctctgtcgccaggctggaatgcagtggcatgatctcggctcactgcaacctctgcctacccaattcaagcgattcccctgcctcagcctcctgagtaactgggattacaggcgcacgccaccacacccagctaattttttgta

SEQ ID NO: 41162 - DNA, 4033 bp, Homo sapiens
taatctgttaagtgtgaaatttgttatgcattaaaaaaaaaaagaaagaaactaatatacccccctaaataaagatataaagatacaggacaaaacaacaaataaaaggggaaacaagaacgtatctttcccagagtacattatttcttctcacagcactgagattatgaacatacacagagtcagaatcaaggaaaaaaagattaaaactgtacaaaattctgtaaattttaagttacagcaattaaatgtgtgtttttcacagacatcttgttacacaatcaccgtaagatactatccccattttattttatttttttaaagagatggagtcttgtatgttgcccaggtaagcctcaaactcctgggtttaagggttcctcctgcctcactacagagtagctggaactacaggagtgcaccactgggcccagctccccatttttagagataaagaaagtaaggctcaaaggtaacaccctgaacaccacaaacccaggggacgttcaaagtaacttcggtccaggacccactccttctcccctacaccatagtgcctttaaggctttaaaagagccaatcaaatctacagtcattttattagtctcttcaaaggaggcaatcctagtaacacaacaaacttccatattttgcatctatttaaatattccttagccttatcagaacatcgaaactgaagtggatacagaaaaatttccactcaaaagcagttcgtttgtgaaaatgaccactggtagatcacttgaattaatttagtttactcgaagtacgttttaaatatgtaaaggaaaatgcgtggcaaaacacctgtagatcttctacaactttatttgggtaacaatttgtcttataagtattcttaatcatcaaaagcaaggaaataacatttctgcttctttccattccatatttccctacttggttaaaatttttcagtctgaattcctcatacattatgaatattagaacaaggtacgttacattaccatacaataaacaagttatttttattttcactcttctgtatatttccctaagtgcttcaccatcggaatgtgcaattttcttaaaacacgaggaaaactaaaatgtagagtcattcaaattccagataagttacaaatcacacaactttgtgccaattcagatactttctcaagtaaacactatttttgcgaagatgcaagtctttctagtcagaatcacgagaataaactctatccatcttaacaccaactttaacagcaaataatttttttttatgacaaattgcgttttttttttttgttttttttttgtctgtaagtgtccaaaactatcctatgacttatactcccggagcacgattccctgcaatgtgaagagaatcgacagataacatttcaaatgtgggtagatgggggtgacgtgacaatcctaaaacctgaaaatttcttagtacccataccatacaagaagaacccagttcggaccctgcaaacggggctcaggtccaactccaagcactctagtttcccaccccgcccccacctcgagaaaggagggaaaacaacttttattggcctcgtctctcaggggactggcaaactagcggggcagtgcttaggcctggacacgtttcacaaggaggcccccgtcgggggctgagagggcagatagctggaaagcccagcattgatgcatctcccccagccgccaccccgctgccccaccccgccaacaagaagcctgggccagccgccccgccgagcgaccccccaggcccctccgctgaaatgaactcgttgtcatgtgacgccgccgccgctaaaacaccgcagaaacgcaggtcggcaggcggcggaaggcattcgcgccagcccgcgtcggcccggccccgctgggcgcgggcgactcccgagagcccgggcgggggggggcggagggcgggcttggcggcgggcccgagcgcgccacaaaggcttccgcgcctgtcgccgtagtgcccgggcgggcgggggcaaaatttttggtgcccgcgggaggggtggcaagcgacgaagacgccggggtgcccaccgcgcccacagacgtctctccgggcactcggacggcccacgaccgccgcaccccgcacaggcccgcgcggcctccctcccccgcacggggcccgcgcccggcccgcccgctcgccgctcgcgctctctcgctctcgcccggcctccatcttggatcggcgcttccagcccccgcgccgctgccgccgcattccccctctttcccgccccccgccgccgtcgccgccgcccgcactcacctcagctgcccatccgggcgccgccgaccatcgacctagtttccccccaaaagtctccggtgtgttattcccgatgtgggggggttgttacggggtggtcgccgggggttcgggagcgggggccgcgccttcaacggagctgcaatcctaacccgccatctggtggcattttccacacgccaatggcgccgctgcagacttgggtccggaccgccctctgctggccgcggtgctcactgccttgctgacgggacgggcctgcccggaaaggggagggagctgaggcgcgagctaggggccgcggcaggggcgcgcgcaaacgctttccagtggggattgcgcgcacgcgcaccagcggggcgggaaacgtggccgctgcgtggcggccccgcccccacacggagcgctcgcgcagttcagccaatcgcgagaggcgtaggcttctggataagggcgctgtggacggttcttgggccgcccgcggctggcggaaggacggccacggtggcgcctgcgcgtccggctcgccgagttgccgcccgccatttttggagcttcttggagatctaggcaggaacccgccccgggttccttcaccgaggctcctccctaggtctcagggccggcgctttcctctgttcccgcccggctcctgctgcccccatccgcagctctcgagacgccctgcggaaacccgagggtgaggccgcgcagatccctgctcctacttggatttagcaagggcctcagagcttagcattgtattcgcgatttacggctgacaagcgctttcaccaggcaagagtgaaaaggtttcaaaaggactattggggacttccctcgccattaatctagacgaaacaccgccggccctaggccgattggcgtcatcctgcctctgtaaagcacatctttccgtggtgtcggctttgcataaggcggcagcattggctagtttgtgagaggagaatataactagactgagaagatagactcagctgtgaaagtggatttctccctccacaacctaggactactttcagtagctctgaaatacacatgagaatcttagccttctagatgccaaaagagaaataatcagtaaggtgaaatcattaacaaactatttatgtttaacgtcgcctcttccctgatctccacctgcccgtccgtggccatggatccctacctttcacctgcttacaacttttcaccacaaaagtgaatccttactctcctggatcattagccccatatatgactaacttctctatcgctatagccaactctatttcagtatggaatcgctcaactactttatagtcttaagggcctgtctccagtaggttacccctatttgtgttttctctctcaagggtttgcaagatgtgtggcttttcgctggaggaagtcataactgaccagattggatatgaattcgtgactggactcctacttataattttcttgcgttttcttctaatctctggctgatctcctattttccacaaagactgtttcaagctttccatgttgttaaagatgccagtcccagtccatactaatagataaattcatccagtttcctgggctcagagctatgggactccaattccggtttgaccttgcctccattataaaatatctgtgaccacctcctgttcgtgatcccaaaacttctaaccaaattaacccagaacccttctctccaaagcc

SEQ ID NO: 41163 - DNA, 1593 bp, Homo sapiens
gaagtgctgggaattacaggagtgagccactgcgccctgcccgattttgttttgaatggaacatgtgatcactctgatattcaaaggagtagtagcagagagcacaggacttggtgccctccaaagcctatgggagtcttgaaggatattccaaatgtggaaaaaaaatatttttttcccaagaaaatttgtgcgtgtgaaagagtgtgtgtgtgtgtgtgtgtgtgtgtgtgtgtgtgtgtatgactgttaccagaagaaaggggattgaatgtaggaatgtggaatgataactatgcactacaacgataaacaagcggaactgaacttaaaaaccaaagctttcactctgccaaagaccaaatttttgttaatgaccatacatgccaagcatttgtgattctaagcactgctttcactttaggattaaaaaaatatcctaggaagtgtgtttgttgcttatttgttatctggtgagtaatggaattacttcaagtagataatgaaaatccgctttttatttaatataagaattgcagagagcagaaactaaaatcctgtaaacaatttcttgctgagtcattcacccttgctcaagacaagctttcactttgcactgaattttaatgtgatgtttcttcatcttcccccaccttctgtaccatagtcagctagtcagtaatttctctttgaccagagtgatactgtcctcccagaatggtcaggcagacagctgagacatttctagggatctccatactttttcacttccaaggatccattcatgatctttctcccaaggatccatgggtgtaagacctcattgcaacacaaactatgcgtctggaaaataattaatttgtgtcctcaaaatttattaattgtagtaaccatgctggtataattctagcacaaactaaagcagttttttagttacttttaaaagcactctcatgagttaaagcgggatttctatcaagctttctgaaataatgaaaatgttggaagtcattaaataactttattccagggagatatatgtttgcaaagataattctggtttgggtaggagaaaagccaagtcagggagatctgccagaagactgttttggtagtccaaagagagagagatttgttaataaagagaagcatgagaaatgccctttggagtaaaattgactacctcagagtgtctagcttcactgtgctaaataaggcaggacctgctgtgcagagaccaaaactaacaagtctctcagaaccactgtactcagcatctcccctgaacagtctgtgtagctgtcaccaggtggcacgtggtaggaatctgggtcatgctgtgtaaccttcctggttaggccacgaagaagtgagagaagtgcagtccatatgatttggtccataaatacaaaacttctccttgatatgaattaaccaactactaacagggccaaatgataacattcatgagctttgggcagttttgaatctgtgggcccttccctccataataaatattaaaaattatattttataactgcattggtataaagatgaatataatccatgctggtttctttttttttattgtgg

SEQ ID NO: 41164 - DNA, 2146 bp, Homo sapiens
tgaagaacatagccactgctaacagggtggcccgctggggatgcaggggaggtcctgaatcacatcctgccttctgatctgcaggtgcctcccacttgccaaaaccaattgaaagccagattatagttgacgtagcccataaaggtcagtcctgagtcacagagcagagtggagagtgggtctgaagggacagaggaaaaaccagcaagcacctcctgttttttcccacagccagcaccttggttcagcccttaccctttcttgcctgtcccctggacccatcaaatccactgcttttaatgaccagtctgtttccaagaggctatattcattccacttgggactggggcatatgcacttgggtagaagaaccagctgtgcagtgtcaagacccttccctcagagaccttatcagtaaaatggcgggtggactcggggatgcccgaagacttttccggaccacgattttccgatgctggacacatatttaaacatgaaggaatagacttgcgacttttaagcgcaaacaatgggtggaaatggacagaaactgcctccgtgcccacttgcagcggactacgtagccctggcagacaggcaattgcttcaaacaagcgccctccaagggcgtaagctagaggggcccgggcgggcgctttcccgtggaccctcccacctcgcgggtagaggaagtccttcagttcaggcacaaccctgagcgtcccccgcagtctccaactccggcgccagtcaggttgtggggtgggggcggcggagggcggagagcgcaggcgcagagtccgcgcggcggcgcccctctccctccgcagtactccgggcagcgcccgcctcgattttcccaggcgagggcacgcccgcgtcagtcgcctccggggcaccttcctcgccacgacacgcaggtaaccgggccccgggagccggtcggcggcggcggactgggaccttgatcctgcctgcccggccgcccgacaagggaatgagagcggaccccgaactccacacacccgcgtttagccgccacacctaaggggcacaacagtctttttgggtaagggccgggctgggggcgacgcgccccgcccgctttgcagacttcggggtgctctgcacgacgcctgaaaggccgcggggcccgcatttctctgtgctgccctcctggagaaccgggacacggggacgggagggccagcatcggctacggcccggtttcccgtttctttccgctgtcgcgtgtctgggccctcctgcagcgtccatgatgaaggccaggggctgttgctttcctctcgcccagtagccaacccaagcaaggggtgagtcactgtggcgtcatatgggatcaatttcaaatacaagttttaaaaaaggctggatgattttagaaatatggccaagaatttgtattttccattactctcttgtctcatgtccatgactcttgaacgccagtctgtgggcgctgagattttcgtggtacatcgacggtttgtagacatcttttcccaagggaagacgagggcaagggttagtggaggaagggcctcgtcacggccgagagtggcggagaaggctcagggcaagtccgcacagcctccagcagccacggggaggaaaaggcgaatctttcctcacagtgctctgggcgctgtagaatttctacgccacgtgcacccatttggcctcatttgagaggaggagagggaagaagggtcgcgcgggccggcaggaaagagactcgtgttgcggcggatgaaggctcagcgcggacctgcatctcgggccaggttttctttcacccggctccgcgaggagcgaggcggaaagctcgggtccgagtgttgatcgaggacctggagatagtaaccccccacgtccagagtgctgggggtgggtccagagggctgggggtaggtccagagggctgggggtagctccggaggagcgatcttcctccgcgggaaaggacttggctcaggcttgcctatgtccgtggtgctgaagtgcctcgcgcgccctcgtcgactgacttcctgggccgcggcctgcgttgcccttctactctgcacctttgccaaaaatagcccatctccatggctggtggccagagtggagcaggcccaacact

SEQ ID NO: 41165 - DNA, 2772 bp, Homo sapiens
cggctgggcgtggtggctcacgcctgtaatcccagcactttgggaggccgaggctggcgaatcacgaggtcaagagatcgagaccatcctggtgaaaccccgtcactgctaaaaatacaaaaacattagctgggcgtggtggtacatgcctgtaatcccagctactcgggaggctgaggcaggagaatagcttgaacccggaggcggaggttgcagtgagccgagatcgtgccactgcactccaccctggcgacagagcgaaactcgtttcaaaaaaaaaaaaaaaagaggcaggttacggcgcgggggcggggaagggggcctgcagcaccggcgaggggaagaaccaacttactgatgcctcagccagtggctggagccctaagaatggacagacctggctccgaaggtcctcttcataacactactgccgccaagaatgtaagctgcccaagcacgaggacacttttagagggccctcagactcagcttcttttggtctgtgcctcaaattaagcacatgtcttacatttctcccaggtcccaattttcaggtctgcttttctttgtttttctttgtcgctccccgctcctaagaaccttcggctgggatgacattcttcaggtgcagaaaccagggggaagctcccagagcagtgggggctgaactcaggacacagtcatttttgctgttaagtctctcctgcggcgctgaggaggcaggctcaaagtaaccaaccagagcagccgcagagggaaaagctaagacagttctggtccggcccagcgcttctcaccctctagctctctactctccgccgcgcagcctccgctccctccacatcaggcacggcgcttgattgacatgagggcccgcccaatcccagtgcggcagagaccgttgtcgcgtcagggaccggggaagggggcgactgaacctatcagattgggtccagagtgggtttcctgcccgcgcggatccgcctgcccaccgcgcgtgccccgcctctctcccaagagctacgcggcggcggcggagcgcaggcctcgtgccgttacggccatcacggcggccgcagtggcgtcctggagccctcctcaggtgagctggagctgcccggctcggcagcgggaaggtgagacggccttgttggcaggcagacacacacacaccccccttcagtccgctgtccgtccatacagcctgttactcgctgcgtcgcttcctcttctcgcgctgagttagccccgggggcgccgtctgcaggctcggagccgagccggagggggcgcggaggctgctcggagggtccagacttctgcaccgggattccgcgagaccctcgggccgttgccccagggagcgtgaccccgcggcctccttgtcagcccctggagcgctgtgtcgggctgagagcccgggcggccgcccgtgcgagcctgggaggtcgagtgtgcggcgcgctggttgacttgtctgttttctcatgaaaaagtccttttgccagctgtggcgtaatccgaggccgggaaggtagggacgtggtaggaggaagggcgctctcacctccagcccgagaggaggggaggcgtcagcctgcgcggtgctgcgggtggacatcttcgggacgcgccctctcccctccccccacccaccggccgttttctagtctggggctgtgactttaatggtctggacctgcttcagattcgtacgcgagttgctggggctgtgaacttttgacttgagttgtaatatgtttggtaaaacaaaaaaccatttcgataggttttgtaacctttcttctgtattaacatacaagttaaattcgccgttagaagctcaggaagctgggttttgttcaggggtgaggacgtaaccgtaggaacgctctcggtgtcaaactgatggacccggagtcacctgaaaataattatgcacgttagattaggtaagaagccctagaaattaggaaagaattaggttaaagagaatttcctaactcctctttgggtagggagcaaagcagctcaatgtcctcccaaaacgggtgttgccaaaaggtactcatttttaaaattttactttgatagacgtatgacaaaccaactataacgatttcttcagcacctggaaaccagtgtgcctagactctcagccttcggcgaggtcacacagtaaacggagaaataacctaagaagaaagttttgtttggtaattgtcaataatattcgttcttttctttttaaaacacttaattttcttgtggggggtggagtctgtgatattcttaaataggcatcccattcacaacttgatagtaatatgcactggttgataaatggtgctttcttttcatcttgaccacaaactctgagacttctttgggaaaattgtgatctgtggaaattggctgtaatatccataaacatagtttgcagagtgttcacatctactcagctgttggctcatgtattaaattttaaaatgtgtacttatttttctaggcattatcttttgtccaggttttgacagtgctttcaggtccatctaaataaaatttgaaacctacgtgtaatgttttgttcgatactgagggagtccaggcggggtagctcaaacctgtaatcccagcactttgggaggctgaggcgggcggatcacgaggtcaggagattgaaaccaccctagcagacacggtgaaaccccgtctctactaaaaatacaaaaaagtagccgggcgtggtggcgggcgcctatagtcccagct

SEQ ID NO: 41166 - DNA, 1873 bp, Homo sapiens
cacacatgtgcaagtatctttttcgtataataacttcttctcctctgggtagatacccaggagtgggattgctcgatctactttcagttctttaaggaatctgcgccatccacgtcaacatctattttttgattttttgattgtggccattcttgcaggagtaaggtggtactgcattgtggttttgatttgcatttccctggtaattagtgatgttgaacattttttcatatgttggccatttgtgtatcttcgtttgagaattgtctattcacgtccttaggctgttttttgatgggattgtttttttcttgctgatctgagttccttgtagattctggatattagtcctttgtcagatgtatagatggtgaagattttctcccactctgtgggttgtttactctgctgattgtgtcttttgctgtgcagaagctttttagtttaagtcccatctctttatctttgtttttgaggcatgagacttttgatagaatctacatcttgctttgctcagattggcttaaaccctacattgattctaatccatcaccaagtcttgacatcttccatggaaatttgagaagggttagtgatataagccagtggtacctgctactgcaactggtattgaggcaggaattactattcatcattaccttcttttactacctattctagatttcctttatgctgggccagcatttaagctggtttaagttgcttctgtcctttcggctttcatccttgtgggacttgagcctttagttgccttgcctgttttgagccatggttgctgtaatttcctgtttaccctattagcaagcatggaaataccctgcattccagacagattgctccctaatctcattgtgtacaacaggtcctaataatcagggtcatttatcactgctagtatatttattcctttctttgcctgctcgttcatcagtatgagaagcccatagtgaccaagtggtggttgtggctttaggctccgtgaacccctactgtggaagcattaccctcaggatctctagtacagcagagattttaaattgtggggataggaaatccacatgccataagtgagttactgggagtgatggtgaagagtcaatctaacttctctaccccttggtttctaaacccgtgcatctcaggtagtagggatataataccctagccattggttcagtgcatatgctgcatcccaaatgaccagcagaatgacttcttaatcgagcttttaatttaatgcaccactttatgattttgttagccggacagtttctaggtgatgtggtatgtggtgtaggaccagtggatgccatggtcatgtgcttaatgttgtatcttcttcaccattaaacgagtcctttagtttgaggtgatgttaaagtgaatcccagattggcaaagcaaacattttgaaaccattgaggtactgtaaatgtccagagacactcagggcaggaaaggcaaactcatttctacagtaagtgtaaatcctacttcccctggaatgcaaaggttccaattccatcctgccacctgctcagttctgtgtctgataagttgtttcctgcattctgctgtgatcctaaattttgctagattttttaaatcttattagtacttttaattatatttttcagaaataagctgatttttttgttttgttttgttttttttttgagatggagtttcactcttgttgcccaggctagagtgcagtggcactactatctcggctcactgcaacctccacctcctgggttcaagcagttctcctgcctcagcctcccaagtagctgggattacaggcatgtgccaccaagcccagctaattttgtatttttagtaaagacag

SEQ ID NO: 41167 - DNA, 885 bp, Homo sapiens
ctttttcccctccctaattgctttgactagcacttccaatacaatgttaaataaaagtggtggaaggagagcatccttgttcttgtcttgttcctgttcttacggtggaaaactttgtctttcaccattgagtgtgatgtcagctccacagttttttgcagatgccctttattatattgaggaaattcccttctaatcctagtttgctgagcattgttatcatgaaacggttttggattttgtccaatactttttctgcatcaattgagatagtcatttgttttttcccctttgttttactaatatgaggtgtcttatattgattttcatatgttgaaccacccttgcataaatcccacttactcatatacagtccttttaatatgcttgctggatttggttttcctagtacaaatgatccttatttttcacagattctgtatttgtgaattcacttattggctaaaatttatttataagcccaaagttgataattgcagtgttttgtggacatgtgcagtgtggcaaaaatgtgagtcatctgatgtgcacattcccagttgaggcaatgttcttccttcttatttcagctttcatactataaaccagtgtcctttgtgcagtctatttagtaccacattttttgcatttttgtgcttgttgatgattttgctgtttaaaatggcccccaagcatagtgatgaagtgttgcctagagttcataaacacaagaaagctgtgaatttgcttatggaaaaaatgtgtgttagataagcttcatttaggcatgagttatagtgatgttgtgaattctatgttaatcacaatttatattaaagtgtctttaaagagaaacacacataaaacagggttgtgtagtgattg

SEQ ID NO: 41168 - DNA, 1886 bp, Homo sapiens
ctgtgcaatggcttatgaaggattggcaggcagtactgtcttgccagagcattgtagtgctggacaggagtgtcttgacagggaccaatgagcaggtggagctaactagccatcgtaacacttcaaagtttggtaaacaactcttcttctccgacagcatagctaaatgattcttattctttcctccattttctctgtttactttcattttcatcttcttaattcagtctgtattcccctctacctttccatctttgctcatatcattctcccaaaaggaatgatgaacagtgtgcctctcttcccctcctacccatatccaattggtacatccggaacctcatattgaggtctacctattccctaaagcctttgctgatctcttggatcactcctttgtgtccctcagacacattcctttgatgctaactgggaggcagttaaagtgagtgaaaaaagcttggagttatgcagacctcagttagaattcctgtttccatccctgaatagctctgtgatctacagtaagttaatttccctgagccctgtgttctcacctgaaaagtggagaatcaaatcatatcttaccttgcaagtctgttgtataatatatggacatgtatatagtgtgtagaaaccctttaggacattcttggcagataatagatatccagtacacattggcttatattgctaacttttgacatgctggaactgtgagcagaagcgaacttaggagagaggaatcaggaagccaagatggagaacaaaggtaacattggggacagacgttgaggccatgtatgaagcactcttaagaggagcagtgagagactgtacaagcagctagtgaccagaggtcaaagtacagatgtggccactgactcacagtgctggaatcaaggaaaatatgcaccaggttttcttgactatggtgtggtaaaaagatatacagcaatgtttattgtatacttattttgtgccagatcctgttctaagtttcacttaatcctcacaacagccctgagtcagacactattataattgttcccaattttcagatgagaaccataaagcagatagtttaaatgacttgcctaaagaaacacaactaaaaagttgacaccaatcaacctgagacaaagattatttatatactagagactcccctgcccatataagcatctaagctcaaatttcgcaagctgaacatttgcagcctttttctatagcacccccaatcctgcctgtcctgaccacactccacccacttcattatttcacttgaggtgctgccatccacccagttacccaaactcagaacctgaaagccatgtttggctcctcctccccagccctcttaatgcactcaatatccaggagctatcagttctatcttctttatcttttgaatttggtcatttctctctgcagacatgagaaacctagtggaagccaacaatgtctgtcacctggatcactaccatagctccctcatggccctcctgccttcaatctggccccctgtgctgttttctccaccctagtcacaaactttttaaagctcaaatgcagggaatgacatggtcatatttgagctttgaacccttcctttgaccttcattcctctcaggataaattccaagctcctcaataaggcattcaaaactctctagaatcctgtttctgtctgccactaagccctatttctcgccatttcaaccttgttctcgtgttgcaccaaacttcttcttgcttcctaaaaacaacattcctggctgattttttttttttttttccagagtttaacacccagtcctggagtcacctcctccaggaagctttctgtaatcctacaaactgggttagatgtttctttttagtga

SEQ ID NO: 41169 - DNA, 1613 bp, Homo sapiens
ctcctcctggccaaagttgggacaatataagcaccagaaggagaatattggctggcacaattgataccatatatttgaaaagtcatcagtccatgacacccaagaagagcgaagctaccataatgcattctcagagaagatgaatctaatagaatgcatttctacttgttattcaatcgtgttgggcttatcgactcgtttatcgtgtcaatgaggaataccagtaaatgtaaatccatcagtcagaaggcattttttctcctctaaaggctcctctccgccccttaacgtccagtctttccccacttggctctccctgtcctgtcaaggggttcggtggaaaagtcttttaagttcccttcacagaagaattgtagactctgccggtctagtctctgggccaaccctccccgtctctttagtaaagatgttttttattattttccttgtgccgtgtattatccttaggctagagtaactttccgggcctgcagacctcttggtttcctttcaatctggaggacttgatcccatggccagcttcggagctcaccaggaggggaagacccattacatccacgggcgtctggcgccaccttgtggtcagtgctgaaaatgttttctgttcccactcgcaatgaaactccctgggcttcctggatgaagaaaggaaagctcaggtcggtttcctagaataataactcagttacacagtttccacgggcttggtccttaacaaacctccactgtcactggtggagttagaatttagcagccaccttctcctcgctctgtgtctgtatctgtcccgagctcatggtttggggcttcacgctgtacccacggctctcgctcttttctgggaccttggcctctcgcactctcctgtctgttgatctttccaccatgctgccattccctacctctcggaaatagactttttttggatgtctttttgttttccttctgtgtgacctatttgtaggatccctttactagactgactttccaggagtgttcctcagcccccgcacagatcagtagggaggagcctgcctgctgcttgctcatgctaaaccagcgtgctgcccagcctgtgaagtttggaactggaacactagagttggccccaaattacagctttctcttctggctcctgggactcccagtttcttcagcaacaacaacaaaacctggaaaaacgtatccttgccagaggtgggagaatgaggctcacaaaaggaaaacacggacctttcttgtctcccccagtgagaggttgcaagatcaggttgtaaaaccccattaaggaggaccttagaggaagaactgagcaaggagccttctcaggtgcctgcaaacatctccaagagcaaaagtataaatcctcatattgtggaggaggtacatgttcctggttccttcactggacctcactgagaaaattaaacaaacaacaacaacaacaactacgttaaaaaacaaccccacaaaaacaaaaaaacaaaaacaaaaaaaaccctggtggccgggcgcggtggctcacgcctgtaattccagcactttgggaggccgaggcgggtggatcaccttaggtcaggagttcgagacca

SEQ ID NO: 41170 - DNA, 627 bp, Homo sapiens
aaactactgattgggagaaccattttgatttttcactgaaaatcttgatgtaataacacatacctgatatattaggttggtaagggggtgtagaatattataaaaggagggagagcctatagctcataaaaaggagcaagataaattaaaagcttggaagataagaacagaattaaaaagaaaaagaaaaaaacaaacaaactcctaaacctgtgaaagtaacatgggtttgatagataaaatgtcaggggcaaaactggctaattcagccagaaatcatgtgtgccaatctggattatacccatgtattaaaccattgtagatggagaaacacaaccgtcatgcagaatattggccactgcgctgctggaggctcctctatcacctcacggtagggaggatcccctgtttcctggtggctgccagtcacccccctctagagctttggtctgtcagctgttctgatgccagggctctcaaactgcaaacaaacgagaacagatgagccaaagctctatacagagccaaagagtcagaggttatgaatgagtttagagcaaagagatttttagcaaatccttagtggaatgccgtctaaaaataaacaaaaaagaactattagaaaag

SEQ ID NO: 41171 - DNA, 934 bp, Homo sapiens
tgcctttatgaatggattaaggctgctatctcgggagtgggttagtcataacaaaaggggggattttggcctccatttcctctgtctcgtgtgcccacttgcccttcaccatcttgtgatggagcacgaaggccctctccagatgctgaagccatgctcttgaacttcccagactccagaacggtgagaaataaatatcttttttaaatacattacctggtctgtagtattctgttatagcagctagaaaatggcctaagacagtgtgagtgagagaaacaggaagaagttggggggagggggtcacagtgatttccctaagaaaatacctggtcacatctcctaaaccaatttcattacaggatctggcacaaacttggcacataagtgaaatcaataaatggagattcaaatggaatacacagaaaaatatctggaaggatatacaaccaagttccaataatagttattactggggaatgagaatgtggtgggagagaaacaggaggttttttatttacgttatttacatgcctcagttttatttgcaatctatgatagttcaaatagggttggagtttccattgtttcgttaatatttttctaaagcattgattctcatacttggcagatcactggaatttcctggggagctttttaaacaggcacattccagagctgaacaggacccagggaatcagaatctccatggtgggtccagggatctctgattaaaaagctccacatatgattctgaggatgagccacatttgggaacagttggtctacttaagataaaccgtttaaagcaccttccagcactttggaaagacttaattccatataagcagttgatacactaattacaaatttgccttatctagtcattaatttaggttccctaaggactactctgaatcccttggattaaagg

SEQ ID NO: 41172 - DNA, 967 bp, Homo sapiens
ctgggcgccgcagttcggagcaggccgagggggccgggctgcagggccgcgccgggccagaagggcgcgccctgggcagcgcggacgcacgcagccggctcctcccgcgccccgctgcaccccggcagggagttcgcccccgctaatgtttaacctcccgaatcgctgatccctcggactgcagccaagctacccacccgccccgctcccgggacgaattcctggcatagttttcccgcgcggcccgctcaccgtggggtctcctggagccggggacggcgggaagacgtctcgaggtggcggctcccatactcgccccacgtcccgcctccagacttgctccaccgccccagacagcccagagatggttcccggaatgctcaccgcccgccgttcccgggatgcttccccagccccacgcagtccgggcgctctctgcggcggaggcagagcctgcccggcccactccagtgccgccaacctgcgggaccgcggacagagagctcctcggtgcgtcggtcagctcgtggcttggggtctctggtgcctccagctcctactacagccgccccgccccacctcaagaagaggtggagcctctcccggcccctctcggacgagctatttttaggtctgtaacggatgggggaaggcgggaatgccacgtttaatccgttagtaaaatccaggatccaagtgaatggcttcctggccttgctgagaggctggacttgccccggtttccccacaccctgcctccggtacaatcgatagcctgctgtgcaggggcggccgcaccccccgggcagatagccctgcccaccctcctaaagggaccgtcctggtttcttcctgaccggatcccaagctaggagagttctttgggtgtgccccaggtctgatcagacagacagcagccaccttccctccgcagcccccacccaccaccccctaccctcccaacctg

SEQ ID NO: 41173 - DNA, 1088 bp, Homo sapiens
tcccctcccaggcttcgacaccctttgaaatggataagatgtgtatggaaagaaggaaagtgacatttcctaagcacctaatgagatagggtgctagtgaaactgacataatttggtacctaactgaatacagtaccgaactgaatacatttcccgcctcccactacctcacccctgtattcagttaggcaccaattagagatacagagagaacaaagacaggatctaagggaaacaggcagccagtggcagagggaacccagtcccacccccccaccgccaagtccgggcccggccgcgtcctcacctgtagaaggtttgcatgtgacgatacttgggcggcacggccatgcagcgtagatccgcctcgttgcgcaccgcctggaagtcgccgcagcacagcaagaggtcgacaggccccgggccgcgccgctctgccagcgccagcgtctcatagatcttatccagctcgccgtggcagcagccagccacagccacccgcattctgccggcctgaggaggtgagcgctgcctgcaacgccctacaccacagccagcccaggaccgactgatcgctcagctcccgccaactttaataagtatagccaccgcctgggtgtagactcctgcaaaataattcacttccggtttccagatctcgcgagagagggaccgggaaggtcaaacctaattctgggatcccagggaacttattttctttttttccttttttctttttttttaattattgttttatgcagtcaatatttttttgtatatacatccacaaatgtactctttccatccttactcttttcttcctggatttccatttttctctttggaatcatttttcttctgtctgaagagctcagtttaagttttcctgtttgtttagtgtaggccgacgacagattaatttttttctagatatttgtttgtttaaaaatttctttccactctggggaaaatggtgaaaccctgtctctactaaaaatacaaaaattagctgggcgcagtagcgcacgtctgtaatcacagctacttcagaggctgaggcaggagaatccctcaaacccaggagacgg

SEQ ID NO: 41174 - DNA, 2197 bp, Homo sapiens
taaatcaagtagctaggaagaaacccaagcattctggctattcttaacactacaccagaataaacggggccggcacacaacgctaaggcaagtcacgtatctgtatcggatcgtgaaacaatcactcttacggttggcaaaggttctgggatcgcaatttccccacctataaaatggagataacgacgccgggagtttggtgcagagagagagaatgaatatgaaagtgaacttcaaactatgtatgtggctccacgtactactttttccaaatatgaatactggaatccataaactgcaatttatcagtccgtaaaactcgtagcgtcagggcgagactccgcctctggggccccgcccaccgcgagcggcaggtggggccggcagatcttctttgcgcatgcggaaaccgctgcccgcttccacctctaacccaggctcagagtagctgctgtttctgagagaacgattcgtaggacagcccctgacgccattcccttttgcccttctttctgcgggcctttccggtacttgagcggtgtccagagcgtggccagttctcgtctatctggctgcctttagggagcggtgcctagcgttggccaatagttggctgtcgaaagtgccggcccccgcgccggcgcctgcagcagccgggtgggaaggctcaagatggcgtgcttgttggagaccccaatccgcatgagcgtcctttcggtgagtgacccgccgcggccgcccgcccgccctccaggaagcctcatcccggtctccaccattcccccaagcgtggtgtgcctcctgggcaccaccccctggggtggaccccggctcagtctcgggccagggagtgagcgagggtggagaggcgggatagacgggcagaggggaccgcggccgagccaaagacgtttccaactccgggagctcccgccggtgcgggttcccaggatggcgtctggcaggcggggtggctgggcttatagacaactggctgggcggcgcggcttggactttgccaagcgtttcactgagccttccttttagcgatgccgcttcccgggggccgaacgctctgccttgtgaagcgccgggcttgcagccggcctgagaacgagcgcccactcagctctcccgggctttggcaagaagaggtgcaggctccttggcccccatttcctcagagctgccaggccaagtctgtgcggcttctatcgcgtcccagcacctgggcaccggctgaagcagtttgctttttggcaatggtgattcgtatcagctgcaactcttcctagtgtgtgtggttttttaagcccctttcctccgctctgctcagaggtcgcggctctgagtcagaggaactctatgttccctgtgcctggtattccgtttttctttaaggggagtcaaacattgaaggggggaaaagggggtgagatttatttccccattgttgaaagaagggaacgtattgacatgccaggaagtaaaacctgttttttttttttttaaaaaaagtttttttaaagaaaaagacgactttcacctttcactatgttgctcttgaaccaggaccaggaatgaaagttactgggagataacttcgaaggattttgcaacaaattcgagctgtccgactctgagaatggtcagtttaccaatggttcatttgctattgttggaaacaagcaggcaaatactgattgaccatcttttagacttgtggaagccagtctgatactgagagggtagttggattataaatgacttgtcgggttcctagagtcttgtaactacaaccggtttcttttctcttctctgacttgtcccacaaacaaactcacctatctgaaaacacctaggacatttgcttatgattcagggttagagcagtgtggcagacctcaaccttgaaaaggcttaagttgtcaatacaataataattttgtgaggctgtcaacagatttttcccctgatccattttagcagtcattttttcttatttttaaactgcaactaaggaaatactgtttacctaagtattagatcagattagcctgttactccatcactgactgtaatacccaggaatattctgtgggagtgcaggccaatgacttttacctcattatgttaaaaaaaaatagtatgtgtcttggctgttctcagttctcctttaattattcatttagatttc

SEQ ID NO: 41175 - DNA, 1069 bp, Homo sapiens
tttatttaatgcatgtttaggttttatggttgtataagcactataaatgtaaacagcttctactcagttttgtttgcattaattttgtttgcgtaaaatttgtcatcactggggttccaagataagttttgtccctttaagacggaagggtacatcactcaagtttgagaacactgtcacgtactgctggcaaacagaatgtcacttttatactgcaaccccgctctaatcaccctcctcttccccgagcccaacccagagctggaagctagcgccccttgaggcttacctgcagggcaatttccttcttcctgctgcccatggctctgcaaagaagacgaagccctgttaccgcggccgtgggccgttcccccgcagcctcgcgacaaaccgctgcgtggatcagcaagcccagagcctccttcagacaagcccccctcctacggcccccggcccctttttaaggtgcttctaactggcggcaaatcagcacactgatacaaagtgaacaccccgcgaggaagcggagcctgcagtccacgggctcgtggctcgccgggcggttttctggggatctgcgaagccccctccccaccccggagccggccagggggcgcgcgcagaggccggagtcagtgcgccgggcgcggtgcagcctgtcgggcacagggtcgccagtcgaggaattctgacaaaaaaacgacatgggaccctgttatccctgctgttcttatggattactgggaaagtgagccactgcgaacgacaggtacaagatcttcgacgcgcccggagtcaccaaccgagtctgccgcgacctagccgcggtcgtcatggcaacctggcccccccgccaggcctgccaggaaagccggcggacacgtaagccacgcccactctgggcccaacgcagtctctccgcggaggctctgaacccagccagggagaggcaggagggagtcccgccccttgccctccatatcggaccataggaacccactcattggctgcagtgtttgtcagcgtctggaggcttcgaacccaccaagcaaagacccagtgcatctgt

SEQ ID NO: 41176 - DNA, 529 bp, Homo sapiens
ctcaaactcctgacctgaggtgatccacctgactcggcctcccaaagtgctgggattacagatgtgagccaccgcgtctggcctgaagctgggagttctagaggaaggctgggccacaatgacctggttgacttccagccccaaggtcccaagcccccacgtttgctgctgaactaggcaccagtttggattggctctgaggcatggcactcagcaagcctcagggcagagaggcaagtgtaggacatgttgcagtggatgaagtatgtttgttttgtcctgctctgggtcagttcagtggctctgactttagccagaaattggctcctggccctgtgtctgaccttggacctctgtggattaaatttgggcctgagccttgcctgggtttttggctaggtgtctggccttctgccatgcctcaaacacacctgatcagccaggcacatctgccagagactttggaaagacttctgctcaatcatccttcagcatataaggttttctccttcccttctcagcctagcta

SEQ ID NO: 41177 - DNA, 1648 bp, Homo sapiens
tgcccaggctagagtgcagtagcgcaatctcggctcactacaacctctgcctcccgggttcacgtgattctcctgcctcagcctcccgagtagatgagatcacaggcacgtgccgccatgccgggttgacttttgtatttttagtagagacggggtttcaccatgttgcctaggctggtcttgaactcctgacctcaggcgattcacccgcctcggcctcccaaagtgttaggattacaggcgtgagccaccgcgcccggcttgaattgtacacttcaaaaggtggaattttatggtgttgaattatatctttatttttttaacggggggaaaatgacgccgctggagaggagttagcggaactgaaacaatgaaatggtgcgcgagtgtcgcctgtccccgtcgcatccatcccaacgaagtttgggccctggaacggtgcacccagaaggcctgcggggagagacgctggggcatgatctggaagaaagacgtctcaggattcgaagggaatgcagctaaggtggcggcggaggttcgcctaggactggggaggcgtccctaggctcagaagttggcccggccggagcggagatttaaaggttggagcgcagaggctcttaaagaggccgagtcgaattcccactcggcgtccaccttaaagccagctccccggcaccacggatctgacccgggtaagtgctgggccgcgggagaggctgcggcgccgaccccagcccctggcgctctagcgcgccctgccgggcccaggggactcggcgcgggtgggctggacttcgtaggcgcgcgtcctgggggccggggtgcacgcgggggcgacagggtcgaggcacccggcccgggctccccactggcgcgcccgcagcggcgctctatttttagcaggcgctgtggcaatataaggaatgcgcggcgcgctaggcgctcggggcgcacgctggcggcgcggtcgctttaaggaggcgccggggcggggacggaccggagtggccggctggcggggagccgtcagtccggcggccgcggggcccggcgggcgcgacgctgcctcctcaccggcgcaggctaggagggggcggcctgagtgccgtagccgagccggggctggagcgcgcggtgagtggtcgggcggccttggaggggagggggcccggccgcgccgcctctcgccccggccgtcgctttgttccggggcgggaggtgtggccgccctccgggctcggccgcgctctccgcttgcggggtgcgccctgggaccggctgtgcgtggcgttttgcccccatcgcgggctcccgcgtaacggtgtgcgttcgtgaaatcggccacgaccaagaccccagtggggagggcctgcgcgccgctcagagagaccctttcatggtaattacagttccttggctgcctgggcgagaacccggtggatagatgggcggcaggacggggcggcgggggatgggtgggtgggtgggggactctttacccccccgccttaagatggcgttaacgaggggagggatccgccagggagttgacaaattcatctgaataataaaacgcagcctgcttcataaacaacccttcactgcccccggaggtttggggagctggagctgtggtcacaactag

SEQ ID NO: 41178 - DNA, 1217 bp, Homo sapiens
ccaccctgtcccactacctcctgctttggcccaggccttgggcctttaaggtgggatgctgaccaaatcctctcctcacttacaacagggcagatgtctctgggcctccccaccctctggctcccagccccgccctctgcccagccagcctctggaactttgcatctttcttccatcggtggagaacagcagtgggccctgagtctccagacactgcttcctaccttggggttcttgggcccagctccgcaacctctctgtctccgactccccagcaagtgcccagtgttttcaaagagcaaaagcctggctcttctcctgcaccatcagaagctgggacatttccaccctggcttctgcccaaacctcagacacaagtgctgttgtcttctcagaggggcctgaacctggcttttcccccacacacttgaatccacattctttctggggacgaggaggagaggaggacatttgaagggcagggagaggaaaaggaacgtttactgagtttttttttcctgaaccaggggctttaccagggggctttatgctcagcaggccttaggccagcttcagagtgggcactctccataggccccaactaagaatggggtgcaggcagagctggcctgtcacccaccaaggggaagctgcccttcccctgccagcagtgatgtgggaggaatttccctctttcccttcatagggaagcatggctgctggcctgagattatgcaatccagccctgcaggcctgggcctgaccctttgtccctgctgcatcagccatgctgctgaaatgcctcactgatctccatggtgcccagggcagtgctctctggtagaaagcccttcctcacattgctgacacatctcttcccaaatcctctcttgctgtctgtcctcagagcggtggtagcagttactaccaaccagacttttcttgaaggcctcatgctaagggcttttacaaggatgccttatttcatccttgtgacaattctgtgaaattgagattagtcaagtgagagtaaatcactttccaggtgagcgcagctgctctgcagccagtgtacctcagtactgctgtactagttggtaaaatagtgaagtactctctaccactggaaaattgctgctgctgctgccctgcacccgaggggcccttcccagacccactagccaggctgggagctgaaggacccctctccagccact

SEQ ID NO: 41179 - DNA, 1696 bp, Homo sapiens
aggatggtaatatcttacttccaaggctgtgaagaggactgagagagtgggtgtgtataaagcctttggcatagtgctggctgccagcaggaacacggtgggtgggaccacttttagccaaagatcttgaccgtaccctgggctatgggccactgtcggagcccctggagctcatgctgtgacttttctccctctggaagcctgggtggaagagggggagaaggtggctcacgcctgtaatcccaggcgtgggcagttttcctagtatttctcaggagggaacaagaaggggagaagggaggaggagaagcagagaaaagggggagaggtgagggggaggaggagaagcagagaaaagggggagaggtgagggggaggaggagaagatcttgactattacatcagagccccaggctggtgctcctccatgctggctgccctcctgcctgggactacatgccttgccagcatgtggggcttgccttggcatctgaaatcgataagctcccagcagttccagggtctccagttaaatcctcctttgcaaagctgctgggtcccttgatcccttgtcctcaagtgggaggattggagcatcgcagacagatgtgcacaacactgaccctgtctctccatttatctttctccttcctcctcccccagtctggctgcctctctgtctctgtctatctgtctgtctctctctcacaaacgcacacgcacacgcacattggcagcatacctcttctcccacagtgactaatactttctgtctctggagtcctcctaccttcatgacatcaggcatggggaatgcaggcaggatcataatttcttaatagtgtagctgcccattatcttcagcctcccccaggaagccctggagtcagaactgctgacaaggggcctgtggccgggcatttgcaggtgtatgtgtgtggaggggtgggctagacaaggggtgggctagtcccacttgggaccaggcccagctcagccacacacccctcctccctgctagccctcccagaccaatggatgggttcataccattcctggggtagattttgtcccttccgtttcatctgccattattagtgtatttaggttttatatgttttctggagccaattttgatcatttatatttcttgaaccatccatttcattgagaattgaaaatttattattatcaaactgtgtatggttttctccataattaaatatatagctgtatccatagtcagaggccttttctcattccaaatgcttgtctttttttctctgataagaattgctgaaagctgggtttttttaaattggtcctttgaaagaatctgcttttgatttttagatatcagctactttcccctcctcctactctggcaatttctacttttattgatacctttttctttctctcttattttagtttattttcccttttctagcctcttgatttaagtgtttagttaattttcagttttagtttctgaaatgcatttaaagctataattttcctgtaagtaccactttggccttaaatgagaggttttatttctgttgattgtccttcaattctcaactgtgatttctgctttttaattagagagttatagaggagcatggcttttaacattttcaggtggctagattctcttatactcttgtttctgttcatttctgatcctgttaca

SEQ ID NO: 41180 - DNA, 612 bp, Homo sapiens
ttgtcctgacttacaggggccccataggactctactggccgcttatcaggggcatctgccatggccggatttggtgtccaacctggaagaggctccaaagcagacctcagcaccccttaccagggccaggagaaagtggaaagtgtgcccagttcaaaccctgattctctgccagccggtgttgaccttgagcaagtgcgtcattctgagctcagtctcctgagctgcagaatggagatacttgcttacctcagagggttaatgtgaggactaaaagaggtcagggatagtgagacctggaaagccaaacagcccataatgaagagcagtttccatttagtgttatcagaggctcaaatatttgtccaatgaatatttcaaaggcttaagctctgccttttgtgctctgcgctttgtgtgtctgttggctacaacagaagtgtgcacatccaacctcacgcgatgatgatggatgggaagatactgactggtttgtgttctgggcaatgatttacaatctactcctctaaaacaacaacttactctgtcgccctccatgcatttcaagtgttgattatttttctttccttcactgtgcttttctttttccag

SEQ ID NO: 41181 - DNA, 1803 bp, Homo sapiens
gcccgagtagctgggattacaggcgcacaccaccatgcccagctaatttttgtatttttagtagagacgtggtttcatcatgttggccagggtggtctcgaactcctgacctcaggggatccgcccacctcggcctcccaaagtgctgagattacaggcgtaagccactgcgccctgcctgtttaatatcattgattgaaaaacaaagtggcagtaaaaaaggaaactctgattggtctctctgttacaggtgacttagccttctggcatttttcaccttgaaaaactcctattaggccctgtataaagtcagaggtctcctgaatccggaatgaggttaataaactggagaaagagatactcacctgtgctattcgcctaaccgcccccttctgctccgagtcctcactccccaaacaaccttcgcggttgtttgacacaaaactagcgcttcagcccgggtcgattttgggggatggagtaattacctacagcttaaatcgagtctgtgcccgacgtgattctaagctttactcttactgcctcatttaaccctcacaaccaccttgtaaggcaagaattaccagctttagtatacaaataaagaatcggaggcgctgagacattaaaggagaagccaaagaacacaaagcctggggagctgggactggaggcagttttgtccgatccccaaacccttacgcagggatttttaattggcgcgaccctgtcccagatggctcctccccgacaagggtcagtctgaccacttttaggcccaggtgaggtcaagtccggggtactccgggaaggggctcacgccgacgcctctgagagccccgagagccactcaccttactcagtcgccggcctcccaccagcagccagccgggccaggttaggctgggatcagctacgtcaggccccgcctccgcgaccgttaccaccgccgggggagggcggccaatcgagcccgagcgcgtcgagggccagcccctctttggcctgcgaatgcccccaaacgattctctccagcctctccgggaagctgggtccgccccgctccctccggttggctcactacggggggcggggcttaccgcaaacgaaggcgtcggtgcgatgtgctggtctcgggcacgctggcgcttccaacgcactccttgggtgccctgtcacttacatggaggcttatttgcccggaagacgtcagaaatacttgtggccgtgggtgaaagtgaagcctgggttacctggccaccagagactgccctctctctcgccccctaccccgccgcgactacgagcccttgctggggtacgggtcagcatgttctcgatgttccagacctgaatgaccactgtagcagctgacatttggaggaccccaataaatatttgttgacgacagttcatcttcccattcagcattttccacatctcgacgaagcgtcaggccctacctgaggctgtagctgtccaccattgtcattgtatcttatagccacatggtgtcgctgttgacaacttgtcttttcaaatcagtcaaatgatgtaggtctgtgttacagtcaaatgttgcaacagactgtgttgcagtcaaatgatgcaggtcccacagtagccaacagggatgtcccatctagggcatcagccaagggtctctcatcaggagatccaagggctcttggagctcaatactttcagacccttcttagccttcttccaggcagctgggactacacttaggtttgatctctgtgtttgccccatgcaaacatgtccctaccccaacctacgcct

SEQ ID NO: 41182 - DNA, 1706 bp, Homo sapiens
cactctgcctcccaaaatgccgtgattacaggtatgagccaccacacccagcaatgctgcaagtcttatgggccaggatagtgtaatctaagaaatgatatatgaagaactctcacaatagggaagaggtgaggagtgtccaggcagagagaagagcatttgcagaggccctgggcgagaagaaacctgcatcctttaaggacctaaatgaagccaagcaggcagaggctagatcacacatgggggcttcatgcccaccttaagtagtttgggtctttaaaaaaggaatgagactcataaagaggttttaaggagcgaatgctattgctgccatgaacagatattccttccccatagctgcagagcaggcacagggctgtttttgcccgccagtatgtccccaccgtctagcccagagcggggccagcggccggctcctacccacacttgctggcaggaagactggacgcactgcgggacatggtgatgtcctgggttggggctgaggaaggcctatgcgcggagggtgcggccttcggctaaggcagaggaccagggttgggtccgtggcggcgggaggggtggcctcctgcgctggtcgccccaggggacctgagaggcgcgacaaacagtcggcgcgtttggtactcgcgcctgcagagctttcaacctccgcgccggctgcgcctgtttctcggccaggggagcaaggccacgcggcctacgcagccgagtcggaaccaaccggttgtttggtgaaacctaccccagagcctcccgcggcccacagagcacaggtgaggcagcagaccgggtggggtcggtgtcgcgcctgcgcccgcccggacgcctcgggcccgcccgctccgcaccctggaaacccctgcactcagccccccggcgtccccacgctctcggccctgctgcgccggcggcggccatctctgggcggcggcggcgggcggtgtttgcgcggtcggtgagacccgcgcgggtgagacgctgggtgagttccggacgcttccagccggcccgccggtgatcccagacctcggggcgggacgcggctcccgctcaccgccggcaaaggtggaggtgcggcggggcgcggggcgcggggccagcccggggcggtgcgggggcgtccctgcctagcgaggccctgccccgcgacctgccgcaccctcctccggcctgttcgcgacctctaaagataatacttctcactgtcgaaaacgtggaacagaaagcaaggaagcaagcaaagcagccgtgccgctgctccccagagacaagctgcgttaacatgagggtgtatattcttccagatggtttttccttgtaacatgagcggggcttgtttttgcagaacctgcatcataaagtgctgaaactctctctctctctctctctctctctctctctctctctctctcgactctctctctctcgactctctctctctctctctcgactctctctctctctctctctctctctcgactgtacattcctgtgtgtcaggttgactacctcatccatccctgactcttggcatggctttggactgtgatttactaaatgtagtttctccctgatggtgagcgtacaagtggttttcagtttttagttattgcaaaaagtaattcattgagcatcgttgtatctgggtttttgagcgtgatcatttctgtagaaagaatcgc

SEQ ID NO: 41183 - DNA, 503 bp, Homo sapiens
aaattctgcttctatgcaaggaaaccactaagactatgtagggagatgaattcaagcatgcagtttccacagaggctgagaccttgctcacaggaaactaggaaggacctatgcagcttgatgataaaattgagatggctgaaacttaccaagttagccatctgttaaaaccacagatcactctacttctcaacagtttcaggagctgtacaaacactggtgacaaggcaaccagataaaaactgggctaagcaaacaggaactttttacaagtatgtgaaatttgaaacttcttccatgtctgtacagttgaaagttttcatgctccatctctaattgtgttgatatccacacttcctggaacagtgtcctgaataccccatggacataagtctaatactttaagtgtttcaacaccttgtccttttgtaagtttatagtaataacaagaacagctatgtacagggtaaagtcttcctctcacaattcatcaatcaaaaaaa

SEQ ID NO: 41184 - DNA, 647 bp, Homo sapiens
actgatcaaacaccaagtaccaaattgaacatgaagattaaaacaagctgatattcatgctttaaacgttgtctgtcaaaaaaagaaaaaatgaataaataaaacaagctgatacctgcttagaaagcactttcatgtgccccacacttccccggcagtatgcttcaaggatgacaccaaattgtactgagacagcaggaatgtgcacttctgacctgcagaaagttaatgatatctgaacagtttgtttatcaaacacttcagatcaccgaataaatactgacttctttattctacaaaaaataaacttatgatggcaaggtcattgtgtgcattattatttccttcctcccttccttccttttttgagagtctcactctgttgcccaggctggtgtgcactggtgtgatctcggctcactgcaatctccacccaccgggttcaagcttgcctaaaataaaaaagtgtagctagatgtcgctaggtgactaggttctagccaacaggatgcaagatgaagtgatgtgcacaaaaaatgagtcctggacttagaaggaaatgctggtccctccccttccctcccctccccatttctggctcgaatgtggatggggtggccagccccttcatacttgcgattctcctg

SEQ ID NO: 41185 - DNA, 500 bp, Homo sapiens
tcactcctgatagaaataaaagtgtttggggtgacttcactggaaaagaactcttacaagcttatgtatgcctgttttcctcatgacttcaccccatgaacctttttccctctttaaattttgctctgtatccttttgctgcaataaattatatctgtaagtgactatgtgctgagttctgagtcctcccagtgagtcatcaaacctgagggtgatcttgaggaccttctgacctagcatgcttttggttttttttttctagtataaacattgagttggggagctggcaggagtacatgagcaaatgctttgaactgtgaataattctgagcccttttctttcttatgagacatcaaggagacaccctcatcccaaacccacccaagttattccttgccccaaagaaaaccacctgcagaagatacctcatctgtcgcaggcagcctacagcatattctcgaacgtactggtctggatagttgaaatccagaagctctag

SEQ ID NO: 41186 - DNA, 653 bp, Homo sapiens
aggtaacagtatgggagcaaagcaaatatccaaataattgtggctcactggatacacttttgcacctatcattcaagtatatattttagacaaaagtttcattgtctagatgactgcttctgtttctcactccaatgagtggcaatgggtccaatagactaactgaggtgggtgcttttgaatgtcaacaaatcttccttctagaaatggtatccaatcaattctggttcttgtttacaagtaccatcatgacaatcaggaatgactgtttgtgtagcagagtacccacatgtaattgcaatgagagtgagtcatgagccaaattgtacaagtgtgtggtggtgctggtgagtaactaaccaacagctctcacatctaggaactgaaccagtgccagaaagccatctggatagcaaacagtaacatgagaagaattttaaatagcttacagctgtagaaaatgcactattccaggctttgaattcttttagttatttctgtctgctgtcattttgaaaataagtcataatatgtaaaaattaaaagagcatccaataaaggctggcatttatcccaagtaatttcaggattactcctttgcatgatggtttaagtttggtctggcaagtacttatcatttgtttgtctgtttt

SEQ ID NO: 41187 - DNA, 1558 bp, Homo sapiens
atgaatagttattgtataactatgaacacgtaacttgtcagatgtagtagtagactggctacagaaaaaaaaaaaagcaacggtcgggcaaggtggctcacgcctgaaatcccagcactttgggaggtagaggtgggcagatcacgaggtcaggagatcgagaccatcctgggcaacatggtgaaacctcgtctctactaaaaatacaaaaattagctgggcgtggtggcgcatgcctgtaatgccagctactcgggaggctgaggcaggagaatcacttgaaccagggagtcagaggttgcagtgagccgagatggcgccactgcactccagcctggcgacagagcgaggctctgtctcaaaaaataataatgaaaaaatttttttaaaataaaaaaactatcagtaggctaacttattaaacagtaaaggaaaacttcaaatcgggttataattctgatcatctgaaatactgattacttaaatcacaagagctcattcatttaagcaagtaaagtacaaatgtatcaaaatggagtttgagctcttgttgacagttaccaatgactcagcaggtaaggaattcatggaattcaggtcttcatggtctagaaagcactgtagctaaaccacccagttaataccaaatcatctgctggttatctaactccttccatcttttctcaacttcacaactgccattacttctaagtggcaggagaagaagataaatttgaaatcagtaaatattataaattagttattagaaatacaagaaaaaactgtggtcaggaatgtggttaaactgtagtttaaaacaaagcctttggattacccatggatttagtttaatccatataatcctccccctgcaggcatggataatcaggatcgcatttcccttgagggcaaatcagcatttgcctggtggtctcctgaatgcctgaagcaccagaagacaaactacaggaccagggatgctgtccttgggtttacactggggagaattctgagctgcagacctatctctagcaatactataatataggagatgactgttgagattcacattcttgattccagcagtaagccagctactcccagttaaagggtcaacctcaggtgatctgctaaatatctgaggagctattaaaagaaaataaggagatatggccgggcgcggtggctcatccctgtaatcccaacactttgggaggcccaggcaggtggacccacctgacgctggagtttgagaccaggagaatcacttgaacccgggaggcggaggttgcagtgagccaagatcacgccattgcactccagcctgggcaacaagagcaaaactccacttcggaaaaaaaagaaaagaaatgaaggagatatacattctcggggagaaggggggtcacaaaaagaaagatcctaggctgggtgccatgactcacacctgtaatctcagctctttgggaggccaagcaggcaaatcacctgagctcaggagtttgagaccagcctgggcaacatggtgaaacactgcctctacaaaataccaaaaaaa

SEQ ID NO: 41188 - DNA, 2534 bp, Homo sapiens
agatccttatctgaccaccctttcctgtgctacattattatgacttaaacagttctgcttttaccataaaatcttacaatgtagcataaaaatccccaaatgattaatgaactgctgagacctctgactcgttggagacaattttattacgaatcatatctccaaacttccattcagtgcttcaaaataagtactcatttaattatcatgacttcaccagacagtcacactgcccacaatgatgtttacaaaagcacttgtcactccctttggatgtagcaatgcagaaaaaagagtctgtttccatactcttcgtgtgtttataactctgtaacaagtggcagagttcaagtgtcacttgagatgaaacagcaaagcacttcaagtttacgtcccaccatctttcatcctaagcgaatcccgaatttgctcggtttcatttcagcagtaattcccactcagtacctgagacagggttccaattcagccctgcgggaagagactgcaggattctagtaagggactataggattctattttggccactgcgaggttaacaggctccaatattaagcaactccagtatcggttactgcaacaccagagcagatcggaaataaatgtgcccccaaacgcacgccagcagccaggaattagcaatagctaacacgagatgctgcagcaggggtatcatttacttagcacttgttcagttatgcctaacctcacaacaaccttatggtgtatgtattattatttccatttaacacatcaggatattttggcccaaggccccaggactggtcagcagcggcgttgggattcgaaaacatgtccataacctaataaccctgggtccacgcctctgaaatacacttctgcgcaaaaaggcacctgagggtcgggaagttccggaggtgtccgcatagacgcggggcgcgagtacgccgtctctccacagaaacgcccctcaggaacgggacccaaagcgacagtgacccgggacgcccggcagcgtctctgccgcccaggggccggggggcgccactcaccttggagagcccagggcgggccgcaaccaagccagacgcccccaccggccggtaggcggttatcctccaagctggcaggaagcgcggtgcaaccacaagagtcgccagcgccgcaggtagcggcaagctagaacgcaccgccagcacgcccgggggcaccgcagccggcgccgcgacccagccgcccctcagccgcgccgcatccgggtcccggccgccgcactcacctgcctggcgttccgccgccgccgcctgctactattccaagtgcgcagtcagcagcccaggccgccgcaaccgctccactccggcgcccccatccctgcctctctcgatcacctcccgcctgccccgcgcagcactacactcgccccctccccactgccatggcccgctccgccgcagcgccgcacaggccgacagagcacgcgcgcgccgccgccgaacccgcgcccgtgtgcgcgcgcgccagcctctcaggcctgcatcccagcagcccccgccccgccctgcgccgccctcgggccaatcccgggccccgcggtggcggcggcggcggcggcggcagttgggctggcagggtgtggggagaggcctcactgccgattcctctaccgttgccagcccggctgcgacgctgctgcacggcctttcctaactctctttgcgactcccagaggactgcggaatagggaatccccggcaagtcgccttcaggagagacccatcacccgctgcggcctccataacctcctcccgagagattccgctcttcctaggttccttgctggccttttcttcccagcccttctccctgttctgcgacatggactgactcctaaattcttggacgcagcacttatttttttcccgatacccgtctccgtctttcactccctttgtgaggatagggcgctagctcggctgcctcacagctggcccttcagtccctacactgtgaatggttgtttctagggaaaagtccaggctttcaagcccaagattcttgttctttgttcaattttgcagtaacaacacctaacatttgtctgcagagccttaaactttacccctttttgcctaccttgtttcctgttacctttgaccccaaccgcgaaaaatcacagtcctctttctagtgggacacttaaattttacttactgaaaaccaacattttaactcactccaaagctagtatattctaacgtaatgctcctatattaccctggacaaatagttgagtagtcagggataaaatctagaagtacaacataataaaaagcaaacgtgacaaatcaattaagtgacaaaccaatagtttatttgagaaatgatcctagtttttttattttttatttatttacttattttgaatgagagtttcgctactgttgcccaggctggagtgcaatggcgcgatcttggctcaccgcaactctgcgtcccccggtcaagcgattctcctgcctcagccttcctga

SEQ ID NO: 41189 - DNA, 2405 bp, Homo sapiens
gtgtcccgggagcaggcactgtgtctgattcacctccttctgcctcacaatgtggcccagcatggggcttgacacttggaagtttctcaaagagttacttgttgaatgaatgaacaaatgaatgctttctctgaactgccctgaactctagatgagatttacaaagaagggaagccctgcttacagttctctgctccttatacccgcttcctaaaggcgttcgtgtgcctctaggactcaaggaggctcccgcctcagcctccccagcagctgggactacagaggcaccccactgtgcctgacttcatttatatacattttcccggtgattttctggagtctatatccttcatcagattttccaaggggtgtctgtcccctcaaaagaatgattgtcattatttgaaagactagttccagacagatattttatacaaattttcccagcattgacatccctgaaccaaactgtttttcttcccaacattactgttttcttcctttctgtcgagtttgttgttttgtaatatcagaatctccagctcacctgagtaaatggtaacaaggtgccaccacctttgaattctcccagaatccaccccaccctccgtcagagccactgccaaggcactcttactgatttctcccacactgctggctcattgcaagtgggaagacagcatgtggagtgggtgtgcggcttattaaagtgagaactcagggtcagggcagaaccaggaagagagcagtgagatatcctgctacctaatccaattctcctttttgtgcatttagcaccctcccctccgcctgcataacaatggaaggaaagaggaagtgggaaaaaagaaagtcatgtaattgagttagaagaggtaatgaccaagaccctggagcagagggaaagcgggttacaaaaggtgggttaaagaaatcacaagagtatgaagagctgggaaattactaacaaatatttgcttgtgtgggaaagcaaaaaagtaaaaacttcagtgctgaattggggcgctgagccaccagggaaatttgagattggcatcaaggaccgtgttgaagcagggtgggcggagaaggagggaaaactaccagccagctgagattttgcagctaggctgtggcctgataccgagtatcgatgccgcaagggagggatgagtcagtcctagcacgtccaagtttagaataatagactgtttgccactgggaaggcaaacacctttcctgtgagagggcttgctgacagttccaatgtccaaagtccaatgccgacccagaaaactgaggaggccctggcccctgcaggaagggctcatttacatggagactgagtaaagtgctgtcttaaaccctccttccttcccccactgggaggtttcagccagatatgccaccctttgtaggatttcatagggttgtctaaagccagggttggcacagagcagaagccacagggctaagtaccagattataattgtcaatgtcacaccttactgcagaagccagggaagggagctaggaaactgaagagctttcttggttatgggcggggctgtaaatgcagagtgtgccctggtgactcatgggagacagtgagaaacactgtggggatctggtcaaccgggtactgattcctttgaggaaggtatactccacatgccaacctgatactcatggctagtgaagagatggcaggattgggttgcatcagccagcctaactcgacttggaaacacagaaaataacccagagcaggtctcaagcactgtgtaactttattagttcatagtggctgaacagccatgtttagggcctctcagaagaaagagtttcatctttgggaagaaatttgtgttgggtgattttgttcatataattttgtgttttttgttttgttttggtgtttgagacagggcctcactctctcacacaggctggagtgcagtggcaccatcttagctcactgcaacctctaccttcctgcctcaagcgatcctcctacttcagcctcctgcatagctgggactacaggcacgtatcactcaacccagctaattttttttttttcgagatgcagtcttgctctgtcacccaggctggagagcaatggcactatcttggctcactgtaacccccgcctcccagtctctgcctcctgagtagctgggattacaggctcctgccaccacccccggctcagctaattatttctttctttcttttttctgagatgaagtttcactcttgttgcccaggctggagtgcaatggcacgatctcagctcactgcaatgtctgcttctggggttcaagcaattctcctgcctcagcctctctagtagctgggattacaggcatccgccaccatgcccagctaattttttgtatttt

SEQ ID NO: 41190 - DNA, 1923 bp, Homo sapiens
taaagcgttgtgattacaggcgtgagccaccgcacctggcaggagtgtgtctttttcatttccatatccctgggtgtaggggatatggaaatgaaatataccccacataaggtccagcatggagcaggtaggtgcctgtgggacggctggatggatgaatggatggatgaaggggagcagacaggtgtggagagagggaggacaggtcacaccagaggggccattgctcagtgtggcatcttgcctctaaaactcattcatttaacacgttgaagtgttccttatttttcggttcctagctgactcgccccttcctggagggatctgctgaagcgtccctctccgatcagagccttccctgaccttcctgtctccaccgcaccatgcattcctcaccctccttatcccgcttagtttttctccacagcatctatcctcaccgtacatgcatttacacttctgttttgcttatcgttttccccatccccgcaggggagaataggaacctcactagggcagaggctttgtttgttcactgattcatcaccgggacttaggacatttcctgctgttgtcgctcagtcagtatttggtgaatatggcccctgttattcactgttccaggagctgggagtgcagcggcgggcgggacagagaccccgccttcagggctcgacattaatcctgcctgaaggtgggagcccgaagagcctctcccagccctgggctccagatcactttgtcccttcctaaagaaatctaaggctggcagcgacggctctcccttgggcgcaacagccgcgcccccggcggcaggcccgccccacagcgccccctggcggccccgagcgcgccgcactggagccccgcgctccgcaggcgagctggaaaccccgggagctccggggccatttcctcccaactttcggacacttctgctttcgcccggggcgggaagaggaggagggctgggggagggcgcagcgcagggcggggcaggaaggctggggctctggcgctttctgccacggcgtcatctggaagacccgctttttcaagggcgaagaccccacattcttggagggcctagctttcctccgggcccagctctacactcaccttacgcctcttctccccgcgggaggtgaggggttgcggggtcacaggaggaggcgagggccgggccaatgttcgtcctgccgccctacgtcccctaggtcctgcaccagggttttggggccaaagcaagcagtgcctctgtgtttggggtggagcttcttcacggtctgtgaacactacgcgcaagccctcgggcgcggtatgggcgagtgccctgccctggcgggggtcccagggatccgcagggaggggaaggcctccgaacagaagtcagggcgccacctggcggccgcagcccacagcccacagcccacagcccacagcccgcagcccgcagccctcagagcccagacgcgccttaggggccgcttggccagcgggatctgcagaccctaaccctcctgcaggatcccgggcccatttcccgtagtggttgcgggcctgggtcactgacatacgtaaggtatgacaatcctacgctaaggtaggattggactttgaagagctgagcaatggctgggcatggtggttcactcctgtaatcctagcactttgggatgctgaggcaggagaatcgcttgagcctaacagttcgagaccctgcctctacaataaattaaataaataaataaataaataaataaataaataaataaataaaaaaggagccaggtgggcctggtggtgcgcgcctgtactctcagctacccgagaggctgaggtgggaggatctcttgagcctggcaggtccaggctgcagtgagctgtgattgcaccactgcgctccagattgagcgataaagt

SEQ ID NO: 41191 - DNA, 600 bp, Homo sapiens
tttggagaatgctgatgaatacaatgctcaataaatgattgctactgttgttaccatctaactcagtagtggctagggctggtttggggcaataagtaagactgaagctttatgggtcagggcaataggcattatcccaaggaaatgacagtgatgagctctcactattgaattccagagtgtgaagtccagatgtgaagataaacgcagggtgcagaaatcttttccttttcctcatctggaatgtggagattttcatcaggagagagggcctgcagcacagggtacagagctccagacttgtggtcaggaggcctggctttggctcctggctgagtcaccagttcactatgccaccttgggcaaggccccagcctattttattttattttattttgttttttggctccctgagggggttgagctggatgatgcgtgaagtgctttccatctcgctggggtttggtttctgcttcttaagtggttccaagttgggccgcttgtatttatgctcaggagagaggtcacatggctgaattgtggctgtcctatccagggcttgagaaaatgccacagaccttaccccatgtactctgagat

SEQ ID NO: 41192 - DNA, 678 bp, Homo sapiens
cctcttggcacctcctgtttactccccgagcccccagattctcacctttgcccagagccacattcgggcttgtcttcctcttccatgtccccgcatgcagaatcctctctttcttctgccagggttcttcctctccaagccctcctctgaaccagctatccctctggaatgcagctgaccaaacaaattcccactaatgtaactggtagtatcttagaggtgaactctcctgtgggcattttatttgtatcttagaagaatttttgttttaaatcttatttttcccaactggcatatagtagggtgctcaataaaggtgggttgcctgaataagtgaaagaacctaaggaacaatgtctaatggtggaatttcagtcatgtcttcatgctttcagcctctctgcaaacatttattttgtgtgctagatactggagatatgttgctggataaaacagccacagtccttgccctttggaacttccagtatagtggggacaatcagttaataagcaaacaaacacatttctatttataaatggtgataaaattccttggctaaaagaatattgcagagtctatgatactgtataacaggggcttctaattaaatttaggggatcctgatgccacttagcagtgggatttcagaggacctttcagaggagctaaggtaagat

SEQ ID NO: 41193 - DNA, 1288 bp, Homo sapiens
cttttcagagtgagctctttcagcaagtaagccctatgcttagggggagttttctgaaccaaacccattgtgaatgggacccaggagggatggggaaaaccctctgtggctggtgattgctgagcagcctgaggaaaggacttttgcttctccagagactcctgggcagaccatgccactgaagagccagtagagtcaaaactcacactgaagttggaaggcagatgataacactattaagcttccacacagaatgcttaccgtgtgccagcactgtttcgcaatgtttgcacatcttatctctaaccgtcacagggctctggaaggttggtagtatcataaacattcctccgatgaagaaactgaggttcggagaggttagttgacttgcccaagttcccacagctggtaacagttggagcagggattagaatccatgttggtgtcatctcaaagcccatttctttccatcacttcaccctggttctttgtgagcctggcctgtgggaacagaccttctccagaaaggtccactgaagcctgaagagcatgtgctgtttgtttcttacccagcattctgtcagggtccctggcacgagcatctgaaaacttatgtaaactcttaagggcatgagccctgacatcagggcccagctccttctctgttagtgtttcctaattgatactatcccagtgattgctttagaaattgactttgatgaaaaagcttttaattacataataaattactctcagaggaacaggccgttgtgtcatggctctgccacgtgtggggcagggagctggctgaagggagtgtttgggatgagttgacatgcatcctcccacagcatgcctctgcatttttccgtggtgactacaagatggattttgggacttgaatggcccaccgggataacacacaagtatatgggccacagggaaatatctgcaccattttgctcctagtggaccagagaaagctgaatgtgaaagaagccttgttttgaaatgtgttttcaaaataaagggtttcataacaatcacgattgcagaaataactgctgatgggaataacttcctggaaagcagaggcctccatgacagttgggatttaaaaggctagaccatgttacaaaacaggtttacctaattgaaactcagcattgctgttcacacacacacacgcacacgcacccctctcttaggctgaggctttattgttagcctctgatgccctttcattggtagcctctgatactctgccaaggaccactgggcctttgtt

SEQ ID NO: 41194 - DNA, 792 bp, Homo sapiens
taacaggcaaaaatgccagcatttacatgttgcctttttaaagtagttccccttaggctctacacttgttcaaagaagttgtcattatgctatgcttttgggtggtttcccctaagtgaccaccttcagaacctttaacaaattcatttcagtgcctttaattgaggcaaatctggcagatttggcctttatgaagtcccaaaggtcagatcgattaagtctgtgtgtgtgtgtgtgtgtgtgtgtatgtgtatgtgtgtgtgtgtgtgttgattgttttgggtatcaattaccacagtattgatgcaaaagaaaccacaaaagcctcagggacatacaacaataacattatttagctcatgagtttgcagtggttcagctgatgtgggctggacttactcatgcatctgctatcagctgatcttggctgagcttgctgagatatctagggtggagctggatgatgccaggcaaggatggcctcatctgggttatctgggctactcagctttctttgatttgtctttcatcctccagctggctagctggggcatgttcttttggcaatggcagaggcataaagagaaggaaactccagtttgcaagttcatttcaagcctgtgcttcattcctgctagcatcctattggcccaaacaggtttcatggcaaaggatacaaggaagagtgaagaattgtgactttcgttttttttttttttttttttttttacagtctgccacattgattaaactatgggacatatttcactttgggaagctgaggcgggagga

SEQ ID NO: 41195 - DNA, 969 bp, Homo sapiens
tttactttttgaatgtcactgcagtagagatggttcataccattattttatatgctttatctgaattaaataaaacccacctccgctcactccatgctattttagagggggctgcccactaccagttcactacatgtggcttgggcaaagctctggctcttgtagctgttatggtcacatggtggacttccaagtcaacaacacatctgtcacagtccctatgaatcactgctattctgaatttgcctcaatagcttcatattttcactggttacagacttgtgcttgagacgtcctattcataatcgctgatccatgttccaagttgaaaacataatgttaaaattactatactgtaaaagggaaattaaaaataactcaaaaccccagaacttctggtttctttgtgtttgagaacagtttgctgtggtggaaagtggaaaaatgcccagtgatttataaacacaacatgtgatcgggggaacaatagcaggcagctgaagagatctgggaggcccgtgggtttttatgtagtaaaagtgaaaataaaactggtttctaagttggcaaactcctttttcagatcatttcagggaattgctgagaaaacatatgccctgccctgcccagccctagcctgtggctgacacattggccaaatttatttttgctgcagttgcacgcttgtttgctttagaaggcgtctgctttctccgtaactgagagaacggaattgttccatgtgtagctgcacataccactttattgtctaatctttggaaaaaatgacatacatcaacagaaatcagtgggattttactgattctacttgcatatataacatgaaccctttataaatttctaatatgaaccctattttggaatttgctgaaaacatattttcaaaattataaagataataatactcactgttaaagctcaaacaatacagaactctataaatggaaa

SEQ ID NO: 41196 - DNA, 1060 bp, Homo sapiens
actgtatcagctctgtcccaccacaggcttggcctcggggaccttctctgcggctggtaagtatataacacatagtgttcaaagtttggacagccctatgtggccaccccatttagagccttgtcacttttagggctttgtgcaccagcaggcatggatcctctacccatggaattctgacctcccaggcccaggatctctctgcctcctcctgctccctgacctcctcttcatcctccctcttctctgcttctctatttcctcctcttgctcctccccttcttctccttttccttctctctcctcctccctcctttttcctcctctctcctcctccctccttcttcctcctcctcccctctttctcctctctacctctttctcttccccaactccatttccttctcctcgtccagccccggcctcctccttactccttgactatctccatggatgtagacctttagaaaggaacctcatttgcagttgactccaggcaacttctctttcttcatttttcctactgtgaaactaaaatctctagggagtaggaagtctagaactcaaaaccctaaggcctggctaccttgcctatgaaaagcaaaggcagaactccctcggttcctttgctgctactctcactgcagccgaggtagagataggcacccttagtttctctttcagttctttgccatgctactgctgcaatcgttgccttgagtgtgtacttctgattgcccaatcccacctccccattggcacaaggctgttcccagctgggcccaggcctgcccctttgtccattgtagtctgacccctgtccagtcactcaagataatgtccttttcctgcatctgccgcttcatctagcctcttctggggctctgagggtctgtcctggccctggtgaatattcagggcatgctggtaagggggaaaacaggggaagaagagaaaagagggaccaagctgagtgaagggggccagcttggggacacccctcagccatggggcctctgtcctttccttccaggactgagagatagatagccctgacaac

SEQ ID NO: 41197 - DNA, 1485 bp, Homo sapiens
ggcctcagtgtgacttctgatttctgagcctcagtttccctatcagtacagtgggcctacagatccagagaaaaggtagaaaagcctggctctatgggtcctactaaaacctgaggcagcctctctctggaaagggaaggaagagcagaaggagggcctgcagagtgcagagcactgattcctccccctagtccgttatgtggaatgaggagtccttagaaccggaggtgagcatatttagggtaaatgagaggtggtgtgagcactgaggagggcctcactgctctgagaatgccgaaggatggagatgtcagctgatccagcagacacagggccaacaggtcatgagatggtcagggcacagctttatctttagggtcattaacctaaaggactccaaagccaaccattccccatagaagtagcttggacggctgccctcccctgtgatcctgtctcctggctccattaggcctgaaaaaaaggcccctcgctcacattcagtcctggtctgaaatgttctcgtctcacctgctcagagatgctgggagcactgctttggcttcttttggtgggtgaggtgcagagaaggtaagagagtgaaggggcatagtgaggagagtgggcagggcacactggaaggctctgagatcactgtactagagacatctcccctggtttgacattgactctaaggactttgacctctgaatagtccagctgtgatggccaatgacagggactctgtgccaaggaccagaattggcaaacattgtagccataaatagaagtggattcagtggcatgctggcaaatgtttaacagccagctttctggaatggaggaagcccaaatttgtagcatttaccaatttctgtagtgtaactaaatactcactccatggctgatctgtgtcactgaatgtgccattgggaagaagtgttcatgcttgcttgttatgaacctgtgcatactggcttcagcacaccacagggcagattcaccatgaggctaggaggcctgggcttcatggctcctcctgtgcagggattctctcaaagctcatgcgtcgtcccacatggtcatatatttttgtacagttggcaaaagtcagatataataactataattggttaagattcctacctctttccattctaacatcccctccttctcacttcttgaattgaatggtttggagtagccatgggcatgttgtaatttctttcctccttgtaaataagcgttcacttttgtacctttttttgatttttaattttaattttttatcttaaagagggcctcaaaactgatacgtactttcagctgcgaaacctggatccacgctgggagtaaattagattgcagtttatcctccagaaaattgtgttgattgttactctgtatcttggagtcatattggtgtatataaatggatcactggataattttgtccagtttagcttcctaaagcgtcatttaaat

SEQ ID NO: 41198 - DNA, 630 bp, Homo sapiens
cttaaccataaggagttcctgtggctcctctgcctcatgactcccgaagacagaggctctgctgctcctttgcacatccccagctcctcctaacacagcttcaatcacagtagatttgtttatcccttagaatgctgtgggctgcaagtaacagaatccatgactcaaactaccatgtcaataaggaaatgtcttatctcatactacaggaagcctagaggcagggtgggcagatccagcagctcagcaatggcatcagggacctgggtctcctctgttgtcttcagcatggatgccacgctaaggacgtctcccctttgatcaccagtgatcacacacagtgaacacacacacacttgggtctctgttcctgtctgtttttgcccagcataaatgagagaataaatttccccaatcctggcacaggtatccttatcctcagtctgatagggacaatgacccactctggaccctggacatgtgccagggaaacaccatgttctgattagcttagggcagaggtttctaaactttcttggttatgccacccttagtgccttagtattttttcacagcattctaggccaaaagaaatacccaatagttccgtttgttaagccgttaggtaca

SEQ ID NO: 41199 - DNA, 318 bp, Homo sapiens
caacacacagcacttcagctcattctggcagtcctcgtctctactctggagtctgactcaccccacaggagtgttctcgggctcactttgctggatatcatcagggcatcgcgtgctctctctctggtggctggactggctcagctaaagtatgcttggcatctgtgtgtggtcacaggaaacagttatgaggttactgttgctggttgttttggttttgtgttttgtttgttactgtttcctaagaatgcttagatcagatagagatgtggttatgtaaaaaaagaagaagaaattttggctgtgaacggcaagaaa

SEQ ID NO: 41200 - DNA, 1463 bp, Homo sapiens
ctcctcggttcaagcgattctcctggtacaggcgcccgccaccatgcttggctaatttttatatttttagtagagacgggggtttcaccatgttggccaggctaatctcgaactcctgacctcaggtgatccgcccgccttggcctcccagactgctgggattacaggcgtgagccacggcgcctggccggaaatttgttatttagaacgatggaaacgggtaggaaaaagagcatatagggaaaaaggtgtaagttttaactttatgcatagggaaggacataaacaccgtctacttgtgaataagtagtttagaagaaacaatctataagggcccggaagacttccggccctttccgcctttaactagactacatttcccagagtgctgcaagaactgggtgtgactcggaatccctcccaaccacttccggcgcaagtggcttctgataatcatggcgcccctcggaacaactgtattgctgtggagcctcttgaggagttctccgggcgtggaacgggtctgtttccgggctcgaatccagccctggcacggtggcctgctccaaccgctaccttgctctttcgagatggggctgccacgccgccggttcagctccgaggccggtaagtgaccttccggactttcgctggggcgttcttctgggagacgtagatcctgtttctggcaggcgaaaaccacgcgatagcccccgcgacacgtatcctagcgcttcctcagattcagctgtcttccttctgtacctgtagagtttgtcatcacctgcatatctgttcattcgttcactcactcaactacagtgcctgagttccgctccgtgcagagcactgtgctaagctctgtgggatatggcaaactaagactgacacagacatttccctgtgggaactcatgtccatggggaattggcagtgcagtgtgacccgggttgttataggggacgcacacaggagaggcactcaaactaggttggaaggtcagggaagggttcctggcaaatatgaccaaagctgagatctggttagccatgctaaggagaaagcaagaagcttctcaagcataggggacagtagcagatgtccagaaatgagactgagcacagatatttgggaacccattttggaggtaggattgataaggcttgattaaggctttggatatgagtttaaagggacaaattaagattgtttcttaagtttttgattggaatagagggttgtcccatttacaccaagatgaagaagattaattaattgttggaaccgttattttgggggcgggggtagtgcaggagtagatgagatcaggagatgggaaaggaggcggaattaaacctatttgggacacattaaatttgaggtgactttaagagtcaactgtttagtatggagttaaatataaagtgaggaacatcggagtaaaaatggtaactaaaggtgag

SEQ ID NO: 41201 - DNA, 2365 bp, Homo sapiens
tgcctcagcctcctgagtagctgggactacaggggcccgccaccacgcccggctaatttcttttttttttttttgcattttcaatagagacggaagatattcttatactatcgttttctttccttattattataacactcttgtgcaaactagtctagggcgttttttagggttacggtgataataacaaagtgctctaacaattactattcttaccagccactggatttgcaaatgcataaaagcacaccagccagtgttataaacagcacccccttcctcccaacccttcttctccccttagaaacctaacagctgagatatcaaagcatttgaaattccatttttgactccatatacatttgtttttggcttctttgcttgtttatagtttgtagccagcacacactatccccagaataagcccaacaggagtgtagattaactaccaccgttttaaaggcaaactttagttttaccaaagcctcctacggagttcaacacattcggcttctgtgtttccctacaccaccgatcccgctgcagactgcaggagctctggcaagcgccacaagcgccaggggagacaaaacccctcactagcaggctttgcctccccaaatcaccccggtcccctaggccccaccgccttctcccttcctggaatcaaacgaccaagaccccgcaaggcctgaggcggcggccgcagcgggagcccagaccactgcttaccgcggccctcagtccagaagctccaggaatcggccgtaacctatgggaccccgctcccttctacgggatctggacctaccatggctgcgtcggtccaatcccgggaaccctcgtttgttaccggctactcaggccttgagataaacccaccgatccactgaccgtcagactgactgacgtggaacttccgggagccgattctcgcgatagtcagaggccagggccggagcgcctgcgcaaactgcgcgcagggccgtcgtttcccaagccccgccccagtttcctaggcaacgtggccttccagaccgctggtagtggacttgaggctgtcgggaaggaggggtgtggcctagaccactaagggccgtgacgtggtgccgctgagcttggaccccgaccagaagatagagattgaaacgatgaggaaaacgaagtgcctaatccccgctggacgctaactgcagggcaagctccccagtgttgtagttgtgtttcggaggccgagaaccgctatcgggcttcctcggactctggccctggaggggggaaacggcgagggagaaggcgaaacgagtctccagtgtgttcttggggcctggtgcgaggcccagagaattctctgcaggcctttgcccgggcactgattaaggctgcgaagagacgcaccgggctgcgggcttagtagcttcaggcttctgaagtcagagggagggctgagagcttacacttctggagctccccgggagacggcaactacccaaccgtgtgggtgtgtttgtgtatgtgtcttttgttgagcttcggctggctgtgttattcattcaacaaatatttatcgatcttcggcagtgtgtcagacataccttcttctcaaatcttcacatcaaacctgaattatctccatttaatgatgaggaaactcgggctcaaagaagttaagtgttctagccaagactgcatagtaagtggcagataaaacctcaaagttgggccgggcgcggtggctcacgcctgtaatcccagcactttgggaggccgaaacgggtggatcacctgaggtcaggagttcgagaccagcctggccaacatggtgaaaccccgtctctattaaaaatacaaaattagcctggcgtggtggcgggcgcctgtaatccaagctgttccagaggctgacaggagaatcgcttagaacccaggaggtggaggttgcagtgagctgagatcgcgccactgcactccagcctgggcaacagagcaagactctgtctcaaaacaaaacacctcaaagtttgtgctctttctactacataaaaatatctcttcattaatgtggctgaattctaagggcctgtgccataggggttacactacacaataaagttcgagaacatttgcctgtcacacgcactgcacatctcctgtatttcctttttttttttttttttaagaaaacatgtggaccatagaaaacttgccctctggttacacgtacaaacgtgtatttttaacttgagagaaatcttaaagtcttttcagacctccagattttcagaaaggcaaaaagaaaaattatgtatttgtgtgtgtagataatgataatcagagggagatgattttgcacgaaattatttgg

SEQ ID NO: 41202 - DNA, 810 bp, Homo sapiens
ttgtattctccttcctggattcatagttattctgtcatgagttgctgtaatggcctgaattggttggcctccagccaggaggtggtactttcaagagagtgccagctgtggtagcagtagggttccctaagcttgctctaagatggccagggtaagtatttggtttttcaggtggtgggcggggccctaaagttcccaggagtttctatattttgtgtttggctaccagggtaggtggggaaatacccttaggtgggggcagaattaggtgagtctgggctcagactcttcttgggtggggcttgttgtgtcccctgtaggggatgtgggggtgtttctcaggctaatggggttatgttccagaggggctcttggtcacctctgctgtgtcatatagtttgccagggaagtgggggatggctggtaacaaaaggcctccctcatctcccatgcagttggcagagctagtgttgctcccatggtgcctcactcagaccttgccccaggctgtgaactaccccacagagaaagaaggcatagcctttggaccttgcccctccccatctgctcaccctgttgccaactcctgtgttcctacactcatacctgcagcagctcccactcatcccccagactccacttgagaaaatttgtgcccatttgaaaccactaccagtttcagatgggagtttcctttgcactgtgacctctcgttaataccactggctgccttccctaagggcccatgtgagttatactcggggaaggcttccctgggctcaagctagtgggagtgccttcaaggcactt

SEQ ID NO: 41203 - DNA, 675 bp, Homo sapiens
tttggtagagaagttgaatgattcccacctgggcagagttaatgaactctctcccagtattctttcacattattgagacctccttatgtctgtccttcttgatcatctcttaaaaatgaagaccacccctcccattccttcatcgcctgatctgacctgaaggaggactgacttcaggacatgacaagttcctcagggcaaaagagttcaccaactggtttcctcactgtcaagaaagaatctggggtgagaaacaccaggtgcctaagaaggcaggagaggaagtaccactgacccttggctcactcaccttttgaactcttaatgatgtaatttgtggcaaacccaaaggttaccatgatgtgttactctgctgagactggtggctgagtcatgatgggaggccagtgtgtggagtgggtcactgggctagtgacaaagccagtttactgcccaaccccacatctcagtagagttgctctttccttactgaaccaacaaccaggcccacagaaaaagcaaactctctagtgctaggggttaaagtattagaaatcgatgattcttagatagggaataggcaccatccttaacaatagtcacacatttgaggatgtctacacatactcttcccaaatgctaagggtctctctgctcaaaagggtaaggaaggca

SEQ ID NO: 41204 - DNA, 1591 bp, Homo sapiens
tctatgcctgtcagatcctcctcaaactccttcccaacctggaagtccatgatgtagttcctaaaagtgctcagcgtgcggatgatcatatggtcaccgtcctgcacgatctctttgtctggcttcagcaagttggcgattttgcgcaaggccacattgacgtctgcggtgggggttgaacggggagagagagagcgccagagagttggcagggaaactcagagaaccgttcccaaggtagcggggccccaggagccctctccgcccgcgaacactgttagggttcccgctggctttgcgttgtctctgcgcacagcctgcctgtgcctcccctgccgcccccaacaaagttttctgctcttatgttaaccgtttaaaaacaaaaagtagcaaaccaagccccagatttactaatgaaattacccacctccagggccaacgagcagacatttgccaccggttaacctaacaaccccgaattctccaatctgcagcctgggggctgccctgggagcggtggccgaggacgccctttctggcgtccgggggcaccggaccgcggctcgccgggatggaggcaggcaggcagcgtctcgggagggctctagggagcggcccggagctgctcggcggggcgcccagggcgcagcgggcagcgcttaccgagggcgcgcaggtactcctcgaaattctcgttgaccaacatcttccagtacccagtgaagtcgactggcatttcggggagtgactggagccagttggccacaagcgggcgggacggctggagactgccgggacagcggctgccggtgctacgcgggtggtgggcggcccggaaatgagcgccctccggggacagggggctctgcggggcggcgacagctggattcccagcgcgcacaaagcctgcgggaggatccattgtagcggtcgctcctccccgcttagcgagggcgggcgcaggggcgggggatgtcgaagggtcaggtttgtccaggccgcgccaccttcgtttcagacgttcagttcgtttcccctacaaaggaagaggagaccggagacgggacgtttgctttgttggccgaactcttcggctgctggggatttccttcaaacgccattaacttctcacactcagcagccactcgggagttgggaaacaatctcctggggtttgtgctggcgtgattaaggaaagaggccacttacaggcctttgtctaaagcctcgcgccggtggtggctggggtcaggaaagctgggaggttcaactacgggcgagaaaattggggcactttccacgtctctcccgaaaataaaagaaaggatgccgggcacggcggctcacgcctgtaatcccagcactttgggaggccgaggcgggcggatcacctgaggtcaggaattcgacaccagcctgggcaacacggtaaaacctcgtctctactaaaaatacaaaaaattagccgggcgtggtcgcgggcgcctgtagtcccaactactcgggaggctgaggcaggagaatagcttgaacccgggaggaggaggttgtagtgagccgagatcgtgccactacactccagcctgggcga

SEQ ID NO: 41205 - DNA, 896 bp, Homo sapiens
tagcccagcagcggacactgagtggaacacgttaagtatttgttagacactgtgcttatatttttaacctttgagtgcacgagtgctaaaggtgggatccgaacccacgtctccgggactctggtcatagccaaaggggagctgggggttaggttgacacgctgcagcgagaaccgccggcgcgcagaggcagcgcggagctgtccccccggttcgcgccaccccggatggctccgcactccgccgccacctgtcgccccagcggggactcccaggactcagttaggggccaggagtcacgtgggcccgggcattcagccgcgatccaggtcctagtgggctgacgaggggcccacgctgcgcttacctgctatttgcagggctcagcaacggcgctcggcgagtctcgggggactgcgggggactaggggacctgctgggcctagcaggggctgtcggtcagcgcgcggcccggcgcccgaggtccgagagggaaacgacgtttggtctcgggactcaaggctgcctccggcccgggcagcctcaggtctagatcccctagtacctgagctggaggcggggccaaggcgaacttgaccttgcgctcccttagcggccccgggcagatggagtctgagggaaacagatctgcgccccgccccttcgctggggcgggccctaaggagacccggccctggccccgcccagggtcctaagccccgccctctcccctgcccccgcccccgcccgctggctcccaaccgccaaggctcttttgtgttgcgtgcgtgtttgcttttttattctcctgttttgtattctgtttgttttgtatttttatttaattttcttttaaaaaaatacatgaaagtaacgcccacttacttattagaaaa

SEQ ID NO: 41206 - DNA, 496 bp, Homo sapiens
tgagagaggtgtcctccttgctcctcattgtcatttcctggtggtcatgtcttccttattcctagacaggtctccatgacaggcctccatgctagtttgtttgacttgaacatcattgggttatacactgtctaacactgtttgttgcaattatatactctcctcttagtgactcttcttctggtatcagtcatcaaagattttaacgcctggctcactgtatttttctcctccactagctctgccatcacttgttgtgacttcagcattcctggagatgagtcatctaacttcctgacctctcagttgcttaactgactcatctccaataataccttcctccactccacttcagtcatcccctcccagggcccaccaaagaccttgtctttaaaagatcttaaccccagagtcttaatgctatgcatagctactctgaccactgccagctttcctgcttgtttcctttagtgtcctccttctggcaagtctttga

SEQ ID NO: 41207 - DNA, 1529 bp, Homo sapiens
tctatctcttgagatgggtgagtaagaatagctctgtccttggaaaccaaagaggcctagtgaaaactacctgttatatagtttactgtgttaaggggacgtggggcatcattaaagctgaagaagagtgaaagacccaagaaagctcagataagatggcagcatagagaagaacgaactgggaatttaaaacattgaggaaatcgtcttttaaaaagacataactggcaatcatcatagcaaaatcaatgatattgagaaccagctcctactgccagtaattggactgcttaataacaagcttagacaagttaataccaggtcaaatttctcctccagaagccatttctgtggcttactgcagtagccatattgaatagtcctggaattggagcccaccacaaatattaattatgaacatgaatttttaaggttaatggttttactttaatgggaatttggggcctctgaaagtcctaaatgtctcagtgaacttgtttgagatcacaaaccaaagaacaagagtgcaaccagatatttatagtttattctgcttggcagagtgtccagagtgagatcactgaataccttggcatgagttcagagcttgattttattatcttgtagctgcctgtaatcacagatgaggcatcaaaggccagctgtcccccatgaatcttgacagtctatataaactaattacttctttatgagctatcctttcagaggtttgaagagagggcctattaagccaagttcaatatgatctacaaactttaaaaattattatttatctaagttatagtgctgggccacagtaagtgacatcatttgcaatggttggcttgggtggctgtgacttcattgaaatacaatttgtgtattttttttaatggaaaggtgaatcccagtgtgttagggattctttctgcacattaatgataccaatagcaaatttcaaagagcaaggagttaaaaaaacaaaacaaaacaaatttgggaagtgagggcacagaggcacatgagcaaatggctttttttctaactctaccaggctgtgggttgcaaggggaaaatctttattctctttgtccccaaatccactgcatggcccttggccctttcctttttttgtgcctttcccttgaagtccctaaagaggtgagacaccaggtataacactgcagcctgccctctgccactccttgggccattcctcttggctgctattccctgttgcctgtcatatctgcactgaggctgcctttgctgctctgtctccctgagatgagcctccacaccagcctcatatgtagcaggctggccataccactggggtgtatgctctcagcctctgcctcttggtgaccactgcctgcctctggatgcttgttactataatgctgtcctcaccagcccaccctgatcctgacatacccctggatcatgctgacctcccttaatcgcccctctccccagcaaggaggaaaaggcctttctcttctggcctactcttgctcaggagctcc

SEQ ID NO: 41208 - DNA, 868 bp, Homo sapiens
gttagtgagttccagatgtttgtttacttatattctgccacattgaaaatgattttttataaacctatttacagaagttactctgaattgtactcataaggaatgataatccctaatggagaagaacagttagacagataagataaagtgtaattttacttccaaatcatgtgtatttagaatatttctacatttatccagtggagttttttctaaagctattataagtattttattttggattattcatttacttttgaaatgtgataatgtttaatgctaactcctttcgtgtatatttttaatgttccaagtaagtacatccaattaatgataatctgtgatttttatgtaacctaagtacaactgagacagcagagttctaatgctgttcagtatttgtttaacatttcctgatggtttggaaaagatttgtttttacagtttgccatacttcattatgttgcaattggatttgaaatttcaaaactattaaaattaggtttcgtatgtttatacttgtaaataatggaatgccttcgtgtctgccttatcagctcagtgtttgaacttagttcagtagtgtttattttgtaatagcaaataaactcattctgtgtatttacctttgttactaaaaggtttcatcagccttttcttttttcaaacttgtttacataagtacatgaataggtagaataaaattgataacagttttgaattaaaatgccataagtggtggctcacgcccataatcccagcactttgggaggctgaggtgggtggatcatctgaggtcaggagttcgagaccagcctggccaacatggtgaaaccccgtctgtactaaaaatacaaaattagccagg

SEQ ID NO: 41209 - DNA, 1780 bp, Homo sapiens
gacctctctgataatcgctgttggtcgtttcatctcccacagagaaatctggtggaaatctccaccagctggaacctaacatttgcaataaatgacccacaaatactgatcaaaccaaatacaaccgttcgcctatcagatgtctaacggggcgttacaggcagccctcaagtgctctgaggatcttcagcagcggctccaaggaagccgcgggccgggagcaggtgggaagggcgactgcgcggggccacgacctccccgggtctctgcagaccgttggagacggagcagcagcgaggactagagcaacacaaggccggatgtgttctgagccggaagaggagtgtgggataggccgaaaggggtggggggtggggggtgacagtttgggtctacgtggcagcaggcgcaccccagacgcgcgcgcccacccggcgatagcatcagcggcgccagggcaggcacatggccccaaagcacccacactagggcccgggccggccagggctgtgttcctgggccttggcgcgcctccgcgcagtccctgatcgcaggtcaggagttgtgaggcacgcgagagccctgcgcgtctgtggtcgtggtccctgcgcgctcggcttgtccgtgcccgtggctttgcacgccgagggctctgcagactgaccagtctctccgggctgtgctgggcctcccagaggcagtgtcctctcagcaaccccgcgcggtcgcccccgcccagccgcaccgcaacaccgcctccggggcggagctccagggctcctggtgcagggccggccgaactgagacggggcgcggcggggtcggcagggggcgctgccgggccccgcgagctccccggtggcgggtgcgcgccgccctcgcctcccctcgcgccgggaggagctggcggcgagcgccgagccgggcgcgcagcgacggagctggggccggcctgggaccatgggcggtgagtgcggcgcgggcctgggccggggcggttgccgttggggccgagcagcgcagaggttctaggcgggtgggcgtccagggtccgaggttgggagactgagggggtccccctaactcgccagtgggagaggggcgggaaggctgggggcgcttcgaagcgtcgggtccgaatcccgcgactaagcctcctcctttatccccgcgctcgcccctgagcctaggacttgcgccctctttcctgccactccccccgtgcgcccggtgtcccagccccggcgcccgccccatagcccccttctcccagagctggcgccgtctcacgcccgctgcgaacccccggctctgtctccaagccctcgccccccgcagccccgcactctcccgcggagcccgcctccacctcgcccccgcccttccagccctctcccgcacggcccccgcactcccgccgctggattccagccgagattcaagctcccgggatcccccttcccgggcggtcctgagccggctagtctccaggtaaggaggcggccgcaacttcgcggcctttcccggagacggggctggctcctcttggcagccacctgcagcctgacgcctccgggagtcccgggcctggccacggggccgcccgagcgcaggttaacattcctggatgcgcaggttaggaccgtgtggtgtagacccacgacgttgcttttgctggtgaacttgcctatgtcctgatcttttaaataagctgggtttgtcacacacacacacacagagagagagagaatggatttgcttagggtaggttgcctgcttt

SEQ ID NO: 41210 - DNA, 955 bp, Homo sapiens
taggtaagtgacaaaaggagcagtggcttggaaggtctgtgcacctgtatttaggaggtgaagaagagggagcagctttctagtaggatggtgggccttttgatagaagcatctcccagggactctttttgaacctgctgtgcagccttgcaggtaaacgacggcccattggagcctctcaacctggagatgctgcatggcagccacgaggaggcacccgtgaacccagaatgaatttcagggtccgctctgagtccaaaaggcaggagggccctggccaactaacacctaactgagccacagactctggcctgtttatcctccaccctcaaaaccagcaggcttctctgaccctttttggactttggctggggaagccactggcttttggaaaaagttcagtctgcagtgatggcgggaacaatctcaggagtctggaagaagttaatgattaaaaaggcatggaagaagaactggatggcggcttggggagtagtttctgcagtcaggaggcacccttcacctcattcccttggcccacagtcatctgtgcatgcgtctgcccctccctccatcagtggagctccctctgagctgcgtactcgagggtggaggagagtttgggggaactcaaacatgtggtagtagagactgtagtaactttaaaattctctttgtatttgcagaatcatttccccaatttacacactcatgtttcagtttacagggcatccttttgtcacctgctcgccacccttatgcccctgggtgtgaccagcttcctcagaaagagctgtaatcaatagcatattgattaaaaagcatattaagatgaaaattattgcacctggttttgatgcccccactctctcccctttcctcctccacttctgtttgtggttacagccatcatttacattaaagttacaaatcattttgaatactatttgtccca

SEQ ID NO: 41211 - DNA, 558 bp, Homo sapiens
catggagcacttcaaggtaattaagacccatcagatcgaggatgaaagggaaagacgggagaagaaattgtacttcgggtattctctcctgggtgcccaccccatcctgaaccaaaccatcggccggatgcagcgtgccaccgagggcaggaaagaagagctctttgccctctactctgctcatgatgtcactctgtcaccagttctcagtgccttgggcctttcagaagccaggttcccaaggtttgcagccaggttgatctttgagctttggcaagacagagaaaagcccagtgaacattccgtccggattctttacaatggcgtcgatgtcacattccacacctctttctgccaagaccaccacaagcgttctcccaagcccatgtgcccgcttgaaaacttggtccgctttgtgaaaagggacatgtttgtagccctgggtggcagtggtacaaattattatgatgcatgtcacagggaaggattctaaaaggtatgcagtacagcagtatagaatccatgccaatacagagcatagggaaaggtccacttcta

SEQ ID NO: 41212 - DNA, 1415 bp, Homo sapiens
cagcactttgagaacgagttgaataccaagaattattcaatggttcctccagtaacttctgctagaaacacagaatttggtctgtatctgacactagaacaaaacttgagggtaaataaacattgaattagaatgaatcatagaaaactgattagaagaatacttgatgtttatgatgattgtggtacaagatagttttaagtatgttctaaatatttgtctgctgtagtctatttgctgtatatgctgaaatttttgtatgccatttagtatttttatagtttaggaaaatattttctaagaccagttttagatgactcttattcctgtagtaatattcaatttgctgtacctgcttggtggttagaaggaggctagaagatgaattcaggcactttcttccaataaaactaattatggctcattccctttgacaagctgtagaactggattcatttttaaaccattttcatcagtttcaaatggtaaattctgattgatttttaaatgcgtttttggaagaactttgctattagatagtttacagatctttataaggtgttttatatattagaagcaattataattacatctgtgatttctgaactaatggtgctaattcagagaaatggaaagtgaaagtgagattctctgttgtcatcggcattccaactttttctctttgtttttgtccagtgttgcatttgaatatgtctgtttctataaataaattttttaagaatacctatactatacaactaatggtttgtacctataagtcactcgagttattttcaagtgagagccagtattttatttttcccccttcattcaaatgtcatgcagagaaccagtattttaaaattttattttaactgctttactaactgctgaaagttgtgttatctctcaagtattcaaagactaaatgtgttttctttccttcccactcacaatatatctgaattagaactgctaaacacagcttgaagacttaaaaataaaagtgactcggaagattttttaaaaaatcaattgatagtatctgttggtaaaagtaaatattgtggctaagagtcaacaccaaaagtgtagataacagttttgtcttctaagacactggtatgcacagcatcaaaatatcttcctcactatcaagttccgagacacttcattccataacaaacactaagcacagagatgagatcagtggacacagtcatagtccttggtttctgggcagtggtctaatgacttaactcatgacaggcctgggtgtatacatgcataatttagcttccttgtttttatgattaatacatgcccactagaaaataaccaatactgaaaaacagcttcagaagtgatgttctcatctaatcccacctccagaggtaatgttgtgagctgtctga

SEQ ID NO: 41213 - DNA, 646 bp, Homo sapiens
tgcccggtgctttggctggcatgcccctgacaaccagggagggcaagtccttctcctggtgggtagccggctggcttcctcccagctcagagccaagcatgcctcaattaggtacgccctaggatgggaagtccttccaggggcctttcctcaaaagccggccagaagtgggctccttcaagcctaaagttaagccgatggagtatgcagggtggagacgtgaaggaaggccacaccaccttctggtggcaactccgcctggcccacgttttgccgcttttcctctttccctgtcaaccacaccacgtgaggcctctttcccagcaaaccaaagctccctctggcggcccaggaggagtcaaatcttctccccacctgtgtacattattttccagctgtagcaagtagagacacgctctgtgtccagatggcctcaccccagctgcccttttgtcccactgatgagccaggtgtttagcattttaaacaactagcactctgattgacagactgaccattaaattgactttctgactgatggatcctgatggaccactgtctatctgaaaagttaatcctgagtaattgactggctggttggctgattaaatatctaaacacacaaatcacttgattgacctaatgg

SEQ ID NO: 41214 - DNA, 3973 bp, Homo sapiens
aggtgtacgtgtccagtgttgactatagccagtggcctcagggagtgtgtctggtccagctttcagctgacagctttctcatcagtgctgggtcactggctgcagctgcaattaatgcgctctcctgactaagggtaccatggaacgtcctctgcctttgccccccagagccttgggaacagattcctggaaattctgagcaaggtgctagcaagtccattgcaacccactcaccagaaagccttcctccactgatgggggatgtacggtggctgtctttgtccctctgtgtcccttttctgatgatgtcattctcagccaccctgtggagttgttggaaagaacacagcctctgaaaccagaggaccaggatgagagggtgttcaggccctcccttgttcagggaccttgtgtcagacactcagactctttatgcttctgttcttgccaccctgcccaaatgcactgctgtggtttgaatgctcccctcaaaattcacgtggaaacttaatccccaatggggcagtattgagaggtgaggcctttaagagttgattgaatcatgagggctctgccctcaaaagtggattaatccattcatggattaatggttaaagggttatcacaggaggggaactggtggttttacaagaagaggaagagaacctcgccatgcgatgccttgtgctaccccaggactctgcagagagtccccaccagcaagaaggctctcaccagatgtgacccctcaacctggaacttcctggcctccataactaaaggaaatacatttctttccttataaaatacccagttttaagtattctgttataagcaacagaaaacagacatgtactttccccatgtctccagatccttataatgatcaaagagaagatatatgtagagttcctctgtcagctcaaatattattactagcagcatctctttgaacttttgcttataagatcttcaattccaactccatctcatgagtcatgacatcaactctaaatatctcatttactcttctgttgaagcatgcactatgcaatgtgtgacacaggtgaacgtgtaccttatggaataacatgcctaagagctctggggtgattgggcaaagtccttggttatgttcccacctggagaatctatttcactctaggcaactactggacaaattcaggctactgattatgtaggagagagagacagagacagagctggctagccctaatatgtcaccatcaaattgtgtccagtgagggaatgtcttacactgtcgtccccatggaagtctgtagcctgagtacagctttcacctgtacagcactgatgtttatgcctgcttcaagaatgactgtgtttgggttgttttttgttttttgttttttttttattgctcacacacaaatgagaaggaattactgtatttttgtgtaggtgtttgtgttcactttgctggttttaggagagacttcaacatggggccattcttctctgtattccttaggctgcaagtgtgtcatagtaagctgaggctgagcctgaggctgggagagagttaaggtgtttcccattcatgggtttgagcagaagaggaaagatctgagaagcgctgaccgagccaggaagctgctttcaccagccgatgaacaagtgtctggtgatcatgcatctgtgcttggacaggattcttctgggaaggcctgtgagtcagggcccctgggagtcctcggctggggacttcaaatgagtcactgtgctttctgatgcctgacaaataagtggaagataatgcacttgccttcagtctggaagacgtgtgaccctttggggaagagggtcagcagcggggaattgtgtcaccaacgtttctttttctgacccttggcctttcctgcagatccacgtcaaacaccataactgagcagcttgatgtctcatttttgtgcttatcttgtttttcatcctaatacttttttcctaagttgaatcattcagggctcttgatggcctctgaaatgagttgaattttcctagcctgtcattcaaattctggccccttcctattttcccattgagaatgccctgctactccaaccaaattcatcagctggccattccctgagtgcacccagacagttccacccttgctcacatttctcctcttgtctgtgtcttgtctacacaccccttctctttttatgtaaacctattgaaattctgctctagtcccacatactgggtggcagtggccccttccccaactactctagcacctggcaactcctctcagctctgagccctgcagccctagctgcacctccaaacttggcacaggctctcacccggccacctctcctttatgttggggatgtgtcttgtactttgctgtatttccagagcttgtcaggggctataatatgtaatgggtgctccatgatatttgctgtagataaggatgaaacgatctgccgccctgagcaatgccctgaatgcttgttcctggcgcccttggcttctagaagagcctgcagatggagtgggggagggatgccgaaagaagaaacccagagggcagctctgcttatatatcttctgtactgaggtttcaagtaacattagcttaagaaaaaagattctgtgctgaaaatttgaaaactactggaaactattgttattgtttctacacctaattgataaactaggggaaattcatacccgacattcagtggcacagagaactcatcagaaaaggaaggatacagaacaagtgtgggcattttacatggcaccaggaaaaaaatacctgtcctgtagaaaggggtttcttaaacaatgaacttgccaagaccatctaaattctagaagtttgcattttgggtctcaagaggtcacaagtgattgaagctccacagtgagttctacaaggggttggagatctggctcctttgtaaaatccttagcaggcctttgagggccccaggggacagtgtaaagcccagactcattgtttgctccggtaaagccttgttcggatacaggagacagaagccaatgccaactggctcagttaataggggactggggttggtgtgaggttataggtaaaggagacctaggacagcaagtcagactcagccaggcccaggaaaccagcacgggagagtcactcacatggttggttgctcactccaggcccacttcatccctgcttctgtctgcctgtctctgcttgacatctaccagcccagagtccacaagacctcatggctccaaagcctgctgctatctggatggccagccacagatggcctgccactcagatcacatttgtgagatggaggctcaggttgaccaggcacagcccctgctgggtccactccatgcctaatcagtgagaggaaggggttaccacaggatcaagaagcaccaacagggctggctgcagagggtggacaagtagagcccaggctgccaagacaagggcagtgtgggtggggaaagagtgcccagccttgcattgaccccttgcctagcaccctcatggacccagagacatctggccctgcaatttgttgggttttggagcacacactcactgtgtaagcacagtaatattgcagtggatattttcatagccagcttccaccaatgattgtaagttcttgcttcctcctagggctgcagtctagtttctccctcacagtgtggatcttacagcttagggtggaatctggttggccaatttttcagctttgacaacatggaaagtcagaaaatagactttcataaacagtgtggttgcctcttacataaaaggtagtgtctaaagtcagcacacacagggaaatacatggaatcaaaatgtctcctgagaatcctttgaatcacccataaagaatgggacgcatacatctctcaggaagcctaatatagccattttcttctagcactagacagaccatgt

SEQ ID NO: 41215 - DNA, 1037 bp, Homo sapiens
cgtcatttttctagtctaggatttcttcacctcggcactatcgacttactggaccagatagttgtgttggggtcggggggctgtcctgtgtattataggatgtttggcagcatccctggcttctacccactgttgacggtattacccccaaaatgacaataaaaaagtctccagatgttgccaaacgttttccagggggcaaacgcacccctggttgagaatcactgctcttgtcctcagtttctcatcaataaaaggaagcacagaaccaagtgctttaagctcacctaaagcaccaaattctctgactccgtcaatgtcaaatctgtaaatttgttttccagaagctattttcctccagagccactagaggggacactctgctacacaaaggacaaaaacagagcactcagggaactttgttttcctctcctcttgactttgtttctgtttctgaccgccccagccttaaataaatagtctttgatgttgagtgtgataaccccttaccacgaagcatgaagagttgtttgtcttgtgcctggtgccataaaagtcagtgtttttagatatggcggggaggggagggcaaaatattctctgctttttaaacattctttgtaaggtagtcagatgaatcatgcctctaaaaaaagatgtgcatttccataagcggagcctgcaggacaaccaggctgggaggtggaaaatctagttctgttcctggtcctgccacttctgggctgtgtgatgttggccaaatttcttgacttctctggttttatatagataacagaactgaggaagctgaggctgagaagttaaggtcacacagtatgttaagtggtcaagcaaggacttgcgtctgacccatcaacttcatagaatagttgtgaaaaccagaagagatggagaaagtgaaagagtcttgaaaaatagaaaaccccacaacaagttcaaggtgtgaatgtgtagatattgtgggaatgagagaaggggatggctatggggtagcatgagggagcagggtaggtcca

SEQ ID NO: 41216 - DNA, 3299 bp, Homo sapiens
ttaaagcgatttcctcagcccaagatcaggctgtgtgcagacactgacagtgaacctgatcagttgctgctgctcccttgattaaaagcatgtagctttctctcttgtgaaattcacctctataaattccacctgcctagggattcaaactacatggaacaagtgcaattcctcagagtggcaactggcagagctcccaggaacaaggtagaactacacaatgtcccaggcatcagaggcatagattgcctgagtcagggagagtggtctctgtgacctgacaccccacccacagtgggaaggaaagctgtgggtgtgttatcaaggaggcctccacaaggggctggaaattcctggttttgtcttcctcttggaatgagacatttactctaagagaatcatggaaaagtacaaaccacagaatcataaaccacagagggagaagctacctcgtaggtcattcttatgctgggcccagataccccgataagcagatgttctcttctcaccacccctcctcgcctttgcttgcccacagccattgccaggactcttcctcaggcccagaaaggcagctgattcctggtaggagggcgctaagagtagaaagtaactaccattgtcaggtccagatctgttcccaatcccttctcactcctcctgcactctaaaaccacaccacagttccaactctttctgagtctggaatctttgagagtgccgtcatgtccttcttcctgtagccttcttgtccaccccagatggactgaccctcccacctacatccatgaggccagaaggcaacaaagacaagcgtggactctggctcccgccgaggtactctgtaccccgtggctctcggattttgcatctaccacatgccacaggcttgcgtccatccgacctccctagtttctcatccccacttgaacctgatgactgattcgccctcctggctacgctgagtaagccacccacttgccaaacctcagacctggtgttgacgcagtaagaaggcatgaggcccatgttgccagaacattcctaattgtttcattgtttccttgtaggatgtggtttcaagtcccatctttgtctcttttctcctggccaggttgcccttggtcaatattccttcattcactccagccactcagcaccgtgattaagaaaacaggatgtgagattagatgatccaggctctgccatgaactaactagctgtgaggctttagagaagtgtcttaacctctctgagcatccatttctttctctatagcattaggaatattaatagtacctacctcacagcttttttgttgtgataataccaataaatgaaataatcttcataaagcacagaggcttgaatgttcactctaagtatttaatatgtgtcctctactattttattttacaattatcattccttaattcatcatataattaccaagcctcatgccaggcactgagatataaatatcccctttaaagagtggtcatgtcttaaatccaggaagagctagttcatgttggcacccagggtagggagcgaagcccagggccacagcacagaggcagaggagaatagacactgaccaccaggagctgcccggggatggtgacaaaagtgccttccacctttccgcatctctttcaataccactgcaactccttgagtaaggtgggcaccacacagaagaagggggatggcagaggggcagtgagaggtccccagggaaacaccctcttcttcttccctgcttctctgacagagcacggccatgcctctgccatgcaggagggtgatgtcctttggggaggccttgttgaatctgtctggggctgttccggaagtaggaagggcggctgggggtggggagacggcaggaatgttctcctggcctgctggtctgtgccggcgagtgtgctgagaggagggcctctggacatcaaaggttccttttgtccccttccgagtggcagggcagcccggcccgggctgctggcgatgactcaggcctggccctgacgtcacccacgcccggccactggcctccctctgaagccaggaaactagttggggagtggcactcgcagctgcagcaaatctcaaaataaagaggcaacggcctttctcttcctctccatctccctatagcacaccttttatttcttttcttcttttttttaagcctcacgaaagattttacttgtagatcaactttcaaaatgtaggaagtcagaatgggtgacatcatcagaaaaatatgtggagctgatcacaagaagtgaagaacccagagcacgaaagcggttgtgactcctgggcccagggagttgacagcgtctgggtttcagaggagccagcgcctccgagtaagtgaaggcccacttttggccccccctcactcagcgcccttcaccgtagggcgccatcttgttccctgacgcctacagcttgccaagccccagcccagagttgggagtagggactgcatttgggagaccctctaaatacggccccaaagggatctgatatctctctccacaggatcagaaaagaatgcaaaaaaaaaaaaaaaaaacaatactaagacggaaaccctggggagaacagcccaactgatgcctttccctgtcaaccctcttgttttgcctcctcttcctcccctcacctgagtattccgtttcaggctgtcagaatgtttgttcagagttctggattgtttgcttcctagatcttatactgagcgatcagacataaaaataaaccctgttctaggcaaatacgtgtcctgtgccatcaaatggtattttcacacttaacctggtaaaatatgacagccctggtaaaaagatgtacataattgtgctgcctttactgagcacgtttctgattgttctgtgtatgaacctccattatcttatcgccctgtttacagaggacttattttcattcctacttgtgccatcgtatctgggatgatattaagcacaaagacacaatgtgtctgttttaactttgtctaaaaactcatagttctttacaaagcctataatttcacgacctctggaagttcctacccaagaaagttaagttcccaagagaaaagttttgacacatacatgagaacagcacgtaggcatagaaatcataccctgattttcccggcttctaagtcatcccctgagtcagcatctagtcttcgtatagctgacgtaccaggggagatctgttcttcagaaattctatgttaaaatgactgggagcggggaggcgtaagtctcattttaaag

SEQ ID NO: 41217 - DNA, 2072 bp, Homo sapiens
tggctttgaggaggttgggaaatgctaatatacatgtgtatgcatgttgcccaaactgtcggccttcaaaactcttccttttatttttaaataacatgattatttaatttgacctggagtcaatatatttttccctcattatttaaaatgttttgttggctttatatttaatattggaatctattcatcaagtgatcacattcttaaaacatggtcaggaactgggatgcagaattgcaagtactgtagattcctggctgaaaacgtaaagaattgactttttaatccttttaagctgtggccttgaattttttttttttttaagaaaatttaagaataagactctactgtcaaaacacagggaacatggacgatttaaaaaaaaaaacacctgtccattattcgtgcattagctccacatggccagcttgtggcaggccctctctgaatactttttcaatgagcagcccctggatcttggaagaaagatgccagcggccagggcccttcatttaaagaagaggactgggtcttttgcgtgaaatagtttctgtgccacgttgggaaaaatctatctaggcctctcttgacggccatggaaaaaacacaggtgactccttattcctgagaatttgatgcaattgaaacagcgactttctgcgaatccagtgtgcatagtctcgaacaggagcccacggacccttctgcggcccgaggccttgttctgacagtcaccaggctctgtggcccagagtcctaactgcgttgtccttcggcaggttctgaattgtgtcctccctgaggaggctgaggccgctgcctccttggtggggggccccggctggccactgggtcgggcatggggccttacggggccctcacgggtcccgccgccgccctcctgaggcctggtccttggcgccgcagttaccccagccccgggcccgcggggctgcgggtcgggccgacctcctcccggacgggctgcgtcctctgccccgcgccgggggcgggccgggccggcagagccgagccgccggcgtccattttctgggcggtgctgtgcagcgctgcggccggactcacgggtccggaagcaccatggacccccggggaaacgcgccggcggcgaaggagccgagccccgtaagtgcccctcgcagggtcttcgcggggccgggggcggggcggggcgaggcgcggcctgcgggcgcggcgcccgtggcgccgccagcccgatcgctcctcgcttctggagggagccgggaagccgggctggggaaaccctcgcaagggttgagctctgcaaacgcagcagaaccgagctgcccgcggggaggaagcgcccgcaggtgcccggactccggggcccgcgcccggagcggggcggggcggggtgggttcggctggagagtgcgggcaggttgcgccgcatcccgtggcccaactgcgcggctgtgctagagggcgggggccgaggaggaatgcgctcccggggctggggacgtggtgggctcgagtccagcgggctcgggcactgctttgacagtcacacctcccgtctcctggattgggaatcggaccctagtcctgaccctatgggaacttgatgatttccttgatgcaacaccaagcccctggaattgaaagggacgtgcaaaggcagggacctgcccccaggggtttgcagtctcagccgcctacttctgcagtagtaaggtctgctctgttggtacaacatacaacacaaccgcccgccgttagccactttttttatagggtacatcataaatcacctgagattttagtctgtccgcggttccactttataactcctgcactgcggtaggtaagtgcctaattccattctggacgttggccctaattgagtatcccttctaaggatcgattataggtgatatgtgttatggtgccttatacatattttaaaggttaaagacttttcttctgtgaagctcaactacttggtcagattctcatggttacaaaatgtggaagagttttgtcctggtttcagagaagcagctagtgagtcgctatatctaagtgta

SEQ ID NO: 41218 - DNA, 1922 bp, Homo sapiens
attaaaggtacttgaacaggggagtgttgtggctgtgcttcaggaccaggctcttgtgagtagcttggggggagatcgggaggagaggcagggcagaaactagaggccagaaagccagttaagctactacaacccaccaaggaaaaagaggggcagaaaaggcctgaaatggatgataacaatgaaatgggaaaggaatagatgcaaagggaagaactgacagaatctgatgtctcagtgaaggaacagctaaagctgacactgcgatttccagagcagtggtacccatggaggaaactcagaaggaggtaaggagctacattttagaggtgctgtgtttgcagtgttgaagcatgctgtctcccaggcagaagggggctttgcgctccacaagaaggccagggctcatttgggagtctttggtttataagaaaaagtcaagagatgggaaaagagatttttgagagagaatataggggaaaaatggttgaggatggagccttttgagaaaagaaaggaagatctagggaagcagatagaagtctggcaagatagtaaggaagaaccatggaggaatgcaactccagaagccagcggaagggggttcctaatggagggagccaggcatgtcagaccgtggaaggtgagggatgagcttaggaagactggtggattcacaagtgcaaagttacattgttggtgttttcctttttaaggtaatatgacgtgtatgatgaatattaagtggtttaatttacacaaattaaaccactcaaatttacacaaatcaagaatcactcttaaatttgtccccggcaagtcccaaaacacatttctgattatgaaaattcaggctgttaaatgtggttttgatagtagtcatacactgtattctgttgtcagcatacaaattaaagaatatcccttaatagaattgagtcctttaaaaaatacatttctgttgactcaaaaagtttctaacagtaatgtaattccattgccttttaccatatggctattgtatgacatgtgcgtgtctgcgcattttcacgtgcatatgagcttagtacaatggaatgaggagaccggggtcagataaatctagtttcacaacctagctgggccactttccagacttgtgactttagaagagtttctctctaagcctgactttttccatgcataactcatataggattatttggaagactaattaatacataatttggtcaggatttctatataccatagtaggtaattaattaatattggttcccttcccctcacaaccttgtatagatatgtaaatttatatattgtgcatctacacgtaaagccttatctttaagactcattttaatttttaattttatcacagaaagcacacatctcctattaccactgatttattctgggttagtcccagtgatcatcaatttagtatggacaagaatccacctggggaacttgtcaaaatgtagattcccaggtggggcaagggaatctgcattttaaacagcactgtcatggctggtgacgaagattaacaattgccaatttctgcgaagcagaggaagagataaacctgagatttgagatgctagtttcaactcctgtttctactagagatatgtctatactcaaaatttttatatcattaatgttaatggattatatgcataatcagacaaaaacaaatacgttccagagagtcagggaatggtggtattattgcaccctcccaccccgcatcatctcattgctctctgctgtgtgatcacagtactgggtaacaagctgcctgcaaaccagtttctttttctggggaataagtgatgacaccctgtccccatggccagagtttgcaaaaccattgtaacttgtttgttagcaatatgtgacaacactacagtcatgccatt

SEQ ID NO: 41219 - DNA, 4235 bp, Homo sapiens
atcctcatccttaatattattgtaacctcagaatttttgacaagaagcaaatggagcagagataatgtgcaaacttgaatttgttcagcaaatatttacttagtatcaactacgtgccaggtaggagatcaggaccccaccctcatggagcctccctatatccctaacctatccttatctactgtctgtgctgctgctgcaagcctttcttttagagtaaaacaccaatggagttccacactgatcagatcaatcaatttgtgtcttgctatagctgtcactgtcactgtgctgggctaaatgttcccagagcctataccagttgaaagtttaaaactgctccttgggggattgcccagagggctaagtaaatgtttgttgattaccctctgaggccctgaggaactctacagggggctaggaaaattgcccagagcccctgcagggctgggttggggtgagaagaaagacattcgtgagaatccagaggggaggcctaggaattgttcccagcatgactttgcttgtttggtttcctcacctataaccaaagaaggttttgctcaatggtggctgtttccttccggctctaaggtgtagtactttattttcttttgagcagaaaagcagaggtgctgggacaagcaggggcagggactcagtctgaggtctcccaggggtctcaatgtagtagctccctcctgtcctcatagatatgccgatattagccagactttgggttctgcctttaaccctctacacttgaggaaagtgcatgaatttaagggtgggagattgtccacttttgagggaatgaagactcttacagaaggattgggacaggctggtaatcatggttttcaaatttaatgcttacaaggaacctgggaaataaactagcccgacctctttgcattccagataagaagagtccagagaagtcttaggacttgctcaaggccacatcattagtggcaaagtgggaacagaacccactgtcctaggcccagtctgccagaaaaaggcaggttatcagaagagcaggagatggcagtcagcagcaaagcttaaagaaggactggcattgtcccatgagagcaagctgaccatgacatctgctgggcttccagcagacacacgcagtaggacaccgtgatgcaaagcttccggtccagttggagcccttgggtttttgccaattaagatagtcaagcaaatttatttttgacctgggagagacagaaggctgttttccatcttacaaaagcatttctcctctcttatgtaaatgaaaattcctaagctgtattataacttaatattgaaagaaattaaaacatttacgcagggagagaggaagacccagcttgcgcacccctatttttctggccactactgtgagtgttcataccaggatgcattttcatgaaaaatccagtggctgtttaagtcctggaagggtatcttgggattatttcagcaacccgtgaaggcaggctttgtgcaaggtgagacagatatgagctgtcacttcctgctttgtgagttggatattgtttctaggccctgttttatttatgttatttttcctgttcatgtgttagaacaactgactgtttgtagagttgatgacaattagataataagaccaccaattcagtccaaacaaagatgaattcattatcttgccaggcaagggagacccacatattcagatcagtctccccatacttttgtgcgttttcatgtaagcatggagatttccgattagttttaatagcacagtgattggctcctagacacctaaatgaggatttcctttttgaaaaacctactcagcattctgatctgtccctgcttaaacctatttagtctggtcttatagtccctgacttgagcccaaagagcaaggtttctcaaggtctctgtgcaggtctttgatgctctttcgtggaagagatttacagtggttacagccataaccggtgcctgtggctgaaccatgccttctgtagtgtgttcagcccttcccttgaattaatgcaagttccacctttgctttaatgggaggggacagaaggaccactttgaggaagcggaggcaagaagatagtctgcaaaagccatgacgtggcactgaaatgaagccctgtgtagggttttactcagacgttagagaactggctgcccctgagtgctgtgctaactagggaaagaaaaaaaaccctgacctttaaaatttttcctgtgaaggtctagcaattctggagtgtcttcagcgactacacagtgtaaagcaactttttgcacagaagcaccataaattacctaaatggaaatttgcttctaagtgaagttcttaccctgtctgttggatatttagtattgtcaatatttgtttttgtttttgacattttcaggaaaccaagagctttttgtcacatttgaagaatctcttttaagagtttcttttctatttataatgcgtttctgataagaagatttgcacctttctctattttagaaaatactttttgaggtcttttgtttttccttttatgaagtttaaatagttgtcttaacctccaatcctagcaactcccttacattaaaaatgacctatattttttttctcccatgaggttcctttgctcagagagaataagaaaagttctggtaattagtcactgtggtattctgtaaacaaatactttggaagctatgatttatgttactggtcgggaagaaaaaaaaatggttttgtgtatctctagacgattacccttgtgaaaggcaagtgcctcgtattcccaaaaggtctcttgggtgccctgtttgttgtgttaaggtctctcaaagccggtggccattttctgcgagctgaatccctgtgtgaaactcctcccactgtgaggtctacgagcatttgttttctaaaatgaaagcacaggcagaaactcaagctattctacagaacagtctgttcttttgatttttttttttttagatcagtatatttaaagcataatttttctaaacaacatattgcgagtgtttacctgcagtggtttggagtttgtttggggagttttaattattttttaatgtagacaacttatttaccaacatcattgctccttctgctcagataattctaccctaaaccaggtgaataggggaactatgtaggcacctgactactgccagaaactttccttctgtttctattacctttcttttggggtgaaattggcaacagctcactggaacttagctcccttaatattctttctccctcccacaattttttccactcggttttttttttttatctgaaccattgttcatccatttgaaacactggccagagtttttgtcgcttttccatagtaggaaagcctttgtgcctctctttgtacctcagacctactggtgggcttgccggacagctctgccaagcgcctgcgtctcctgagcctatgaagaggcgactttcacaatcctgtgctgccttcgagctctgtgctgccaggcctggcctccctccagaggtcgtagtgttgccagcagtggcttcaaactggaaacatgggaggaggaattgtgggaaatggggaagaagaaaatgtttgtgcagggaaagtgtgtacgtggacttaaataaatatctgagggcccaggcccatacagatgatctctgtacgctggtattttgcgcctggagccaggtgtctgttgacagtggggaggaggtggggaagacccagccggccgagagcctcagccaccttcctgcaggaggtcctcacaccccagacggtcagaatgctccccagactgaggaatcagctgcacatccccctgatgtctctaaagctgaaatctgcttcctgggtttagccaccattttcattgagcagttctgaggattccttgtgggtacttgtgatcttggtggagatgcttcatggtgttgaccctattgttttgaatacctgacagctggatggtccaggccctatttctatgatctgttttttggaactgttgtatttgtgtgacacagtgatggagcatgatgtcaactcccacatactgtaacccaggaaggagcatgatgtcagctcaggataccggaaccgataaaaactcagtgagtgttgcttcccccgttacacacctgctcatgatgacttgtgggatgcttgttttaaaggagagctgagtgcctctga

SEQ ID NO: 41220 - DNA, 998 bp, Homo sapiens
tgggtaaaacaagaaatagagacacggcactcaaaaggcttcagagagattctctaagcctgtttgccagatttcttaagcaagcaggtgcccaggcaagcttgatcctgagatgaacccaaggcacacgagctaccctgaaacactgctgcatttcaaaaagaaaaaagaaacccaggaccttttccccctttcatctttccaaacaagcaacctaaaatatttaactgggcccattgcatcattcatgaatctgacagtactcgttctcacaatcctatgtgcacgcaactgcaagtccagggccctaatgtttaccttttccagataataggtgaggttgtccaagctggcctccctctctgctgagtgcactccagcagcttcccgatgttggcctttagaacagcctgaatttcagttaaaaaataagcttcccctgtcacacgatgccttcttgaatctgatagcttaagtgcagtaaaatctgataaatgtagcttttctgtgcccgtttcaggccacatttagaaggcaacatcaacaggattttccttttcctagacacagctcaactccataaaggacttctgttttgtaatctgttttcgagatctgatgcgtgtgtttctaacaccccgtcacgtgaggaggtctgacgtagtcacccaacatgactttgagaaaatatactgtaaagatgtgtgtgggatggtacagccagctcactgaagcaaaatatcctttgtcggaaaactttccgcagggaataacagacctgcgcagtagatttcactttgatatggcccctgtgctggcccagtatggactgcaggtttgacttttgcaggattccaggtcagtatcctaatacagtgcgttctttttttagttaggttttatttctacgtttctttttatagaagacaacttgccatagatggaggagaaagttgctctgtcgattctgttgttattatgtacgttaggagctgcgt

SEQ ID NO: 41221 - DNA, 3104 bp, Homo sapiens
ggaggctgacatgggaggatagcttgagcccaggaagttgaagctgcagtgagctgagatcgtgccactgcactccagcctaggcaacagagcaagactgtcaaaaaaaaaaagaaagaaagaaagagaagaaacagaaacaggtttaggaaggttgagtaacttgcccaaatgtaaaaggggtagaaacaggctctatgtctgattctaaaaagggatgcctttaaaaataagggggaaaaaaccctgtaacacgttgatactctttaaatgagaataattttaacaagggcaatgacagagaatggaaaggaaggaagagatttcagcagagtcagaaggatgtggcaactgaaaacagcattgggacaagggataagaaaaagtcaaagtttctggcctgagtaacagtataagatgtgaactcagatttggaaagggagacaggaaattaagttttggacttatgtttgaaatgacagcaaaacattcatataagaggaagtggttcactttatccaacaagtgtaaagatcacatggggaaatagaagtcacctgcaacacaggcagaactggaagcttcgctggccaggtccatgttaaactctgaccattctctggggctgtccagcctttgcacaggcggcgcgtttgtcttcagttttcaggtttccccgtcctatttcttatctcccagtgcctctggccttttctgtgtctccctccagaatgagctggagctctcttcatcttgacctttgtgtagtctctgaggtctgaggccatcactatgtctgaccctcaaaaaatatttgttgactgactggcttattcctgttgttgccctggaaaagaattaccctgcccgattaagtcacagtttcttccttcttagggcagcgtagttaacaacctcaacaccaggaaattgtcttcctcatcacataccagggtattattcatgcagtttactcactgtaaagagttcccttgaaataaagctaacaattagtcaaagatttacacatttcctagggtcagtcaactttttaacaaagccaacttttagtagtggtggcggtggcgggggggagcccttctttgctttttctgttcctgaaatacaaaagtgatggtaaatgcttcagaatttctctatgagagggtctcaggcactgcactcacgctggagttgggggtggctggtccttttcttgaaccaggttttgcagagaattggtcctagtaaagagtatttgtgtgggaggagtttggcttgctggcggggagtatttggataatactggaagagcctcaaatgcatctcttgcctccttttgaataagatacttttgaggtccacccacctgccaaattccattctattttcttcccacagggagtttccctgattgggaagggcctgtatttcccgcgagcgttaggagatgtgcaggtctattcattgggggagcccaattcccgggaggatttagggatcacgggagggccggggcgttctcctggtggggattttaaggccgctcagagccacgactgggagctacccttagccagcgccccaagccgggagtacggttctctgcagggtagcccggctcgggggtggcgaaggcggtgaatggagacccggggggggcgggggcggggccgcggcgggcggggcggggcggggcgagtcgggccgaggcccgggggcggggccaggcgcgcggctggcctgggcctaggccgctgctgggctccgcctcgcccggctacgcaggcggcagggctgcggcacgggccgggcggcaccatggcggcggcggcgcctgctgctgcggcggcttcttccgaggcgccagcggcgagtgcgactgcagagcccgaggccggggaccaggacagtcgcgaggttcgagtgttgcagagcctgcggggcaagatctgtaagcgggggctgggctgaggggacgccctggcggcgctgggcgcgaggctgagggggcggcgggttcgcggcggtggcggcgccgagctgcgctgggatcgcgggcccgggagggggcctgggccgggcgcggttgaggctggaagggggtgtgttggggggcggcgtcgcctcgacggggcggcgtgggccggggctgctgctctccggagggagtgggagctggagatgggcctggggtgggagagcccgggctgcgccggcgtgaggggctcggtcgtggggagcggcctggacgcggggacgctggagtccggggcgcggccgggggcgcggtccgggggcgtgaggagcttccggccgccctcagactcaggccttcgcgcggctgcgggcgctggggagtggccccgcggtgggagccgagcagtaattatacggaggcgcggcccgaggaggtggcgggctgggaagtggggctggcccgaggggagggggctgttcgtttcctgggctcggcgagcctgggagaggttgaaaaaggcgccctgagctgcaggaaacgggccgccctggggcccgagtggctaccgcgcggtctgttcgcgggtgagcgccccgggaggagctcggcgggacacctgtacttgccccacctcgctgcggccgggacttgaatcgagggacggcgtgacaggcgggactaaaggcaggatgtagtggcttcctgtgagcaggtctcaaaacacaatcacccagcccgcactcagcccgcttaattcccttccttctcatgcgtgtaattgctactttagtgagcgagcctaccagttgactaaatacgaaattttgctcagagttgtccgagcattactgtggacagattatttgagttctgtcatttgaacattttagttttaaaaacgaccctttggtgtcaggttgccattttttttttcacagtggtttatttagatgaagtgctttttgttttctgtttgtaagagagatcaataacatttatttttgcatttgtcgaaaattagcattattttcttcatgcagtattctcagattggaaacatgcttcatgtttcttataaataaccctcaattatgagggcgtacttttcactttgaagaaaatt

SEQ ID NO: 41222 - DNA, 2190 bp, Homo sapiens
gttttgagaatcactgaaccagatttctagatctttaagatcatttattcactcaacaaataattgtgcctcctgtggccaggcattttgcagatacggaggataatgtggtgatagcaacatgtttcctgctctgatagagttttacatttgggagggaagagacaaacgaataaattaacaagataatttctgagagcagtaggtttaatgaagccgtaaagcaggacacatatccctgcacaatctgtgcgcctgctcagacgtaacaccccgcagcgcagcaggcagattcagcggcgtcgccccataagggcccgagccctctcagttggcctaggacggcgagggcggggcctgcccgcccccctggcgctggcgtcaggtgacgtcactgtgccgcgccagccaatcgtgggcagccggggtctaggcaccacggtggctggcggcctgcgggcggcgctgtggcccgtcgggcggctccacagagccgccctagccttccgccttccccaagccaacgtctccgccgtcggctccgcggcgccgccatggccgacgtggaagacggagaggaaacctgcgccctggcctctcactccgggagctcaggctccaagtcgggaggcgacaagatgttctccctcaagaagtggaacgcggtggccatgtggagctgggacgtggagtgcgatacgtgcgccatctgcagggtccaggtgatgggtaagcgctgcacgcgagtccagggccgccctgcggcctccgggagccgacctcggggttgggaagggacgggcgtccgtcagaagcctcggaaagtgccctgcctgggagagtgggtggaggtcgccctgccccggcgccggaggaacgcggagccacgctcctgctgcggctcctgagggctgcggccgccgcctggggctgcggggttgtgcaacaggcgccctgcgccgggtggttggtgttctagggagagagacgggcaataaacggagttaaacaaggtaatttcaggtagtgatgggtgtgaccaagaaagtaaaaccgggtgattgttgggaactagcaggaaacacttcggtttgtgtgtccagccccagccccacctctaaaagctcaacacaaggtggtcagggtaaaggccgtgattcagcagtgaactttaatagtcttggtcaccaccaaagtgatgctccagagtcatcttccacaaaacgacacccttagttctcctcgagggacgcaggaaagtgttcatagccattgcatttccggattagcttaccgccgctcttcgaatggcttttaaatctggattgatttaagacgggtcagatagcactagcgtggcttgaagggaacagtgtggttcaagaatatctaagtttcatggaagctgaagaattgtaagcccttttttcagaaacgtaaaacttcacctccatcacacccccctctccatattggatgccatttcctggagaagatactgtgctgctctgagtcatgcctttgtggagaaccctcttacaaatatgtcttctttctgtgatattttgagttaaaatattagaccaagtgaaacttttcagaacagcttaatcttgttatattttatatggttctaagaactcagaccactttgaaaagcaggtgctatttaaatgcaagttgtattttcagatagggcatttaaaattactatgagaccctcttcagtggaattctttattgagggtagttaaagaaaacggacatttctatcgtttgaaaactgtgacttgtcttgaaaaatgagagaattggagaacatacagagaattgctcaccttaaggggggtgagactgtaaacataccagaatcaagagatttcgcagtttatgctcttttgtcttttattcctaagggcttgtttcaaagaggatttacaacaattggattcagatatttttatctttctcttttgaaagaccttgatattagacatgacccacttattttacatggatcacttgagcccaggagtttgagaccagcctaggcaacatcgcaggaccctgtctgtacaattaaaaattaaaataaaaagctgaccaggcatggtggcctccagctactctggaggctgaggtgggaggatcccttgagcccaggaggtcgaggctacagtgagccttgtt

SEQ ID NO: 41223 - DNA, 2239 bp, Homo sapiens
ttggtaagaaaagtgaggaaaaaggaaaattcatccatttgcaggctgtttaaacttccagacagattataattcatcactccaaacaataagatggctattacatttctccataatttttatttgctaataaaacggaggcagagcttttttctaaaaataaataaataaacaacaacaacaacaacctcccccaccccgcaccttctgtgcaaattcctataaagtcttttatcctgtcgctgagtctgagggcaccccccctcccgtactcgtcagctccatctcgcggaggaaaacgctaccggcaccctcagctccgcccaagggccgcgatctctacaggggagatgaaaagccggcgacactacacaggcgtggaccctccaacgagtgttcctttcctgtgggttaagagtaggagcgtctgggcaaaagctgggagctttcagttgccaggacccttgggaaagcacgtatttagatttcattgataaattcaactgaatcccgagaaaaattatactccattcactggcatatttagaacggaattcccattgacccgaggctcccggttgaacccttcaagggagccaagcgaggacgttctcagaacagcagtgcaccgtgtacattgtgggagccccgcgcgatcccccgcagagcgtcctgtaggaacgtcacagagcccagagagcgtcctgtaggaacgtcacagagcccagagagcgtcctgtaggaacgtcacagagcccagagagcgtcctgtaggaacgtcacagagcccagagaacgcctggggacggtcggggaggcagttcggggaggggacgattaagttccctcagagaggaagccgcgggccgactggagtcgttttcgtgctctccgcacccgcccgccgcgggtagcatcttctcagcgccccggcgcccaggaacgcccaggaaacccagtcctcctcctaagcaacctgcggcgcggggacgcccgccttttgctattattataaacgtgcgtgcgactaaaccttcggatttttagactttcttctcgcttcctctgacccaggctgagggagcccccgaggctactgcggggcggggccggggcggggtggggcgccctcgccgcctcaggcagcgccccggccgctggcgggaggcggcagcggcgcgggccgagcggcgcggggattggctgcggcgggcggagacgtcaggctcccgcggcccaagcggccgcccggcgcggcgcggcgcagtcggctcgagtactccccgtaacgaggaggtgttctcggccgtcccacccttcactgccgtctccgggctgcgccgccggagccgggacgcgcctccgcagccctcgccgcctccatccccgcggccgcagctcctctcgccgtccgcgcgcacaccatgacgaagaacgagaagaagtccctcaaccagagcctggccgagtggaagctcttcatctacaacccgaccaccggagaattcctggggcgcaccgccaagagctggggtgagcgggcagcagctgggcgtccggggccggcctcggtcccgggggcgccgggcgcggtctggtgggaacggaaaggcgggaggcggctcccagcgccggggctcccgaccgcccgaccctaacccgggcggcggcggcgcagtgcggccccattcattgctccccgggccggccggactggccgcagctcgctcccgaagcagcggggcccgcgggcagcccggccgggccgcgctggttcctccctccctgctgggagcggggcgcacgtgctgcccgggcctcccgcccggcgcggcgccggaagccggggacccctgcccgaagccgggccccgagagtgcaggagccgagcccccgggcctcctttgtacggagcgctccggcccgagaggccctggcggaggcgcccggcccgctgagcggttcggagaagccagaccctgccccactccaggggagaggaaatttccactcccgccgctatcttgtgactcgtccacgctgccaccccgaccggtcggaagagtgcgactgagtgttaagtgtgggtgtgggttgcttaaacgtgtagcggtgagttaatcacagaagtacattgtacaagaaaatgcacttgaatttggacagtgaaaaggcccttaaaaaggttggttcctcccggattcctttttaattacagaggttttcttccttacaaatt

SEQ ID NO: 41224 - DNA, 1164 bp, Homo sapiens
taatttttgaaaaaatggtcctaaagtgttaaaggtttcagtttgtcgacacaagcacagatgttctaaaattttgcaattttctataagaaaggttttaacaagtttggattcaacatttaatcagggacaacacatgaaagcatcagttaacatacctgtgatataaccttctaaagcctttggcaccagggatttcgcaagtttcagatcctccagagagcatttgcctgactccaggccaaacgacattcccatccgctttagtacttctatgtcatcatggatctcaaaggtgttgtcaaaattgaaaagatactcaaacctgcatcaggaaacaaagtaaagggtttttggtggtgctggagaggtctgaatagttttgtattctatagtttaagtaacagaatgggggcctaaatccagctatagtgctagaaattgctaccatttagagagccatgagtcattctgctctgtcaggggaatgacatctcaaataaaacactttcccaattaaaacaacattcctctgacagatgatagaaacccacaaactttagccctaactctgttacaaacagaggatagaaattttattctaaatccagtacttctcaaagttgcctacagctttgccacaaaagaaaagcctttctactttaatattacgatatccctattccgagttggcctgttagctttgaggaaaaaaacattttgaatgcttacttcattttcatgagtcaaatgttagctacagcctacttcagataagcaataaatagaagactttcaacaagtgaaaacaaccccaaatcctgtcctgagaggctaaggagtaaaatgttttaagaaaaaatgtcacatgtaatacaagcacgtttccaaatatgtttggaaagtacccaaattggattcccagcttcccagcagcccaacacacgttaatcaagaggcaaaagaaggaagacacagtccttccgactcctaggctaggcctggagcaccttcatcatgggcctcagccctgcagggacagggtttggggacaatggtaggtttcacctggtcatgaaattctattaaaatcatgtgagggtaaaactttataccctatctaagataatttgaataacagattatcttagaagcaaaaattat

SEQ ID NO: 41225 - DNA, 1353 bp, Homo sapiens
acaggtacacgccaccataccagctaatttttttgtaatttttgtagaggtggggttttgccatgttgcccaggctggtcttgaactgctgagctcaagcaatccaccccccttggcctcccaaagtgttgggattataggcatgagccatggcacccagcctattttgcatatttctttactgattcattaagtcgcagtctaattagcattacagattatgagtaataactttattatctaggtctctactgtgtagtcacctcctctgctacattgttacttcctcagtgcattcttctctgacccaccccatctaaagctgaatctccttgctgttgtatcctcagtcctataccctgatatacagattttttcacataaccagttttttatgtgtatgtgtttgtaatctatcttcctcaccagaatgtaagctccatgagggaagggactttgttctattccttgtttatccttagcacctagaaaaatgcctggcacatagtaagtaagtactattcaataaatatttgctgaatcaatgaaagaatgtggcctacctctcaggtctcatttcttgccacaaaacaatctttatatgtgtctcacatctatactgttttcccttctgtagtactggctggatataacgcaaccctggagcagtccagctatcttttttttttcttttttctcttttttttttgagacagagtttcactctatcccccaggctggagtgcggtggcgtgatcttgacgcactgcaacctccacctcccgggttcaggtgattcttgtgtctctgccacccgagtagctgggattacaggcatgcgccaccacacctggctaatttctgtatttttagtagagacagggtttcatcatgctgcctaggctgggggctcgaacttcccaaagtgctggaattataggtgtgagccactgcgccaggtctttttttttttctttttttttttttttgagacagggtcatgctctgtcacccaggctggaatgcaattgtgcaatcatagctcactgcagcctcaaattcctggactcaggaaatccttccacctcagtctcccagggtgctgggatcataggcatgagctactgtgcccagaccagctatctttcttatcagtgctgctggacaaaagtagtcgacctcctggatttaatatcttttttttttttgacggagtcttgctctgtcacccaggctggagtgcaatgacgtgatcttggctcactacaacctctgcctccctggttcaagcgattctcctgcctcagcctcccaagcagctgggattacaggtgcccgccaccatgcccagct

SEQ ID NO: 41226 - DNA, 1479 bp, Homo sapiens
taatatagggtctttttctaaaccagcatccatggcagtcaataataaaagtgcctaactaatgcaaggcatttaatacgtggaggattttcttacgattgcattccatacattagtccattcactccccgaaacacaccgaataggtggatgcatctaatttacagatgaagaaaccgagatcacacaatgggagatagcacaggctggtaagagagactggggcgctcatccacttcgttgtactgtctctcagcgagatcctaggaaaacccttacacttctttgtgaagacagaccttggctttccagattttctcaaaggagtctgggcccaaaaagcgatcctctacttcagagaaaagttcctttatggggcatatgaggttcttccaagcacacaaagcttagaaactctttaaaaacaaacaaaacacctggtggacacagaggcctgtgagtcatgaaaggagaagggaaaaatcggaaaaccagatttagaagccatccttctttgaagagaacgagaaagtagaaagcagcccttcccctcttccacgaggcgtgactcagggacgttacctcccccgatttgctctatgcactaagagggtgaccctcctctgctttcgactctggcccagacactcacgggttacccggccaggcctggagaacccaggtctaaacagatgggactcgtgggggaacaagggggcccctgtgcgcagggagggaaacctacccaggaacgcgcccggccgggtccaaaggccctccgcgcgcgggcccgcgccctcgccccagaccttaccgccttcggctgcagaagaactggcggccaagcgaggctgtcgggccgagccaggagcgcgtcttcgggcgccgccgcttctgtggcgcccgcgcttaggcggcggccgggtcccggtggactcacacccggggagacgcggcctgcccggtcaaggcccaggagtttgaggccccagaacgccaaccgtgcgcgcgccctcgagcctgcccaaagatgaagggtcagggcgcgccccgcgggccgggcagctgcggcagcgccgcagccgagatcgctaccgatttcgtccgccctctccctgcccagctacagccccgcttcccccgcgcgagctttggcggcggagcagcacagtgcgcgccgattggccctcagaatgtgcgacgcctggcgccgctccccacggattggccgggccggcagtgcgtgcacggagtaaacaaaccccgcccccaggcttccctttgagagtagggggccaacagatggaggggcgggactcgtgcactcagccaccgccccttggttccccctgtggcctccctgggagccctccgcaggacccgaccaccccgcttccccgccgcctccagggacagctgcgggcctgaggcctagaattttagacacacttccttcatcactcctatctcatcccccct

SEQ ID NO: 41227 - DNA, 350 bp, Homo sapiens
aatgacagttaagtctttttgtggtattatataatataagtcaagcccaaatgacatgcagtgagcatacaagccagaaagcaggcacatttcatccctcttaaccaaacgaaactattctcaattcagaaagttaaaactccccaaagagatttcataaccgtgtactcactgtggcatgaacccagcagtagggtgcttatcacagaatgtacttacttgttccacgtaataaaagttgctctctgtgttgaaatgccaagaccaacaatttgattcatctgtattcctgcagctaaaagtaaagatggataaaacacatgttttaaagccagtgatatttttcttta

SEQ ID NO: 41228 - DNA, 1439 bp, Homo sapiens
acttgcccaatacctctaatatccacggcaatcagttgctcacgtaaggaaccagcattttgtggagtagtagttaataaagatgacaagtgaagaatagagaataaacttaaattctacaaagatatgaaaagttattgaggcacaagtccaaaggctataataaagaaaaaagaaaaaaagttttgaaaaattaaaatgtaaataaagatgtggtgggagatctatcagggaagtgcaggaagaaccaagcaactcacaaaccaccctctggctggatgtgcacagcctgcccagtcccgtccggcgagtcacctcagtcccatccaggtaaggccggacaggtggctccccaggtggcaagaggcaagcgagcggcccaggtcatacaccgggcccctggcaccctcagcctggacaggaagggcgcgcgggattcagcccagacgagggagggaacgcgaagactcagccggtctgggcgcgccgttctggccccagggcccgcgggtgctgcaggtggccgcgtccagggcggtaggtggggcctgcccgctcgcctcccgaggccggaccccgggactcagcgaaacccagtcagacccgcgccccacgcccgcccccaagtcaccttctgcacgctggagccgcagacccgcgccgcccggtcatagacgtggcagcggatcacagaactgcccacatccagccccagcacgaagccggggtaccgcggctcctgcgctctctgctccgggtccgtgagcagccccgacatcccgatcccgcacgcctctccgctacagccgcctacccagagggcgcgctacaaatcccaatgctccagagtccccgggcggcccaacccgggccccaacccggctcagccggagagcctagagaggcctggcccctgccgccggctccaccccgacgccgtgacgccacgggcgcgcgccggcggccgcgcgggaggggtggaggtgagcgggtttgcgccgtgatctgcagccccagatcgccagccatgctcagcctccagtcgccggccgcggttggattgacttggcccttaactcttgttttttttctttttgagacggagtctcactctgtcgccccggctggagtgcggtggcgcgatctcggctcactgcaacctccgcctcccgggttcaagcgattctcttgcctcagcctcccgagtagctgggattacaggcgcgctccaccacgcccggctatttttgtatttttagtagagaaggggtttcaccatgttgatcaggctggtctcgatctcctgatctcgtgatccgctcgcctcggcttcccaaattgctgcgattgcaggcgtgagccaccgagcccggcggcccttaactcttaattttttcttttgcttctccagcttcctgagaggcagcgccagcgtttct

SEQ ID NO: 41229 - DNA, 892 bp, Homo sapiens
tcatggaactcaatcgcttagttcctctggttccatggctgggggggtcacactcccagccattgcatggggctgggagaggtcctggagcaactaaggatttctggccagggcacaccctggtgttatccagaggcttctgggttgaacccagcctttggccacccatctgagtgctggcaaaaaggatctctagctatcctgttacaaaattttcctcctcttctatccatggtcaccatgtctcctattttctctgcatgcaatgtgcaggaatttttatagttcagggaagtaatcctgttaggaaagatcaggaaatgctgtagtaactggaatatagctcaggggaatgccattgtgatttcctaggaacagaaagtcttctcccacagtgagcatttcaccctctgcccttgatctggaaagcacatggcatctccaggtcactctctgcccttgagctggagagcacgtggcattttaaggtcaatatcgccacctagtgaactaaaaatcatctccatgaggcgttgtcggtcctttgacataacactgtaccttcccacttcttctcccattttgcacctctctactagagaccaagctttatgctgcttctgtggatgggaaaactctgcattcaacaattaggagcaaaatgtcctccagaaccaaattttagttccaatactgtcccatcagcaggaaaatcactattaggtccctatgttcctttaagtcacctatttatgtctccagttaaagcaatacttattaaggggattttaagtccagaagttaatgagaaccattctctagggggaaatgcttcagcatgggccataatagcaaaatatggagttcaatctaataccctccaaaggcaacg

SEQ ID NO: 41230 - DNA, 750 bp, Homo sapiens
gaatatatatgtctatgaaattctctgtctaggaagttgacctctcccaaagtttagtctaaacaagtaaaataattttatcaagaatttaaaaaagggctttcagttcaagttttcaattgccaggcaaaaattttcgagttgttgccttatctttttcagtgtttacaaaataaaaagctttctaagctggctgaagggtcaatccacctaatgcaaatgaaagccagcaaaactgttttctttatacaaggagttgacaaactatggagttctgcctctttttgtaaataaagtcttactggaacatggccacatccattctaatggctactttcacactgtaactgtagagttcggaagctgtgatagagactatctggcccacaaggcctaaaatatttactatctgactcttcacagaaaaaatttgctgactcatgtttataccatcctttacttaggagatattttggtaagataagttaattgccaaaatataaaagactcagagattctgatgtgttttctactcatatttaaattataactatattatactttaattttctgttttataaaaaagcttgttttgttttggtttaccttaattttttttaaaaaatagatttgggagtacaaatgtagttacatggatatactacatagtggtgaagtatggactttagtgtacccattgcctgattagtatacattgtacccagtaggtcatttctcatccctcacatc

SEQ ID NO: 41231 - DNA, 1071 bp, Homo sapiens
tatgctattaattcttgttagaaagagaaatgtatttgctaagtaatataatgataaccacttctagaaaagaattaggatatagaacttccaagaaattaaaagggaaaaaataacatatgcatctaaaatatctcaagagaggtacaataaactgtcaatagtgtttgaacttcaagtggtgtcattagacgactttcatttttggtacagagtgtaaatgttcttaatataattttgtcagttaaaaaaatgaatcaataaaagccatcaaagtcacaaagcaaatatatgttagaaaaattataaatcaaatcttacttacttagtttctccatctgatacagccacgactctagcttcctcaaggtgaggccaattaacaaagacagattttccaagcactgatgaagctacattttctacggtcttaaagtaaaagcaaaaaagttcattcatgatttcaggtctaagagaaaactttacacaggcaaaattttccaatctccatttaagttttttaaattctaaaataaacaagttggggccgggtgcagtgactcacacctgtaatcccaaaacttaaagtccagaggtcaagaccagcttggcaaacatgatgaaaccccatctctactaaaattacaaaaattagccaggtgtggtggcacacgcagtagtcccagctacccggaggctgaggcagcagaatcgcttgaacccaggaggcggaggttgcagtgaggtgagattgcaccactgcactccagcctaggcaacagagcaagactccgtctcaaaaataaataaataaataaataaaatgaacaagttgaattagttgctttacaaaattccatcttccatccaggtgtaaaactctatcattctaattatcttccttatttttttatggtaactgagaaaaataaaaagaacagcagaaatatctagaaaagaactattgactgtttcatatcaaatagtcaattatttaaaacaggatctaagaaatacaagctcatttcagtttatggctggtgtgatgaaaaaagaatattagacttaaaa

SEQ ID NO: 41232 - DNA, 2124 bp, Homo sapiens
ctaccaaatctgattggaatccagcaacaaaaactcctttccagaagtaaactaccttcatgttcgtaaatgccgattaaaccataatttaataggctatttacaatactacccatcacaactgattcaatcagctacacaaatttcaagctttttttctgtaaagcatcagaaaagagatcaaattcattaaatgtgacaaacaccaaagtatcacccaaagtctagtttacctaatagacgactgctttctcctctctttccacagttccaatatataaactacgttttcggaatctacacattaacgttgtcctggggtcagtacatgccaaatattattagtagtattaatgttctatcaattcgtttcccaaccccctctgtcacacagtgaggcctccaaataaaaggtcctacgccccactccccagctggcccaagagttttttgttttggcaacaggggattggtgctgcttttgaaataacagaaagtaacaaaaggcatcaccaatatgaccatcagccacgtcggaaagtctaggctccgggggccgggtgggccgcgctctagatcagggaaagtaaacaaggtgactgcgtgcggaagcggctgttatcgtctgtaagtgggtctgccgctctgggtgggatgggggaacctacgaggacacccactccagcttcgcagcctctgtaaggaaaaaggcaacttgcagctccccgggaggaaaccggagaacagtaaaagcgttctttcccaggacttcatttcggagtcgcggaaggaccagcagaagcaagagctgtcagagaagccgtgaacccagcggctctgtccacacacaggcaacctgcgtccttagcccctttcggctcatccgggcgtcctcaaaccttccgtccccctccctaatgccactaatcgtccagacgacgaggggaaagaggtggctcgaaagccccagctctaaggtggagagggccgcggagccccgggtcctcggctttctgagccgttgcccctcgctcacccacctgatgctctttcaccacttcgctgagacagggataccgctctgagatccatctgtaaaacttggggactcccatttcgatcgtcaacactaatcccagtcagggccaaaccgaaaccaaacgccccgccggggctccgccgcagcctccggtcgtcgctccgcggatgacaacacaccgcccggccgaccatagagagcgcccggcgggcctagagcggcaggatccgaggccgtccgaggggcggggcttagccctccgggcctcgcgcggccggggccgcggtactgtccagtggcggtcagggaatctgcggaggtttgctggtgtgttgcaacttaggggcgaaaatgccccatgatagagttgtgctttctaagtggatttggaagtggcatgaaaaccgtacgaaggtgtgggaagggtatcgaacactgatttttgttccgcttgtctcctagggttgctaatctcagtatttttcattcagatttcgaaagatctggtgatttacttggcttagtttgttgttttgtcaataattttttttctctgaggaatttaaacttacgtttcttaatacatacgtttaaaaacgttcttttccaaattgttcaaaaaaatttcccatgtacccgccccccgcaactgttaacataagaccttggatacgaaatcatttaatgtttagttttgacattcttgcatccgggtttatcatatttttccccatcacactttcaaccgcacagcaaaggagagttctatcaacttaagtgaaattatcagttttaaatgtaagagttttccacttatttgaatgtattaacccgttactttgtatttaagtcttctggatgaaaacttacagaaaaaccttaaacatttaatactttttggattttaagatctcaggaaatgttaagtatcgctgtctttcatgaccactggattctgcattctgggactgcagtatggcagcatcacacaaattacagaatgtttatttcgttttcacattcacgcttcttggcttatattttttccctatcacactttaaaacaaagttttattaagtgaact

SEQ ID NO: 41233 - DNA, 534 bp, Homo sapiens
ctcttattgatgaaaattaatgtcagttaaaaccagtgttgtgaaatcaaatagttccagaatacaagactcaaaattaagtcccatatgaatgaacttattttgcatatatgtgtacatatcaatatatatgtatatatacatatattttttacactgacacaaattatcaagaaaaaatatattttcaaatccaaactcagacatatacaatatgtcatgctcataaataaaatagtcaacagcaagttctttgaactctgactcaagtgtctctgagtttcagttttgcaactgtgaacttagacaagttacgtaagttctctggcactgtccataaaatagggatggataatcaggcgtgttaacaataataaataaaataatgtacataacatacttggcacaatacccattatatagtgatttatcagtattacttaatgttataaattgaactttatctctcaaaaaaatatgctgaaatcctaattcttggtacctgggaatgtgagcttattcagtaacaggatc

SEQ ID NO: 41234 - DNA, 2104 bp, Homo sapiens
cattggcttaatgtcagctttgactttgtgtggaaagttttcaaacagtttaagaaattgggaagcagttattccaaatgataatttaactgcggtagcagcacaagcttatttatttcttgttcgcagtagtgtagaattaaaacaaacaaagcaaaacaagctctaccgagtctttaggcctggttcagggaagcctgcctgtgtattgaagaggtgtgagagccatcaacacctctccctccttgtggtaagatactggttttcatgaggtttacagacaacatgcatttgcaaatgaaatattaaattgtctccaaattttggcaacactctgtgcacgctgagattttgtggacccaggggtctatctctccaatttctgactaaaataacggatcgggaactggacgatcaatacgagggaggtcacatcttcagtatgtactatgacttcacttcaaagaaaaaaactgccttttccagcaagtgatgtcacttgcagaaaatgagaagcggtgattttctttcaagggcagtttggggacaaaatgtaaggctaaaaaccaattcctccacgagtgatcacaaagaacagaaactgatgggtcaagtccctcgtctaaggaaaaagattttcgagaagaaaatgagtgtagaaaagtgaccagaaagcgatcagcagggactcttcctccagctgcaggaagcaaactctcgatcggggtgagtggtaaaccagggccggcagacgcctctctcccccacggaccggcttcccgcaggtttgtggcgactgccccatgtgctatcaacgggcactctgagggagaagcgcccaaatcagccacggagcatctccacaagggccgcagcgggggcttaggggatcccagccatagcgcagcaggggaggggagagcacgtgaaacccaagccggaatcagcggaggaggatgcaggacccaggctgggcctagccctacctgcccagctcccgcagggcggggatcatggaagccagctccaggccatgttcccccatgctgaggctgcgaggcactagtcaaccacgccaacgcgggttcccggcgtctccaaagctaccgctgccggaagagcgcggcgcccgacggagccgtgtggaggccaaaactcctcccggaagccgctactggccccgcttgccaggcccagcgtcttttctgcataggacccgggggaagccgggaagccgttagggggcggggcaagcgggcgggcgtgcgtcggtcaagtttcccgggtcgcgtcaggcttctttctcagcaccgagcgagcgacgttcgtgaagctttcgttttgagcggccagactctgctgttctcaagcctgggaggcacagagaagcaagacttccgcatcgggggaggatagggcttgagggccgccagcccagactcgcttcacaaatgtgagaactatgacagtccagcgagtaaaggccaagagtaaactccaggtttccccagagtaacgctctcacattttaaaagttcctcacgttcccaccgctcttgtccctctttctgagagatacaggccaaaaggtgggctctccctgtttttttccttttaagcattttttttcaacttgaagtcactgttaggtttcgttgaggaccctaccaacttttaatatttgaaaatggggttggaatatatttgtgtctcatcaaatcagcaacagtactgtgtgtggaaatgccaccattacgggcatccgcaacctgtgatttaatttttaaagtaaatcaatggattttggcaatacacattttctagctcaactcaatttattggaaagatgaccaccataagagattgttgacatgtcaaagttatgtagttaatcactcaaagtcatgcagtatgtttacatttgttctttggtacatgaggatagttaaccgatacagtatcttaaagaaaaaagtgatggaatgacagccaaatatgctcttgcctcaagaactttgcatttgctgtactctctgccttgaacaccactctgtcattgccctttttccttcaggtgtttgccaaattaacaccaaagagcctc

SEQ ID NO: 41235 - DNA, 780 bp, Homo sapiens
cacatttttattaaccatatatagttctacatcctaatgtacatgaatttcatgataatgtaaatttgaacataatacaactactaattgattcctgcattcctgtcagccctctttttatcatttggggagtaggagtttggaggagagggtgaggcaggaagcagagtggttggtgtggataggtcccagtgtccctggtatttcctaagcccagtgtcacagatcaagttgccaaaggggcatcagtcagtgttctggaattccagtcagccatgtgtatagaattgtccccattcatgattaaactagagtggaaaatgaccaccaggtggtactacaacccagttgagactaagatagacttggttctcagccagatgcccaaactcctggttggttagctatgcaagttccaacataatgcaacagttttacaagttcctttctacatccgaatgaacttcagtggacacctcttggtacacacacattcaataatatgcatttttaacaagcttctagatgatgctgatgttgtttggagttgttctacacagcagtcagagcaaccttcttaaaacccaaagaccacgacatttctcttctttaatagcttggctatgtatggaatattgtcagacatagataaagggtaaaagggggcacatgtctgttagttttctttgggtaaagcctcaaataatagacaacataaccacaagccaatattctgaaatttaatagtgcagaatagccaaactgcaccaatacacttgt

SEQ ID NO: 41236 - DNA, 2103 bp, Homo sapiens
ttatccatattgagtcctgtgtgagagtatttcttcttttttattgttgagtagtattgcattgtataaatataccacaatttgttttttcatttacatgttgttggacagttgggttccttctggtttggggcttttgtgaaaaacagctgctatgagcattcctgttcaagtttttgtgtaagcatatgttttaatttctcttggataacatctaggaatgaaatggctgggtcatatgttagatgtatgtttaccttttaaggaaatattttgctttattttgtgagaacttacttaactccccttgcatatctagataaataagtatcagataaggatactaaatttaccagattctctaggtggcaggtgggaaaaatcagataagaatactaaattcacctgattctctaggtggcaggtgggaaaaattccttatcttccctctccatggcccacctactttcatagttcattgctcgtccaatttgtttgagttcttaaaataatttcaacttcccccctttattttttctattgttaccatctcagggttggttgggtgcctattctgtattggatattgtgttaggcgcagaaggggcacgtgggactttgagttaaaggggcagcaaaaccttgttctgttctctggactgagttggacagaccacaactacggattatgcttcaggcaaagtatgtgagaactcttgaggcagcattccatttacctgactcacatgcgagagaaaatatcccacttttgtttgagtgtgggctttagttatatatttattttaatcaggtgtggctgttaaaggaaaaggaagcaatccgtgaaacaaacggaaaaaaaaagagtaggggagagaaacaagtcttcctttaataacgtatacctttccttttgaccagcaggtcccaaagtgtggtacccagactagtagcaccagttttcgctgagaacatgttagaaatgggaactgtcgcgctacgctccagacctaactgaatcggaaactcagtttccgggtttgggatctgtgatttaaaaagctctccaggtgattctgatccacgctcaagtttgagaactgctgtgctaaactcattcccagggtgtaggtggtcatctttagacttgggtaactgtgggcggtagagataacgttgccgcagcgcccgtccacctctccccatccacgctcccagcgcctgcaactcctctttcacccttagcctaaacccaggttctgggcttccctttccctcccctgggagccgcaggcaaaacgcggcaagtggattcagagtttgcgggcccgggtgccggccgagcatgcgcagtggcgcgagcgcagcggctacgcgggcgcggagaggtagccgcagagtggacctgcaggtacttggatctccagtgggagctgccctctcgaaggcaggacagcggtggcggcaggtacgcgggggtggggatagggcccaaaaggaaggctggacagacagatggaaagcgaagcgttactcctttgggggcgcgcggcggctcgggggcagtatctccgggtcccctcgctcgcgtctcgtctcctggctgtgcagtgtggcgcccgccgtcctctgggcacgcttctgcccagtcccggcaggcagtgcccgcaggtgttaaatcgcgtatttacactgcttaaacaataagcctgttaactgaattgtgattctatgcaatgaaataaggtatttcattaagttttcttctttcaactttgggtggctgccggtgaggctttctgaaccagcctgttttgttttaattctgggactggtttatttgcctttggccttttggtgcataggatcaatagggctgtagtgaaatcccatccgtgctgtttttggtacctttcctggagcatagggacctctggatgcggcataaaaatgtcagttttcagcgaatttcactgccaaaaaactttccgtgtttcagctgcattttcaagtggagacttaaaaaaatttaagatttctccctaacttttcaattattactgtatttcggtcttcatttggtactattaaaaggaagcggtc

SEQ ID NO: 41237 - DNA, 1227 bp, Homo sapiens
aggattttaggaaatacttctatgaatccttgaaaaaacatgcatgtataagacaattccttcttttgtcttttaatagggaaggccagcgttggattgtgtaggttgcaaaatgcagtacctcagacttgcaactctgaaaagcactgtttgaaatctctgtaaagagtgaaaaacttcaagttttaaccaatgagtgttttagaggttaaagtttaaactctgacttggaagcacgctgggtaggactcctctgctcactcagactcaagttggatcatcagaatctctcttgtgttgctgtgaatgatttgcattgaaattcccagctagaactggaggaaagaggattacaaaccaggaggtaatacctgggttattccagagcacttggaaatgactcacagcttcctgctctctgacagttctttagtgttggtcttgaggcattcattctgaatgagatatttgtcattatggggagttacagtctgagcataatctctaatgtataatttcctgttactaaataatacatagaaaataggaacaaggtactttttcagaggaaaaaaatatgatttaaaaatttgtgtcattttcacaaagcttatttaaatcttttaatccattccctgagtatcataagacaggtcacattctgcccacacttcaccctggcagttctgtaccgacaagtcaggttctagggcagcttctaacaggagaaggtcttagggggtacaacataagatgtaggcatggaaggggcttgatggagaccaccaatatgaaggtattatataattaaggatctggacttagcagactccttgggttcagagcccagctctgccacttatgtgaagcttttggtctcaatttctttaattctaaagtgcgaactgtaataatatcaaccacagagagttgctgtgaagattcgatgagtcaatacatgtagtacttagaacagtgcttggcctatagtgaacgcccatgaatgcctgttattaaaggggtaagggaagtctcacttgctgtgtgtggactgccactgtgtatgaggcatgagtgctgtcttttgtgttttttggatagggagctagggggagattttatgagccatgtttatagaaccttcatgtgtttttgattggatgcaatgagttcaggtcaggagaagattcttaggacggcatgcttgcatttgcttaggattcagat

SEQ ID NO: 41238 - DNA, 501 bp, Homo sapiens
attctagaaagccttccttgaatcttctagtcagatgattctttctttcctacttatttcattctagactgtacaggggttctagttcattttgagagctgactctctagtaggggctgtgtggaggactgtgttgaaaagggatcctgaaccactcaaggctcagtgagaaagaactgcaattggtgagggatgtctgcagtggataagggagtcatgtgtttgccattgctgtcatctttggttcattgactcccttactaagttgtaaactctttgagtcaggtctgtgtgtgagtcaccatttgattgcctccaacacttggcacaacacctagcaccttagatgttctcaataaatctgttctgaaatgaaatgagggcaatgaaggaaaaaattcatggtggaatttgagctttgctttgagtgggggtaaagaacggctgtgagagaatagagtttctagggacaggaaatggcatgaaggaaagttgtagaac

SEQ ID NO: 41239 - DNA, 1387 bp, Homo sapiens
tacatttataaatgctatacttttctcaaacttgaaatgcaatgcttattttcttgaaatcgtggggtaaaatgcaaatagaaattattaattcattaggctattgagaaatatctgtgtaaaagcacaaggtgagaaaaataggtgtttcttccccttactgagtctcagttatagtttggctggcctatgctgagagattgttaccaggggacctactcatatttgttctttgtcagccagatctcatagataattcctcctagagaatgtacttcctctgtaccttatattgcttagttaaatgtttccaaaggcttcatgctttttttataatattgctttttctagatataaagacctgaagatagtcttttctgtccaaagatggaaaacagtactactaccatttctcgggaggagcttgaagaactacaagaggcatttaataaaataggtatgcttgagaaaaagtaaatatgatattactggtctgcttgatgtcagacttcaggaatggaaaaataccttttatttcatctaccaccacccaattacctccagatttattcctttttttctatctaggtttcactggattctttctttctgaaagataagctacgactagcttgaatttctaggtgaattggactttgaattctttgatcatttctttgcagagagtaatccaggttaatgaatgacaatgtaactgaatacactttacacggtatccttattacagagaaaaaaatataaaaatacttccttgtgtataaactgaactctggccttcacatctttgcactaacaataacactttctgacttcatgcagaatatttttaaaatctcagtattgtttttaaatgccatatgtcttattttccttctcccacatgcataatttagaaagtcttagtattgtttttaaaggccgtatgccttatttttcttctttcactttttatagccatttagtgttttgtctttatgacattatcattttgacagttttgtatttttcttccaaaaaattttcctcatactctgttggatctcaattcttctgcaatttgctcttaggaaacccatggtaaacaggagaatataaatacctttttttttttttgctttagtttgcaaatgcatgcaagtgaaaggtgaacccagtgaaaggtgagcacagtgaatagacattgggataatgacaccactatgtttgccccttactcatcaagctcattctctagtgtaatagagccctccatgaaaaacagtcatatggtagatcagggaggagaaaatgatcaccgctggtcttgtgcttagatttctcacaaacctaataacgactaaaattaatgtgagtaaaatatcatgca

SEQ ID NO: 41240 - DNA, 664 bp, Homo sapiens
atttaagttcactgactctttttttctgccatctcccatctacctgtgagtacaataggtaaattttaaaatttcagatcctgtttcttttatctctagaattattaatttattttttaatagttcctgtttctcttctgagattctcaatttgtttatttattatgcacatatttccctttataaatcctgaaacaaacatgtaatagcagctttaaagtacttgtttgctaattgcaacatgtgagttaccttgagatcagttcttattgactgcttttgtccttgaatagggacacacttttcctgtttcattacataactacagactggacattatgcatgatacattatactctagattctgttgtgttctgataaaaataattttgttctagcaggcatttaacttggctagactcaaacttaaagtctgtttccctggcagcaggcagcagctgtaatctcttttcagttctttcatttttcagctgatgcttttgtgccaggccaactgggctctcctccacatatgtagagtttagctgtcagacaaagatttcagtagattttatacgaatattttgtgcctcaattctgtaactccctgcctggatttcctccccaacattctggctgctctttcagccccagattctgtcct

SEQ ID NO: 41241 - DNA, 1356 bp, Homo sapiens
agtccaggagttaaagaccagcctgggcaacatagggagatcgtgtctctacaaaaaattttaaaaattagctggatgtggtggtgcatgcctgtagtcccagctacttaggaggctgacgtgtgaggattacttgagcctgggacatcaaagctccaatgagccatgatcacactgtactctagcctggagaatagagagagaccctgtttaaaaaaaaaaaaaaaagggaaaatgggataatgtttacatatcactccacaacctgggcatccttgaattttctggctgaggaagaagagaagaaggaaaaataaaaatacataggaccttcacaagctattccttctacctggaacatgttcccacttctgcccttctctcactcatgcttagggtctcagtttcaaggtcactccctcctggagacatgcctaaacacccccaaacccgaaggtgggctctgtccaattagcagtgctcccctcaggtctgtgagcatgggatggctcagcccactcactgcatgttataaagctcaacctcgagggggcaaggatccttcctgccttgttcactgttgcatccccaggatctggcatggccccaagttaaagcttaacatcaaaaatatttgttaaatgaataatccattaggtactcaatgaatcaccggcctccttgcacaaatcacagacaatatacctactgctggctccacctttttcattctaatatttcctaccttgcctggcagcagagctccaaaaggccactctcttttctaagccattctttgcaaaaagcagatgcatatctttttggaaactttatatttcaaatctcctgtaaatgctaacacttaatgcagaaactcaaggtgcttttttggtggcaaatagatgaagctactgttttgtgagattatattgatttggggattcattatctgcctgcagaaaaacaattcgacgtttgtgttttttcctatcaacagcaaagtcccgtgtgggccaaagcgtagagcttccacagtgacctcaactcaccccacagctcctgggatgtcctcactgtcacaagcaaacgtgccaaagctctcgatgccggggctcctgccagaggacagaggaactgcattttaagctgatggtttgcatttttaggatactatgagcaaaatgcaaacaggaggccagcttcttctgtgtggaggagtgcatttctgcagaaatgggaatgctcctttgtgtctgcagcttttcctccctaaacacatcatttactactttgatcaaaaagaactgtttttgcagcacgtgatttttttttaagccatcattctaatcttctacg

SEQ ID NO: 41242 - DNA, 1558 bp, Homo sapiens
tgaatgagaagcatggttttaaagaaagacaggcaagcaattggttaatataaaaaaagtttgtcgttcccatatttggagagatgcccagttctcctccccctttctgaaaatcactcgccattggcagagcttcccatcgaaagggaggctgatgttgatggaggctgaagaggtgatgccaaagttggccaccgggcaggtcccacagcccagctcctggggccttccagaggttggcgaagagttaactttccggagcggctccctaggcgccgcgccgctagggttgttccctagtttacgtctctgggcaaagcctctcggggaaggaaaaaaaacagcggtaaaccaaaatccacatatttgggccccagtgcttccctctggccccatagacacgaggagaggggagacacaagtcagattaagccccgccacgtggtggccaagccagctgcagggccatccggcaggccgggctggggacccaggagggagccccgcgagcaaggatgggtcccgaagtcccgggcttagcctacccgagggtggcggacgcctgcaccgcgcgggagcgcagggtcgagcgctgggtcacccaggcgcgccgaagcgggttgagtaaagcagcaggcgaggctgcaggggtggaggaagggaaaggagagaaagggagcccgggcaggggtcgcgttacctctctggggactgctgccgcgagagctgggtggcggcagccagcagcaggcagagtggcgcccaggcgttcgcgcccctcatggcagcgtagacgctcggggtttgcaccccacggcgcgcgcgccggcacacacgcccctccgcacccaccgcgctcacaccgccgctcacactggcagcagcgctggctcacaccggcgctcggctgcccgcgcgctccctctcacgcgcgcaccgccgcggggcggcccaggtagccgggggatacgcggccggcagggcggaggcacttttaaaggcgattatggtgccgtctgactcgacgcttagtttcccctgaggagctgctctggcagccacaggccactgctgaatatcccgtttgttctccggcggcaggaggggcggctccgaggccagagccgccccctctcgtggggcgggcgaacgtctcctcccggcaccccgggaccgacgggtcctctctcgtccagccctcagggaccccggggagaagaggaaccccttgcggagtggcaccccagcggcccgggccccgacgcccagagacgattctcagggagggcttctggttttgctttggggaatgtttttcccagttgcttttaaataaaaagtaatagcgcttgctggctgctggaaagcctgggggtccttctttgtctccttcaaaacccagatccaaggaaagaaagggaaaagggattttattgtattttaacttctgtgcttattctcctctctctctctctagatacttttcttttttttactggtatgacaatgacaaggaagacagtctctgtgccgggatttaaacacgggttttcaggcg

SEQ ID NO: 41243 - DNA, 1193 bp, Homo sapiens
ggcctggccttggtaaacactgggacagaggggtgagttggtggtagagcaggagaggagagaaggaggcagggactatgtctgggtctgtgggtaagccagggctccctgagagttggggagcctctcaagactgcagcacttgctggcttccttcagaggctgaggctctccagtggaaaggaagtgaaaattttcccaaagtgtggactccagagaagatggctgcttacaagtgagatgacagaaatcggtccttctggagaatctgacttggtgctggtcacttggagccctatggtgttgagctgctccagattcctggtgacagcaagactggtgctgagacgaaggtttgttgtcaacgctcccttcttgtaagaacagtgcccagattgtccttttggactcttagagcaagttgtcctggtgaggacagctccacccatctctaagtgggagcgatgactcaggccacagttaatcagagcttcaccctgcctagccacagggatttcttcaggggcatatgactgccacctccccagagccactgggatgctgtgagacattttctgaaacagtggcatgtggtagtattctttcctctaaagccgagacttgagacgatacagggtcaaatctgctgtcgccatcttgagagcactggggccaccgcagaggaaatggataagagacagagagaaaccagccatgcctaacaggtctactcttgggcgttttgttgttgttgttgttttctcactcagttccccaacaagtttacttcttgcttaaacccactggggtcggattttctgttacatgaggctgaagttggcaagttcctgttactgcctctatctggaattcccctatgtggtcacatccccatctactggcaaagaccttcatctctttcaagactcactttaagcaccgaccacctgtatgcctttcctacccgctgcctctcatggcactgattcctcctttattttcccccattgtactctgtacacacttttatcatagcacctaaattatttgaaaccccttgtttctatgggtatgggtttctgtctataagatcatcaatctgttgaaggtaggggctatttgtgggctttgtgtcttcagagtctagcccagtgtctgacacatggtaggtttatgactagtatttgttgcat

SEQ ID NO: 41244 - DNA, 3356 bp, Homo sapiens
tttacagtacagtcaacattcttgtaatgtaaaatttagcaggtagcttagacattaaattttaaactcagaatcatcatcaatcttttatttagatctgataagcttctggggttgctccacagtggaatcttaatatggttctctcacatagaataattcaccttcggaatattatgtcctcttttccaaatatgtaaacaaatgtattacttattgtagtggaaataacatacaattacatttttttccacttttcattgcagtaaggattatgttactttgactaacagcttatacttttttctcagctttattaactccagtcaagtccttaattttcatgaatagaactgaaaatgctgttcttttaatcttctgagttgaattctgggtcatgcaaagattaagtgaagtgactccaaacctaaaatcctataattacggaatgtctgtttagattggtgcttggtcttctttttccctcttctagattgggaagagagctttctgaactgcaaattaggaaggccttggcttgtttgtctgtggtaaagcaaacagatttgaagaggacatctatttagctaccatttgttttgtttaatctgagattaggcctaggtttgcaaaagaaatctactaaatttagagtaaacagaattctttaaggcagcattgcttgatggtattttcttcttatagcctcttctgagtggtttgtgattaagggataaaaaagtgactattttaagctctgaaaaatgtgagtacacagttttggaggaaatagaaggtaaattgatcaaataatttactagggaacctcaaaatggtagcatatgatctttaaatgatttttttttaaacttgtaataattcctttgaagatctactggctgtttttaaccactgaccatcacctaagggaagaccatgtgactcgttactataatggcctgcataaaaaacaaaaacaaaacaaaaaaaccctcagggaagagaagacttacaactatgacctcatttctaattggactgtggtgaaaaagaaactagtcatagctgaaactaggggccaggagggctgcttgcctctcctgggcaacctgtagttggcgaaactttaactctacgtataaagagaccattttttacagcgagtttggggtaaattgtgtaaagtctcaaagggacctaatacaggacatttcctacattccgaatttgacactttaaggaagactgcgataggtaatgtgaccttccaccttagagatagtatcattcattaatgaagggtatttagttttgtttttataactccaataaatttaagaaatgtcttggtggtccttgaaagtggaaaaacatatttatatgccatatttttcttcctgctgctctgtcttcttggagagcctgcctggagcaaccaggtaagttgaaaggagtaaggacttggggccaggcagccagacagacgtgcgttcacatttcagcattcacattcatgaattcagtagttcagtagttcactagttcagtcagagactggatgagtgtgagcgtgaaacttatgctccctgtttccccagatgttaagtgaaatcaataataattacattgaggagatgtgaaaataatgaagtaacatatgcagagtgcctagttcatagtagatgcttgaaaatgatgctgtccttcctctttcccttctgtctgccatccttcagatggactcaacgactctcttaccgtccagctctcaagtcccttctcttgtgaaaatggaaaagttgaactacagttgagatattattcccaggtgttctttggaacacaggggatttctccaaaaggcacagaacaaattgcctccaaacagccaagattccagcagaagctggagtagcagactacttggatcttcaaagtacctggccctgagtcagttaaggaagatcttttcttctcttttgtacaatcctatgatgagagctgcaaagtgaactgactaagagcttctgccttgatcattgacctcccaatcctaataatatgttcactggccaaacttcctaatcgatttgtcttttggatataacgttcctcctactgtttgcctgattgagaaatctgctacagaacatgaccggttagcattcccaccaaccccagtgctacactgactgtctttcgatggactttgctccttgctgcctctctgaggtcccagaccttcagagtgaccttcacagctctgcctaactttctgtcatacttctatcaagagagacagctaaatcaatatttttaatgtgctttgctgtcggaattcgatgatctgtcacagttcttgcccaatacaccccatcattattgttaaaatgtttttagctttgtttgtagaattgctttaactggtttcatctctgggagctacactttgaaatataactttagcaacattttactatactttttcacaacccagagcagtactattttatgcttagtggttaaactaattccataaatcttttgcaactatcctctattctttttcttgtaatttttacctgggaaggtttttactgataatcatcctatcctgagtcatcccacaaaccaatctgtctcactaatcattgcttctaacctacagactaagcataacttctgctaaatgatctttgataagatgctatgactctataaagtctttgatattcatgtctaaatttaatcacttgtagattttcatagaatcaatctttcacttctacaattgggagtatttataagttgtttatcttaaacagttcctctatcacgcttttcacgttaaataaagcaatcccttcaaatcaattttctgtcatgtctaagatgttattatttcatggtatgggtcaggggtctacagactttttctgttaagacctagatagtaaatattttaagcatttcagaccatacaatctctgttgcaactactcagttctgccattgtagcactaaagcagctatagacaatacataaatgagtgagcatggctgtgagccaatacaactttatttatgaatgctgaaatttgaatgtcaagtaatttcatgtgtcataaagtattactcttctttttttttaaccatttaaaaatgtaaaaactattcttagtgtgtgggctgtacaaaagccggcagagagccagatttgcctgggagttatagttttctgactacagtatactttatggccaggagcagattcaggttttgtggggactgagctctttacaattagggggccctctttaagaaaaggaatgcaagaccaggcatggtggctcacg

SEQ ID NO: 41245 - DNA, 2868 bp, Homo sapiens
aagcctccagtgggttgggatccctttgtagcagtgaactttttccctatggttttgcagcaccttccttgagcaaagaagaaaacacaatgaaatttgaaaacaaaccaacaatagcaacaacagaaactccaaacagatgggcgaaccagtagtctcctccaaggcggaggctcactttttactgcagaattcggagctgtttaggaacttcctgattaccagccccaggcagaccaccagcagcagcatgtagcccacagtacccgagaaagtgggtgcggcaggcggcgcctggaggaactggcgcaggccctcttctacgtagtacacctggtcgtagatgctgaggaaggtgaagatgtggaagagctggtggctgtggccgataatgtcgaaaagacccggctggatgcgctcggggatcttgctcacgttgaagaaggcggccaccaccagccagaagtagcggcggtagaagtgcacgaagagtgtggggttctccccacgcaggtcgaagagccagctctcgagcataatggggcaggccatgctgagcggcatgacgaagacgaaggtgcgcagcgcgaacgggtaggtacaccagtcggtacggctcttgcagcaggccacagtgcaagccaccgccagcacgaaggccacaggcagcaccagggcgcggtaggcggcgataaggcgcgtgcagtccacgtgccagcccaggcgctgctgcaagtatggagtcatgactctggcatccagcaagctgaggcctggcaacaggtagtagtagtaggccaccgtgctgccgaagccgtagtagctgatggacgcgtagtccaggtagaagaaggcggcgcgcagacgcagcgacaggcagctgaacacgtgcgccgtgcagctcatggcgaaggtcagcagcactcccgacgcgtagcaccacaacggtagcagccacgggtggtggaagggcacgtcgccgccgctcaggaagaacagacggcagaacttgctcaggaacagcagcagcgggatgaagtgcgtccagaagttgagcgtctcgttggtaggcttcagcaccgaggctaggcactcctgggccgtgcacggcagacgccggtagcccgacaggatgaagcactccacgaagtcgtcgggcacctcgtcccagcgcagcagcggcttggcagacgctggggggtcccgggaggcggcagagtgggagttccgggcggcccccgaagctgccggggccggggccggagggccttttgtgcccgcgccccggggctgcaggcgccgcggcatggtgcccggggctcggctagggcgcgcgcaggcgacctctggcgccggctcccgggcgctgggcagcccccgccggccgccgtcggagcctttgtgcccacgccgggggcgtcgctgcaggtttaggagaagacccgtgcctccgagcagccgctcctaaaaattaaataaatcaataagagaatcaattaataggcagcgctgcgaccgccaggagcgcggagcgcgcgaggctcagcggcttcctcgccaagcccctgctaccggcgcgcggccgcccgcgctgcggcagcggcggcggcgcggctgactgcggcggcagcgcggcagcggtgactgggcatcgcgcggtgcgggtgcctccgccgccgccgcccccggagcgggaggtggggatgtgcgagccgaggcgcggagggagggacgggcgcaccgaggaagggcgggggcctcccaggctagggtttcgcggccgcttcgggggatagagttgtcccctgtctcgagttccgtaccatccccctcctcgggccgccgcagcccgggccgccccgttaatgattgatgcgggggccgcaggctggtcggcgacgcggcggcgcgcgcgccgagtactagagtcggccctggggttcgaaacccgacagccacgcgggcgttctggaggacactggggagccgcgttcgcggggggcggggagctgcggctgcggggggaggggagggcgccggagccgggcagggcggagagatgcgccagcggtaatctccggaggtcgccggggaggggggcactccggaagtcggggggctttaagcccgcgtccggatcggggccgtgtcattgtcagctacctggggatgcgcctctcgctccctcactgtctttgcgtgtgtgttagtgtgtgtgtgtgtgtgtgtgtgtgtgtgtcggcctgtctacgcactacacgaaggcttagttggtcttctttcgtctagtgggcgcactcaggtgcgtcaccattctgccgtttccctcgcccttgtcctgtccgaaagaaccgtccgcaagctgccctgtggtcgcgctcaccagctcttcgagccgcagctaacccatcttcttgtttttgtgtctttaactaggacttctatttggaactgagtccgacagctcaggactggctgctcaaactccacaatttaatgaaaaatctcagatgatgactcagaaaacctctaatgatctgaggaatatattaagggattccagagtcaaaggctgatcatggagggcattgatgagggaagacttcaggtaggaggtgcattctagcaggaactgaagagaatgaagtccagttggtagaaacggagggggtggcttggataaatcttatatgtaattaatcagaagtacctggcaggtggctggagaccagaagaaaggaacactggaagaatgaaaacggttgtgatgcactgcagtgtgaaaatatgcccttgagccttaaagaaaggggcttaaggccgggcgcggtggctcacgcctgtactcccagcacacagatcacgagg

SEQ ID NO: 41246 - DNA, 1695 bp, Homo sapiens
gtttcatgtaattgtaatccatgtgtgaattccatcttatgttctgttttaaatatagatatttccatgaaataccattgtatacatcctttacatttttaatacctttaggatgtttaatacagatcacattatagttctccattggaagtatttgggatactaagaatttatcatgatgaccaattacattattatgaaaatatctttggatttttttttctttcaggttgtttccttgacataaattctcccaaatagaattatgaaatcaaatatatggacagtttggtggctcctgttataattaacaaattcctttttggaaaaaaaaaaaagacagatgtttctccttactgcactatcaactcaaagccagagtaggtcttatactccctgttccagagagattcatcagatatgcatgggcctctgccctggaccctgaatacacacactatctgtgtgcgtcaaggttatagcaaggcctgccttgaggcagaggcaagcatccgtgctgggcaagctgactcatgctggcctcagcccaaggctgacctcagccccagagaggaaatgctccttctctttctgcttggagaacgtgtgccctgtatagtagtagaggggagtggatgtagaattgggctggaaaaggaatttcctttgtgtagcattagcaattactgaatataccgttagtttttttatgataaaagactctatttgttcagatgtacagataatcagatttggagataaccaattgtgctctattttgtcattccaaaggaaatcaaatgagtcagtcacaatttttgtgcagcactaacctcatcccgctagtttataagttccatgagggcagggacctgtcctggttgcgctaccattctatccccagcacctggtacagtgcctggtgtgtgtgcaatacgtatttgttaaattaataaatgaatgaatgcattcctagaaacaggaaacttcaataaatgaaacaacctagttctttctctccaggggactttcaatccaagctatacgtacagctgtttaaaacatagttaacagtgacaacccaacttttaagtgaacatcagccacctgaacaaaattaagtccatgaattctcttttgaaattaaacttaatcagtattttctgggaaattacaggattgttttttgaattcagctggtgcacttgtcccagctgaaggaatggagacctgatgagtcagtgatgaatccagggctctatctccaaatggtcatccatgaattaatcattagacagcaggcagtgctccacccatgttaactttccgttttcaagattatgtttcacataacaatgaaaataatttttcttctaaaaattctcttaaaatatgaaactgttgtatgaataggatatatttctatttctaactggttgttgttagtgtgtagaaaagctgttaatttttgatatgtatcatatatctagacattttttcaaattttttcattttttttggttgactcgggttttctaagtatactctcatatcattttttttaacacactgctggatttaatttgctaatattttatttaaaattgtttacttctatctttttaaaatttaatttattttaattatagaaagtagagatggagttttgccatgttgcccaggctggtcttgaac

SEQ ID NO: 41247 - DNA, 3152 bp, Homo sapiens
aggaggcctggcctgctgattccttagtggctggcatatatgtctgttaatctttcttgagagccagccttgtgtcagatcctgttctaagtgcttccctcgctccccacccccgccattcaacaaaattctacttcttcagagctggttcaaatgctttcttctctatgaccacccccccccctgccccgccccgtctcttttcctcactcctactctcagaattaattacttctttcagaggtccctcagctattgatccttccttgcagcatcaatttaattatgcatagtgtcagtttgcggtttccttgtctcctccatttctcattaagttttaaatcatatgaagacagtgcatgtttgtctgtctctgtaagccctacaacactttgggcaggcttttacacacaaaacggggctcaaaaatattttgaataaatgatttagggagaggtccacaaacgccctccactcccaccctagtcctcagagcaatactttaaaataaaaatctgaccatttcaaccttgttaaaggccgatcttcattctgagaacagaattctaactcctaagcacgatggtgacctcagggcgctgtgtgaacctgcacccgcacccctgtccaaccacgtccctccccacacctggtctaataaaacgactgctttaggtgacctgcacgatcggctgtactgattcatgccacaggcttttacctcaattactccctctgtctggaatgtcctttctttccttgcctggcctgattcgggcatggccttctcaagcaagctttccgtctttgaatctaggccctgattaagaactttttaaaaaagtactaagttcagaaaagtttaatatggtgttcccccatttatgtgattaaaaatgaaaacaatactaaagtgtaaaatgtaatctttaaaatgtcacacaactttacatgcatgctagatttagaataccatctgtatttacgattttctcttattgactgtctccacgcgcacccactctgcagacgccctaaagagtgtctatcggatcaccctcaagttgggtcaaacggctcctcttctcggcttttcgggagcaaccctatctcaacattcaccatcttaagatgagcagactgcaagtttgcctctcccaccagtatgggagctgccgaagcggcaagaacagcgtttccgtccatcgagcgccaggtcaccagtcagctccagtcctattttgagttgaagtaaaagctcctccctagatggccagtgcacgtctttaaaaagcgactcctttcccacaaaggaaatacgactggttcgcatctatcaagggttggcgttgggataagagggtgaagtatcagctggccctgattctctgaattcccggacccaataacgcgaccaagcaccgtgactcccaggaaaactagcggagtgagcgcggctgaggaaattactgacaccggaagtcacgtgagcggctgcccctaaggtcgctatctcgacagtcgactattcagccttgcaggcgcctctggcgggcttcactgagatccgctctttcggtgctcgactcgcccgtgctgctgccgccgccgaaggaggggcaaagctcaagatggcggacaaaacgccaggcggatctcagaaggccagttcaaaggtaatttctgacaaaatttcgtaagtcagcggatctaccactgtcgtttggggcccacagacgcttctggcctgtgagaggcgattgggattggggtctgcattctagtcgcgacggtaggcccgggcgccgccgcaccgttgtgcgcaggttgagaggcctggtatctccccatagtcccagccgggattcagctcgagactggcgtgcccagtgggtggaggcgtgagtgcttcggcccgcgcttggcattggagtgaaatcaggaattcagattgaggtctgaagcagtgaaaacgctctcctgtatctcagcttcctgcgccctgaggccgccagacagcgcctgggagagaggcgggaatcgcttcccggtgcttaaatgtctgctgcttttttctcggttttggatctcactcacttccggcctccctcagtttccctccaaggaatgaataacctctagggtcgccagctgtgaggggaggaccactagggcaaagacacggagtgggaaatgcagaggcgggagcagctctcctttgcagtgctgcatagccaaggttaatgtacagtctacacgtggtctttaccttaacgggaagtaaaaagcacttttgagggtagaggactcgtggtctctttctttatgttgaagaaacagtgaaaagagaagctccgtagacttgtaagctacatacgattagtaaattgcatttgtgtttacagggaaccctgggcacgtattgtgaaaccagtgagctgtggtagtagttaagcattagtacggttgggttcttagttgccatcttgggcgggacatttaatcgttttttggtttgggtttctggtctcgaatatattaaaagtaattggtactgccacgaggtagttaaactttccgatgctgatgcaagaagctgtgtaacactttcaggtgctagggactgttaaatcttaaagagtgtgtgactgtaaatcggctattagaaagttaaatttacggtaggagagaagcttgcgtttacagttctgagaaacatcataactcgttttctacttgctttctctaatccgactgtttatgccatttggtgaacgatgtacaccaaaataattaattcataattagtaatggtcttaacagacatcgtttagttacatagaaactttggtgaggggccagtttcggcttctttacaaggtattgtgtcagttttttttccccctcctcagtacattttctcgtctccctctctttgggggcgagctctaccaactcttctcaacagactcctgacaagaacataccgttagggagctattactaaagctagctacgttcataacaagtcgtgcataagcctcacaatttttgtttcttctcaaagtaatattttaagtattccctacttgaggtcttggatacattgaaaacatttcaatgtctgtgttcaggcttccttctaaaatagt

SEQ ID NO: 41248 - DNA, 642 bp, Homo sapiens
ttctccactttctctgcaacgtttagttctttccttgcagagtgttggagacaaggtaaacgtgatcagctgcctggtcttgggtaaggtggtattttctctctgttaaatttgtacagattcttacgtttgactgaaacactgcccaatgcaaaaagaaagactggggcaaagagatgaaatattagatataattactttcataatcttatatgtaaataaatctagttgccaaacctcaggatctttgagttcttcggttattttttgtggaatgtgatttccgtagattaattttggaccttgatcatctttaatgaatctagatgagctcatacagagcttgaaaagacaaagttcacaaaagcagagtgcctctttgaaaacctggctttttgttttgcgtggcccagcgggacttgcccaaccatagaacaaaatacctggactccagagatccaaagactcccttcagccttcaaccattgcaaggcaatcacttcccagctgtgtggtctcagtcacgatgtttaaccaaggccttttgagcccatttcctcatttgcagcgtgagcatgccatctattttacaggattcttcaacaagttgagcatctactatgcacaggcactggggaaata

SEQ ID NO: 41249 - DNA, 1585 bp, Homo sapiens
tattcttttcctttgtgcattgtgctttaaatttgtacaatgttttaaatgcaatttgaccaaatgtattatgctttaaatattttcatacactttgacccagaaattctacttttagaaatctggtctaaggaaattttttttttttttttttttttgagacagggtctcacactcttgcccaggctggagtgcagtggcacacacagttcactgcagcctcgacctcccctggctgagatgattctcccacctcagcatcctgagtaactggaactacagacatgtaccatcatgcccggctaatttttgtatttgttttgtttgtttgtttgtagagacagggtctccctatgttgcccaggctggtcttgaactactgggctcaagcaatcctctcacctcagcctcccaaagtgctaggattataggcgtgagccaccacacctggcagaaaacaatttttaaaatatagaaaaagaggcatgcatcagggcttatttgcaaattgtaaaacattagacatagctctaacatccaaaaatcgggagcagtttgtaagactgctaagaatttactggaaggaatattatgaggccattaaatgatgcctgggaggactatgcagctgttgcacaattgtatttatgatatgttaaaatatgcatacgaataaagtttaagatggaatatatcaaaatgatagtagtaggttagtagactttacagatgattactccctacactctgtccttttccacaatttttgcaaaaattacttaaaacctgcattttaagattctgtaagtctaatattacatgattaactgacttgctgtcctttgtcatttagaaagaacagggcttaggaaaggaggaggcacagagtataagtcacagtccaaagtttggggcaatacctggggagtattgggactggaggaggaagcgctgggctgagaaaggccggtgggtgtgacagtggacatgactctcctgccttccctgcagttttgcctgagcgcatgtctttgttatgctcaccaactcatcagctaggagcagggcttggaatctctgaaagttccttagtctctctcttggacatcccaggcatttccccactggggagtactgtggattcattttcacaccaagaaaatcaacaaatgcagcttgctggggatgactgtccagcctggcatgctaaggaatttggtaaccaagggaatcaataacaatttgtttgggcttgtacttttaatgatttagactttgaacaagctcctttggattgtatttattggtatatgaggcaacttttctcaaatcctttctcacatctggaagcctttccctggctttctctctcttgacaggaggtggcacctgaggtgaagctgagtgggaggaaggatagaagccctggctgggactgctagcacccacccaagcccctttgacccccatctgctggcgtctactccgcttatcaccctagcatttcaccctcacgggagagatgatgcttgaggggtaaggacggagaggcagacaggagccacattacagaggacttggaatg

SEQ ID NO: 41250 - DNA, 819 bp, Homo sapiens
attctccttatcgttctaatctaacctttcttcctggactggtacaatgctaatgcaccatcagggaggcagtggggaacataatgggggcactggacaggaaagcagaggtttgttggcagaaggttgaggcctccccagaggacctggccctttctgcccttattctcaaatccacacaccttcctgccaccacaggctcgcctcatagaaagcactgaaagccagggcagatgcctgtactgtgaacctgtctgctttcagttttccacctactgtctcaaccaaaggtaacatttgaatctatcctctagaactgctgggagaattaaatgagataatgcatgcaaagtgttaagtactgtgcctggcatgtagtaagcacttgagtttattcttatatctttaaaaacatgtcttgcctgtaagctccatgaaggctaggacaatgttctttttgatgaatcaccagggcctggcacagtgataggtacatgacacaagctcaataaatgcctgttaaacaaatacataaaacctgacccaggtcagcagcacctcctgcttggaatcctgccatcacctgatctccccgcttgccctcttgtccctcaacacattctccacatttcagtcagagtgatggttctaaaaaatagatatgcctatggcttccttagcagaaaatgcaactctagaatatggcaaactcactcctacactctctggtattttctcttctcagccctgtctttccctgttctaggcttttctcaaacatgcttttctcttctttctttcctcctggcctgtacacat

SEQ ID NO: 41251 - DNA, 905 bp, Homo sapiens
ctgaattctgcacatatgatctcttgacaatgatcttaatgcaattcttatttttcaaatgagtacatttaggctcgcaaagtgtagtaacttgcctaggtcacagagtaagctgtagatgccttgagcctgcaggctgggtctttgcctctgcctattgctttctgctgttgtctgtctgcacccacattttctctagcctggcttcggtctctgaataggccctgcagcctttctgttcccaggctgactggtccctctggcctctgtttcctggtcctcagccttgcaatgatagccagttggctgcttacccactttcttcctggatcaaggtctccagcctgacctctgggtgagccctgcctttaaggacctacatgcaacccactagatacaggacatggaaaacagataagactaagaagcctccagccccatgcctgtgactcagcagtaggctaaccaaatcaacccagtttgctaggaactttcctgactttaccactgaaaggggattcccaggattctctacaatcctggaaaaacctggatggttgatcactctactttgccatgtgacccatgagcacacaggcatgaggccatcagaagaagggaaatcccaaaggggttttgaaaccacagcatccacttaaccactatggtagctgagcagtgtgtctgcctccaccttcaccctgaccactgattctgtttctgtatctccattttggtgagtggctgggaccaagaatgagcaatttaactttctaggcctctattgacacgtatataaaatggagatgagaatcagctacataatttataggggtcagtgaaaaatgaaaatggggaccccttgtttaaaaattaaggatttcagccaggcgtggtggctcacg

SEQ ID NO: 41252 - DNA, 841 bp, Homo sapiens
taaagtaatatcaatgctgaaaaagaatctgagtgatgagtgctagtttttttctgtatatagctgaattattttaaaacttttatctagaataaaataaatttgaaattacgtaaactccttagctgtctatgatgcgacacggttcgttgtgggtggtgctctgtaattcccttatctgatccatttttctcactccagtgagtgaaagcagggttgaagatgagtctattctccatcagactgtgctatgtatagatccactgcaaccctagcaaatgacctaagagaacagattcctgggaagctttcatgttgtgtcagggtaagcaaataacagttctggacacagtgttccaaaaacattagatgactgcatctaaagaatgcaagcaagatgcaagcaaaaaaacatggtgattggcacttggagttggtgaagacaaagatatggaataacgacaagcttgaagaaatcccagctcatgggtgaattttctatagaataggatagcctagaatcaatactttttcaattacatttaaaaattgtttacacaatctagtatttgggcagcaagctaggaatgttgtagctattgattttaaataaaattttatcaatcaaagatataccttctcaaggggaatttctttttttaattcagagaactgagagagtataaagtgaaaagtggaagacttttcctccctctctgacacccaagtcccacttccagacctaaatactgttactattccttacagttctagagattttatacatagattagcaaagttacaccctttctattttttagaaataagagataatactaaa

SEQ ID NO: 41253 - DNA, 805 bp, Homo sapiens
gttcttgtattgagcctctgtgagtacattagggcagtcaatactcacacactgattatctgtgttcatcaaaactattcaatatcttgatatttaaaacagttaagcagagtgtgaacagcaatcattaggaaaatgatccattgaattaattgccaagggggaaagagggaggttgaaaatgatattgatggcaaatgtctaaggcagaatgggtatttttaattctgtttttcctttcctatttcatgggtggtgaggttagtaactgtgttgtacaaaacagtgctacgaggaaataaaagcaagacagacaagttgaatgtgaaggttttataagtaggattaagaagtttggagcttgttctttcataatagagagtcatgaagggttttaataagagagatgacacaatctgaactttggaaataaagctcaggcagaagagcagagggcagaatggacacatggctggaggctttcccaataatttcaggaagagatgagttgtaccaggacaggaagaggcccggattcatgctcccaaactcttacatgttcactgtcctgggttctaatagaccaatgaccactgtgctttgtacttcacaaatatacctcactggttttcatcttctctgtgtgccacaagcccttagcacagtgatgcgacatagtaagcctttaatgagtgaacgaataagagagaacatcaaggaagatatagcagaggtgacagcaccccagagatatttgagatggaaaattggtgggtgttggtgcttgagaggcagcaaggaatga

SEQ ID NO: 41254 - DNA, 3437 bp, Homo sapiens
aattaaacaatactgaaagtattgttacttttgataacctggtatagatgtttcttattaacccgctgtagagttgatctacacatgccagttaccatggtcttctaaaagcactgttcaagccctaaaattaactcagttaagactcagttgtttaataacgtatcaggaaccacctgtccctcagactaaaaatcacttctcattttaactactctagcactaaaagtgaatagcataataatgtatctactagcgctactgctaaacagtccgggtcccctgaaacttatccctaaacacagtgctttcgtgcggcatctgcgccttacttttgcagtctggggtgactgagtcaacgtgaccgtgcggagcaccaagcagccccgggtccccatggctaccgccagggcaacgcttcgcggcccgctcctcagggaccctcaggggcggcaccgggaaatcagctttgcggagaggaaccgcagggctccggggacgggctagggcagccggcgggcagcagaggcaagcctggcaaactcttcccggcttcttcgcggcgcttggggcagacgtcctggcgacaccaggccgcgtcggttccccttcatcctattttccctttaacacggtggcttgagaactttattttgtgctcactcaagaaaattttaaatgattttacagatacaaccccaaagatgaagctccaacaaacccgccactactcgagcctttctcaccgtcttcctcacaggccccaccccctaccgcgaggagcacgagctgaggggaacacaagcccccgtcgggcactccccggcctcgccccaccccccaggcgcgcacccaacccatataaggcgaggggaggcaatcgcgccagctctgcctccgcctcgcgcgccgtccagagggaaggatttgcaatagacttcctcagttcatttcttcttattccctcctcccttaaagggccgtttccacaatagtgaaaggaacgcaccagtaaaccacaataatcataaaagatgactgtaattaagactctttctgaaaccagaaaccgcgagttcatgcccccacctcaagagcccgagcttccccctctctgaaccgcccccacacccgctcccgcgagctcccgcttacgctttccgggcggcgcgcgacgcgctcgctccgcccctctggccccgcccccggctccccttcttggtctcaggagagccagcgcgcacaagcaagggtgtgcggctctgagacgtgcgttgctgcttgtgggtgtgagacatcctagctcctcttccccttccgtgagtccctcctttcctcgcagaccccacttgtcgtggctggctgccgccgcagctcttgtgcgaagccagcagtgcgcgtgcgcgcgggcacgggcgcgcgaccgtcgggtccccgcgctccctccccctcccgctcctctataacttggctggcgtggaggaggcgccgccggagtcggagggcggggagctaggaggagggagctcgagagttgtggagactagtgactgggagaagtcgcagcccgctcaggcccgcgccttcccgctccccgtcttcctctctcacacacctactccgccctccgccccagcccgcgcgctagctccttctctcgcccggggttcctgccggtagctctccgggtcttggcgcggcgggggcgccccgggggtgccctcgccctcccgttgcgggcgggcgggcggtatgtggcgcctggtgcccccgaagctgggccgcctgtcccgctcgctgaagctggcggcgctgggcagcctgttggtgctgatggtgctgcactcgccgtcgctgctcgcctcttggcagcgcaacgaactgaccgaccggcgcttcctgcagctcaataagtgcccggcgtgcttcggcacgagctggtgccgccgcttcctcaacgggcaggtggtattcgaggcgtggggccgcttgcgcctgctggacttcctcaacgtgaagaacgtgtacttcgcgcagtacggcgagccccgcgagggcggccgccgccgagtggtgctcaagcgcctcggctcgcagcgcgagctggcgcagctcgaccagagcatctgcaagcgggccaccggccggccccgctgcgacctgctgcaggccatgccccggaccgagttcgcgcgcctcaacggcgacgtgcgtctgctcacgcccgaggcggtggagggctggtcggacctggtgcactgcccctcgcagcgccttctcgaccgcctggtgcgccgctacgcggagaccaaggactcgggcagcttcctgcttcgcaacctcaaggactcggagcgcatgcagctgctgctgaccctggccttcaaccccgagccgctggtgctacaggtaggcgcggagccagggcagggggcgtcctgggaggggccgcgcgtgggaatcagagtcgggagaagtggctcagccagcgcttgccgccagttcggactcggccgggctgggccaggctgcaggcgtgggaaggggcgtctccgggggagccccggggctgtgcagggaggccgagggcgaccccgctgatggagagtctgctcttgttacctagattcgggcgcatttcggatttgactgtggatctttcaacgccagagggagtgcgtctcttaacactccccaaaatgtctctactgcgagtttccttccgctctctaccctgcctttctgcttttatctgccggggcttgcaggtccgcggcgcagactgttcacgagcccttggacctttcctagttcttctgaagtgttctacaccgcgttcgctcttccttttctggcgctggtggctggcctaacttcggtctcagagtctttgttttcgctcatttacctggcagtcatttggacacctaattcgaggacaagttggggaggatgaagtcggagaacgggacagtggtcggggtgggtttaatctgtgagccgagctttgggtgggattagaatcagaaacaggaaaagtaaggcagcgttggacttggggctgggagggcttaaggccagacagacgttttcatcctgatcctgtgacctgccctattcatctggtaatctagttgaagggagatgaaatattaggccagggcgagtatcagggaaggagattcttgcctttcgccagttgcgttgtttgctctcgtctgactgttttgaaaagtaatgtgccttttaggggaataggatggaatctttactggtgacatcaaaaagagaacaaaaaacaaaaacactgtttactttcggagtatttgcttgtttctgcacattcccacccagcttcagtgcggtgtccttgaacagtgattacaactgtggggttgtggtttctccttctgtctgcaggaaaagttaccgtgctc

SEQ ID NO: 41255 - DNA, 525 bp, Homo sapiens
accataaagagaatcctaatgttagttgtacatgatacttgaacttgacaataacaaaacctaaatgacacaagaagcaaaaatggaatgacaggtaattttctaaagtcaatgatataggccagccctaaattgaaggttattctgataaggggagcttggcaggcttgcagacactgtgtttaacttttgtttctgtcagagaactctctgaaagatgccaggtttagtggaatttagataaagacattctcatttcagctgaaagttggacattcctttgtgtctgattcatacctgtaatattgtcaagtctgatagaatttcagaagcacttcaacatttttaacagtcccggtttctgagtaagctgtcacagcatctcaacttgggggttaggagaaaatgaggagaatcatagtcactgaagggaggtaaacttgagaggtgccaaataatggaaatttctagtataataacattcaagagcaaaagtgaatcagcagacacaagtaaattagggag

SEQ ID NO: 41256 - DNA, 1450 bp, Homo sapiens
aaaattctgtcattcatattgttgttaacttccttaaggccagcaaaatatacattttatttagaagtcagctgcacagtttttcaataaagaaaaaaatgcttaaaattgtttcatagtttatttgcagaaagattagcaacctttataaattaatccttcccacaacaagtcatcccaaatagcagaccttcttctttgttgtgtacacttgagttggtacactgcacatcagtaaactttggccatgaactgtggccgcagaagactttcccagaatctgggagcccaattggcagggcctggcatgccctctcagtgtactcaggctatttctacctatatttgtgccagatatttttcaaccaagatcttactctgtttttcaatgagttggggtttgtatatggaaataaaataagaaaattacatgataagaagacttaaaaagttgatttatatactatgtagtgcttgtttacaaggaaataatgaaaaatatctacacataaaagtgactaatcaaataatgacaaaacgaattatttggggggaaaaaagggatttgaaagaatgcaatctcacagtgaaaaaaatagcatgaggtacatcatagatctgatcattaaactttccagaatacacaattaaatgttgtaggctatatgattcccaatacaatgctcagatcaggacttgaaagcatgattataacagaagaccaggtaaagaggctaaaagaaaaaaatatatttaaataagattcctacagttcaaaaaaaccagcgtgagttatttatccaagaagaagatataaacttcaacaaaagcaatatggaggagaaatgtttaaagacaaaggtgaccagtcactgagtcaatgtctggatacttaggtttttgggtgacaaggtaacctagaaccacatgatgtgtctattgggaacaggctggggaggtgggagtggggttgtgtggaaggtaatgtagccctcgtatgggcagtgtatgtgctatgctggcttatgtttttattgcacatcaagccatttcctggtgcacactgtgatgctctgtttaactagatgccttttggtctttccagagtggcagcttgttcggaacagccttatgagctatgttccagttctttgctttgatgaggtcacaccaaagttctatcagcagtttactcattaacttggaatagaaactggtttccctggaagctaagtgaacataaagaagcagcaacagtcctttttagggggcagattaaatgtgagatattgtcgctgggatgccaattaaagttctagaaatagttcagctataggtaccttgattggaatcaatgtctttatcatttcctcagctttgcagctgtttttgtttgtgatgtttccattatgaccactaaaagaataataataaactcgaatataaggct

SEQ ID NO: 41257 - DNA, 1100 bp, Homo sapiens
acctccatgagcctcaattataatagcatatgtctgaggtggctgctgtgtgcatgaaaataaaacgatgacagtaaactgtctcacatatgtagaagaaactgttcagatgttaatatcctttccttcgatatcacttaaatagtgtttatttaagcaataaagtgaagtattcatcttgatcactacattttgattttggaagagaagattgagaatttgttcaccaatcaaatttttagacaatatttcttctaaattgttcccacaggttgctagtttttaaatagcatttggttttaaattatacttttatagtttaaacattcatgtttagcttgaaggttccatgtaaagttatttttcatgtgtggcctaaagctgactgttttaaatgaaactgtttattttgcagataattcagtaacaatcctgtttggactttcataccctgaatagtatcaggttttacaaacatatgagtgaaacatgcttatgtaaacaacagaggtgctttcatccaaaacaaacatagccttcccaagaatcatgaggatcaactgcagacttgtctacacaacctgcctgactaatgtctgtagcatatttggccacaaaaattgtttgaatcatcaacatacgcatatataagctgacttcacaatgtgctacaatctaattgttgtgtttgggaaggaattgcaggaccactctgacctcattaaaagcaaagccagttgatttagattcatgattttgaaagacttcaacttgattttggacataaaaaacattgaaggatgagaaaatgttgatttatcctcttaattttctgtgattttattaaatcctttgccctatctccctggaatatttaaaaggagaagcttttagctctttgctgttctcttagaacattgagtgcagattgaattcatttgggtagtttttacttccctgatacccagtcttcacttagaacaaataaattacaacttctgggaatggggcacgggcctcggtattgttttaaagctctccaagtgctttcaatcaagattcaacatctacctcagaataaaaaagacaaatctttttgg

SEQ ID NO: 41258 - DNA, 494 bp, Homo sapiens
tgaaactatgagaaaatagggcaaggagtgtaagagaatgctgtttataatgatttgtggcactcagagccttacattgggatataatgctaaattgacttttgcagaaatacacaacttgttgtgaagctttggacattttccataaccagtggtgccagatcctggaggggctgggcagtctgggcaaagacaaagtaaacaagtcagtagaaaaaacaatgattagaaagactgacctctgaaccataacatctctgagctcccaaaaaggtcaacctaagtttggcaaatacttcaatcctcctggtgacatataaccttggatgttgatcactcaaacttttattgttgtttatatctagaagcgcaagttctgggaggatgccaaaagttttgtggttatgatgtgtggggtatattagttggcattgctggcttgggaaatctattgttctgaagtggaaaacctgcttgtttaacattctctcttc

SEQ ID NO: 41259 - DNA, 673 bp, Homo sapiens
aagataaaatgtagatatagatagtcttgcctcaggcagtatgtaatacttagacaataccacaaaatagttataaaacaagtgccataaggaggataaaaaataatctgcaaactagcatttcaagaaatgcaggcttaatccacatagcattttaatgggtttttcagatagttcaaaaatattaatttttgataagttgaaccttgactttttagtcttagtttaatttagagttttcaaaggcagttacaataaccagtgttttcacattgctccagaggccgaggtcataggtttgacatatcggctggcttgttggtttaacctaaaaaccgtcgacttcctggtgaagagtccaaaggcctctcacaagtggccctcagtgaaaatgctaatgtcacagcaggaactcatcaccaatggagagaaaaatacatagaatggtgatgttctgacacagactgtaatatctttctagtccagaccccacaagctaacacttgcaatttgactgaacatcaagggatcatttgaaaagagtaatcataattaatttatgtcagtaaataattgctagctatgatcatctacacacacaaatttactcatttgtcacaacgaacaactgtgccagttattgtttctttgtgtgtgtttacctctctagaat

SEQ ID NO: 41260 - DNA, 434 bp, Homo sapiens
aaataagagtcacatgaatagtaatttagtaataagataaacctgtttaaaggctgagcacagacacctacagtaaatggggcagtagtaatgtgacctctaactaacacaacgccacacaaaataaatactaagtaagctttgtcaccaaaagacactaagctcttccaggaaactatgctactataagctaagcttctgggcagtgattcaggggtactgattcaggaaaagagagcttgcagatcaaaacagatctagggcaaccactaataacagtcatctgacaaatcctagtgacagtaagctaaagtacaatattatttctctacccattttctttcagatctctctgagtatcccctttgtgaggtatctgttcttaaacagctattggtattcattttaactgtaaaaaaaaaattctgtgctct

SEQ ID NO: 41261 - DNA, 621 bp, Homo sapiens
tagaaacattacttttgactagaaacttccctcttttggacctctcaccacacaggcagaggttatccaccatcaccaccccccatttacatctgttttcctcatgaaaactagagacatttttgctggcagctctagacggtgcagaaggctgtttatgcagttaggctgctctgggcactcctgggctactaggtgatagtattttcctgattcttctttcacaatatcaaaatgtttccaagtatgatgtcattttcattgacagagaaacttttccgcccaaatcctttcctctttcttccttttaaaaatcatatccaattattcaaggtcacagtgacccaagtactacagcttttatgcacaaaattcacatctctatttttattacaaatcaaattagtttcagaaatgagttatgttcatgtgtagatcaggtgattagctcttcccctgtttatcttttgtaatcagtgtgcaaaaattgcaagcattcctatacaccaataatagacagagagccaaattatgagtgaacttccattcacaactgctacaaagaaaataaaatacctaggaatacaacatacgagggacgtgaaggatctcttcaaggag

SEQ ID NO: 41262 - DNA, 975 bp, Homo sapiens
agtcacctaggttgaaaatctttcattcacccttcactcctctctttccatggcctatctcatggaatcttttccttaatcctattgattccatctacttaatttattttgcattcaaatcctctccactcccactagaaggcacaaggctagattaattttaaaaccctagagacctctacattacccatctcttcctcactcataaataagactgtctgacaaactattttaaaaatgattctgtgccagttcccagactgtatcaatggttctcaactatggcctaaagcgggagtcagtaaatatttactctctggccttttacagaaaatattttaggtcctgatgaccatattgtctgtcacagtgactgaactctgtcactgtgttgcaaaagccaccacagacaatatgtaaacaaatgagcacagctgcatttcaataaaactttttacaaaaacaggcagtggtacaagccacagaatccatcatcttgagtctcaacaagaagcaaaagctcccatatagccaaaaaagaaagcaacagaagtgttccctaaccttgtcatttagccccaatcctttatcattattggcataaacttcagcaaaaattataatcatccaaactattagcagcacagaagtagcttcacacctgataattctttcatcatatcttcacctgaagcatatgtctatatttccagagataattaacatcacaaaccaatactatggatccactcctaaccacccaccctcaaaacacacagacacagacacacagacacagacacacagacacacacacgcacacacacagttaaaaacacccacgtacccagttgactttgcacaacagattatgataaaatcacaataaaatgattaaaattattttataaattttggagggagggaaagggagttagttggcataaaacaaatacaattttaacagataaatat

SEQ ID NO: 41263 - DNA, 610 bp, Homo sapiens
tgtaataaaattactctatttaaagttacatttcttaaatttgtctatataaatcataagaattaactacaagtttcagtttttactggatggattttcacacttacaattccagtataaagttaacagcaaggatttcatcatccttaataggaaaagtaaagttggccagacccttgagtagacaaaaatgttaccaaatccaatgactcagaaggcaaagcttaatcatgtgtagtctgaccatgtccagcaatcctatgccaaataagaactcctactgtttcagtactattgctctttataaataacctcaaccaaatcacaaatacataattttgttaaagaaaggtctggttagtaatattacacatgaacagctgtttcctctaagttgctattcagtatcatgactatgataagaaaaaaatcttagttggagaaaaaaaatagtgttgacatgtatcacccacatgcttttttttaaccaattcaagaattcaaccatctcaccatttatgaagtattactgttagaaaacgtaacctaaactggatacgtacttttcagatttcactaccatttatgctacaaatttaccagaaataaa

SEQ ID NO: 41264 - DNA, 10285 bp, Homo sapiens
atagtagttttatatgtctgttgtcatgtgaaataaaaggcacagtctgtttatggatgatatgtcattctgtgtggctgaagcacagaatacagaaagtacagaggacaagaccctctctcttccagaggtttctccaggcccttgctcttttcctctccaccccataaattgctggtttgcatcagtagatagggacaaacctttccttttttccttgaatgtaccacagtaaattagagagtttataaatgaatgaatgtggtacaaaaatactggtcttgacagaaacatttgaaaccatttcctttgtttttgcccaaaacttggtttctgcccagtttggatcatagaatagtaaggtgcctcagaaaacacacacaaattttatccaggtctggagacatgacggcaaagacttggcaggaatacatccaccttctccttatcccatctagaaggcagaaagggcaggaaagataaatcagggtatgaacctgatttactggcactgattaagaaggttctgcctctgaaagctcccataaggatataattttcaggtaacaattcctatacgttattttcagagaaaatgattattttagccaaaatcttatttagtctttccatgctaagaataaagtggcaaccaaaaggaatcaatacagcacacagaactctcaaaaatttaacaaaaatctatgttctcaactctggtcaacaaagcaccagagctaggaaaaactacactccaaaaattgatgaatgtgtatcacattcccaactacagtgggtaaactgaaaatcactataaatatttgttttcaaaaataatttgctgttatcattccagtaacactataatgccatattgcctcaaatacaaatagattagtctaatccagggattcttaaccctgggcaattttgtccctctggggacattaggccttttttgtttttttggtgctcagattagaaaggttatactactggcatctagtgcacagaggttaaggatactgctaaacatcaatgcacaggatagtccctcaaagcaaagaagtgtctggctcaaaatgtcaatagggccaagaaattgtgatttaaaccatttcttcttggttagctgggacatgttgacaaatatacagggttagagatgataagcactcttcttaaagaactattaagctagacaatttagggtcctatagaagatcttgatatttatgtcaacgaataagcttctatttagtaattttcagttgaaacttgtaaagaataaaatagaccacagtccatgattctgcccactttatcaagcagtttacctctacatttattagtttatcacataacctatgagaacacctacctacaccgaaatttgtaatcaaactgactactgctggcttcacctatcacaaattagtattttcccacatttcgaccctaaccgaattctccatgcctgcttaccaagtgaccagtcctcagatttaaacagtgggtttcatgtggtcgtttcctgaggaaactttcatacctaaaattctctttctctgatatcacaatccattaaaagtttactgtccagttccatgaaatttaaaatccagagtgagaagggaatttgattttgactataaatataaaggcagatacaaagggatgtcctctattaaaaagttaggggtgttggcaatgaagtggaataaaatatacaaaggccaaagaggcctctctaaatattacaaagtccttagaggttattttatttcccagttaaagtctccttgggtgtttcaacaaagaaagacatttttctggggaaggctttttgttctgtttttcctttttaaatttctctacttccaaatttgctgaaagtatttactttctactttccagatattatgttagaagaaatatttttaaattatgcaaaagtttagttcaaatttagaggaatcacacgggttcagaaatccatttttaaatggtcacatatacctaacagaaagaaaagcatcctgtaactgatagaaatccatctgaatgctgaagtttctcaagctaacaaagcaagcactgttttgtagaaagataggcagttcagcctgctgacgctttctgaaacacttaaagatgaagacaaaactatcgctacatggattagctggactgcaaaccaaatgtcactttctgaatgtaactctgaaatagaaatttctgtccttaggcttaagaaaagttcaagtagaaaagcactctattataaacttgggggaaaaaatggtgccaagatgacttaacaaaaaacaaaacaaaacaaaaaggacattagaaggtcatttaaatgcaagatctaatttcagagagttgagcacaaagagcacaaatgtggaaaactccaaggatttttcatgtgccacaaaaggcagcaaagcatgtttagacagacgtggtgaaactctctttaatctggctaaatataaaacgttttgttttacacagcttctgaaaacgagagacagcaccgggctcaagaaaagggtaggtaaggggagcagctgtgtgtccacagcttccccttcagatcccaaaggaagaaagctgccgcctggaggtactgggtagccaggcagccttactgaaaacaactaaggttttcgagcgagcgttgtttttggcaagagggaggtgttaccggctgcttcctggggtgctggaaggaatgtgtcaccatcaattagaaagtacactaagccccgtgtttaggtcacagaaggagtactgcctcgtccatcaaggataaatccatgccaactctcggaaaggaggggaaaggagagctgcaggaaaggtgttggtgcccatgacctgcaagtccaaaaggaaactccaacttgttctgcagggaaattcgggcacgctgagttcaccgagaactccaaggagtcaacgagggcgggtgcccctacacttccccagggaccagcgccgcccgaccgcaattctggggaagaccccggcggtcctggagaggagggacaggcccccactactcacctggccagccccgcggaagggctggtggatgaatgaactgcccccccgccggccgagcctcgcgggacagcggcggaccgcggggtgctcacctgtggggatgctcgagggcttctccgagtccgcacccagacagggattccaggggtggaggacgagcgccaggagcagcagctgaggcttcaccgtgcatccccccatattcggccctcgagggccgcgcgggctcaggcgcccacggccccgcagcgccgcgcttctcgcgagaacgcagagacccgggtccgccctgagccgccgattgcgggcgggagccggcgggcaaggcgcgcggccggcagccggagcggcgcgtaacgcagctgagtgaggtcgtcggtggaggcacggagcagcaggcgcccggggcgctgcggaggccttataggctccccgaggggaggcgacggggcgggccgcgccctggctattggccgccggctgacccgccgccgctgcgcgcccggtgcggtcgcctcagctcgccctcctgggccccacgtctggactgtttgctcagcgcggacgctatttaaggagctgcctgcggctacgtgtggaggctcacgcagcgcttctggctggaacggggaagcctgcacttagctttgggagtgggtttgggagagggaggaggagccgccgggagtctggcgggagggcggtgttcccgtctgggttcctctctgctgtcccagccccggtagcttccacagcagcctcgaagggtgagaatttgctcttctatggacttggatactccacccagtctgaagtgactgcaaatctgcggcaatcttggctgactgggacctcgccagactcttaagccatggaaatggatcgcccctcattaattcaggggcaggttcatcaccctgtaaaaggaaggccgtgattttattttactccgtaaaccgaaagttttattgtccagtgaacatttcttgctccgccgcttgtgccaagagagccttagactctttccagtaatgaggcttgtaaatcctgcggaatcggagcccaacgtgtgtaatgccggggctgtgcttacaagatcgtgctccagtccgcatggaaaattactcccaaagacgtggtcggagaggtcgagatctctgagccttggcccccactgcttccacttttgactgatgtctaagaaaattcccttttttctgttctcacattttaactagccaagggtttaacttgttggaatgagtgggagcaaaagcacaattaagaaaaaagcttgacagttttgcctcatacatttaatgacataagctattttataggagaaagagaaccaaactgctaccattctggaatctcctgcctaaattttcgtgaaattagaaaaaaacagaatcgagacaacacccgttataactctgggcctttgaaattaagacagaaaattatggaaaaatgtgttccattatgatcacgttttgtctaaaattaacatatcaagataacatgaacttaatgctttcatcttgatagcattaaaaacaggtggaaaaccctgcaaagaaatcttgcctgggatgtgacattttagaaagaatcatttcctgtgcccagaactaagccagttattactctgttttgaaggtttggtctcagttttttaaaagaagaggaaaactggagaaagttctgagaagagtaacaaataattaaagaagtggaaactatgacctgtgagaagaatgaaataaggtttatttagtctgaaggggaaaaaaaaagctaaaagatggattccttaataacagcctttcatgtgtggcaagtacagcttcataaaactaggcacaaagcaaacagcatcagtcctctgagtccaaggactctgctaggaatggctggtgttttggccagatctgtctccagaaagccaaacctgcaattgccaaactccttgaacttgacttcttgcttccttggttctccagtatctttaagaacttggagagctacaacctggcttcctgccctcccaaacccccgttcccctcatgaatgcttaccggcttctctgcatcacaggtgtgtgtgtgtgtttaaactccaaaagtccactaataatttcaggttattttgacattcttccttctctgttaagagtcacaacatctgtgctgtgagactcgtataaagcaagtgttgggattttcaaatacctagacatttctaacagtctgaaagagccccaattctcaaaccaaatccttcctgctttcttacatttccagccatctgctgaacatttctacttggatgttccattggcaaaaactcgatatgtcttttttttttttttttgagacagtctcgctcttttgcctaggctagagtgcggtggtgcgatatcccctcactgcaagctccctccgcctcccgggttcacaccattctcctgcctcagcctcctgagtagctgggactacaggcgctcgccaccaggcccggctaattttttttttttttttttgtatttttagtcgaaacggggtttcaccgtgttagccaggatggtctcgatctcctgacctcgtgatccgcccgcctcggcctcccaaagtgttgggattacaggcgtgagccaccaagcccggcctgatatgtcttttaactcatcaaatccagatcccactcggctccctcatctctgttgatactactgctctctaactcatatggcctcagacatttttacttctctctttccatcccccacacccgccaactcacagagccggactccaaatcttgtcattttttcccttcatgttctctcttcatctattcctttccattctcactgctacctcactaactaatgcactcttgagtgtatcctatgccatttcctgtagactttccctaccaccagtgtaataccactatataccacaactagattaatcatactcagatatccttttgattgcttcatccccaaacagatttcataacagatttggaaacaatccacattccctaacctagtattcagattccttcatgccaaactaaacccaaccaacgtagtttgctttattatctcctaaagcagaccaaatactttgtcactttaattctctaaagtttaggtaggaatcatttgggttcctctgaagcccaagcatgagcccaaattcagtgactagcggtttgtggagagttttgagaaaaccagataggtgaagctaaaatgacacaggaaagggaaaatatccaattaaatcaaccacagtgggtaatgggagcttaatcccacaaaattgatgtactatatatcactcaaaaatatcctggtcaatgggtcagagaactgggatatatattcccaacacctatcagtcattgacttaagggctgagggacactcattaattcccaggcattcccaacctgctatggtagcagccactctgatgatgtaactcttgatcataagaagtcagggtgacatgctcagaaatggtaaggaaatttgaggagaaatgagagaagcagcatttgctcagcaaccatacctttgttcatgttatccctatatctaaaaaaaaaaaggatgacaaaacctgtcctccttccttcattgggctaatgtctgtcaagctcaagtgccacctcctacaggaagcccaactggggtaacttaccctacctcaggatgggtttagatgtccctgttccatgatttctaacttctgaagcaaacctctctcatttgtgacagggtcttttcttagaattattattagacagtgtgtctgttaaggtcaggattcaattatttttcatcatcaaagagtaagtaccatagtagcacatttgtttattcattgattcattcaaaaaatattccatgactactatatctcaggcattgttctagatagatattggtaaaaacaaatttattagtgacagaaaaaacaaaaatctactgtgctttagtttcaggtgaaacagagataaacatataaggtaataagtggtagagagaaagtaaatcaggaaaggtaactgggaaggaccaataaggaggggaggtataccaaaaccttagtaagggatcctgggaaagccccactgagaagacgattcttgagcaaagacctgaaagtggtgagaaaaagagggggccaggatgtacaggggacctgtgttccaggcagaagaaacaggaagtgcaaggactgtgagaccagaaatacctggagtgttgtgaggaagcaagagggcaattgaatgttcagtgactgtgcataagaatagtaggagatgaagcctgagaaggtaacaagcagggcggaggcaagcagataaacagacagtgtgataagggtagaacctagtaacagctttgtcctttaccctggatgaattgaaaagccatttggatggttctaagcagagcagtgacatgatctgaagtaggatttaaaaaggatcacagagtccacagctgccacattagaggaagataagggagagtgagtggagaaataaaacagaaagtctgtagacctgtagaccaacttgaaagctaatgcagtggtccaggagagagatgacggaggctttaagcaagtcagtagcagtaaatgaaggtcaatttccagatagatttgaatgtagagtcaacaaaatttgatgtctgaatgtgggcgtaggagagaaaaaggagtcaacgaatatttattcaatgaatatttgtggagtgaataagaagtaaagctttgggaattcgcggaataaccctggaggtacagaggaagggggatgttaaatgaattagaggacaaagaaaaaccaccagacatccaagagctgaaactcagagagggcggacccttttgaggaaagaggaaaaaagaaatcagcaaaggagactgttaaagtcagataaataggaaaagtattacagaagagagactggggaataggaggaagcctcagagaggtcattgattatagcattgggaaacacaagtttaagatcagaacttagatgggagtagaaactacagtgaatataagatataaactggagatgagggcttagagaataccatgaagcagaacttttgtgctgtgactcttcattctaaatcaggtctctgctgcagatgtcaggggatgacctctctaattttaggatgatcaagttgccacaaatctgaagctcccctttatatatgagaggtttgcagtatagtccgtgggccccagcagttttcccttttaattctttaagctgtaatttgacaggaatgatttaccaggtgactttttcaaggctgaacgtcctttcaaacaaagcctatatgagaccaactacattttaagaagttaaaaataaaaagaaccaaacaaaaatagtaaagggaagaatttcctaggagctagacttaaacaataaatgacctgcttaacacaaaagtaaaacaggtttcctcgtgcaacaaaaacagtaatttatcacagggaaaatgagcatggtttattttctgaggtgttttatttctttcatttcttatttgtcttcaagagaagataaggacactttaaagtatattttttaaataacactaattctacgttttagtcatcttagtgtgcttatctggaatcttctttctgtggatatgagttgtgaaacccttgtacctagcaaaatgatgtcagatgtaaaactaagctcagccaagttcaaagtaagaagagcatgccaggataggaaagaatgccagcaaacacaagtattttgaagatgattctagcagatgtttgtgactagtcaaaatgattgggcagaactgtctaggccgtgaatcatccttcagggtcagcaatcactgtggcattcacattcagtcttccaaatatgtttgaccaaagttccacacgatgacctacgtgttggcataggtaacaccagattagcattaattatgattaatcaccgtgtatagtcaacattttcttgttcaacagtagtttctaatgatttttttttttttttaactgactctctgcccttataatctctcattctcctgcttctcgggaccatttagctcctttctctgacatctgctctgcccagaggcagatttaccctgaaactattgaagcttaaatgtcaatgcccctcacttgcaaaggcccctgtaagtgctaggagtgtctgggagttgtacgatatgctaggctggaagggaagccaagctgtaatcaggaacaatcactaagaaaacacttcttggaaacggcctggggaaatcttagaaaaaagggccctgagctccaaggattctctaaattattgggctttcttttcttattctaaataagtactcacttctttattttattttatacttgtaactcacataatcttttttaaaaagatctctaatgttttagacccccataaattttgactggcttcttgtcctacccctagaatctaaaaccaatcctttccgtaagaattgagaacacaaggagtctatgatcaataattcttgggctcagcatgcaattgaatctttctaagtcagttctgattgtatgctatactcaatttctgataatgatattgttactttattcctctatgattaagcatgcccttatataccttggttcaagtattttagtcactattttggatccctgtctgattgcctaattcatctcagactgagatctttcctgatcttcttctaagttttccagaaaatggagttctgtcacttaattgaatctctgaacctcctcaaggcctcctgcctgcattgtcttaccatctgctattaggtatttctttacctgtctttcccatggctcttagtctgctggttctgatcatccctattctggcagagctttttatgacggacatgagattaacatacattgattacaagtgtttgattcaaccagaaactttcagttaaataattgtattataattctacttggtgagatctctaaggatgctatcttgaaatgaagtatagtctacctaagaaaatattgagatctattatgtaatagaaacagttgtaaaactctaatgttagatgttattttgttaaagatgtaaataactctaatattagatgttatataa

SEQ ID NO: 41265 - DNA, 2639 bp, Homo sapiens
aactcttatctacaaagtaaattcctggcataatagcaaaaattatttttccctttacataatatggagaacacaagcatttatagagtgaagttgattttttttcctaattatttttggaaagtgctgtctaaaaagattcacaacataacaccataaacaaataatggtttaataaacagtggtgtcacacacaactgaattagcaatagtttagtctacatctccagtgactcacattttcactgtattctttctaaaagcaatctaggtcacagtaattgctgcaagggaggtactgaagtcagtttcatgatgttgtaccttgtcttcttattgagattagagactaatttctctctctgcttactacaaaaaaaagctgagtttcctaaacaaccagttgacttttatctcctagcaaacaaaaatcccataaatgtggtttttctctctttatgtaagttactagaaaatacaaggcctactttcatcctcctctaccaaggcaggaccttgccacaggctctttattactacaacctctctttgcagaactgctttgcaaatcttgctttttttattacctaattttccccacaaacttcaaagattattcagtagatatgtgtcccactgtaagtccctttttaatctttttctgacaatgataggaatgtctatatacataaataacaaatatatacatacatatatatatgcaaacacacacacgtatttatatttgccaaatgttaaacaaaaaaaaatcgaaataaagtccccctttagggaaaataatcacaaaattcacatttgaaaataaagcatattcaaatttattcacaaaaacttacctgacattttgaagaattccaattaatcctgaaaaataaaaaatgttaatgcctttaaaatacatacataataaatagtattgctactcagtaacacaggtaaggatttctgtaatttttttaacctccagttaccttacatttgtcccttcattaattaaaaaaatacttattgagcacctattatgtacgaggcactaatacagatgttgagagtacagcaatgaagcagacagacactctgccacctactgtgctgcagtttatattgtagtagaatgagatttaaaaaaagtcaagaaatgttaaagtttaacgttagatagtacagttatgaggaaaacaatgtaacaagcttaagagaaacacggatggtaagttctaggagagtcagggaaagcctgtctcaggaagtgacctttgagctgtttcaactatgaaaaataaacatcacactacaattgtgggaagagagttccaggaagataggaaattagtgcaaagggtcagagatggcagtgagcatgggatactgaagggaggaaaagagaaagtggtttaggagtgactgggccacagtgagtgaagcgaactgaggtaagacatgcagataaaggtctgatctcatctgaaggccatggcaaggggtttggcatttttggtatttgcaactgggaagtctggaggattcagtcggtggagtgatcagatctgaccgacatcatacaatgagagcaagagtagaagcagggagcagtgagggatggcagcagcaatccaggtgagagctgacaccagcttagatgggggaggtgacactgcaggttaggagtgttcagaggcatgatacggtttggaagcagggcctccaggagtcgctgatggactaaggtaaagagaggagtggaagagggttctgagtcatagcccaaggtaactgagttgacggtgatcctattaacaaaactagagaggaggatagtgggggaatagtggggatggaggagggtaagaattgaaagtttagactggggcatgtttaagaagagactaaaagaagttaaacatttaaattaaaaatatgtatgggaacattatgagaataactcaaagaagaagactagaagttgagacgagatttgaaacaaggaatgagggtgaaggtaaatttttctgaattcagtcaggcaaaaaaaaggctattatttgagaagggaatttcaatatatctgaatttctgagttctgagtaatgacaaataacaaaaagagtatcaacaaaggctataatttactgaatgcttatcaagtgttaggcaaagggcccaattcttttcacatatctctgattataacaactctctaatgtgtaaatggccaaccctgctaaaggcaagtgcttctaaatcctaagcctatgtacttttcaatatgtgatcatgttcataagaatacagtcatttgcgttgtccaagtggagtaaaaaagtatcaagttagagtaggtcaaaaaagcattcaaacaacgtattagtgagtcatcaatatggacactgagctgactcaatgaaaactgccatggtacgagccagtatgcagattcccagctgaaatgattgtcttgccaagacgggtgaaagtttaaccagtcttggaccatctccactcacctctggagctggagtttgttgtacggtgccctatgtgtctccaagcttaaaaaatacatataaatatattttaaaacatatatatttacttttatataatatatattatgtaaa

SEQ ID NO: 41266 - DNA, 669 bp, Homo sapiens
ttataaaccctctaatatatcacaagtacctaggctgggtgaatataagtgctaataggtctaagaaaatgtatacaccttgctttaaaaagaggtatctactagatgttcctaaatgtctgatgtattaactattttcttctatctccatagaaagtaaaagctaatcaattttagttgttacatataacttagtattgcataatagagaattattctggtctttgccctgggttccgggaaagcaatttctaaactcttggaatttgcaagtaatagcagtgtttctgttttccttggtgggcccttggaccttacctgagattttgctaaggtggcaacataatagggaggccgatcatgccagaaagaatcatgatgtgattagagaattggagctttgagtaacatcatatttgcctgacctccaggggggtgggggccttgagactgagttcaatccatgaagccaataattcaagtagtcatgccagtataataaaatccccataaaaaacctgactctagttagcttcctggttggtaaacacatcaatgtgctgggaatgtgatgaatcctaaccccacagagagaaggcatgaaagctttgtgttcatgaccctcctaggtctcatcccatggatctccacaactgactggtcctgatt

SEQ ID NO: 41267 - DNA, 1511 bp, Homo sapiens
ataaggccacaaaataaaatcctaagtctttaaatatgaacgtttttaaaaacaaatcaagcacagccccaaatcgccccagtttgccagaattggaaataagagagagggattctctcctgtcaccgcctccactcgctgagcaattaaaaagttactataaatagcgtttttacctgcgagtggcctggcctgagtccgtgagagccgcgccgtagaaacgccagagacccatgagaaacccaatcaagcgagacctgtcacgcagagcgaaacgaaagggccgcccccgtgaagtgcagccaggacccccatccctgggcaggaaactgctcgctcccaaaccctctgcgtctgcagtgcagacgcgcgcccgacaccacggaacttctgcaaccacctgaggatgcgacgcgagcgcagtgtccgggaactgctagcgcaggacgccgcgcaacctccgcgcctgcccgcaggcaccgcggcctcgggcctcccctgacgacgccctcggccccgcagcccgggcgcccgcgccaccctgtcctgctctgcgcccgcctgtccagccccactcaccgcctgccccgcagaatgctgggcaccggggacgccagacgccgggtctagttgtactggcagaggaaagggaaaggaaaggaggcagggaagggagacggagaggatttttcaagttataaacaaagtaagcgcgcggaagggagggctaggcgcgggttctgggggcgggtccggcacgcctggaccctccttccccgcgcgcggcttccccgtctcggaccccgccccgcgctgggagagccgccagcccgggggagcgtcttcctggaagaggtggggcaccctgaagtccgctgaaacctaaaagccgagggggaggaagaaatgaagaaaataagttgtcactactctaataagaggtgaaagaaaagataaaagccagcccacggtcacttccaatcagaggggcaggttgcagggcctgggaaagggagctttgttcatagattactgcgcctagagagaaaatgaagaaacccctctttctcaagagccttttttatttttttatttttatttttgatacggagtctcactctgtcgcccaggctggagtgcagtggcgcgatctcggctcactgcaagctccgcctcccaggttcaggccattctcctgcctcagcctccctagcagctgggactacaggcgcccgccaccacgcccggctaattttttgtattttttactagagacggggtttcaccgtgttagccaggatggtttcgatctcctgacctcgtgatccgcccgcctcggcctccaaaagtgctgggattacaggcgtgagccactgcacccggcctcaagagcctttttgatttgcatttgcgcccacccccaggtccttggcttggtgatttagccttggcaatgccgtgctggctggaaacacttgggcatagggcccagaaattctgttttcttttcc

SEQ ID NO: 41268 - DNA, 997 bp, Homo sapiens
tatcacctgatgccaagagtttgagaccaacctaggcaatgtagggagacccctctctctatataaaaaaaagttaaaaattagccaggcaaggtttagcatgtctgtagtcccagttacttgggatgctaagagaggaggattgctttagcccaggagtttgaggttttagtgagctatgattgctatgattgcaccactgtattctggcttgagagacagactgagaccttgtctctaaaaaaaaaaaaaaaaaaaaaaaaaaaaaaaaaaaaaaaggtttaaagaaaatattttatatgaatcctattaataagttcataagatataatactttggaaatgccttttatattcctggtaactccaaatacctcagaatagaaaataagtttacattcacataccagaggatactgttcagatcaagaaactaatttaatccctctgtcactttctcaaatctatgatatcttaatctcacaacttttgactgctaatagccatggctgagatttgtatttcagcttctctcagttctatgtatccacaaagattttgagtttaaaggtcttgagactactaggttcacagattactgccacattctgtcttcttgatttatcatttatctcaactaaccatatacttgtaaaaaataacagctttattgatacataatttatatagtataaagttcaccttttcacactgtaaatacagtggtttttgttatattcacagaattgtgcaagctttaccattgagtaatagtaactggcccaagacacacaatagtctggctgtcatcccagaccattccaactcttatgttcctggcctgctaattcttaaattccatttccatctgtttcctgacttttgatcctttatttttcatttaacacttgcttctgccctggagacttggcatttgtctcttgtctctaattaatgacagtcttctaaggactttgacttagaattgttcaccagag

SEQ ID NO: 41269 - DNA, 1222 bp, Homo sapiens
attaaatacattgaaaagagcatttccatagctgtttcaattaattgtggatattctttaatctcacatcaaaattcaatgcatgctaaattcttaaagattcattgcagtgtggaatctgcaactcttatcaatgaacttttgtactttgtttcaataaaatccattggtctatcttgcactttgaatccatctttcactcaagtgtgattttgtaacattgtgcattggatatggggaatatattggttcactgaattatgtcaaccttctaaatatacagtgaaaaattccactgtatacttatgagaatgaaaaaggcaaatagcatgctaatattattatgagtacagttctgacattgcagattctgctctagatagtagtctagtggttaagaaagcaggatctggtgccaaacttcagagtttgactcaggattcaagagccagactgctagctctgtccaacccccatcatgagtacttttctttctttatgcattggtgttttaatctctaaaatggatataacaaaaatacctacattgtagactgttgatatgttgaaataacataatacatgtaacatacttagaactgtgttggcacatagtaaatgatcaggaataatagctctcattacatttgctatttttcccgggctttaaattctgcacccatgtcctctattttaccttgtttcttcttgcggcctctgtccctcaggccatgtgtcgtcctacattctaactgaaggaaagttcaggaataaggatcatcccttatctaaactggagcacaggaaacagtaatgaatgcattgcaggaagtgagattgcaaaaatttggaaggcaaagtatttgagttatttaatcacaggaaaccaaaagttttcctggaggaactccaaactttctcatgacactgctctgttttggggccagggaatggagattttccaaagcttttcacatgattgtaatgtacaatgaggagctggtgactgacaacacaaaccaatgattcccagtctatgttccatgtaaggaacacctccgggacttaaaaaaatgccatgtctgagttccatccagagagattaaattaatctttgaaagtcggggggacttgaactgctgttatatgaaagttgccctcattaatttaagtgtgtcctcagggttagaaagccttaattatagtctaataactcacatcc

SEQ ID NO: 41270 - DNA, 1263 bp, Homo sapiens
gactacagatatgttccatgagacttgctttccttctgctaattttgggtttggtttggtttattcttgcttttctcatcctttgaagtgcattgttatgttgtttatttgaagtctttctacttttttgatataggtttctgtttgctataaactttcctcttagaatcacttttgctctatcccataggtattgatatgttgtatttccactttcatttgtctcaaagaattttatatttcatttttaatttatttattgacacatttattgttcaggagcatgttatttaatctttatgaatttgtacagtttccaacattccttctgttattgatttttggttttattccattgtggtcagaacagatacttgacataattccaatgtttaaagaatttgagctgggtgtggcagctcatgcttgtaatcccagcccagtaattcaggactgccatgagccataatcatgccactgtgctccagcctggacaacagagtgagacctcatctcaaacgaaataaaacaaaacaaacgaacaaaaaaaaccaaatgtaataggacttattttgtgactgaacatctgatctgtcttggagtatgttccattgtgctgttaagaaaaatgtgcattctgcagctactggatggaatgttctttgaaatttgggctgggtgtggtggttcatgcttgtaatcccaacagtttgggatgccaagttaggagaatcacttgaggtcagaagcttgagactagcctgggcaacaaagagagatcccatctgtacaaaaattttaaaaatatatattagtcacatgtagtgctgcatgctgcagtcccagctacttgtgagctgaagcaggaagctcgcttgagtccaggagttcaggactgcagtgagtcataattagagtgagacttcatctcagaaaaaacaaatttgataggacttattttgtcactgaacatatggtctgtcttggagaatgtttcattgtactgctaagaaaaatctgtattctgtagctattgtgatattatcttgctatattgatctctttataattgtgtaatggaattctttttcttttctttttaccattcttgacttaaagtctcttttttctaagtatagctatgcctgattattttggtttgaatttgcatgcaatatctttttacatctctacactttcagcttatgcatatctttattggtgttacgagtttcttgaatacagcattaatttggtctttca

SEQ ID NO: 41271 - DNA, 1115 bp, Homo sapiens
ttttactcataaggataatcataaatgctttttttgacatgagcacaaggatacatgtacagaaatattcattgaagttgattatagaggaaagaggaaagttggcatattattcagggttctccagagaaagagaaccaataggggtaaaaaaagtgaatatataccgtgtgtgtgtgtgtgtgtgtgtgtgtgtgtgtgtgtgtgtaaacaaaaattgtgggaggtcattgttttggagtgagctcacgcactagactccaacaaaccagattaaaccacaatagagtcactcatgccaaatgttacacaatcatactgaaactttaaggaaacagacagatcccaagcagaccatttttttcccctgaaaacaggaaatttcaatctgattgagtcagcataataaggaagtccctctgctttaacccttacaaaaaagtaacctgaagtaatctgatgttaaccaatcatttttttttaattgtgccatttcctcattcccaccttacaaggcccattgttcttttattgtctagtcaatgagaatgatgagactttatttcctggtgatatttgtaagttggcctacaataagaggagtcacaacagccttcaattacattgctatcctttctgtttaccaggagccacaggccacctgtggattgagtagctggagaacaaggagtctcagttaacatagattagttgattattaaaaaaagaaaaaaaaaactgcatgagatttgcatcaagtatattcattgactcattttctaatctgtgactccactggaacttacttcattttctggagccaatgtttctctaatgatcattccaaactttttgctagaataaattcttcaagactgaattctgattcttttgattatttcagattgacagagctaaagacaatggaaacagtttcaatagaaagaagctacaggacttcttacagcccacagtaccagaacatcaagctatttagctgcagatgtgtactactcttgaagataagaaaagcagtaatcctgagggcaattcagaggtcatcaggtctgtctccttggttttcaatgggggagagagccattgccttggtttca

SEQ ID NO: 41272 - DNA, 1396 bp, Homo sapiens
tgtgaattatttgagtgaatctgtctttattcataaaaactgaaatagatttgcaaaaaaaataattttgcgagtaaattatcttctgcttgtgacttgcaataacggggaaagaattcaggcagtatgatttaacagaaatgtgcttagtaggagccatggtttaaaggtatgtgtgcccccaaattcatttgttggaaactaagacccattttgacagtattcagatatggggcctttaggatgtgattaagtcatgaaggcaccattctcatgaattggattggtgaccttttaaaagggctcggttgggtccctgttgaccttctgccttccgccatgtgagaatgcagcaacagggtgccatcttagaaacagagagcagccctcactagacaccagaatctgttggtgacttgatcttggacttctcagcttcgtgaactataattaacaaattttagtcctttataattacactgtccctgtctaaggtgttttggtatagaagcccgagtggaccgggtggtagactaagatctaattaactctgtaaagtcaatataaccgagaatttctctaagatattttcaggtggttgcagtctattggcaatacctgactaaagttgaaatgtttcctagcaactaactcctttgctgaaataaataggccaatgtttgttccctatcactgccagacagaataacctcaatgtgttaatgatggaaaacccccagaatccacaggcagaaacaaattgtacttagtaggcaagcagatcaattttccaaatctattcagaattcaatgtgggtagatttataatctgcattttggcataaatctgatgttttctaccatataaacattaacagtaggttaacgtttaacttgaatgcttggtgtgtgtatgtgtgtggagggttgttaagtgcagagctctgtgaccagttgtacttgttccttatcattccatggccctctcagtttgtaaatcatgagttcagactctgtattgtcagttgtttcatctggtttcaggggcccagattattgttcctctctctctctcttttctttttcttgagaagcagtttcactcttgtcacccaggctggagtgcaatggtgcaatctcggctcattgcaacctccgcctcccaggttcaatcaattctcctgcctcatccttcccagtagctgggattacagatgcctgccaccatgcccagctaatttttgtatttttaatagaaacagggtttcaccattttggccaggctggtcttgaactcctgacctcaggtgatccacctgtcttggcctcccaaagtgctgggattacaggcatgagttactgcgcccagctattgttcctctcttaaaatagcttg

SEQ ID NO: 41273 - DNA, 747 bp, Homo sapiens
ggtattttcttaattaaatatcgaatttttcatgtgtgattattttctgtatgtaattatgtaatgagaagatatttgtctagtatttaaataggttctgcagaagatatgtggggttttgctcagatcttctttgcagagttgaagaaagaaatgtttagatcagtttagtttcattttgcttaaccaaagatccagaatcctgttgagagagagagaaataatgaaagtaaaatttagctgtcacagagataatgtcagtactctaagccttattttgggttagttttggcacattatggccagtttggaaatcctatgcccaccctcttctgtaactggcataacaatgccattgggattcagctatgcaagtacctccacttttcttggcatgccatctgtaccaagcacatgctctgagttccatgggtacacctcatcactggaacttggcatctggtgaattgtttagacttgtgggagatcatctagacttgacttttcctgaagatctcctgcatactaatgttctcaccgcttgccatttggagctattgaggtctagggcactaacaccatgaggagagctgctgttacaagaattgtgctgaatatgaaagagggactcttccacatgcccttattgcttaagcatacttttccattgcatgaagaatattgtgggttgttcatgtcatctttcaactcaatcttcattacaaaagagattaactaaattcttat

SEQ ID NO: 41274 - DNA, 1402 bp, Homo sapiens
caatacagatgaaactttgctcactctccagctgctcagctcctgctgtacaagcccagttcctaacaggccacagactggtactggttggtgatccaggagctggggagcccagctgttaagaataggtggaggatcttcagcagggagtgtcatgagtttcaagtcgttgccaaatgaataacaaccatgaatacacatggtatttgcctttcacaaggtcagagatcattctctccttgcacagaaataccggaaaggaaaagaagcagattctaaaacaatgacaatttgttcatatttgctctttttcttcccacttggttacattatttttaatcttaaaagataagttagtgaggatgagacttactggcaaaactactgcagtataaaatctgggtctttgctttactataggttttagaattttagcatttatataatatctcaagcattgaaagtggtatgtaataagctctggtgcaaaatgttaagtgttccttgtacctgtacatgtgccaagtagataaggcactgtgtgccaggtcactaaagtcatccactatgtggatgcctacattcctgtttgctgttataatgatcctttgggttttctcaagcttaataagtctattcccagaaatacatcactcagtttggggaataactgggtgtgccctgaatgaattaatgagttaattaatttagcatgataattcataaataatggcttctaccacacttatttcattttaaatttcagaaatactcagagaaagggaaaatcatctttatgctgtaccaaaaaatgtaataaagttatgttgtatattgtaccattggaataataattactccagtatgaacacagaacttcaaatataatctgattttttctaactctgttaactaagactttggaggaaactgaggcatcatatattatttgcatacaagtacatctctgttaaaatttttctatcagaaatcataagttcccattgcttctctggactatttgataactgtaacctctactaccacgaagaggaagacacagcacaggggatttccagttctggcttcaaaattcatattacagtgaaactcttttgacccatctcttgaggtcctgaaatttttatcttactgctttcaaaaagtattactgtaaaatctggaacccaaaggggaagcatacttaattttgaaagttcctaaaactaaaatttgtttacccacaccagatttggattatttatttaaatttacttgttaattgcctaagaacaagctccttccctcattccctcaaaacagaagataaagcatttcacattctcttcaagccccaagatagggataaatgttttgaattatgttagcaaaattctactgc

SEQ ID NO: 41275 - DNA, 2231 bp, Homo sapiens
ggcagtttgatctataaaccagctattttacatgccacttttctatccaattgcataaatccactctttccctttatatgtctttttcatttccccgcattttctcattgttcaaagccctactattgttgtaaacagggtggcattaagacaaaggtttgctcttagaaaaagttcaagaagggagcccccaaactgtctgacacgtttaagtgtcacttgtagtaaccatgtatctcaatgtgataagccagaaaaaacaacgactgcctgttcctggaactgggaagtggccatgccaagacttccaggaataacagtgcatgaatgaaaccacctgggaaccagagaatcagcttggagaagcaggaactttgtcaaatatttaaaataataagagctaactttcactgagtactttctgtagcgccaggcactgctctaagaattttacattaatactctgtagctcatttaatagttacacaatttcagagatgaggcaatggaaagaacatatataagaagaaagtggctgacagtccacagacgtgaagcagtagaggccgaatttaaagtcggggagcctgactggagctaatggtcttaggaaccgtgctagataccgccactatctttcctaagctggtattgtagagggcctagcatagatgtgggctccggcggacttcattgaatacttactgataaatgacagcttgcaggctgtattaaccattccttctaatagccccactacgctggcacatgctcctgagcccagactctacccaggattcagggccgctctctacctgtaaagcagtgtagctaaggggaagctgagccccgcaaggcgttttcaggcagggcaccccttgtcattcgaatggttctggggtgagcccgggtgccgctgggccgcctggggccccttgccgtgtacctgctccacttccagggtccctttcagaggcctcttgcatttctggccccaaccttcaccccacatcctccacccccagagcagcaaacacaacctgcgggccctcgcgccggttccccacaagttgccctccacacctgaccccggccctggccccagcgcaggctccgcgcagttcccgcgcccaagtccccaggaggcggcagagaaagccgcccgcgcacctctggctgccgctgtttccgctcccgagcgagacaaggtccagagagccggggccaggcgatggcttcctcttctgcgcctctagactgccgggcacagctgctgcgcaaccttctcagaagtcagccggaaaagggtctgggagtaacctttgcgccaacacccgcggctcctggtttcgtttcctgaatcttacgtacacaacacggtttccttttcccggttcccgcgctggcgctcggggacccacgagactactggagggtgaaggagctggaggagggactgcgcccaccccctggtgtgaggcccctcccctacccccgacttgctttcttgctcattggagagactccagagacgtttgtccggtggttaaggagaggaactgggactccgacactaactggaactggaaagtcatcagctggggagtggcctcccccgggaactttctttactctggctttgacctccatccctcggaagcccgtggcttttcaaggcgagggagtagaggcagcttaagactacaaatgaggaggggccaaaattgtttttctttatggtgccttttctttcttgctgtcttgctctttctttccttctattaaattatgtgatattactttttaatttttaagcagttatttgaatgttttcgagctcactttatttttttataaatattgttcctttttaaactaaaatagtttttattctgtgtatttaagttatttgtatgacatatccatcaactcctataattacacatttccccccttggggcaagagcagctataatctacttatttagcataaatcctgaataccactatcattaactatagccctcatgttgtacattaggtcttcccatttgttcatcctacgtgtttgtaactttgtatacttttacctaaatttccccatttctcctgaccccactccaacctggatgaccctggataaaccagtggtccccaacctttttggcaccagggaccagtttcacggaagaggatttttccatggaccagggccgggtggcagacggttt

SEQ ID NO: 41276 - DNA, 786 bp, Homo sapiens
gagtatttttcatagattccgctgtaaatttagtttatgtttaagtgagaaactttgatccagatagcctcaaaatataagtaaaatacataactttcaatcaaaatgtatgaaatggaaacaataaagagcatgttggttttgctgatgttaagggtttttgtctgtcttgagatttgagtaggaatatctccctcaggatcatttgccttctaaagcatctaggggtttggaatcatgaccagggagagagattccgaaatgcgagaagatactgtaagaaaaaaaaaaaaaaggaaagaagcaaaaagtaaaataagtgaagggaacatgtcctaattaaaaacacttttctatcttttagaagccccaaaatgcacacagatgaaagcagcactgcttgttttattagttgcctaaccaatcaataccatcctggaagcaacaactgtataaacacaaagcctccagcaaatgctttgtagagccacctgcactctgatctaaaatgaaccggagtgacatttcaaacattctcatgagaagttttctactttctcaggatacaacattccacattgtccataagactattggaatatgttcagcagcattttcattccagtatgcacagtacaatgttttcaaatcgtagaagatgtgtttgtccttgatgttgagcacataaagctgatattttgctgttactatttcaaaaagattattaaagtagttacaacatgttcctgttaagtactattgcatgtattcctgattcatattttt

SEQ ID NO: 41277 - DNA, 1269 bp, Homo sapiens
cattagatggtttacaaagttagaaaataaagctttttgctaatatcaaatatcaataaaagaataattacctagtcattgcccatatcagttaaggacaaaaatctatatatcaaggcctacatgtttgatgcatcatgtcagagatgaaaggaacttttcaagttattagcatgtcgttttacaagtagaagaacccaggtccagaaaagtacagtgatttacccaacatccacagtaaattagtgaaagagccagaatgaaaacccagaattataagcacactgtggaaaactacagtctattctgtttgccagtgcaaacagaagcctcacttatcaaagtccagattctcctctttggaaggggcagctggtcagggtcagttgcagagcctcctggccactgatgagtttactcattacaaaatgatttgaactgtggtccccaaaggtactagcatgtggactgacacgggctaccaaaaacaagctcagtgtgagtagttgtgcagtttggctctacacattggtaaatgactaaagagttgaagacgagttgaactccagcccatgctcaatgtgatggttaattttacatgtcaacttggctgaaccatagtgcccagatattttgtcatacattattctgtgtgtttctctgaacttgttcttgttttattgtttttgtttttgttttgttttgtttttatgagattaacatttaaattgataaactctgagaaaagcaaattatcctcaataatgtgggtgggtcttgttcaatattgaaggcttaatggaacaaagtttgaacttccccaagaaagaagaaatgctactcacaggcttcacctctaaaagttactgcaacttttccctcagtctccaacccacaaacccgctacattagactttagacccacaagtcctctataattgtgtgagtcattttcttaaagtaaatctgtttctctctctctttttgttctctctctctgtctctccacatacatatatacatcctgtagctcctggtgctctggagaagcctaatacagcctactcaacattcatgatggaaggtgtacttttctctaatcttcatagaagtacttatatgggctggcaaagtcctgtctttccttgtcacttatttttcataccatgtcacttatttttcataccataaatagtaataagttaaacactaaggattcattctacttagttccttgaaattcatgttttaaatattaacaaaacttaa

SEQ ID NO: 41278 - DNA, 3290 bp, Homo sapiens
ctggccctcccagtccgcactgacttgcgatgtcgaccggtctgcccagaccacccccacctggctgtcgggcctctcggtcctaagacgaggggttggcgcggtagggtccgcacaggccaaatgggatccgaggtgtctaccgcaaccacgcccttgagcgctgcggcttcgggaagaaaacagctgctgctgtcaggccaggcctggctccgcagcccggagggccaccaggcggctggcataggccggggaggggctgggatcggtggctgcgatgccctgtagagccgagggaaggcgcgagtgcacgttagagtgacaatattggccggaccgagccccaatcggggagctcacggccagctgaattcgctgacgtgtaggagaggaaaggaccccgagaacccggaagcctagattcctgccggagctgcaagtgctgcggaaatgggggaagaaggtttctgggcgctttaaacaaatggctgcctcccagcgctctgagttaagggaccggctacctagcgtctagctgaggaggaagacgcgcagctggagaactgttgcctttgtagttgcttctcccgccgcatccaggaaaaacaggcgctttggggctggttagaacaaacaaagccccaattcccgagccctgttgaggctcggacagagaggtttgcgcacaacctgcgcttctgcgcaatcagcggctcctgagcccgggtctccggcaccacctggtcgctggattcccaccctacaggagcacagctagtacactgaacagtctggaaggtgttggcacctgccatttcgcgggacactggcaccattttataaaacagtgatagaaagatgcggaataaatcagtgttcctatttgcccccatttttatctcctctgattcctgccagcatttgcaaacccaaaactttcttccttcttctctttcaaaaaaaaaaaaaaaattacaaaaaacatacaattcagggcctgcaaaagaaccaaggttattttgagaaaacagaggtgaaatggaattagaatttggtgcccctccccaacaacccccacccccaacaaaaatcccgccaaacgcttatccgatctcgtgagcgcctcactggacattcacgtaaaacaaaaacaattatttcgctccagacgaggagcagaggagaaaacagcagtgcactgagtgataccggcagccgggaagttcgcaggcccctaggaggccaggtgaggccgcgccccagcttgctccggagctgcaggaggcgccctggtctctgcgcttgacatcacccccgccccccgccaacacccggcctccagtccttccccctccctccagctccctgcactgcgccctgggtgggtgggtgaatgtgaagaggcggcgttgggctaggcccctgcagcccgctcggagcgtcctaggcccggggctgcgctgtgaaagacccagattctcatcccagaggcccagcagtcctgaaaggcctcctctccgaccctgagccgggtccgccgaacaaagttcggaagctcgggctagctgggccagcgccattttctcgcacttgtggctggatctggttgtcccggcgactgcgccccggcgcggtctcttttcctctacctcggatccccagcactgactcgccctcagacgccggggaaggtgtggtgagctcccggccccggccgaggggtccctggagaggagctgggtggcggtggccaggccgagcgcggttgctggcccgcgcctccctccccgaggcaccattgttccgggatcgctgtgaccgccacaaagtgaatcctttcggtgcggacagtcgccttcaaagccaggccccggattcaggtcagggagaatctcagctcctgagaaatttgctcctgtttgccgcttctgctactcgaggaaatgaaacgccattaatatttgaaaaggcaattattttcctgttgaatcgagaactgtcttcatgaataatttgtagtgaggtctattgccatttgagaaatattttttttccctctctctctctctctctctctctcactctctctctcttctttttatgactaggagggggatttgagggaaatgcccgagcaggccagactctgtagttcgttgttggtcgtgtttgtttgtttgtttgtttttgtttgttgtttcccccaccccccaccgctaatgaatcaggaccgcgaaccgaaagaacgcacaaaattctgtcctgaaaacacgaaaacctgagccagccgtggcgcactgaacttgcttctctgctgtaggtcgactgtgctaagaatttaaccattttctgcttcacagaattcaaacagtgggccggcaaagagctgtaaaagtttgtttgtttaaaaaaaaaaaaaaaaaaaccctgtcattaaagatgagttccttctccagctcaggactgcgagtctaccttccgggtgtccgccgccagctcccggagtagcaggcctggggccaggattccagtgtgacctaccgccccttcccgaagctaaaacctctggtgagggggtgagatccatgcgacattgtgggaaaccctgaaaagaactcagggaaaccgtacacttccagacaagctttagaaataaagtgccaggctccaagtggactttggtctggtctccgcatgtgccagtgtccgggccatggaccttccccgggaagggagagtttggggagaagataggcgttagaacaactagccttaggaagttctttgactccaacaattgtcgatgttccagcaagaataggggcgagtaaggcaaggcaccgggcagtaggagaagtggggcaccaagctggaattcattttattttctcctgtccccaccagtccccttctcccgcccccaaaatgggggaggggagaagatgttgatttcttaaacttccagggaggaggagcgagaaaaccctaactaaggagagtacaaacaatggctgctaaactaattaatgtaacttcacaggctgttctggaagtgtgaaaactttctccttgcagttgtattaattagagatgctctggccagaggagttcaattttgcaggctcttgaacgatactcctttttttctgttaactagaagtagcagatgtagttgacacatgtccccatttcccttagcagcttggtaaatgatatttaaggtggataggtctgtgctaaagcgaaagtgagggtccaccaaacatccctagtgtccggccaccaaggct

SEQ ID NO: 41279 - DNA, 2787 bp, Homo sapiens
cacttgattttacagcccctggcctatccagaccctacctgaggctttgacctaataaaatctttttaaattgtttctttgtatataaatcacagctttgcctctcagttcatgtacctctcagttcacgttcctcacctacaagaagaggagtgaagaccagatggtccccaactcttctaactacaaggacatggttgggaaaataaataccctgacttcacatttcttcctccctccagtctctcactagagctattcattaactaaacccaatcagaagctctagaatggatggttcagaagcatttaaaacccaaaataaacaatgaggagtctcagcatttaatttatcaaaattatgattgtgtccccttttagaagcaatgctccctagaaccttaaattccatagacacaaagttatggggacaggaatcaaaaattctaccagtaggctattaggtaaaatagtgagagcagccaatctcatctccattcctttgtccctagatgttatattctgactgtgtagatagagtcaaatattagctgctggcttaaggggtattagctgcatcttgtaaaatggtaccaaatctcacagagtatgtttttagctcgcactgtagctgagcttcctcaggacattgtactcttctatcaaggtaagtgttttggccttaacgcaaataagatcaaagtgaattccactggcatcagtccaatgtctcacttcctttgctttaaaacaaatctcctggtcaaaggtaatgttttgtggattgccatggatacagcaatctgtaatccatgaatcaagatgctggcagaagccagcaggaaaggcagatctgttcctgaatacacatttgtccctgtgtggacaactgctgcctcctccatgatgagcaggttgccagccgttcccttaatatgtgatgcaggaactcattgctgtcctctctgcagtcaaattgcacactcagttgagtgtctagaagccagatcagccttgatgagagcaagattctgttgttgagctcacacataatctccattcttgatgtcagggccactttgtagtggacccatccaacaggcactagtgtgctggaataagaagctgtctgacatccatgatgggatcaattatctacctaatgattaaaagccctcacagatgaagcccttgggtaagcatttacatgaatcacaaatgtgttgccctctgtgcccattataatagatccatctatatacctgttccctagacctcctttgtcaccaaaagtgttcatttcaaattcatgaccagtcgaccagttcattagccacagtttatgaatcaagtacattcatacattaagccatctttccttccagaataagagttcagccacatggaccacccaaagctctacacattgtggtgagttcctttcaccactatttttcagggccaactctgagtgggtctttagttcagtagttctgaactacccttctggatcatgagaattctaatagtgtgagacaggaggaggcagagtcctgttttccttacttttaagcccctaactcatccagatcgtacaatggcttctaaaatttctcttggatttatgaaaagtgcagtatacacacaccactacacatacacagaagcccacaccagccttggccttgaactagaacgtgttgttttggaaatatttcttattgaatagcaagtttgtagcactaaaagccaactagaaattaacctttccccagcagtagaaaaaggcaacataaacattcttttggaattacagatttaaaaaggaattaaacattgttttagagctaggttggtttcctcttccccacttctattgtcagtgaacttactctgactggaaaggatagcactgatgtcaaggaaagcaaacagcacccactcatgtaaacaatctcatctgtaattcattaaccctgctaccctcagcctcccaggaaaagtgtctcatttattagcttccaatcctaagttcatgtttgtctttcagttctgggacattattgagcagtacaggaaagagatgttcaattactggtgacattttttacgtggagttgccagtttacaccagtggtacagattgtttactaaattattttcacttttgatggattagatatctcagactcctcattatttatatttcttacccattgaagaaagtagaaaaacacatattactaaggtaccccactctttctcattctactatctaaaacaaaagaagcagagaccaaaatagcagtggcaactggaaaacagcaaggcctcccacagcctgggatactattggtatttgagacaactctcgatggtatgccagacaatatcaggtggtactctaatcaggcaaataatggtatcagaaacctataatgagaaaattattttcttttctaatttgcttcaatcctttaatttcttcagtaaagaaagtctcatttgggggctagcctttaatatctaatgttttaacagagagaaagcaagcttcaggcttagaacatttggtagtcaacaacatctagctagaacttaccaacgttattattttttcattatctctttatggcaattgatactgatggtatagtagtgataatgagatttctctttgataaattttaaaagtaagttgttttaagaaaaaaatgttaagtaaataatagtacaagtgatacatgaatacagtaaaaatctcaaaatgtgaatacaaataaagaa

SEQ ID NO: 41280 - DNA, 2208 bp, Homo sapiens
tagtccctttcatatgttattggattcaatttgcctacattttgttgagaatttttatctatactcttaagaaatattgatctgtagtctcgtgatgtctttatctggttttgttatcagggtgatactggcctcatagcatgagttgggagatcatccttactcttctattttttggaagagtttgtgaagaattgatattatttcttctttaaatatttattgggtttttaaaatacatttttaaaatgcaacttgggtagcatgtccaataggaacaaatgagtgtccacccttgaatttcataaccctggaattaatccatgtaatctatgatccacaactgtattaccaaagttcgagttactcataggaaagagaaagaagttctctaattcgtccttaaaagttttccaagttcagaaaaaaaaaatgttgaagaacacgaatctccgcaggaaatgatactcctgtacccccagctcgctctccctcacgacccctcgctaggcggggttcgggaccaggtgaacgctgatctgatagttgacacgggacgactgtggcatcatccttgctgccgtcaatatcccgagagggaggaggttgggccgggagggtctcccggggcggggcggaggaggagggaatgcaaaacagagcctcgtccccggaacccaagaagcagcaacgcccctcactataaattcggagctgcctcctcgccaatgattccagcgcctgacagccaggaccccaggcagcagcgagtgacaggacgtctggaccggcgcgccgctagcagctctgccgggccgcggcggtgatcgatggggagcggctggagcggacccagcgagtgagggcgcacagccgggacgccgaggcggcgggcgggagacccgcaccagcgcagccggccctcggcgggacgtgacgcagcgcccggggcgcgggtgagtccgcgcggaccgccaggcatgcttgggggacttcaagggcggggtgctaagtttcatgtcacggtgtcctaactgctggctctatactgggaagctctcggggaccaaggaaagagcgaccgtagttctggtcagcgcctgcccctggagctggccacactttcccaaatcaggtgaggggcttctggaatgggagggaacaaggtaggtttgtttgccacgtgcctcgaaattctcaatccattttaaccaaactcttccgagtgcaaggaagaaatctacagaaataagatgcaattcaataaactttcttcctgaggcttttagttaactcttgtattttagccatcatctgagcgggaagccggtatgactctgcaaggcgttcgtttaaaagttgtgctacttttgaggtgaagttaagagtgtctccatccacgccctctgcttcccagtcaatgtccctgcactgctcacgtccctttagctctctccctgcaaaccatagcggtgggtcctagacacgggacatcgctccaaccttggccaaactctcccaccctcagggttcccagatgtcctttgaataatcaaactgaggaaggagaagcaagatgtctccacaccccaatccctacagccttagccaatgcatgtgtgtaactgagacagaattttagcaaaaggtctcctgcttccaggactaaacagagcctctggcaggccactgcccgacacccaactccatcctccaattttcttaaatgtccaggtaaacatctccatagtgccagcctgctatagtctcccgaagacctcagcaattcttccccaaagcgtctccttctgcaccgtttttttctttgggcaaccatttgtgacctggctattgagcccacctgggcctcttctctttgtttgctgatagcctcgttaagtattaaaaacctactcccccccttcaggagccctcttttaatgaaagtttgggtactgggatcagatttgggacttggctacatttatttcctgtgtcattctgagaagagaaagtaatagaggcaagaaatttggcaccctattgatctattttattactttgttgagcaacttgtgcttcccgctgaagatgctgcatcccaacatgattctcttattattagttaccacctgagggttttggatctccaggtgtttatttcacatagcatatgctttaacccccttataagtcttctctaaggaa

SEQ ID NO: 41281 - DNA, 816 bp, Homo sapiens
taacattcacacatttgtagcaaagcttccaaaataactatgatgttttgcttaggaataacaaaacatggaagaaaacattctgtgaaattttaaactttttcaaacctttaagtttcagatgaataagcaaaacatacttaagtctaagaagctattttttgtttgtcaaagaactgatgttataccagttctaatattaattagcaactttgccctggttttcctgtaaaataatctccaaggccctatctcaatctgtgggcagtatactgaaatacaaaaagtgttcacaaaaggaccttctgaactttgcaatctccctttaaaacttttaccaacttaaaactacagaactctgatctcttattgatttaaactagtgatatgtaaacagcacttcagagcttgtttcacaggaccaaaaaatttatgctgaaatctactcatgacaaatgggaaaaccctgattagcacatttaaatgaataaataaagaaccgtattcaatggcttaaaatttatagacctgcatcatccattatggtagccatttactatatgtggctatttacatttaaatataaacgtattaaaattaaactaaaaattcagcccctctgttgcattacccccatctcaagtgctcagtagacacatgtggttagtggacaacacagatttagaacatttctatcataggaagtactactggacagtactgctgtaaacacacttattaataatgcagcagactttcttggccacttggtaagaaagttttctgctcttttaaacttatttgggaagtttttaa

SEQ ID NO: 41282 - DNA, 797 bp, Homo sapiens
ccagaattgtttctccttgcctacaaaaactactccatgcctttattagtcagaaaagcagttttgtagagaaggcaagtaacagagaatcaagctaagtaagtgaaactctgtaattgtcaaacttccagaaagtaacatttgtaactaagtatggtatctttgtcctctctctttctctcttctctccacttggtttctaatgaaagccttgattacatgttatatttaatgtactgttccacaaagaagaaaaggcctaatgtgaatgcaagctgaatttacacttaaatattgcagtcagttcagaccggaaggatacagatcgatgccctctgatcctgtcagattccccgaagtgtctatggcagtgataccacaagagggcagggtttgacttccggactaggtggcttcctcccttcagtgcagaccttggggccacgacaacagccatcaatctcttgaaaccctaatgatgaatctgagctcaaattccctcttcagccttatctgtgcagaatcctgaagttatgaaaaatgcttacagaaggtaatttctagaatgatctaacacagcagatatttagtaaactccctgtttgagagctcctactaagcacccaacacagctttagactttggtcacccaataggattttatcttttgtgagggatctgtagttttccccggaagatataatgcatgaaataaaagcctccaataaaattcagtatacagttaatttatttcataaaaggtgagagatataaattatcaaaggttaaaacaaaaa

SEQ ID NO: 41283 - DNA, 3107 bp, Homo sapiens
tatagttactaatctactaaatactgcaaatatatagtatctgcaaatatatatataaggttgaaaactaagctcagaaatgagcattaaaaacttttccagatcaagggagtgctgtacccccaagctgaggtttcataggctaccatcatccaggcactcagtcttcccaagcaagttaattcccaccaaaaatgaacacagtcaaagattacaaaacctaagcagaagtccattatcaagaaacagtgtccacaagtgcaataaatataatttatacctgaggaactataaatagtaaagcaattgggtaggggctcttaacagacagatattcaaaatgttaaggaaaataaaagaagaagtagacttcgtaaaataggaacagagggctaagaaataagaacaagtagatctgaaaaagaaacgagtaaaaagcctagaaatattagtgccaatttctatgggtcaatgatttcacaagtgaatagctaacagttatttcctgtggccttacttggcagagagaggtgggggaagcaacataggagcagaaacagttcctttctaagtctgacttataaaataggaacaataaagacaacagtttattgaacaggatggtttattgagctgtccagcactataagcaaatggcttacaaacattttcctactctttttgatgcttgagagagatactttgatagaagattattccaaaatataattacttggtcatttagttctctctttattatcataggaaactatggggaatttttttttctttagattgcaaactagttttaaaaagagcttgtaatgaacaatttaattagattggttttggcttgcctaaaagcttaagaaggtattaatattctaatcaaaagtcttgggaaagcattcttagaataaaaaaaggaaagaaaatcttcattcttatgctttaagaaccaggaaagctgtcaaaggatataaggtaactcttacaaaagcaattgtaaaataaacgtggtttggccacaatgagccaacacctatgtttgccacagacttagattcccacctcactcatggcaaatttattcagctgcttaagattattttttactcatacttcgaaagaacaacagcctggaatttttagacttttaatggcaatggaaggaacttacctatgataaacatttttctttactctcacgctttcttaacccatggctgttctgagtcaatgtttgccttgcattcaaaaaataatagtaaagattcaagtaaaacatattcattaagcactatttgaaagatataccaagtgctttaacattatctcactttattcctacaaagatcatgtgcaataaatatcactgttcatgtttcctacagatgaaaaaaaactgagggtcatgttcagagaaattggatgacttacccagagccacacagatttgtacgtggcaaaggaggattccatttcaagtctttcaaccccaaattcatcttcctttctctaaggggaaatggtgctatggaattcatgtaagccacagagcttggataaaaggaatagtaagaccaaaaataggaaaagtaggaagaggtggatcctcctatgtttttaatcagggttctatctacctgtaactcttctgggaaaagaagcaggatgtgactgaaacatagctgctttctagatctcacaaatctggcttttctagtcaatcacatctctctctccttcggcttctcaccaaaccagcatccgttcagcttcaaagaaaaaagagccctactgtttcccactcatttatcatcaatctaaagtaactgccaatcacaaaagtcccatctttatttctttccttagaaacaaatttctctagggaagcttatcagtagcagaagtgcagactgggaaatggcctatgtcaccctcccatctagaaatgcccagtgcacatccagatcccacacccccaagagcgttgtgcaatatctgttaatttatgagagctgtttcccatagatgatgctgcaggcattagtaaggagggcaaagttcaagtgatgacaccatctctactccacctggctggtttccaggtgccatctcctgatccctctccccacccccactgccctctcaccatccttcccccaaaccccacactccccaccaatctgggtcagtgataaacacagagtattccacatgcctctgatatgatgtaacattcgacacactaaagataatactgcctttaaggctcctgtccccctggctagacttaaactgtgtagaggaggagaactgtgactttattccccttgcatcctggacacccacacatggtaggtgttcagtgaatatgtgatgagttggtgaatacccactgaatgtgctatttgcattgctacttccttgtgcttccttccactgtttctatcgcctaaaattcttctccctttttcctccaccctcgagtaggaaaaaatttgtttctttattgggcagggagttctggtcattatacatttatgtaaaatgttcttctaattggcatattccatgctatgtccagattctttcaagcgaattctcattaaggtaataatacctcaccgaagtttccagggatgatcccctagctgttcaaagctaccttttatatattaaataccagtcaatatgaatcaatggtaactgaaaaaaaggctgatagcttgtgaaggagttggagtacaaaactatgcctataaattgatcctcacaaaggcagactttttcccacagaaattgtattatgaatgctagttatagtttgagactagttaataaaattctactcactccaaacataggattaatggaacccacatgagttgtgtgctgtcaaagtcgagtcaagaggagagagaaggagaagaaaatttcctccctgttctcatagctcagggcacccaagggattctagagcgtaaagtgtactcccttctattttttactgcccttattcccaagctgaaccaaatatttacctctgccctcattttcagttatggagttcactcaggcccttttcaaccttcgaggttcct

SEQ ID NO: 41284 - DNA, 706 bp, Homo sapiens
ctcctggtgcctcctgaagagtgggaaaatatagatactgatgtctctaactggaaaaaaaaaagattcacaagagcaaaattctacatgtgaaataacacatgtattgtgctcatatttgcatttatatgcatgtaaaattgtgatatttacttttgaaaacttgtctaagtaggtctaaaagagccttttaagtatagaattaaaatcttaaagataaaaaattgtaatcttattggtagcattttattctttcttgacagaattgatggcatcttaaatgcagtaaaataatacaaatacttacaaaattatgggttgatctgtgggagcaaaggtctggctttcagaggtcagaaggctgaaggaatcacagcaaaccaccgctgatgatgtcagctccctgcagcaccaaagcaaatgattcacaaaggaatgcccaggagtcaaagtaaacctcatgactaccatttgccatttacctgcccacctgctgtcagagagtaataccttctcctaattttccactttcaatatcccaagtaagtgtttctcattaacagaatctgaaccagaattccattggcaagagattctgggaaatgttgttcctaggcgtctctcctaaaatgtaatactgtcagccccttttatataaaataggggatgggggtgatagtgcgttaacagtagacaatctgcacag

SEQ ID NO: 41285 - DNA, 724 bp, Homo sapiens
tggtttatctatgtttgatatgtcgactttacttgaggccctacctcaaatttagttaatcagaacctccaaggaaatatagtgcaaagtatacaagtcttataaaataactcttatttggtacaagttctattcctaagtgtttacatttgtgtcactggaatctttggaaattcctaacaatggggcagaagttaattttctgcatccccatagtttggaggaaagggaaacattctgttgttaatttgcacaaatacaaataaaccatatggctttctgaatgactgagtcactatgacacccagccaactatgcctctaccatttctcacatgtctcccagaaagctgtcaacacagttcatcttaatgactcatcattctgtcatctgctgccctctactggaaaagaatacatatagccaacagtgtggtccagaatccagaccaacctccataaaatattaactgtcacacagaaaaatcgtccctacctctgtggttggagtgttggaatgatataacaagaacatgacaaatgtcatgtaacaaaaacatgtcatataacaaatgtcatataacaaaaacatgacaaatgtcatccctacctctgtggttggagtgatatagcaaaaaacatgacaaattacagaagagtcaagctacaggttttttattatggaaaactaagtttgcgttgaagtaaaagagacaggaatcaat

SEQ ID NO: 41286 - DNA, 935 bp, Homo sapiens
ggcacgacaatcacttggaccagggaggcggaggttgcagtgagctgagatcacgccactgcactccagcctgggcaatagagggagactcagtctcaaaaaaataaataaataaaatatgaaataaaataaaagtaaggtgagaacaagtgcctttttattattacacacagatcaatatggtctttgagttgtaaaatatttcctcacttctgctttgtgttacttgatacatgcttctgattgctttcacttttggttctgatgaactggcaagttctttacttttggagtttcttgtgatagtaagatatatgctcagttccaaaaatatttcatgtttctttctgtcaaattatcgagataattttgtatttgggtttaaacagatttaaaaagttactgaagtattcaccatgttaatctccatcggcaagtatttaggaatcacggtctgttaatatctatattctagaaacagatttgcaatcaaaagtttcagagcttgtgaacagactaactctatatagcataggctaaccttgagccaaagattttttcctgccagtttgcatcaggaaaaccccttctgcagctcaggatcttccttgaatactacagagctgaaagctgtcaccagaatttgatactacaccattctattgccaaacggggcgctgcagccaaaacagcttggccactgttaagcactacctagctttcggcctggccaaaagcttaggagcagtgacagtatctaaccttattgggcctatcaaaaaatcagcatgtgaactctttggcaagttctgttggtgtcagccgagggcagcactttctggaagcaagtgagttctaccacagggagtgagacagaacttcccggccatgggccctgaaatggtactcatttaaacgtctggtatgttagccta

SEQ ID NO: 41287 - DNA, 1503 bp, Homo sapiens
gtaatctggggtttgtttgcttgttttttaaggttccctaacccttggcttcttggggagtttgatgccgcactcagccccaaagtcccccttaactcccaggtttagcggcgacagggggcgcgcggttgacaagggcaggcgccccggggaagtaggagcaggggcgccggtgagccgcagccgcagcggcagcctagccccgagggagggaggaggagccgagggagacgcgggacccggagccccgcgggccaccgcccctgccggccgcgcagctgggaggatgcggacggcagcgagagcgtgcgcggccacgtgacggccgctataagagcgcacggggcagacgctcggttccccgccgtgcctcctcgctggccgcgctccctcccggtgccggcttctctgagtcaccaacctgaggctgccccggccgcctgcgcacccggcagcaccatgacaggtaccgccgcgcagcccgccgccgccagccccgggaccccggcttcctgcccagccgccgcctcccttctcctccgccctcagccccggagtgttcccggcaggacgaaaccgccgcaaagttgctggctggccgcagccgggcgtgtttctgcctgcgtcagctgccgccccgccgccccccagagtgcagggatggggcagccgggcagagcccgggccctcggccggagctctcgttcctgcttccgtctcctcgtccttcctcttgctctcacggcgaagggccggcgggcggagcagctgcggcggggccgtgtgggggtggggagccggttcccctgggggttccaggcgggagtccggggcgcagcggcatcgtggggagctgccccggcctctggcggcccggaaccccaggaagcaggggctccgaggcggggatactgcggcctccgcccggctcctccgccgcccgccccggccccggccgccacgctgagcctatttttaggcctttggggccgggttgcgggaagccgggagtcggactagcgtccccgggcgcgagccccgtctggtgggagggcgccggctttggcttcacttgttgcgaggcgtccgggccactccacgagttagccccagcactgggaagctccgagttagctggtccttccgtgtcattgaggctaatagccagggttattacagcagttgaactgccacaaagattgcaggtgtaacccagagttcagccgtctttaggaagattaaactcctacccagctgtcattggtctttcttggtcatttgtaatgttggctagtctggtgttctaacctgtgttctatcccttatttaatcttggaaatcatccatatccttgcttccagaaatccttgaatcctgctcaccttattacatttttctccatgatcgcctggaacctggacttcatttgagttagatgatcattcattttgcctagcttaagtatttttggtacagattgacagcgatgttacccatgttata

SEQ ID NO: 41288 - DNA, 1127 bp, Homo sapiens
attctcctaagaacagtcgcttatttgcgatgcgttttccttgcaagtggcgcatatctctactagcgcctctgcaaatacttatctgcacgtctgtgcatacagataagctgtgagccacttggggacaaggactgtcttactcggccctccaccgagcacaatgcctggcgcacagtgggtatctaatggatgttttgttaaataaagcactggccgagatgctttaagccccaggccccccacagtcggtgacagagatttcccaagtccctaacacgggactcgccctaggagcccctactcgccagcgaagacaatgcatttatttctccggcggccacatatgcgaccaacagaacgaatacagctgcacaaatcgcccagggaacgcagaggaacgcggggaaggtcaggttcatttggggacgcctccaggccgttagaccgagcgccccaccccctccgcccccttcacctcttgaacatccaggacatggcgctgagtgggatgacaagaggagcgcctcggctcccctggatcgttttcgagccgcctcgatacgcctccttccaggccccgcagccctgaagccggggacaaattccgagcgccggatcaggagcgcacgactgaaaggtaagtcgccgcgagtccagtcagacgtcgacgccgtctccttctgcaacaatctgggagaccagcgtcgctctgtgactggcactaggaaagcccaatcacgaagaggagagtgcggagccaaaccagtcagagcacagaagggagggcaactccgccccgctgccattcaaagacggcggggggtccgggctgcaagggtggttccatccgggttcttccccgcccccaaggcgggcgcgcgggaaagccacgaggccccaggagtgcgactgcggtgcctgcggtgccggtgttttgtttgattccctgcctcaaacggagggaaacgaccttcctttatcctacgagtcctaagactgaaccccattctaaaggctctaccgtatccttcctcttattttcttctcatctaatgtggcacataatagggccttatactaaaggagctccacggtttacgagacctagagctaccggcgagata

SEQ ID NO: 41289 - DNA, 1896 bp, Homo sapiens
gggcctaggaaagggaggcaagtttaacttcaatccaattgcatctaatttacaaattctgaactggaaactgactgaagaaaatgttgcactttcatttatgtccctgtgtgcctaaataaaacagcatccctcaatccatgctaacacatatattttctaggtgaactggacaaagttatactacttgttttatctaaatctgatttttttagaaaagggaaagtgttgcgatcgtgaactccacgttgagatgtcaggaatagataatttactgcatagttttaggagcactggactgaaagccaggggatttccctcctagttcttctatcctctggggctcaaactagtcttttgtcaaatgcctacaagatgaagtccatggattctttctttcaacaaatatctttttgccaagcacgttcaaggctttgctctttccagctgaactattctagaatttccattattttaaagcaactcttcagagtgtttagccccgagttgcaccccatttcagtttttgcaaccccatcctccagaagctcagggactactgaagagacatgaataacgctcctcaaagtaagtacaaaatgttacaagatagatgatgaattgtcagaacgtactcaaaagccaaaacataccgcctggcccaaagcagtaaaagacgaaaggcagggacccagcggtccccgcacccaccggccactgagcatagagcagtggcaagctcgcgcggcggagtgggaggcgcagagaccgaaagcactgcagcgccagagcgcgggctgaccaggctggcgtgaccgctttcccgacgcctgccacgccccgcggcggcctctttaagtagcggagccgcgggcggggccggctggcgttcacgtgacccggcgtcattggctcgctcgcggaagtagtcctacattcgcggtcagcgcggggtctccgggcgccctgcagggcgggcaggctgtgccatcccgccggacgtcgggatggtgcagctgtacaacctgcacccgttcgggtcgcagcaggtggtgccctgcaagctggagccggaccggttctgtggcggggggcgtgacgcgcttttcgtggcggcgggctgcaaggtggaggcgttcgcggtggccggccaggagctgtgccagccgcggtgcgccttctccacgctgggccgggtgttgcgcctggcctacagcgaggctggtgagtaatctagagagccaggggccgcctggggtccagcttgaggcctcctagctagcggaccgaacgtctgggctgtagctctagctagggatgggacttcttgcttcccggaatttgccggatggtctccctgggtctggccgctgattgcttgaagtcgcattgagctatgcggttgtcgcggcaagcataggtatgagcttgcttctgtcggggcggagacgctgacatctcttcgtcttggttttctgcagaaaggcctctggctggattccactcatctcggatacttaagcaaacaacaacaaaaaactctttagtgcatcagatttcaaagacttaccaaaaaaacaagtaggaataaggagactagtactgtatcccggaacctccaagtactcccagctttaacaattattccaactcttggcagttctttcacatctgtacctccatctacttccggtcggtttttgaaagctcacattatgtgttgatttttaaatgtgtgtaagtagaactcagactgcccccctctcttctcttaaacatctgtggccgggcgcagtggctcacgcctgtaatcccaacactttgggaggctgaggcaggcggatcacgatgttaggagttcgagaccagcctggtcaatttattgaaaccccgtct

SEQ ID NO: 41290 - DNA, 3747 bp, Homo sapiens
caaaggaaatgagattttggaattggaaaataaattagcaaatgattttgaacatagtcccctttttgttttgaacaggattctacctgacatacaaagtgaggcagaagtggtttattttaagacaaaacaaatgaatggtctccaaaataattttatttgaaagagaaaatgataaaaaagtagaaaaattgttttagaataatgtgacataccatgcattttattgctttctatgaattcctcatcatctttgtttactttctcggggtgatcagagtatgttttgatgttgtcatctaagtaccaagattcattctcatcaaaaactagaaacagaagggcaaattccagtttccttctgggattgaatactttcaagtaaggtcttcgacaaacaatcagggggccaattaatccactgtagaggtcctggaaacaagaaaaatcttcagtaacccttgtgaattaggtcaggatttcagagaactgagactttgcacccagggcctcaggaattttggagagaccaattgaagtaacagactttgcccaatgtggtactgccaatttagtaacttttcacttgaagtagttaaattggaacaatggtgagtagtaggtaggtcatgtgggtgatgctgacataacagaaatgtctgcagaggcaaaaattagctcagctaatgagcagtgattttaaaagaatcccaaatgaacagtgttggtttgttccataaactcatgaactcttgagtgtgagccaagcgctatggcagtccctaaaaatccatagatgaatgaaatgtgtaataataaataggaccacaaataccagatttactcatttgtttgagccagaacactgaattatcaaggagctacttcccccggctcactcaggcacttcacccacctatctataaccgactccatttcttttctccctccttacagtagaggtccttgaaatttgcctcacgtattacaacggcctcccaacctccagtctcttccccctccaagccttccttcattccaccagaatgaaggatctgaaatgcaaatatactgccattcttggtcaatttttcagtggctacctgtgacccacaagacaaaaatctaaacttcccaaatatcttgaaaggcctttgagctgtatcatattaggaaatgttagatttttgtcttgtgtgtcataggtagcagcatagttgctaaagtagattgcaaacagtttattttcctaggattttaacgtagaattggaccacaggaaaacactaaccttgtcttccttcaattgtgtgtctattttgggaagtgtcacaaaacaaatgatttgtattttaccttaacttgatccacagttgaataataagcccatggaatacaagcagaatcctctgttccagctccagatctttctgggattttccatacgtaagtgagagtttcacctaaattcatcaagtgttaatggatctggttgtatttggtttatattgtacacacacacacacacacacacacacacacacacacacagccttgataactaggacccaggaactggaaatgtcagtgtaattagtttttaaaaattgtggtactcaagattgttttcaggaatttagttttaagatgaactggaagacaaaattttgtcattttttgggttaattttaaattagctataacccacttgccataccacaaagctaggaggtgtgtacttcaatattacaatttgaaaaaactttgcaaccaatctcttcttagcttgaagtgtgttttcctaatatacttttttctcttcagataccaagtgatttttccccagtggctggcacctttcccgtaatctctgcatgtgtgtatctggactattttgtgtaattccctcagcttcagcattggcttcctttccttgtcctctctcatgatcatccttagtgagctcatgattcctggcgaggagccgttagacctcttgatctcatgagtcaccgacttgacacagttatgtttacctccccctccagtccatctcattctatcacaccatgtgctgttttgtcactactcccacatacaggacataaccacaccctcggccttggcattttgaagacgaccagttgcttcaccctcctgctttgccaaggctcttacccttttcccatgtgctctaggcttttctccagtctgatctgcgtttccattcacctcagggcttcctgtgcaactgctcacaggcctcaacttttggccatgcccactcaccaatcccagccacactcattttccatcccatttatttagaccacaccattacatattcatgctatcacactaacctgccagagtccaacagacattcactagagaatcaagcaagacaacagagatggtctcaagtgatgtggtagacgtcttactttttcttcaagcctcagtctgagctgttcctatgtcctcaccctttttctaagcagaaaatttcactagaatataaagtattgattcaccacctgcacatattactgtctggccatctctgcttttacttattctcataagctgcaaaataacattttcttctcttttccacacccctttacaacctgctcttccaccagtggtcagtgcccaaaaccttggggtcatgcttgactcctctcttccctaacactccctagtgcccattttccagcaggtccttttagtaccacctttaaaatggaaccagaatatgataacatctcaccacttcagccgcttccaccatattccaaatctcgatgatgatgatgatgatgatgattttacccagattattgcagtggtccttaactgaccccagattctgtccttgcccccttagggtcacttaaccacacatcaccaacagccccttaaaaggtgtccatcagaacatcagtcttaaatctcgagtctgaggtcctccctactccatctggcccctgctctccctggatctcatctctagcattctgtcccttgtgtgcttttctttagcctctggctgccttgctgctgctcacacacaccaggcattgctcctgtcttcggggcctagaatcaattcgtgcacaattacctgaatttcattacttctcaaactttaggtgttttcagcaatgccacctcctcaaggaagccctcctgacctctctacctaaaatagcacccttgctacaccctgctaagttattgagaaatagtattttcctggaagccaactttacaactaatagaagaaaaatatggttcttattaaagaaaatgctcacctatgtatataatctgttcaagattttactctatgtttattaaagaaacatttgatgatctcctaatatatgccagatactgtactagatagggggaatttagagttccaagtggcagcctctggcccttagaaccacatgtgctagagacaggcatgggaacatccagccacatatggtgtggtagatgccatttgagctgtgttctagctgagcgaggagacagcatctctctgattcacgcttgaggattcatagatgtctactaccttcaggtttttctcttaagctctcctgtggacttttttttttagtacaagcatgtgcatgtacttgcatacacacagacacctccttgcatcccctcttcacaactacctcccttttcactttcttggtccagactctctatgatgagagtaatctg

SEQ ID NO: 41291 - DNA, 5439 bp, Homo sapiens
aggttgaagattaagagagctgcccaatcccagaagcagtgggattcctgataccatgagacagaaaggtagaaaactcggtttccaggtcatacctggaagtggcaggacctctgcggtggaggctatatagattaagcctgagtgctggggccaggtaccatggccacttggcaatggtcctggtggctgagtttgggcagagtgagcaggtgttgaaaataagagtcaccattctctggattgatcaaggaatttctatgatgagcgtttcctcctagtcactaccatataccaatacactgggaataccaattttcctgaattgtataaacccgaattcccaaagaagataaaattattcactaaaaaaatgactgagatgatgtttccctgtccatcccctgtcctggtgggagggctaagctagaagttagaaaaataaagtgtcattatttgcagcctgtgtggagcagcaaaactgtgagtataccctcattttttctatttgttttcactttctaattgtttgttgccatttcccaatttgttaaagcaaaataggaaaagattgggagagacttcatggacacaggtaggcatgggaaaagggcaagacactggggtgaactctgtccctaaacccatagcaaggaatgcacagaaagagtcttaataaatatatgtcttaacaacagcaaaattgttgcatcaaagactactaagtttaaaagcagagagtcattcagtccatatgactgagaggaggtcaataagagtgcaatttcagttaggtacacaactgcagctgcaaagtctacagtacaaaggtacaattccactctggtcccaccggaaccctggaccaatcaatctcacagagacttgtctaagccccagggtaaattttcttaagagtctgaacacacttttatttctgagagattgatttgataatatttggagactttactccatgctttaccatgtcctattggtacacatcttacataggccaaagttaaaagttagccctcaaattcttaaggcttcatttaaataaaatgtttctttatattttctgaatgtaaatacactttggcatacatcatgtcctattttgataaactatagcaggctttgtcaaaatgattttattgcattgaaatgctcctgtattaatcatttcctaaaataggaagagcattgccataaacaaatacctaagaccaagaccaagacctatattgcctaggctttgtaactaatttttctaggcaaagttttttgggggggttaaaattgcttttaaaattattgatctgaaggtataacatatctaggcgttttaacatctgaaattccttttatacacattgcaatatgcaaactgctttttgcatcttgccttttattgtgaaaaaaactgtcttaaccaaactggaaaatattttacactgtgtgacactttgggagaagtctatttgtttatgctttgtctccaaataaacattaaaaggtcattaggggctctctatttaatttcgacagcacagcttgaggacaaagggccagttactggaagcttgcaggaagtttgccagttagatattcagccacaagaatctattatagctgttctttcaaccaaataattcacatttaattgtagttcttcctgttgacaactgtagtatgttcctttctactcattactgtagacatatctcccttcaagtaatcaatcacattctctctttttagccccttatttaaaaaaagaaaagcccgctcctataatttctggtagtcttagacccagaaatgagtttttaatagtagcataactattttttagtattgctttggtaagatattaataatgctattccctcccataaatttagaattcactcaagtgatcttggtttatgcttagacgtggttcccaaaacttgggtattataggtgaaaagtttctggatttttgacttcattaattgagacatatattttttattgctgcataacaaattatcacaaagtaggttaaaacaacacccatttataatctcactattctatgggtcagagtctggcatggtgtggctgggttcactgcctcaggcatcaccaagctgaaatcaaggggctgctgagctgagtacttatctgaggctctgtggagaaatctgcctagctcatttgggttattgccagaattcagttcagtggggtcatagaattaaaatccttgtttgcttgctggctatgggccgagagcctctcccagtttcttaaggtcacccgtatgccctcctaggtggcccctttcatcttcaagtcagcttcagtgtgtggactcttcagataatctcactgactaaaacataaatcatgagagtgatgtctcatcctgttcacaggttctggagatttaggataggatttcttctgggagccactttggaaatgctgcctaccataaacaagaatcataaggaaaacagtcaaaaattaactgctgcaagaatatggcagagactcaacctaggtatatataacacaaattcaagtgatttgccggttctaaccagccttcctccactggcgcagcatgaatgcagtacctagtgaattttcttttgtctgtgttctcaggagaaataggaacttgataataaatggaatttggtcagtgtgaaatgttagtcacttaattagctcttccatacaagctgtcttgtgtgaagtgtttggaagtgtactgcactagctattgcttgcttttttttttttttttttgagatggaatcttgctctgtcgcccaggctataatgtaacggcgtgatctcggctcactgcaacctccacctcctgggttcaagcaactctcctgccttggcctcctgagtagctgggactacaggcgcacgccaccacacctagctaatttttgtatttttagtagagacgggatttcaccatgttggccaggctggtctcaaactcctgaccttgtgatccacctgccttggcctcccaaagtgctgggattacaggtgtgagccaccacgcccagccctattgcttgctattttttatttggcaaccttggagaatgagtcatttaaagtaaattttccagaaaattttagctagtaattgtacctatttaagaatcatttaaaaatttaaaaatcatttttgaagggatgctatataacttgggaggccactaggctgagacaacatcagcgccttgggttcctacgtaagcaaaccaaaacccaattcaatgtagtaaacagtaaaatgaaacttcgaatctgtaactagagactttaccaatcagaagccgccaactaacatctaactagggagtctccactttaaccagtctaatatctatttcttagtctgagaatacgttataaaagtttcctccctgcccagaggagcattgacagaactgcttgtggtcttagggcacccaattgctgtggctgaatgcttgaataaacttgttaaactttcaatatgcccaagtttatcttttaataggggtaaaatgaatgtcattagtgcaagctttttctttaaaaatattttatttgcttccctgttttcctaaacagcggatataatggaaaaaaagtaacttttttgataacaatagtgaaatgaacacttattgaatacttattatatcctgatcactcaagatcataattatagtaattatgattaccgtaaggtggaatgttctttgttgtctagttttttggtcaggatttgagctgttatttcttcttggtcattaggcctgcttatagtgacatcttcactgtaccatttgttttggaaacctctaatggaatgaaaaacccggtaataatgtttgtaagaactgtatgttaagaaagttgccaagcctgagtgagagcctatgaagtcaagtataaaagagttttgtgatggccgttcgtatacttaaaaaaattttcacttatttccagcttcctagaggtcatcagaaaaaaaagtaatctgaagataagagaattactataatttttgctattatatagtcaattaattcagtaaataattaactaatgcctactatggacccagaacacactattgtgtttactaattgtttttatatgtatgtcatttattttaatttgaatatatataacttaggatcaggaattatctcttataaagtctttaactacttactgatgtgttgaagtgacagataaggcactgacccaagtaaatagcagtactgagtataaggaaattattttccacttcactcttttagaaataaatattattggcattaataccagagaagtaaactttatttttttagtcccccccaaaacctatacatttttctcttttaatatctgccagtgttttcagttgcactaaccctgcatataatcccctcaggtgacttttctatcttattctgttacctgatttgttctatagcatgaatctctccacatgaggagcaaggaaaagtttttacaatacagtctatgatttttcctatcttcctatgtatcttttatttactcatttaaacttattcagaaatatttatttagtgtctcctatattctaggtactagtgaccaagcactagtacttgcatatgcatatactagtactctcaatgcatattttcctgttcatcatcccagaccttcaagatcaacattcagcttaaactcgattctttacctaaaattcatattacactctttcacatcttattcttcagcccatttatttccactcctttttagtcatcatacgataagaagtgccaaccatgtcttgtgatactccatcatccttcactgactgggctaaacatgctgcaaatctgggacaaagaagggaccaaaaggttgctatctgcacacatctatgcaaaaagtttagcatagtattggcaaaattgctgaagctgtattcaaaattcactggtaagatatatgggggaaaaaaatcacagagaaagcagtcccacctagagtttgcaaaactgtagcatattgttgaagccagaggagatgttaaagtcacaggacaataacaaaaagagaggtggactttgcaactagaagatgctccatttttccttttaaggagccttaagtatctctattaagtatactttttaagtaactgatatggtttggctgtgtccccacccaaatctcaccttgaattgtaataatccccacatgtcaagggagggggccaggtggaggtaactgaatcatggatgtggtttcccccatattgttctcatggtagtgaataagtctcatgagatctgatggttttataaatgagagttcccctgcacaagctctttcttggctgctgccatgtaagacgtgcct

SEQ ID NO: 41292 - DNA, 7518 bp, Homo sapiens
ttggagggctcagaagaagatagcaagatgtgggaaagtttggaacttcctagagacttggagggctcagatgacaggaaggtatgggaaagtttgcaatgtaagacatgcctttgctcctcctttgccttccaccatgattgtgaggcctccccagtcatgtggaactgtgagtccattaaacctctttttctttataaattactcagtcttgagtatgtctctattagcagcataagaagagactaatatagtcacaatggggtaaacaggcttatactcattgggtagcttccctggcacagacaggccacaggagtaattaaaaacaaaggaatttcctccgcccccattcaccaaattctaaacaaactccttcactcttctactccctgatttttagaattaaagatttttttttgaagcatattcagggcaatgtcttgcacttagtttatgcctgataaagctgatttgatttttgatcacgaacaatggcagagtggtggtgagtgggggcatagagaaggatagtatttttatttttttaatgtgtctgactttttccttggaaataaaaaccacatataatttatattatatttaatcaagaaaatactgaatccatgcaaaataatgtttctggtgaagctgtaaaaatatgtcatattccttagaagataataccaccttaaaaccaggttaaaaaagaaataattacaagatgtattagttttatttacaaccacttatcttcaggtcagaaactttctttattgtatattattaaattcataatataataattggatattagtatctgttatgtatttatttttatggtgaaaaatttcaactttacataatgttaaagaaaatagtatatactcatcaataagattcaataattacaaacttcggcatccttatttagctgttttttaaagatataatcttggcagctgatggtcattgggcttgtttgtgttttattaccactgaaatacattttaatgtagtgaatattgattttgaattccaagttcccatttggtggttaatgtttaattaacatcattaaaagtgaagacctcagtatagataaacttctgtacaaaaaacttcaaggagaactaaactttttgttttactgtgtagtgaatattgctttcaataaggggattttccaactgaaaaatgaagacatttaagttacatggagctttttgaggaccatcctaataagtacctgacatttttttatgcacatatgtgccaagcattgtactaagagctttacatgcacccgctctttaaataaccctatgagctatgcttattatcctcattttacaaattaggaccctgaagctgtgaaagattaacctacttaactgtctggagtctctcaataaatatcaggcaggatcttatttgctaaaattgtattttatttctataagtgatgttttgaaagatataaaaaaattttatgcctatcatgaataaccattaaatggtgcaataaacataacattgtatacagtaattgtttaaatgaaagaacttctgcataaacacataaaaagacagattcctaatcggagatgcagttacgaccatgggaggtagtaagatgtgaacacagatccccaggaacaacaggaaagaagcagggtagtccaccaaataaaaaatatacaggaatataaaggagattgattcaagtgtcttgggtttcaagcccacattttgcagtttctgtatataagaaattttaaaaatatttcatcttattggctctatcctttaaaaataacttaaaattttggtctataaacaataaaaatagtgacttacgtgtcaacagaaataagtttcttttccccatggtcagaggcataatcccaagtcgtttcaataattccaatgtaataatgcttttctttcgcccaggctggggtactacataaaaacagaaaaataccaagtatcaaaatcttcatttttttccccttcttggagcctgagaagaaatgaagtaaaatcaggagcaggcaattttataaataagactttcttccttatttgcttgattgacacaatttagtgttgcacaagagtaaattgtttcattaaagcaaatattttccaattcagttaagttctcgtaaaccaccaaaaaaacagttcttggttgccaggcttctctgactgaaaataaaaagtcaacagttattgttggaggcattagggtgtgcataactctgtgcctttttccattcattgtgtaaattccaggagggcagagaacgtgtctaaatgctccctttgttcctctgacaatatgtcacagcacagtgtcctgcaaacagtgcacttttagtaaatcaggataagaattatgtaaaatgaatcaaaacatgtagctttttactacagtcattcttaatgacagggatacgttctgagaaatgcattgttaggctattttgtcattgtgtgactatcacagagtgtacttacacagacttatatgatatagcctactatacatctaggtaggctatatggtatacctattgctcctaggctacaaacctgtacagtctataactatgctgaatgctatagacaattgtaacacaatgatatttctgtatctatacatatgcaaacatagaaaatgtacagtaaaaatatgttattataatcttatgggaccaccatcacatatgcagtttgtcatttactcaaacattattatgtggtgcatgactatttctaaaagtctaacaaatgattaattgcagctttatgatatgaaacatgatatctagcatgccaaatttaagtaaacaaaaataagaatttaatttggaagaatttatctgttttatgagcttggaccaaatctgcataaaaactttaccagatcattctgtattgctatatgcaaataactagcagagcctaacaggggctaataactttgttttaatcatcaaataaacaaaccataactaaacctgtcttcagaggcaaagattagtcttagtaaatagaaagtaccccagtttatcattagactgaaatttttctctttgaagtggatatgaattttaaggtggaagactttttcttaaaaccctgtttttagtcaggaagtatatgtctaaaagtatgaaatggcttttttttttagctgaagaaaatcctgataacagttgacactttgtgttagtataattttttttctctcaaatacctcaaaacgttgtgtatttgctgaaggccacttgttgaaatagattggtatagaagaaagcatgcgatatttgaacaattccttcatttaggaaatattattgaatgagccaagttctgttctactcactgggaatacagcagtctgtgccaagttctgttctactcactgggaataccgcagagaacaaaacacctaccatcatgcaacttacattctacttggggaaactgaaaatataaaaatgaaaaatgaaatacacaatattagtggtgaatgctatggagaaaaataaagcagagaaggagaataaggagtgctagggaaaaatctgatgctaccaaatgacctcaagtaagatacttcagcccagcttcagtttcctcatctgaaaatctcaggttaattgaaatgacctatgttaaggcagacagtggaggagcttctctcaccagctggtaataatcttaactaaatggcttggtacagaaaactgaatcatgttgcccaggatgccccaaggcctccttctaggactgccttgaacaattgtgccgtcatgtccactgagaggactgacgaaggactaaaatcttgctcagatgccaccggccataccctgtgccttgcaagaagctgcttttcccctaatggtccacacagacggggggcatttttcagccgtttatcctccccagggcatggagaagggggacagttctttttctaattggcatgaagccacgatgtgaaccagcaactgtctcagccatttgcttttcatttttcactcagtgctcaaactcagccccaatcttgtgcatggaaagatgttgatcagagcaccgtaaccatgcccagagtcacttgtttcagcaaattgtaccaaccaaccatccaacaaacaaacctgttcaaatagttgctgagggttccagaatgtatgcatagcacacccctcatattggtggtgaaatgaaatggttaaacagtaacactgtgaccagtgcccttgtgaacgttttatggtgtaatgcaaaaaaggtcatgcagtccgtatttctgttctgttttgtggtagttactcttctcatcaaaaggcatgtggcaggaagtggggagaattctctgagccttaggactatttaaataggagggagaggggccgggcggagtggctcacgcctgtaatcccagcactttgggaggccgaggcaggtggatcacgaggtcaggagatggagaccatcctggctaacacggtgagaccccgactctactaaaaatacaaaaaaaaaaaaaaaaaaaaaaaaattagccaggcgtggtggcgggcacctgtagtcccagctactcgggaggctgaggcaggagaatggcgtgaacccggaaggtggaacttgcggtgagccgagatcgcgccattgcactctagcctgggcgacagaagaagactctgtctcaaaaaataaaaaataaataaataataaataaataaacagtaaaaataaacaggagggagaaggcactgggagctaataagctcagccattggcagagtcattttgcactgcaaacttcattacagtgattccagagatagtacttaaaaatgaactttggataatgttccaattgagagttttctgtactcaagaaatgtaccacaacagcacagactggggttagacaagaaggagcagaggggcaccagaagaagcctaggaaacttagagcattgcaagaaagagaggaatctagactgccaaacagcctgtcctcttagctgtgcttgtcaaaaggtttttacctcagaatcccagggtatatcttggttataaacaactagtatatgtctaagttaacagcttagtaacctgagtacagttatgtagcagaagttttaatcattttccacattttctttttttgtcgtcttaaggatttctggactgggtgaatcttatctgcatttggcaatcatgattctgagactgtgagtggctaacgtcaaggaagcagcctcctttacagaacaacccttctgtttatttctgtctggcaggatgcaatctctctttactgccgctattcctgtatataccttctagtttcattttttgctgacccttgagaactggctcttaacccctactccatgccaacagaattattaggaaatcatcgagaactgtccttcactttgtgacagcaggagactctaagtacaaaatagcaggtcactctgactatgaccaatcggacagataaccacgctgctttctttttcacaggaaattgtgtaactctggaattttagaggtgagtgtggtcacgtacagactttgctaatgagtacaccgacttgccctagcacagtgtgagcattgctgatcctattctcccctatcagtcaggtcataactgtttaggaaatgatctctcagatagttcttcagtcatgccaccatccccctttggctgcccattaatgggtcacggccctattcatcagctcctgggatgtaaaatggtctcaggcaagggaagagagaaagcccagactctaacatacagaaagccttaacatacagtagtactatgggaaagagactttaaaaaaaatggcataagtatttagctgaatccttcatgcttgttctctcactaccttgactgttatagaaatcaaagcatgtgatttatcaaaaatgaaatagaaccacaataatataattataatttttaagaagattaaagaacaaccctttttaaaggaataacttaattcactactttgactacatagaaatttaatgcatgactttcttgaaacgctcttctctcataacacccctggcccattttctcctgttttgacaccatgtgagggttatatacactgcatagctctcaacactctgatttgtgtcctggtcttaatttacaaaaggtgactgcgtgacaattctgagaggccaatgccaatgagagaaaagtttactgctactcatgatggcgcccctggaagcagaagacacagcacgctatagagggccatgtgggaaagcactggagtagctccaggccgggcttgccagtctctctgcactctggaaggagtttgcctgggttggggttgtcccttggtagattccaaaccttcattttgtcaatttacttaaaggtgactgggtttaaaggggctgactgattgtaaataacttggagaataaatcaatattcattaataaagttaaataattcacgtaaaattaaagtataataggcataatttatattattggtttttttttcaatttaggggcattcgctccttctttatagattcactcagaaaattgtattatggaacacagtttcattcataagtatagagtttgagcgaaagggtagatattcttttctgtaaattaattttaatttgtactttaagttctagggtacatgtgcaggatgtgcaggtttgttacataggtaaacgtgtgccatggtggtttgccgcacctatcaacccatcatctaggtattaagcctagcatgcattagctatctttcccaatgctctccctccccatcaccccaccccccgacaggccccagtatgtgttgttcccctccctgtgcccatgtgttttcttgttcagctcccacttataagtgagagcatgcggtgcttgtttttctactcctgcattagtttgctgaggataatggcttccagttccatccatgtccctgcagaggacatgatctcgtatgcaaaagggaagatactgttaaagcatgtttcttttcttttttctttgacattttaaaaattaacatgatttctgtctaaatactgggtactcattattagaataagaggaccttccaacagctgtgcaggggacattccattgacacattcttagtctttgactctcttctgttaagaattcatacagattactacccttccattcaaatccatttgctaaatcatactttgcccacctgataagtcaaagtttggaactgtgttcttaaatgaatgaatgaatgaattaaacattattcttggtgaaatttgggcaatatcttttgctgtttcttaaaaaatgttctagttttatcagcatctttgaaagtctcagacttgaatgtttctatggaaggagttagctgcacccatatttcataagttcttcatagttttaatatcaaataatgaggtattattgcta

SEQ ID NO: 41293 - DNA, 747 bp, Homo sapiens
ggaaaaggggcagctgccatctctgcagttcagtcgactcagctattccaccctgctggctctgaagagttcaggaagggtcccctgcaatgcagcactcctgccctaccaaaaaggagccagactactgcttttatgaggtccctgatcctgttcctcctggctgggcaagacctcccaacaggggtctccagacacctcctacaggagcattcgggccagcaacaggtgtagtacccctctgagatggagcttccaaaggaagtatcaggttgccatctttgctgttttgcagccttcacggctgatacctccaggtacaggaaaaactaaggcaactagggtctggagcagacccccagcaaaccacagcagccctatggaaaagtggcccgactgttaaaaataaacaaacagaaaacaacaacaacaagagaccccttgaaagccccattcaaaggtcagcaacctcaaagatcaaaggtaaataagcccacaaagataagaaaaaaatcaatatgaaaatgctgaacactcaaaaagccagagtgcctcttctactccaaatgacaacaacacctctccagaaagggcacagaactgggctgaggctgagatggctgaattgacaaaagtaggcttcagaaggtgggtaataacaaacttcactgagctaaaggtgcatgttgtaacccaatgcaaagaagctaagaatcatgataagaatcatgataaaatacaggagct

SEQ ID NO: 41294 - DNA, 5249 bp, Homo sapiens
aatgtgatggggaagtgtgggtggggccatgttcactttggtttgccccaagccccacctctgtctgtgttcatccaagcaaaatacttagaaaattatggtagtaagttcctcctgaaatgacagctgatgttcctatttttacattgtctacatagctctagaaagcatgagaatttgctgtgcttgctaaatcagtagtctgtggcatatgggcaaggtccagcacactgcctctgttactgcagcccatgagctaagaatggttttaaaatttctaaatagttgaaaaaaaatttaataatattatttcttgacatgttttatgagatacaaatttcagcatccataaatgaagtttttggctctcagccactttcatttgttttcctattgtctgtgaccactttcattctacagtggcagagtagagtatggcttatgatagagaccatgtggcctgcaagcctaacttctttactatctggccctttgcagaaaaaatttgctgacccctggtctacatgatccataccagttatatgtagttgaattctataaacagtgtggagcgaggccctttcatctgtttcatttgtgcagagcaacctgtgggttaccattggtgagtcagtgagtgaatgttaccgtgcatttggttgctgagttgaaaattatcattttccttgtccactttgtttggttttgaagcataggtgttgatactgtcttcgaagtaccaggattcattctcatcaaatatcatgaagtggagaacacggtgaactatgttggggttgatgtctttgcggcatacagagagagggcctaccagtccactgtgaaggtcctgaggaggcaaagcaagatcgttcactgtggccacaactaacattttcccccacaaaataaaagaggtagaatccggttttagtttttaatgaggtcaaatcctgagtttttaattatcaggattctgagagtgaagaacaaaatatttgacatgctcaatgtttgattgaagaaaaattgtaacctcattcattagagttgaagtctaaagagaacaccaaacctctgaaagggattttagatacatttttcagtggatttagctctatttttgacattttaataaaaaaagaattttggttttaattagaattcctggcattgaagttggttggcaggaagtctaaaggagttagtcccttcacctttgtgcttttgcccctgcagcagcttttagttgagagtcttggtttgtttgtcttcattttgtttttgaattaaatctctgtgtagattcttgttccaggcagagtgggccaagataagagttcaaatagaatacttgcactgtttttttttttttttagtgcaaataaacttgaaccctatagttgagggttttaaatataaacacacacacacatacacccccctacacacacaatatgtatatatatatttcttattaatcatagaattataccattctttatttatgattactattgttactattattattatttagagaccaagttttgctgtgtcacctaggcaatggagtgaccatagctcagcataatcttgaactcctggactcaagcaatcctcctacctcagcctcccgtagctaggactacaggcatgtgccactgcgcctggctaattttaaaattttttgtatagacatcagccaccacatccaactgaattttaaaattctttagtgtatgttgttttctgtaattcgaatactattcagtggaacaaagtatagtctattattgtataattagatatatttttcaattcacagtgagattatgcaaagaattataagcctaagtaatcatgaggtaatagtttattttgctcttgaaaaatgcagaccaatgtaggaataaaagctgaacagtaattaagttacttaatagaaagtttacatggaactaaggttcttaagagcaatgataaataccttcttccttccgttataatttctgggaggagataggataagaactgttatttgatttaaaatttaccttagccacagatacagttgaatagtaaaaccaaggtatgcattcaaagtccagtgaggtaggaccagttctatcaggtatctgccaagtatatatttgaatctctcctgaaatagacaaatgaagtgtatttaaatagagcttttaaaatcagacttctttacggagaaccagacaatgagcaaacactaaagctataaaaatagtaggcagcatagtcctagctttcacttctggtttcacttcttgctttgtgatcttagtcaatgtggcaattactcaatgtgacaaagccttgaatccctgctctgaacattccaatgtgtggatcacatgtacctcctccctgccctcaaggctgtgcatattagtcctattggatcttaattctatattctatattgcagtgaagttcttttgctccctccccaccgtaattctgtatctcccacttccacagatccatgggagttatagtcctatgacattaaccaaccccacctccagctcccaaatctgtaacaatctacttagcactaacccttgccttccagtacatcacacaatgcctggcatacagcaggtagagtactcagaagtgtttgtggaatgcatgtagtagatcctttcttaactaatcagagcagtggactgacttgcaaactcccttgatatgagacttaacagaccacaggactgcttttaaaaacaaaaagaaacatttcgcccaccatcaaagtctattgtcagtccctctgctttacaaatcttttctttctgaatttggctttcattgatactcttaatttccaaaactacttgttttggtgagcaactatagtggacattctgatgccacccctagattcccaatcaagaatgaagaacatttcactccagcaggcgtcagcctcctttagagagagccttggctgaagaaagctaccttgctcaagattgcatctaatgactgcttcagggacataacagcccagctctctcactccagcttaggaaagctgaaggtcaccctatcttcagaactgtgttggctgtgacttctgttgaggctgcatctctgcttaacctcactccctgtccaatcctactcatttctcattctttccatattagttgattccaagagcactatctacacacaaatcctcatatcacagtctgcttactgggcatttttaagtaaaatatattaatgttcttctgagttaattatgttgaatggcatgctgtatagcagtgattccattccacggaaatgttaatacatggggtccatcatttcctcttattggctcaatcctcccccactttctcacatattgcatcttgtactcaactcctactttagcactttagttggagagattgtatatagtataagaatacctggcagctggacaggtacagcggtgggagggagggtggacctagaggagaaattcatacactggggaggtaggccctgaagaccaaaccttcacttcacagttttgctcatggtgccccagcctggaagtaaacttgacttgcagaaggaactcccccgccaaatgctttcttcaggctcatcttactagtccactcgtctctctcatctggaactgcacccatatatttaaaagaacattagcctcgtagtcctgcataaaagctttggggattatttttctcccaaagtagttacctggctgagttggaacaacagtggaattatttgttttcactccatgagcatgaatagaatacggtcttgcggctttatttttaaagataatttgaattatttgaccagggttgagcaatattaatggacctagggaatataaaaagaaatatgtctgagtaattgttatttattttaaattatgagtcatctctcttcttatttacacagtgacttattcttatccttttacttaacatgcagccaaatgaaataaaaacatttaacaagtagatcattgctgatttatgaaacatgatttttgcctgaaatttttaaatcatttagaattttatgagtttttttttttttttttttgccagaaaacttattttaatgaacaacggtttatgcctaggaaaacatacaatttaaaaatgaaaccctttcttttctttcttgaccaatctcaactttcaagccttttattcccttgctccttattctactggaggattgcaaggagctgcaaggcctgtttattgacccaaagtgattttctctcttacagactaaaaaccttcattttactctctctccctttcatcctaagccagaaactacaggtataaaattcattttaaatcttctttctatttggaagcaggttgaattagtggctctgaaaaattctgaaacacaggtggttttgagatgagataagcagcaagaactttctgcaaacttgtgctacaattactaaaattagagccctgaagatgcctgctggaggctaaatgctagctaaagacagggcctctttgctccctgtgaccatttcacctccccaaacaatatgcatggtttttctttttaataaagtgttttcctttttgcgtaaataataatagaaccttgagggtcagattgcgttatttatcttcatgcattcagccacaatcctagagaaaacaaacatcctgtggttactaaagataggggcccactcaaaagcagcagcaacaggatagcacaggcttccctccagggctcacaaagagacaagctctagaggctgacggagagcaaaaaagagcaaaaattcctcttcatcagcatgtaaatccatctcctcaggatcccacatcataaaataacctctaatatacacatagatattaagactgaaacaggagttgggcgtgtggaaatgtcgcatgtgggcacctgggatgactcagaggtttcctacttgatctatcaagggtggaagaaagagttgtacttttcctcactcagacagaagacacttaaatttacataaagaagttcctttcctcactatactagggtcccctgggctttgttttaattgtattgaaatgatccctgcacgctacttctaaactcctttctagaattttttaattctgagagcaagaatccaggtaatctgaaactgagcacattacttttctacattctccttattttttaggaaacaacac

SEQ ID NO: 41295 - DNA, 3430 bp, Homo sapiens
ggatggaataaagtggcaggatggataaaagaaattgtattgggaaaaaaaactatgttttactttctttgttccctaactatgagctattcctacttcactatatatgtgaatgatggttctaaagagggaatcagatcattcatgtattcaacattcagcaaatatttgagacttcctgtgcccctagccttttggccaattgctattggctatatatatggccaatatatattaaaaagggggccagtataatgagtacagagggtctgcaatcatggtgcagccacaagtaaaatatgagtagtatttatgcttttctacactctcatatgtattgcccagcttatttacttatttacctgtttacttattaaaaccaacccccaccttcagtggatgaatatttgccaactcaaatgacagtaaaaaacggtgcagtggctcacgcctgtaatcccagcactttgggaggctgagacaggcagatggcttaaggccaggagtttgcgaccagcctggccaacatggtgaaaaccagtctctactgaaattacaaaaagtagccgggcatggtgccacatgcctgtaatcccagctacctcggaaggctgaggcacgagaattgcttaaacccaggaggcagaggttgcaatgagctgagattgcaccactgcactccagcctgggtgacagagtatgactctgccaaaaaaaaaaaaaaaaaaaagagtagaaggaattatagccacagaattttccagggcaattccagaggagacccaacaactgttagggactatgcccctattgttaaaatgtctatataacctctgaggctgatgactttgagaacacctacactgacttgaaaattcacattctggtgtgtttctttctttctttgagacagtgttagttttactctgtcacttaggcgagagtgcagtggtgcgatcatgactcattgcagccttgaactcctgggttcaagcaatcctcccacctcagcctcccaagtagctgagaatacaaacatgcaccaccacacccggttaacttttcaaattttttttatagagacaaggtcttgctgtgtcgcccaggctggtcgagaactcctcacctcaagtgaacctcctgccttggcctctcaaagtgctgagtgtgcttctactgaaaacatttacagtatgtcataatcacaactttttagcatactgttagctaaaaaataaaatataggctgactgcaaaaatttacttgcaattcatcgtttggacctcacaataacttttctccattgaagcaatgttgcaagtggttggtagatttcatttttgccttcccaatgcctttgtaaacccaaatgtagacaaaatagccaaggataattgctactaaaaaatatccatttaaaatgaatccattggaaactggaaacaaaccaaaatattgtattaggattttatcatgagaaatgaaaccaatcaagaaaataagcttattttatcttatattatgttaaaccctactgtgtaaaatttattaaaaatggcacttattgtggctcaaaccaatatttaaaacaaatttgattacatttgtaagtctttaccaaatcttagaatgaaccaggaataaatcaagtgtttggatttgaatgttacgatttttgttgacaaagctgtaagaggggcacaatatcaagtcctttatttcactgttgatttttgcagtaccttcacaaatagggttattttgcctaaatattagagggcacttcactttttcgaagggcatctcttaatctatgctattcaaaccattcttttgagacacataacctatcattaccccctttgcttttcttcaaacatttactagattcttatttgtcaaatctttatgtgtgatttaagtagttcctcatcacatctaatcacttaaatcctgctatttgcatttaattggcattctgtttgcttcatgagagtaacaaatatactgacacaataaatatggaaatatatttgtatcacatgggaagaaatgtttaaatggagactaatatcataagtggtcacttctaagaaacactccattctcatgtaattatatttatagtaaaaatcatagaagacaatgcagatacaaatctgacaactaagaaaattgtaaaaattatggaatagttttaaaactttttccttgaatgttggctctttaaacaaagaagccttaatcagagaaatttacgcataagcatgtgattctgaatgagccttttcaaggactttatgtatgagtatttgacttttgaggttaatagaatcaattctttaatatgggttgagaaataaaaataaagtcctaagcttctccaactgactgaacacaccatctcttggcccaggggactccagagaaaccttagaaactgagttcctggccatgatgggctagcaggtcgaacatgcctcagtatgccccattccttctaacctttaaccagaattctttcctaaggcgtaagtaagcagaaaccagctctggaaaatgagaaatggatgactcattactttgtcaactttagccagtcctctgaggctgccacaggactccctttcccacattgcagtttcaacatgacagctcaccagttaaaccataaatcccttcctgataagagaccaacaaccatgaagtggttctggccaatctatgcagggtgcacagccagggcatttgtgtcctccccttcatcttttgacattagggggctgaaaactccactctcagatcatgctaatgccacaattttttgtacagggaattcatgaagaggcataaagctcaattgtgaagcacatgtttctcctttaataaatattcatgactcctcctacagcctaataaaaaggtattttcagccactctgctcagcataaattcccgtttctttcagcactaccttgaagtgcctgtttctggcttctggccagaggttacacttcccagcgtgtcagaatggccaccctgcaggttgcagccttttgtgagaaataaagctgtcctttccaaatgtatgaaccttgtgattcttcagctgacagggtaattcatctgaaaaacgtagtttttcttcttggaagtggacttccaatatcatgatgctaaaaacatgtcatactgtaataagagctgttttgtacttttacagaaggaatttttaaaaatttatttttagtttttgtgggtacatagtaggtgtatatatttgtggggtacatgagatattttgacacaagtatgcaatgcataataatcacattagggtaaatgaggtatccattacctcaagcatttatcttttgtgttataaacaatccagttgtactcttttcattattttaacatgtacaatta

SEQ ID NO: 41296 - DNA, 631 bp, Homo sapiens
agtcacaatactgaatccacatgttgcaagagaaaataagcagataggggaatagtcaattgtgtattcatctcatactcagtaaattgggattttacataagataaggtgaacacggaacagctacctgtgaagatatttaaccttttatctgtagctgtttatttaggaacaaaaggaaaggcagcttcttgcatgactcagctttcagcttaaattttccttttggcatagtgaattaggttcccaagtttttattttcattccacaaaactatttgtgagaaaagggcaactgtgctactgttagatgaaggttcctgggagaagatcagctgagatgttttttagtcacagtttggtttcagctacctgaagttttaagagtcttggaaagtcaggagtgacttctgctaaacacggggctttccagagtcagagaagctagcaagcctgtggtttggaccaggtactaaatatttgacaagagtatgccaggtgtaatgagctactgtctattcccctttaaagctcccatggcctaactccaactctcaggagtaggccaagagaagcacttctatgtaggaaaatgagtgttcttagctgatccaaacagaagaaagtggaag

SEQ ID NO: 41297 - DNA, 2477 bp, Homo sapiens
cataaagatggaaacagacactgaggactccagaaggagggaggaagggagtggggcaagggctgcaaaacttcctgttgggtactatgttcactaactgggtaatggaatcaatagcagcctcaccctcagcatcatgcaatataccattataacaaacctgcacatatacccccgatctaaaactcaaatggaaaataaatttaaaaaataaaaacgtatttgctctctatctttcatgtaagagactttcatcagatgtctaggacacttgactatttacttgtattaatgagtcaagaaaagtgctgcttggaaactcagagtgagctttgagcttatttcctctgaatttcactgtgtgcgaattgggtgaatcattgactgaggaatttcaaatgccaagatattcgtttctttctgcttctgtgaaaaataaccacagacttagtgaccaaacaacacaactttattatctgcagtatctgcagttctaaagagcaaaaatccagaatcagtttcactggactaaaaaaaaggtgttggcaggcttgtgttcttctggcagctctagggtgagaatctgtttccttgtcttttccagttactagaggccacgcactccttggttagtgccccttccttcatgttcaatgccagcagtgtagtaacttctgtcttctctgattcctacttccatctttacatcttttctctctgaatctaatactgttacctccctctatatggactgtatgattacactgggctcccctggaaaatccaggaaccctcccacccccccattttaagatccttaacttaatcacaactgcaaaatccatttccatcctttcctgtgtaacatattcacaggtcccatggattaggatatggcattttgtcggggctgttatttagcctactacagctaatatctaaaattttccctcatactggccagacttgctagagagtctccagctgggaaggtcaaactctgactggccaccagcgttctgagatctgagtgggttaagagggctttgtgggaggagtgcctcagcattcatccttcaggatataccagttacttaattcttctgattttggggtttatattcatatctttagtgaatctagtttccttcaactcagagaagaccgtctattttaccctgcccagagaattttcagatgccagtcacttcccagtggcatggagaggagaaaagatgcagggactcacagaattcctgttttaatggtcttccttcacttccaggtccagagggctctgatactatcaatttgggagtctctggaaaattctgaagtataaatcaggttagtcttcagcttcccccactgacagctcaggattctcatgtttcttgggttggtttgatcagttacctgtcatcaatatgttttgtagcttccaaaattttattgcttttgccacctctcctaatctccccatatttgtggttttatgtcttaaaaaaaacttttattgtaaatttagtgtgattttaggcagcagtgaaatttgtgtgtgtgtgtgtgtgtgtgttttcatcttaacccagataaagcattttatctgaattgattaagttccttggactgactaggcatggggtgatctctgacctgggtagccaggcaccacacccagtgctctttctaaagtaaaaagatttcagtggccaggtttgtgtatcttgccctgcctgtccagttgcacacactcaagcatgactcgttaacttaatttcctgccatatatctcggttcttctagaactggaatcttgtccttaattttcagcttcatctcacaaagcaggaaggagagctagcaggattgtttctgaatacaaatagttatgattttcacagtagtaaccatggattgcccctattccttatagctttccaaagggatggaaatgtataggccagaggcaggggttttaggaatctgaatatgatgtctgttaagctcacagtctccaagcatgtgacaaaaggtaaggcagtgctggcttcttgtgcactttgtctagcctaacaatgcctacctaccttcaccttctttctctcccaaaatggctgaccctttgctgtccctgtaaccctatgacctttctccatccccttccctttctgttgtttttgtggcatttccatgtccccaccatcccaaatctgctccaactgcacctgggttctgatttaagtcaaccaggcactaagaactttacatgtttgaactcaattaatcttcacaacaaccctattattattcctgttttacagactcagaaactgttgcacacagaggttaagtaaacttgaccaaagtcacacacctaataaggcagagcccagatttgaacccaagcaacttgactccaaagtacatctttattccactgtgctataggccacttataaatcatatccatggcc

SEQ ID NO: 41298 - DNA, 2665 bp, Homo sapiens
tatctaccacactttctttatcctatctaccactgatgggcacctaggttgattgtatgtctttgctattgtgaatggtgctgtgataagcatacgtgtgtcttttgggtagaacatggatttttctacaaaagaaatttaaaaacttgctcagaaactagaagttaagtctgactttcacattctttatgctattccaccatgttcacccttgcctgataacattgttgtgcattacccctctcttcttcattgtaaattggtttcaaatttggaggttctaattccttggtagtagcttcctacagtgctattttgaaggcacactggtttcggtgggagagatatacagattagctagatagattagtgatgtctgcagtggagatggggtcagagaagaacaacatgcatggctagtattccctagtctttgtccagcctcaaacgatgatgtctctactgacggtatcatgtcacaggttgttatgaagacttggtgaggaagtacatgatcaattgttatttggaagatggttccagaagaatgacagaagtgaatgaagaggatattcctggctggaaaacttgataaaattgttgaaaagggagttgagtaatttatttgtctttggttaccctattagtgaaaacagctaatgaagtctccccagataactcaacattttacttaatttcatctctaagaaaacacttttaacctgcctctggaaaaaaatatgtttgctcataaataacattcttgaagccatttgcctccggtaaactctcaaatttttttgccaaagaattcttactaaatcaggattttcttgctggtcctccagtaactgggaggagccactgggatgccgtgcttgttggctgcttctggccttggcttcctgttctccacagcagaggggaggaaatccgcaggatgcctgctaccaggggacagggtgactcaggaggaaagactccacctaaaatagtcgtggtatgcagtctctgagtcacttcactttgaaatcagttaatataagatcctggaattagccccacaggtgacgggaagtggggaagaaggaaatatctgaaaaaaagtttatccaaaagagaaattgtccatgaatatgactttttaacagcagaaaaggctaatattcagggagaaatttcaccttgagagtttaaagtagataaactgtgatttcttccatggagcatgggcataaagcactggtctgggtccaatttagggacccactgggaatgaatgtttgcttaaaaacacattagacaagcagcagcagggcagctgtgtaaacagaagtgtgctgttttgatgcagttttcctgactgttgtgtttataatcctttctctagaattatctggccaaaatgtccatagtgccaataaattccaggtttatctctaactaatgataaacattaagctctttccctactgagacagggagaagagtattcctgtttctattcaaagttccccaaagcagctttctgtatttgaaatgtcctctcagaccattgttgaacctccctttactcccttctgactggctcccagcctcctagaattaatttatttattcaagctcttcatagtaggggaggaaggaactgtattcagtcatttattcttaaaacgtgtattgaacatttacatgatgacacatgatgactgaggcaaagaacacccattccttcaaaatgctcagagtctagttgaggaaataaaaaagttaaacaacaaattcgtaatacaaaatgttgaatatccagtagatttaaccataggctttttgaaagacacaggaaccttgaatggagctggagttcaagtgagatttcttggaagtctggaggacaaaactgagtcttcaaggttaagatgcaagtatctaggtaaactgagcctcaatcaaagctaaatgttgccaggtgtggtggctcattcctgtaatctcaacacttcaggagactgaggcaggaggatcacttgagcccaggagttagagaccagcctgaacaacatagcaagacctcgtctctgcataaaattttttaaaaattagccaggcatggtggcacatgtctgtagtcccaactatttgggaggctgaggtgagaagatcgcttgagcctgggagaatgaggctgcagtgagccgtgattgtgccactgtatttcaaccagggtgacagagtgagatcctgttacaaaaaaaaaaaagctagatattcactggtagataaatgcagtgtgaagcttgattggatattggtttggcaaaacatggtgagacacattttggggatgattggaaaaatacgaatgtatgaatgtagaccgtattagacaatattagaaggttgttattaacttggatgtaatgatggtgttatgaaggagttgctctaaatttttggagatgcatatgtcttcctccctgaaatggtttagcaaaagaataaggagaaggaggaggaagaggaggagaagaatggtagatagataaatgaagcaaatgtgacaaaatattaacaattgttggacttaaatctgaatgttcattgtactagtttttccactttcctgaaatttttgtaaaaagtagttgcaaaagaataccctagt

SEQ ID NO: 41299 - DNA, 1705 bp, Homo sapiens
ccagtattatctaatttaaacctcttttaaggtagatgtatattctttctaaatcacagatgagaaggctgaggcacatagggtgatgtgctcagatcacacatttagtaaatgtggaactgggattcaaaaccaagtatccttgactccaacacctgacaatttctgagcagcattccctcccatgtaaattattgatttcatgaactggttctacttttggttttcggtatttgtacatgcctttatgtctctcaaagttagtggcagcaactgaaattagctcggatcttcctcctctctgctcctaaaactgtcctgtgcttctctccagccaagtagattccttgagtggagaggttgtgttctggtctatactgctgtctgttccatgcccagaacaatgcctgacacttactggggctaacactctaaaccacatgaactatagacattgactaattcacacagtcatattcctatatattaaaaaatgccataagaaacagactgcggtgttcaactagaaataaaatcaaacattccaactataagaccatagtgagtggcatgaataactttcccaggagattctttaaaaattaaacagttccatataaaattgtagacatttcaactgaaagatacgttagagaaaaacctaataattcagtgtagtgttatttgaaattcaaaaattgggtcatcccactcttccctcttcctttttaaaaacaacaacaacaataacaaaaaaacaagtttgcataccatgaagtgaaacaagaaatgaaatgaagctgtgttcagtggcctggagtgtgatgctcaagggctcccaagaacttgcaaaagtcaatattatgtagttatgaattttcagaaatataagtaaagtcaacttgtaacgtttgatttaaccaataggaactgctccaacaactcaatgtatcaactctgaaaacaaattactgtatcccctgcctaccctagtatttagaaggtcagtgcctccctcctgaagtgtacctctcaacggcccaagtttgggtttaggctagccaggcatcttcaacccaaggggagagatcattggtcagggctgtctttactgctctagaccacacggtgtcactgttgaagaccagttggttcaccaaacatctctgctgtgaggagccgggggtggggcggtggtgccagtccctgctggggccacatggccctttttggaggacaatggcctcccacaacatgtagctctgcccggggccccagtgtggcagccctttaaattcataaaatcagtttacgtacaccggagctggccccagaagctttgagtcaaatggattccactgtttacagaactgcctcccattgtttctttctaatcatggccaagggataggtggcagtgttatttccaacacaactctgcaactcagaaaacataaagggtctctctaataccacctttttctagacaatctaggttactcaccctttacttacctctcttctgtggtttaaatgatatgtatccccttaagaaaaaactcctcctgggagttcataaggctatttttcatcctggcccataagaaaaagttgcttgcacttctcttactaaaaactgaagagccacaagagaaaattagcttctcttacagggctaagataaaataataccaaatatattttc

SEQ ID NO: 41300 - DNA, 1190 bp, Homo sapiens
agacaaaaatcacattgaatctgattgaaattccttttcagtaatatatttaaagggtatttataatatacatatacctagtagagaaagacatagaacccttcttttctatattttcgaaactttctctttcatgtaatgttgtgcggttcatacatttaccctgatttaacagccactgactacatttatcaaaccaattccttgttatcagagatttaggctcttgccatttttcctggtgttacaaacaatactcccataattattactggaaactgaactattgtgaacatccttgatgattttcttaaaataaatttctacaagtaaaaatacttggctaaaggatgtgtaggctttatatattgtagacacagatcaccaaatggcttttctgaaaagttgcatcaaatcccatacctgttctcaccatgggtaagcatcagagaaaacaatgaaaaagatctcacacacatacaagaaactcatactgtggtaaaggtagcattctatcaattgtctgagatttcagtgcatgagatttcctttatgtaggaatgtatttgtaaatttggtcactatggtaaattgacactcagaggccacgtgtactattcaagtgattcagattctacagtaatttttattgttttaatgttgtcaggtaagaatgagctgttttagtacaacccctgagggagtttccagccaaattgaaaggcctagaatattacaaaccaggagcgtaggctataaacagaacttaaggagggtgtaaggtaatttgtgtaagctatttccttcaggtgatgacaatgtctactattaaaagattcacaaacaaggggaaatgttgagtcactcaaacttaggctctaggatagggatgactaaggctctcaggggcctgtcaaagtccccattaggtgggtggagtatctgagtgccagtgtaggataggaggaagactctagcccctgggccctggtggcagagcaggtagatgaggcagaggagaggagcagggaaaacaccgtgttcatgttacaccaacttggagttaaatcagtgttgtttttttttttgctacagtgtttttcatttgctaaagatgtggccttggacagattacttaacctcactgagctttgagtctataaaatagagagaagtaataccttctaggg

SEQ ID NO: 41301 - DNA, 1859 bp, Homo sapiens
acctattcatcattgtatatccagccgctagaacagtatctgacacacaatagccactcagcacattttaaaagcagttgaatgataaataacaatatgaagttgctttgtgaaatgtcagcaaaccatactgaggtgatatctgactatagattctaggatttagtcgattttataaatacctggatattcttccagtctgaaaaattctacttctgatagctctcctagaatttcagcctttgctacagagtatttggattcttaacaaaatataatacaatcatgtgggaaaatcaaggtttgacttaattccacaaagaggcctggtataattcttttcttatcacgacttccttccacaacagaacaaaggggcttggaatttgagacctaactttagaatagttcattgagccaatcagagattatagttgttcatttcaaaaaaagttctgtttttgtggccctgtctttctgcatgtcagcagaacaaaaatctatattttcaggtctcaatgtaaaaaaaaatttttggctccacctggctcccaggcaactaacctgtggcttgtgactgttagttatttcccatattgaaatccttggacagttttaaatgaagaatgacatagaagaggaggaaggtttcttgtagaatccagagtggataatgggaggggcaaacagtcaaatagctataaaaaccatttagcaatactaccacctctccctgcattctggttgcataagtcatgacttttcttagaagtctgtttgtgcaatagttttgtatgtttgtacatatgtgaatagccattttctactagtacatccagtatgttctgataaaagctgagtcatgattgatcacagttttgaacaccaaaatttcaaacttctgtaagtatcaattttccttcaaaggctaccattgggttatgtttattgtaaggtagtagctaatattaacagctaacagtggcagttgcacacaatgtggcagcctctgtggggaacattttacatattatttcattaattctcatgacaattgccattgattttattttaccagtggagtaactgagatgcagagagctcatttcaccttttcctacagataggtgcagagctgtgattgaacccagctaattcaaattcatgatctcataactgtgctaaatttgtgagattcatatatcctcactacatgctttaaattcatggggtcaaacattcttgataatataatttgttattaatattatttttaatcatgaatctcaaaactaaacctttcaaaattcaacttcagaaagttgagtagggaaaagggaaactcagaatcaactcctgctcaaagaaacatgtcatccattcatcaccacatacatccgtttctatcagctgtgctgtttctgttcttttctggataactgataaaaaaaataagtatcaacatagaatggtagaacagcacaaattatcctgatattatgattgtgaataggccttacttatatagcttaataactaaaaaagggggcattgtacatagtttgtatgttttatatgagtgtatgtatgtgtatgttttatatgagtgcatgtatacacaggggtaagggcatggtttgccctgggcttgggttaaattcatatagttgccattcttattatatatggattctataatactttcttataaagtagtaaaatgtattacacttaatcaggcaattgttctggtataatgtatgaagtaattgagatgcactatatgaacacaaactctacatctagactgcctgggttcaaatgctaactgccactttctggcaacgtgaccttggatg

SEQ ID NO: 41302 - DNA, 3981 bp, Homo sapiens
ctatgattgtgccactgcattctagcctgggtgacagatcaagaccctgtctctgggggaaaaaaaaagaaagaaagaaaagaaaagaagcatttagaatttgtttaggtcggggactggggatccatccttggatacctattgcctaaaccatgcctgagtcagtgagaataaacactggctaggtgggtggatggatggataagtggatgcctatctggtttgatagagctgccactatatacatgtggtggataaaaatgtgtagccatgtagagagtaattacatactggccctcagtgctggcaaaggtgtagttccactggccgagggaatcaagacatagtggtccttctgctaagccaagggctgccacaatgacacagtagccagatcctgcaattccaatgagagcagccaatacagaagaaagcatctagggaaaagcagacacacaggaagtgagccacagagtgccacagctacatcttaggagtcattttcaccaccagggcaggaggacctaccgcacatcgtttgccacagttttcatggccacagcagccacagcagtcatcctgttccagcccaatgaagacaaatgctggcaggagcatctggttaggaaacaaacaaagtcaggtcattgtcttgctcaggctcatatgggtcaggttaggcatctcttggtaaaatatatttatttccaatgacattaactggctttgattaggttgaccagatatctcaaagaatgtaaacctctgaggagaaaaagaccatttaaatgtcatatctgcttgttttcatgtaatctgtcaaagcattttttagggtgaggatgtaacatgggaggagtaaaataataaactgtaaacgtgtttattccacaagagtttatcacacgaccccagataacaaactctgttttggaaatattaaaccctttctttaaatctgattttttccacttgtaaaatgcagaatataccaacaaatctttaatagaataactgaaacttttttgtaaatgggagacatgaaagctatatataataaatattaactgcttccttgattatacaaatgcatagttttaacttaacaatattaagctcttaaaatatagtaaatatgaaatacttcaggttcaagatcgaaagaaacttaagtgtgatgttatgtttaagacaaataatcatgttaacatgataataatgcttaaatttgaggcagacgggcactgtggctcatgcctgtaatcccagcactttgggaggccaaggtaggagggtcacttgggcccatgagttcaagaccagcctgggcaacatggcgaaaccccgtctcattaaataaaataaaattaaataaaatctcattaaataaataatttagggcagatttgccatgccataatcagtgtattaggtttaaatgttttactatcttttacttgattaagaaaatttatcacgtatggtaccattccataaaatttctccttaaaatttttaatcccagcactttaaagtagcaaacttaagtttgctcacattctttccatgctgtggttgaagctaatgctttcagctcccaggttggcagggaaattcctctcacttcaatcaaaaacaattcttggaaaaaataacacattccactattagcttcagacaccgacctgctgctaactgtagggtttttcctagacgccacaccccagccttacataaaggagaaagcttagagttcttttaaaatagcaatgcactcacaattcattatttttccctatcacagatggctgaaaataaacagcagagaatttggattcaaaactgttgatttaggcagagaaccagccaaccccttccggctccccagagcaaatgttaaatgactgcccgttctagtagaaactctatagtctctcaaatctgatttaaaagcgaatatctgtttcctacctatagagtttagcaaaaaggcagttcacttttagttgaaagagcattttgtaaaacaacatctcataaaattactacgctatactgtaccaatctcgcttttgtataatctgctttcaaaggaatgaacagcaacaaaaaagtcacttgatttagaaatatgcattacaaaaaactttccatgaaaatacataatgaaaacatctaggaaacaggagagaattcagtaataatcctgaatgacttaccagcaggccacctcctacgatgccagaaaagaaccacacgaagcggctgaggtggttttcggaggcatactttgtttccccattgggaaagtaaagcaaaatattagccgcgatgcacaggagggcgagccccaccagagaatgtccgatgcatcgtgcacacttcccatagcacatggtggtctgctaggttttctcccccttctctttgtcttcagctcagtgataccccaaattagatgaaagtgtgcccttctggtggagaaagcaaacaccactctcagcccattcctgctacctcttaaatactgcgattcttagtcactgaggggatgaggtactttgctttcattggtcctaatggcaggctctggctgtggtgcgaagaggcagggggaatgtcccgcccttcagacgaaatccttgggacaggcaaaaccaggggcaggatgtgagaaacagcctcagtcataggcaacagggaaaatgattaatcttgaacaaggcattgactgtgcaactcctccacaagataaagaatcaacaggaaagcctaacatgactttccagtaactgccaagtgtccgagatgcaacagccctggttgaggctttgaaagacagtgagctgtgcccctgctccatgcagctgtctggacagcttccaatctgagagctctgtgttcatttctacctttgtgctgatttaatttacaacctggggcaaatctcctgagctcatttccttgtctattaaatacaaggtgtctgagacgtctcccatggatttgagaaggctgttgggaaaactacagagcaaacttctttactctgcctacagcaagctctgcaggatggatttcagtgttcagcgtccctggacatctgcctctaaaacaaatctgcaccacaacagaggtggcatcagtcaacacaaagggctcaggtgctttttaaaaattattgagtgttgctgtcaggaaaagcaatgccaggaagggccaaggaaggcctaaagcatgggacaaaaataaaaagaggaagaagagagggggaggaagagaatgggagagaaggaaagaggaaaggaggaaggaagagaggaaggaaagaagagaaggagggagagaaggagagagggaaaaagggaggaagggagggagggaggaaggaaggaaggaaaaaaggaaggaaggatggggggagggaaggaaggagggagagggagaaaaaaataagacaaagggacttggcaagcagagtggagaaacaaggttcagagaaacagaactggctaggagtgtcagaacccacacagaggtaaacagatggtttacccagccagatcctgagaccagcttccacaggctccccacacagggcagagaaagggtgttagactaactttctaggtggttaccttgcagaaggaggggctgggcactgaataaatttatgccttgaacagcagattgcaccagccagtggatggtggtgggaggtggacagggtggccgggtggggccaggcctggagggccttgtcaccaggacaagatagagagtacagaaaatagaaaaggaccaaggtagggaggcattagcttagaagaagaaggtgaatgaggttcacgaatctagagtctgaaggatttggcccggaactagagggcgggacacataccaaatttgaggagaccagctgtggttagtgatgtggcatgggaccggaggagggcccaagaagtgtggcctcagcacact

SEQ ID NO: 41303 - DNA, 3782 bp, Homo sapiens
gtaaatgaagtggtagcccgcaatcagtctgattgcttgcagaaagcagccaaccagaggatgaagtgaagttacaaaggtcacactcctgtgcaaacatctgattggttgcaaaaagcaaccaatcagagggtagggtgaagttacaaagttatacttctatgcaaactgaagactccgtccacaatcagtctgatcagagccacagtcagaccattcagagtctggagtgaagttactaaattgcaaacaaagtctctaccagcaataagtctgatttgtcgcttacagacaacttcccaactgccacgcagaaaaggtcaaagggagtagcctctggtccttctgttactgaggcatggaaagttagggttttcctttcaatttagttctaggaagtcagtgtgaaaagccttaggttccctgcctccagtctctattctcctgcctcacatggccttttgaccttatataaaatatgcttgcttttttgcagaaaggttggggtgaaactctccactcctgctttcataccatttgaagttcagaccagtgagatttccatcagttgggagttgaagatgccacaaggacaagaactgaggatggtttgctcagagctgatttttagacaccattttccagggatccctggtgacagaggagcattttttttgtggttgagttctgaattaaaaagtgtcgtactatatatttgtttggtcatttctatgacttcagcactctcaaagacttggacagaagcataaataagaggcagtgtgagcattctccaagtaatcattccaagttggtgagttcatactccacctagacctcatggcctcgccactctcagtcaaactggtttttgtggttgtcaaagtccaacatggcaaatttcccactgatactaagtgagttgaaaactcaagttacagttgattttgccctagggaattttaccaagaacagctttacagcagtggagagttgaaacgtgtgtgtgtgtgtgtgtgtgtgagagagagagagagagagagacagaacgagtgagcatatgtgttagaaagacagacacccaaaaaaatgtcagatttggtttggctacacttcttgctcttctggcccaggtggacagttgaccttccttccccctacctgttcatagtctctgactggctttgatgcgggagaactgaagtccaaataagcatgaccctagcctctaatacaaacaccgtgcttcagatttcctccccagaaagggagttgagattctaactagctgagtcatctagtgacaactcccttcattgtgttatgttacaaaaacatagttgttcactatgggaacccggatgggaaatccattccactttcaggttaaaccgttagcctggccaaatgactgtaagattctacaaggtcctgatttttcaataatgccttcaccatgatttggaaattactttttcagacttagaaggtgaggaaaacttgagcaagaattgcaaaggaactgaaaaaccaatttgaaacataaacattatctggaatgtttataatgcatgtattccttgtccaatagaaaccaaataagcttctctgatgagacccttcagaatagctgtccctaagaggaactaaatcaggaattggggatagctggcaagaagacatcaaagaaagctcaggatgtggaatctctacattgccctggatcttcttttgcaggtgcaggttcctagagttcttattcaccatcctgaggacaccaggggaataaaaaggattgcagggcctcgtccttcttgaccttctccccctctgatttcctgactgtcttctcagtggtcctgatgtcttctataatgactcgatgtttttaggaatcagagtcctggacacagagacacatccaggtttggcaccaggcttgtgtgagttcttttctatttttttaatgaagaagaaggaagaacataaacaagtgtaagtggaaagcattttttttccttctagatcacatatgtgacattttacagggatttcttctaggttgtcaatacattaaagacaactaaaaagattattacagggaattcttaaagtcttaaaggaagatagtctcacaggaggatgagatctctgacaaatcaatacgttaattattgtctgaaaaggacgtggagcaagatttccccctcattttcattcttcagttagagcttctgatcaacataaggatcattcacccaacaaatatttactgagtaatccctgaatgtcaggcatgagtctaagagcgtcacactcatatcttactacgttccacagcaaccttctgaggtaggtgctatcgtaaacactatcacacagggtataaaactgtaagagcttaagtgcctttcccaaggcttcacagattgtccagcgtggccagaattttaattcaggcagtctagatccagagcctcttaatcactgtacggtgttgcctccaacctggaggaactggtctgaagagaacaagtattaccacgagtgttaataccattataggtaaaatacacgtagtgcctagatattggtttctaaatatggttctccaatgaaaggaatgaaggcactttggacttcggagaagtggtggctgatatcagggctgaaacaacaatatgagatgattatggaatattttgtgctggtgttctgtgttctttcatgagatgatcattcaggtgaggtcacaagaggacatataaggaggctcaggaaaacacagtttactgtactcacagatcctaaagacaagaggcacaggacaccacaaagggccttgggggaaagctctggggtggccaggaggcagaggggcaggagtgagaggagatccaggcccatggtcatgtgaaaagcagggcaagatgaactgtttaggtttgaatactttccataggctctaagccatagaggtgtcccctagttgcctggtacctggccttggaatgactaaagcagagaagggttacctcttgtgtgtatagccaaatagaagagataaggatctggtctggttagtttacatattagagacatgctcctggctgagaggggtgttggtctctgtccccagctctactgggaaaggattcactttgaagcttactcaggttgttggcagaatttatttcctagtatttgtaggactcatgatttttcgaagtcagcaggagagcaagactctagagtgagtctaccagcaagacagatccttacataatgtaacacaatcacaggagtgacatcccatcacctttgccttatcttattgattagaagcaagtcacaggtcccacccacactcaagaggaggggattatatgaggatgtgaatactaggagtcagggatttggcggggacatgataaagttggccatggtgatgctgtgttctcattgcatcctatgaggtggtttaccataccccttagtctactacaagcgatgtttacttgaatcacttgatgaaggtggtgtccaccaggcttctccagtgcacttactcttttccccctttgtaaatagtattttgtggggagatgcattcagacaatgtcaatattgctttttcatcaaacttttagttaatatctctatgaactcatgaagtcctattttgttcaatgaattataatccattactagtgctcaaattgtcccagatttggcctgtgaaagccctttaaagctggctcctgtgtccttttcacaggaca

SEQ ID NO: 41304 - DNA, 938 bp, Homo sapiens
cccgtaatttttttaacttttatttgaaattttatcatgtatatttattattttatttattccacacaaattatacataagtacacaggtgaaaaaaaagtcaaagtaaaaaattttcccacgcctttcccatgctacttcctctgccagagataactatagttagcaatttgttgtgaattcttctagagtttttcttagatagtattgttacctaaataagactaaggcacttaagattccagattatattttaatctatttggaatattcaaagaaacagaagtctgagagaaaaatataatggactgcaatttaaatcttctttgggatcaacagccagagcctccgcattgccaactccagggggtgctgtgtacattcaggtctctgtgactgatgtcccctggcgtttgcaacacagcaaacctgctaacaaaccaatagtacaatgagcaaggggtatgaacacacagaaaagaagatggttcataaatatatgaaaagatgttcaaatttgcttttgacaagagagtgcaaaataaaaccaccaaaatattatttttcatctctcggattggcaaggattaaaatgcttgttaacatacccttattcagtgttggtagaacgactgcattttcagcagtttggcaatatgtattcaattataaatttatttgcagttgctaatttaaaacacttctaaaaatataccctacacatacacttgagtgtttgggaaatgatgtatgtataaggcagggtttcttaactctaagtaaaatttgtcatttcctttaattatgaaagcaagcaggaaaccatgatagtatcagcctatgcctttgttaccaataaaatcacagatattttacatcacattacaattgttgcagatattttgaaacagcatttatgctcactcatattttgaaat

SEQ ID NO: 41305 - DNA, 4965 bp, Homo sapiens
atatctgcattcccatgtttatagcagtactattcccaatagccaatgtatggaatcaaccaaaatgtccatcaacagaagaatagaaagaaaatgtgagatacacaatggaatactacttggccataaaaaagaataaaattctgtcattcatggcaatatggatgagccaggaagacattatgttaagcaaaataacccaggcacagaaagataagtactgcatgttcttactcatgtgtgggggctaaaaaaattctgtgctaatagaagtagagagtagaattttgactattacaggctgggaacggtagggggctggggaggttggggagaggttggttaacagatacaaaattacagctagatagaaggaaggaattctggtgctctacagcactgcaaggggaatatggttaaagataatttattgcatatttttaaaaagctaaaagagaggattttgaatgttcacaatacaaagaaatgatacatatttgagatgatggatgtgctgattactctcatatgatcattatccattgtatacatgggtattgaaatatgactgtatcccataatatatacaattattacatgtcaactaaaaataaaaagaaaagtaaaaaataaaaattcaatcatgtatacatagcactcaagggcatatttgcttaatccttagaatgacattttgttcagtgcaaaagagtgatgcaagaagttaaaagcaatgtgctgggtatactccttactaataatactaacaatacttctatttatataaacttctgtggtcttcaaagcccttctaaatgtataaccaaaatgttgagaaaaggctatatggttgttacatttactgaccagaattgagctattttgtttgatgctcaaaacaatgtttgatataggtagagaaggtgttttattacttcatcgttattattattattttacaactggaaaaactaagagagttcagatgacttgcccagaatccagaaaaagtagcaagactggaagtaaacctatgtttccaatcctagtaccttttctctcctaatatatcatacagtttctaagataattatgaaaggtgattgacttgaaatcacttgtttacctttgaagagagattttctttccagatctccagttgcctgtcactaccctctgtcaagacccttggagtcatgactaacaggaagggagcaggtggcagcgtggccacctgccatgcagaaagactgggtcacttcctgttggtaaagggtttcctggttcaggtttgttaggcattctaaaatggagagaaaaacaaatgcacctctaaagtacatggaaaaataaacaccaaagtcaatgtttttgtgttccaaatgaaaatgtcactctaaagagaatcagctgttatttttagaaagaaagaataaaatttcagctctgtataccaaaactatagcctcatccattagggacactgatgtagaagcaagtagaaactatccaaagtctgcagttcctacctgactaggtaatgcttaaataaataatcagttctcatcatgcaactcaatgtttagctgagtccaaacatactgctgccaacattttaaagtcaacaacgatatctaaaataaacataggctgactaacacacactggtactttaatgaaaatatattgtgaaatagctccttgccaatagaagttcttgcgctccttctttggataactgtggactattcaacagaatgttaagccacctatattttttaaattaattaattcaacaacctcccccctttttcgagcacttactcttaagaatttgaaggatctgagattttagcttattttatcctattttgaagctatttgttagcttgccagtttcaaaggaactggtagaagtcatgagattcttgggtcagagacaagtgactttgttacagcagtagcagtagccagtttcagcatttgagaggaactctgagcttagggaaatcaggccttttacaccgaacaggaagcatgcctactcattactcttgagacactttttcactcttccaaggtggtttgctacacaaacacccttgaaaaatagtccagaacaaagtcagtcaatccctttactcatgagacatgtagaaatgtgagaaatccaaggagaattgtctccagacacttactctctaccagacattgtaatagatgctaaacatacgaagatagaaagaaagaacatgctacctaattcttgataaatataatagtgctaataaattcaactgacattaaactctcaagttctgtccatagaaaatgtaggaagttcagtttgtttagtaaccctctttaaattcttctaatcaagaaaattggtgaagtattcacaaggcagaaagcctgccttttcatcaccagcttgtttgccagtgaagtgttgaagtactatgtgttggcaaaatggaactaacgcattacaattacattagagtgcaatatctccgcactttccaaagttttcagtctgtggcataatgatcaagatgacataaaggcaaaggtcactggcaggggaagtagataagaaaaaagtgaaagcctatagaaaaatattatcaaggaaacctttcttaattgtactgataggactttgctataaaagaaattagaattaagccacaccaaaattcagagcaaaacacccgactctagcaaatgcatgagttacaaatgcctttagaatacaatttagaggtgcgtttttctttttttcctaaaacaaaacaaaagggatacatgtgtagaatgtgcaggtttgttacctaggtatacgtgtgccatggtggtttgctgcacctattgatccgtcctgtaagttccctcccttcaccccccaccctccaccccccaccgcccaacacgccctagtgtgtgatgttcttctctctgtgtccatgtgttctcattgttcaactcccacttatgagtgagaacatgcagtgtttggttagaggtgagtttttctatggggacttgagcattattaccagaatgaatttaaaaacaaaattttaaaattccaccgaaaatatatagtctgagcctctgaaaaagacatagacatgttacctaaatcatttcaacttcagttaatgctttataatgccatttctcccattattctgatccagctccctttaggctcactcggtttttaacaaggaacttttcaaaagtaaattgacttcctaggcagacttttccacaagtgagagaaacttctgacctgacaatatggatatttcagactctttaatagcactctttttttttttccattccaaattagttaattggaggtttgatttttcaataaggctcttgtgaatttagtcagcgtaagccacttccatcagagtctttctcctgggtaacatgaaaataactactggatattttgaagatgcaaacaaactgttgagaaatactttgttcctaagtggactcacgctgaggctccactgacaagtgcaagtcctctggagactgaatggcttacctgatggctgttctccctttgatttttttcaatgtaataataattttgtctttttcctttgatttttccatgaaagttaaaatttaagaacatgttgaagatctatctctagtatagtacacaaaacaccatttcctacatctgagctaatattactctcttgggctacctacaaaactggcaatttctatgtagggtagcatacagtcatgtctgtaattctttgatctgtcacaggtacaggagttcctctaagattatagatgtatatttataaaactggtaacatatactacacttgatttcagccaaaatgctgagaaatgattttatatatatgtatatatgtatgtatatgtatgtacacacacaaatacatatatgcatatataggattgccagcatatatataaatatagtattttgagacatagtgaaataatattggataacaaagacctaagtggaaatacaatgtatgtttagattatttaaaataatttaataatagtaaataattatccccaaattaatttatcatcctgaactatttgaatcatttagcacttaggaaattttttaatttcccagtgtttcgggaacttttcccaagagtattgattccagtgtactttgattgtgaggaaatgctgtgaaacaagtcttgttatctccatattcagaggcatccaatgttgtgattgttcttagaaagattataaaagtcataaaacttaccacagtgaagagaattaataaaatacttttataatatctattgtctgtgtctgaaagagttaatgctaagggtaatgtggctgttaggtggggttctgaggaaatagcgggagaggccctggtgaggcgtctccatgagaacctaccccacaaacccattcacttacccatagcaagagatttccagagcaaaacctccttggatgtgtaaggaggaaggaaggaaaaatcaaaccagtggagccaaatttgcttctctatgatttctttttgggtcaccatcagtcagaggtgtgtgccttttcccagctgtcaataacctgagtcataagagaaggaagatagcagatcacccagaggaggtgatgaaccatagccaatcaatttttgcaggaaatggtgtgggcatttgaagagagattaaacatgcgcacaggagccagggggaggtctggtgtctaccccctgaatggagtttccaaaagttgtacattttacaaacaaatgtggtgcatcttataaggcttaatgtttttaggaaacgactttgatatgacaattgtgaaggctatgatgaaaagacaaaacagaaaaccgtgtaaaagtaggagcctgacattacaaagaatgacacctttgtgtgttgctccccc

SEQ ID NO: 41306 - DNA, 1731 bp, Homo sapiens
tgggaaagttacttaatctctctgggatacagtttccttatgagtaaaattcagattaaaatagaaccaacttcatacaattgctctgttttctgttattagcattattaatatctatcttccttttcttataagctctgtccatttaacacgtctccagtacctgacacatcagtgctcaaaaaatgtgctaaaagaataaatatacaaaagctaaaattgacccccatgaaagttcactgacatgaaattttaagacagttgtttttgatgtttttttttttttccaaattgtgcttgctgtcttggtgttgttatcatttcccaatatgtttgtaaatttttataagcaaaaattatttggaaaaataatttttaaaaactaatggggaaacacttgtacaaaggcacagacaaaaagaataatacataattatataaagtcagatttatagaaattaaaaacacatgcagtgttaaaatttctctgcattttaaagccataacatgaatttttaaacttggtttctttttgaacccatgtttaattttaaaaagaagatgaggaaccgcagttagtgatgttttaccttacggagagtgggtgaggggtgagttcctgttgaaagttaacttctcacctataaccatgatgatatcaaagaatgctaaaacaaatcaatatttgggcaggtcatctgggacagatttaccagccagagctcatgcctctctgagaggtcacagctgtgcccttttgtactgagacctgcattagagaggactatatagcacccctttgagtcatgaggcaggaagagatttgcatttctcattctaattttgaaaacaactggagatacttttaaggtgtagatggtgcctgctagctcctcaagtgcaaatcctaactcaggctgtgtctacccatacacaattgtgggaattatccagataatttaccctgtagcagagaaaggcccttgatttaaacctaaatgcatgcaggctgtcctctctgtgttgagcaaacaataggtaccagtctttggtttctgaagcaggatattgtggtgattaagaggatggtctctataatcagactcctttggtttaaatctacctttatctctgtggtgaattaaagctggccagaaattctctgacatttctttcataaagaggtgaggtctatgttccctccccttgaatttgagatcattctgactacactgaccaataaaattggccaaagtgaccctgtcccattttctggcccaggccttaagacaatggcagcttctacttatatctcagagccttatgttaccatgtaaaagtctaactacagtgttgcagaaaccacatggagagccctgagactaaaggaagaaaaagaggggcccagctttatatgagcccagtgttatagctgttcccatcaagccaccttgatatataagtgaaaccaccttggattctgcacaccaatgtggccacaactgaacaacagcaaataaccgcaatcaatactacttggagcagaataatcacccagtttgtctcaacccatcttcctgacccacaaaatcctgagataaagtaaaatgattattgttttaaatacacagttttgagttggtttattatacatcaaaagataaccagtggcctgatgtggtggcttacacctgtatcccaacaatttgagaggcagaggcaggaggattg

SEQ ID NO: 41307 - DNA, 1270 bp, Homo sapiens
ctactatttgctctcacttctgaagtctccatagaaggctagtgacagaatggggcttagtgtcctcagccacttccttcttgctgtttctgaaaacaagggagttagcctttttggtttaaagccttcactgctaaacacccagaggaacagaataagcaataaactatcaagtaggagtatcacaaaaatgattcccagaatctcacacaattttcccttgcccccaaagcagtctgttggtgacctccctgctacacttccagagagtgaatttcaccaaggttcccatcccccccacgattccctctctccagattagatattctacttcttgcctggaggtctgaaggcacaattaataattgaacaattaatgagttagtcactatccaagtgtttgaagtctgaagtggtcagggcattccaggaaagtgactgtttttcagtgtttctcttcctctacccaggaaataagttacctcaggcttgaaagaaaactgaagtgtggtccacaatatttcttactttcatctagtcactcagacagtatacatgggtaactccagttgtgcatctgaaaaatctaggacaacagggctagtgttggtcaaatgccatgatggtaacttctagaagcaaacggtgtagtccagggagaaaggagaaagctgcccagtccccagagagaagctgcctagctctaagtagcatatgcatttgattaacccaatccactcacccccaggactgttgcctttagagttcatatgctcaagactccctgtcagaagccagtgggttataaataaagttcatttgcacctgcctggagtgttggaaaacagctgtcagcacagtgatgacagcccttgtttgcttctggtggaaacacagctggttttctttttcttccttttgcttgtctgtatatccaatttttctaccaaaaaaagtcacattattttgtaataaggaataaaatcacagtttgttgttgtgttcagaagggtctcctactgtgtgcatatacctcacacacagtgtcattctattgtttatatttaaaagatgatgttttgttgtttgtttgttttcaaaaaggaaaatctatgagagagaacatagcctgggttttggcaacacagagctggagaggaggtaggctaatgggtatgaacatacagttagccaaagggataacctctgttgtttgacattacagtaaagtgaccatggttagtgataatgtattatagattgcaaagta

SEQ ID NO: 41308 - DNA, 5557 bp, Homo sapiens
gatgagcttgcaaaaatcactttgagcagaagcatccccacttgtgaagggggcatgacaccttcttcacagaagggtgaagaacatttaaggtgctcattcgtgcttggagtattatgcatggctcaataaacatttgctgtttttctgctttctttctcatcctgaccctgagatttctaagtatctttataaagcaaccagtactcatttcttagaaattttagaaggagcctcaacatttttccagtctgacttttctggaatccttcccacagcttccctttccaagggcctctgagccttggcaaagcccagtccatggcttccttgtgagcaggtggcctattccacggtaggacaggtcttaccatggtaataatgtcacttgctttttatttagctaaaatttgactccctaaaatattcgacctattttaacctctagattctcaatgaagaactagtaagacttccagttccacctcttaatccttcagctgttatgtaataccagtaccaggcagggccatcgcataatgtagagcttggtccaggcgtggcagagaacttcttaagtgacacaaagcaaatgaatgaatcatgcccctggcagttggcaaactttctaataggggtgtgttttactgcctcctgcactctataactgctcttccaactgtgtcttctccccagtcaactcatcaggaccttttctctccctctctaccaatgctgaccttcctttccccttagccttagtggatgatggtttctttattcctatatggaagacatagctgagaaagttgattaggaaaactgtttttgctaattccatcacatcgtgtagggaaaagatagaacttaattacttaattgcgtaacaagtagagaaacacagcaatcagacaataaaatgaacagtagctttttgccttaaacaattcttttaagtctgagctcaatgatacacaactagaccatcaaattattttgatattgaggaaaacagaagctcttttggataaccctgaattccaggctttcagtggaaaagacaaagacacgcactgtacaccattaagtacttgggagacatgattttaaccaggatgtaactcaattatattagtgatttataaagagtctggagaaaatatttctttatttgggcatgggcactgtcagattaaaggtgcagtggttctaaatgctgtttgttccagccctgtcttcgattgcaacaatgtgagtgtcttgtctgtgctggtggattattaacagaggttattggtctccatggcaaaacgattgaatgattgctctgaacgtaatctcatttatgggggtgcaaaaaacaaagcacttcaggtcagggagaatgtataaatgtccattgccatcgaggttctgctatttttgagaagctgaagcaactccaaggacacagttcacagaaatttggttctcagccccaaaatactgattgaattggagacaattacaaggactctctggccaaaaacccttgaagaggccccgtgaaggaggcagtgaggagcttttgattgctgacctgtgtcgtaccaccccagaatgtgcactgggggctgtgccagatgcctgggggggaccctcattccccttgctttttttggcttcctggctaacatcctgttattttttcctggaggaaaagtgatagatgacaacgaccacctttcccaagagatctggtttttcggaggaatattaggaagcggtgtcttggtgagtagggaagcttaaaatccccctaagggagattttcccttccccacaatcctttttaaatcaggtacttattgaacagggagatatttagttggtaatagaagctcaagcattgcatggtgagaggtcaatgccttaatttttttctcgtttctgttaggatctgacaaggacacgtcagctaaatttactaagtaattaatctctaagcttgggctgacagttctcatgggtcatttgagtcccatgaaccgaagtgaaggtcgcatagtttcttgattccaacaagatagtgcccaaaacaataacaacaacaaacccacgatgcaaacccactagaaaagcaaattgacttaaaaccaccatgagaagctgttgtcagtgtggtcgtcttccacttaggacctaatgatttctttacctctggtttccaatagaattgggaacctccgtttgagagagtgaaagggagagagactcactcttcatgacaattgaggaaaagtttgttattcttttttctaacacaccatctaaatggaaactcagattttgaaatcttgcctcattgaagctggttagtcagcccaaatggaatctaagtactccataacactccattacccctccagccatgctctgttactttgccattccctttgggcctccaaatccctcattgtggatggggctccttatacagtcaggcaggctcgggccctcccttcaactcctggactctctctgaggtgcctcttctcctggtagatgatcttccctgcgctggtgttcttgggcctgaagaacaatgactgctgtgggtgctgcggcaacgagggctgtgggaagcgatttgcggtgagttaccatggggggcagctactagaattactccagggtgctctgtgcttttgtgctgggcagcatggggatggagacaagttatcagctccagccaggactctgggagcagctggtgaagggataaaactgtgatttttcctgccagtgtgaaataataataattttccaaaataccatagccctcatacttatagggtatgaatattgtattagattttacaaaccgacagggatgtcagaactggagattcagaggggtcccatatacagaatgcaagcctggaaggcagagatgaagctgcagcattcctctgccactgagaggccataagaacttggacaagtcatttcccttttctggccctgaattgcctcatctgcaaaggggacttgggacaggacaaaagatggtatcctcccctccccagtaggcttctaggttcctcactcacaccacttccatgttctctatttctgaggcccagcgcctctggcttccaccaggctctgcttcaggacttctgtttcctctcttgtttcatgcggccatcgatcttgaactagagacgttaggcatcaaagttccagagtgcagtggaaagaatgctgggacatggggacaggacccattctgcaattgagcaagtcattctactgctctgcctccctttgctcatgtataaagcaggaagctggactagaccagaatttctcaagtatgggacaagctctggtgctacacagatgtgctatatctttccacaacatagaatgtcattcccattcaattctccttcaatccttttgaatctatcaatctatcaagaaaaagatcttattttggtagacataagtctttcttttttcttttctgtttttttttgtttttgtttttgtttttttttttttttttgagacagggtctcactctgtttgcccaggctagatcttggctcacagcaggcttgaacttctgggctcaagtgattctcccacctcagccttccaagtagctgggagtacaagtgtgccaccccacgcagctgattttttgtatttttagtagagacagagtttgggcatgtttcctaggctggtctcaaactcccggactcaagcaatccgcccacctgagcctcccaaagtgctgggattacaggtgtgaggcactgtgcccagtcgtctttactattttttaccctttataatctccctttctaacaaagagaggacaagtcttaggctccaggaatgaatgcaacgttgtttaactaaaatgcaactatattgtgtttctatctgccaatgattctaatttttcattcatatagtgatataaatgaacacaatgagagctgacaaaaaatattaagagttagatatattgatgaggcagaaatgaagcatagtagaactggaattactggtctgaaaaatgaggaagatcagtttctcctgtaatctcccatggttcacatgtccacctaaaagattcatgaaccacaataatgaattaaccacatttactttaacttcctaaagggaaaggtgcatctatccattctgaaacaggatccttttaacatttctttcttagcattatttgttcatttattcaatcaaaaaatattgagcacatgtgaaaggctgaggctgctccaatgtgcatacattacagtttccatgtgagttcaaaggtcaaagaaaatataacatcatgagtcccaaaaaagtattgatgattgttatgttaacatttaaaatcatcatttacaaagagttctttttaaaaaacccacaatttaatataatcatgtaatatacgttttatataacaaaggatattttatgtaattataaaggaaaagaaggtatttataacttattttccccttgaattataatcccattatatgttgtgaacttttgggggatagaagttggagatgaggattttttttttaattagctattaagaaaataggatgaaaagaaagaagagtcatttattttagaaatctaaaatttcacacctggtgctgagtaaaaggctaaagactggctaatataaaaataagggatcttttgtttgcttgatttttgtttttaggtttacatataaccacagtgagaagtgagatagcattctaagtattacacaaaacttggtttttaaaatcagatgtaaatgaaatccaagatgaaggcaaaaaaagtttgtctttttgttgttgttgtttgtttgagatggagtttagctcttgttgcccaggctggagcgcaatggcgcgatctcggctcactgcaacctctgcctcttgggttcaagcgattctcctgcctcagcctcccaagtagctgggattacagccatgtgccaccatgcccagctaattttgtatttttagtagagatgctgtttctccatgttagccaggctggtctggaactcccagcctcaggtgatccacccacctcgtcatcccaaagtgctggcattacagtcatgagccactacacctggccggaaaaaaaatgtttttataagcacatttcattaaaaaaaattttgagtcaataggatctgaaatatttgggcttcccaatataggttgtctgtgggggctgtctaagcctccatgtggaacctgcccttggcatgaattgaggataactcctccaaatgaccaactgaccatccaaatcatgaggcagtgtccatcaaaggaccagctgtgccagattgtaaaccaaggcacctagcacggctgccctgggccagggtcgaccacatgctgggtagccagcagaaggatttcttgtctttgatttttttgttttgttctattttgtttttttgaggcgaagtctcgctcttgtcccccagcaggctggagtgagatgatgcaatctcagc

SEQ ID NO: 41309 - DNA, 1058 bp, Homo sapiens
aagttaaatagtcccctgttctgaagcaaaggctatgaaatagcctacatttatgcttcatgatctgctccaatacgacactctcctagctcgctaaatagctattctttgcatgacaaaaaaaaaaaggggggggcctcagaaccttccccaggccagtgctgctcacagccaggtgtgtccccctccaggagccctctgtcaggatggctgtgcgaggtcagccagctggcccgccgcgcctggtggctgtcaagcctggcagaaatcccacagacctgccaaaagaattccgaggcctccctcttttctcgtccctgttgccccggcgacccgaggccaggcttagtcagcatttttgtttgacaaactgcattctcctgtcccccaacccccaaattaaaaaaaaaaaaaaaaagaaagaaaaggttgagggtaaaagcagggctgaatttgctttgggaataatgatttctctacaaggcagcccccgtgaagggacaagggggagccaaggctttgccacttactcgtcttccaggtcctggtcctcgaggttaaaatcttccagaaagatggccccaaaccgttatatttaaatgaataacacacatgaaaagaaatactctcttcaggtaaagccatatgcctgttttcatgtcaaggaattgttcttttagataaacaggcattgagaagcctgtttctcaatgtctgacctgtgactacgatttcccacttcatttggtaaagttgcaattgtgccttttaggatactgagcaaatattgcgttgaatttttcagttgtaacaacagaatactctgtagtcattgtgggtgtgtgtggctcatgacatttaaaaatttatgtacggcctgttgtagaaaggattctaggcgctttggaatgggtacatacaaagtcacagcacaacttcatggctgacacagaataaaaaaatgacttcccaatatattaagaagaggcaacaaagcagtattaaagtatgctaccacttttgtgttttaaaaaacaaagtagacacattgatacaca

SEQ ID NO: 41310 - DNA, 753 bp, Homo sapiens
ccaccagacaccatggaaagccatacctgcctcatgagctcctcttggcgcattcgaatcctttctctctccatctggattctctgaagccgcagtttctgctgctgctgctgctgagtggtcagcgcattgggcatactcatgagccctgcgggtgggttctgagtggggtggttctgctggctcagggtactgggggccatctgctgctggtgttggtgattcatcactgcaagagggaagaacatacagattaatgaccagggcccacaataccttatcaaaaatagaccatcagaatgttttctgctttggagtatagattcctgagattccttccaaagtactttcctgttaaccattactgtttaagtaattattaccttaattcaattcacggaggctcgaatactggccccaatcctgactcatctagcctcggcttttgtttctgttaaaatctcatttcacacctccctgtctagagtacattttaagccttacatagaacatagtggtctaaagcaaattccacaaaggttatcacaagttatgagataatttcaccagatcatttgtgtgtgtgtgtgtgtgtgcatgtgtatactttctcagttaatttgtgtgtttatggcagaggtaaggagggcatgtgatctttggtacacaaaccagtgaattgacaaacaacatgtaacacaaagcacctagatcaggagccgacatataaggaggactccattaatcctttgt

SEQ ID NO: 41311 - DNA, 1830 bp, Homo sapiens
ggtcaggagttcgagaccagcctggccaacacagtaaaaccccgtctctactaaaaatacaaaaaattatctgggcttgttggcaggtgcctataatcccagctactcgggaggctgaggagggagaatggcttgaacccgggacgtggaggttgcagtcacccgagatcacgccattgcactccagcctgagcaacaagagcgaaactccagcttaaaaaaaaagaaaagaaaaggcagagtattccaaatgcagtatctgaggccaagccggattaagggcagactgccacaaactgcctcaaaaaggctaaagacctcgtcagctctagaccgttgccagtccccccagaaaggaataacccaaacagaagatttctccatagaagcaggaatgcatcaaagctaaagcagggacatcttttttgtttttccttccaagagagtcagaatttaaatttagattcccatttatctttttctttttcattgttttcatctccttttccctttttcttttttttttttttaataattggctttctcttctgtgtttggaaattgataaaaccatgctctgcagatgtgtgaccagaaacatttaattggcattattcaatataaaggaaaaaatcacacacacacacacacacacaaaaccgccagtgccaaggcatctgagatacaaacacacttttgattcaatgactgtgtccttggtgaagcaaacagtcaacacgggaatggggcggggggtggggttatttacgtaggacatgaccctctggttagtgctgcctggggcaatatacacttggtcatttctacaaagctctaagtgtatgctcaaggcaagaaagtcgcccggactcaattctaagccagcacaagatttgctatataagaagcaaacatggaaaaggtaaaggcttcaatcctgaacttttgccttttgcaacaccaggaaacagagagccacagctcgtagagaaagtgcttttggcagcttccctaagccaggagctgcagacgatgagggaggccagtgaatcagaggctgcccagagcacctcctggaatgtttcacaaacgtctttttggcctcggcaggtttcagtggcttgctcttctatgtcctgggcttgcttccctcatttttaaaataggttttagttacacacatacacatatacaatgccaagtgaagaaaacaaaaccataagggtaggctcaactacgaaaaccatagcggacaggcctgcaaggggctggctctgagtagatcatggaaagaacagctggcgcccagtggctagaagtcacacctaagtgctaggaagacacagaaattacttggctcccttcaaatccttctcctcagttcacatgtgagtcttggaaggtgaagaagaatatcttcggctagtatgcgtttcttgttgtatctccctcctctctcctttcgacaacaaacttctcagtggaggtatctctactcttggcactttgaggtgaattttttagaatatgtggttttgttaatgtgtcagaggcacaattccatttaagtgaatgggtaaggcctccccaagccctccatgactttttccatccccagcacctatttcctaacagtacttcggttccaacaataatagggagttttcacaggctgtagactgtggttcattagtttactaaaaatgtaatttccacaaatccatattcatatgaacagataattaaacaaataaatggatgaaggagagacaaatctcccttacagaggaattcaaaatcatttatgtagacacaccatgctcaaaggcc

SEQ ID NO: 41312 - DNA, 668 bp, Homo sapiens
tctccaaaaaaaaaagagtagaacaggtagaggctgacattgtttttaaaacttgaatgcagtctcttcaaaataggtaaatatgcaacattcaaaggcatacactgggtaatacacttgatatggcatctgggaaacttcctccttggaacaagtgtttaattcagtttgatatttgggccagtaagttcatataaacttcatcagaaacactttccaggaacctaaacccaacatgagaggggagcataaaagcttccaaaagttagaatgcaaagctttacaatcacctcattctcttcttctctgtcacagagggtgaccaattatcctggtttgcctgggactgaggggtttcccagaacacaggtcacagtgctaaatctgggaaagtcccaggcaaatgggatggtttttcactccaggcctatggccatccatagacctagggctaactcagggcagcagaactcaaatttcctatttccaccctaatgccttcccttaaaaagagaaccaggagccagtacaaaatgacctttcattattcagaactgtcaggctatccagattagctgtcagtgtgtcctccttggattaaaaattggtggttgtccttttgtatccatattatgtgataattggaatgggaatattacatactcatt

SEQ ID NO: 41313 - DNA, 2303 bp, Homo sapiens
tgcgatctcagctccctgcagcctctgccttccggttcaggcaattctcctcctttagcctcccaagtagctgggattataggcgtgtgccaccacacctggctaacttttgtatttttagtagagatggggtttcaccatattggccaggctgatctaaactcttgacctcaggccatccacccgcctcaggctcccaaagtgctgggattataggcgtgagccaccgcgcctggcgacaatattaagattagtagccatccagtacattgatctcctctgcttaacgttatcagtctatttgcataatgtggagtcggcttttgaacttcgatatgttgacaatcagaaataaagtaatagctcttcacatggttgaagagatacatagcttaggttttactgtatttctagaaaccctaatcaatcttcctcccacgttgtcattctttctaccaccctaattaataattctttgtcccaaggcagcttttaaaacactattattggttataatgattcttccattctgcccaaatcctaaacggcaccatctcctgctatttttaatgcatcagaatagaagatacaaagaggtaaaagtcaagctgccaatgtgcacagctgacacatctattagcaaagcattcagagtttaaaccccaaagctattaaaaaaaaaaaaagactcatgccatataataaaggtgactcttcacacagcagaaatgtgttagatgagaaagttcatccttctttgaaaccacaaagaatttatagttgaaagtttccggtcagattttcacttaagcagctcatcaaacatagctgcagtctatgacacagaaataataactgatatataaataggggatttttttaggatcctctaataaaagatgatacaagaccagagaagttatttcagtgtatggttccggtctctaccattcacttgccaattcaaaaaatttcagcattctctggaattctgaatgaatggcagggattgtatttttaactaccaggctctaatcctcgacttccctcacagacttgccaagaagtttccacttgtttaagttagcagcagtaggcacagcagccatgtgaaaggtctcctagtgcctctgccctggccagctgtggtgatccatctccctcacgtccttcccactgagcaccaccgacttttctgcagactcattctgtctgaacctactcagtcaggcagaagctgagtcaagcaaagctgctgtcagccccaaagagcagatgagccaaatcaggactgtaatacccgtggttcctgcagggattcatttaccagagttttgtccctggggtgggaaaaaaaagtggcactgtgaagtgccacttcccagagaaaaccactttggaaggctggtgactcatcaagacagccccaggtgtgactcaggagcctcacttcagaaggtgaacagttcagtcactgtgttagagacaccccgtcatatgctgcacgcaccccaacagcacccggccctggcaagcctcactttgcctctgcaaactgagcaaaattcttgcttaacctcatttttcctattttgtgaaaacataagaaggaaaaaaaaaaaaggactgggagtttctgttgcttgtttgatttgggccaagagccatattaaagaactttggctgcgttgcaaacaattttattattagtaccagcatttttttttctcctctcatgccaggatcaataatgctattaaaaaatgtatagtccagacacagtggctcacgcctgtaatcctagcactttgggaggctgaggcaggaggattgcttgagcataggagttcaaggccagcctgggcaacatagggagatcttatctctaaaaaaaaaaaaatcaaaatatgagtcgggcgtggtggtatatgcctgtggtcccagcttcttgggaggctgaagcggaagattacttcagcctgggaggtcgaggctgcagtgagccgtgatcataccactgcaccccagtgtgggcggcagagcaaaactctgtctcaaaaataataataaaataaaataaataaaagatgtataaatcaccttaagtttattgtgttggaactccacaacaatgtgagagtctatttcacgatattatttccagatgtcaagtataaaatatgtacttggtagagtctttatttcacttttctcctttctcacaaacaaaaacatgggatgagaatcagaagtagagaaaagatgagacgctttatgaatggtgaattattattactcttatt

SEQ ID NO: 41314 - DNA, 640 bp, Homo sapiens
tgcccaaacagaagtgactaatgctagcagcaagtgctgtaataaataaggccccgagagcaagagaccgctgcaccacagtagcttgttgtatattcccatggtcaggactatttggagaccagcaaccagattttccagagctcttgatgtgttaatcaaggtaaccaggtgcaactcctttcactagcaatcttttgctaaagatgatagaaagaaaaaatacaggaagagcaaaaatctaaagagaggaagaagtccaaataaaacattcactcagaagacagaaatcatactaatatggtctatgcccagttatattacagatcagtttttaaataactacatatgttttaatgtctgatgtaatgcattacaggtgttctcaaagttgtacatggacgatggaccagtgacctaacattaaactttgaatttctctactactgtttcaacatgttgttggcacaatttccgaattagttacgtggtttttctttgccaccataaggatgtctgctctgggacccaaagagtcaaaatgccttaatcaatcattgaactttccttatctttatttcaactctcactcactcacctttatctaaaaaatattttggtagagattatgaatccatat

SEQ ID NO: 41315 - DNA, 2745 bp, Homo sapiens
ctctctctctctctctctctcacacacacacacacacacacacgaacacacgcgcgcgttgggcactgtgacttggtgccttcttcggctccaggctgacttacttgaggaagtacctctggccagtggccgtgaaggtcatctcccagcccgggggcagtggcagctcgtcggtcacgtcgtaggactgctggcggaggtgcgcgtgctgctgcgcggggctacccgcagcacccgcgccggtgcccagctgcagggacgcgggcgacgagtgcgagcggacatgctgggcacccccagccagtcgaggccccgggtggccgcccgacgagtcggtgctggactggcgcgagtgcgagcccgaatcaggctccttaaagaaagactccggcaggatcttcttccgccacgagctaggcttcggattcatgacagagttgaagagggcttcgaggtctgtgtctaggtcctgcgtgacgtggatcacttgctgcccaggcggcgggagcggagggggcgccgaggccggattcatcttctgcaaaaagaaggtcagatcagccttttatttaaagtcggaggaagtgggtaagagggttacagggtgagagggcgagatggtgggagaaagaatagagggaaaaggaaacgaggagacagataattgcccgcctggagatcccagacactcagcggtaagaccagcaggatgggggaggggtccctcctggcctcgagaattatgcaactttcttgaagcaaagaagttgcctggaggaggagaagatagggcgaggggtggagggaataactgcactcggggcttgctgaaccgcaggatggcaaaggaaaggtcgcacgattccaggacaggcagccccccgaaagaagttcagcccgagccaactccaccacgtctcgactccggaagcccgaggagcctggagccctggagtggtgccggatgagcgcgcgagctccagcgggcactacctgggcgggcagcgaagctgagcctgagcgcgcggcggccgccgtcccgcccgaacttgccgtcgggcctgggtcgctcgggtgagtcccgagattgcggagctggagccgaggcttggctgacaaatcccgacccgactctgtgcctggcagtctaagggcttcggctctcacatcccccgagctggcctaaggcgctagtgctgggcgaaaaggaggcgcaggagaagcagacagcgcggccgcagcagctcccggactgtcccataaacaaagtttggagcaaactcccacccccaggaaagaggcgggcccgaaagttgagctgttgaattatgtatgacctcctagtccctagccggccagcccccgctcgcccctcctcttcctcctcctcctcctcccacctcggctccagaaaaccctgggcgtgatgggtactttactgggtaagaggagacgggtgccccccacccactcctcccggccgcgcggacctctcccgctcagacctgcatctgcattcctttgagtttaccacggacttggggcgggatcaaagggaaagtggcctgagcctgtttcatcaaggggttgtggaccgaaaccaaggccgggggtggcggagggcacgcggatgaggggctcaggcctaggaagggccggtcctggacaccgcgccctcccctgcagccaggcgccgaggcctgcagcacccggagcgccgcactgacccgcgattctgcccgaaggccggcccgggtgcgccccggcgcggggagacaccaacaaggccagcttttccacgagaggctgcttagctcttgtgaccatatttggtctggcgaggaggcatcttggctgcctggctctcaattgtctgctagagcacagacggtgcccagaaagtgcctctgtcactggagatgcggcttcgccaacgggtgggttgtaaacaaacaactttcaaaccattcatcaatccttaatttcctctacgggggtgactcaggccactagagattgagaagaaaaagctgggtgttggaagagaagagcaattgcacccccctcccccgcaacatccgtgagggttgtgggaggattggaatgtccctgccgccctccggggagcctggagccgggatggaacccgagcaggtggctggaagtagagagggtgcgccagtgacccgaaaaaagccacccaccttcccaccaactagatctgggcgagggatggagaccccctgcctctagctaagggaagaaggtcaagtctggcgaaacagctgcgggaagtaggaggaggccttgcccttcagagcagctcaatttcttttctctctggttgcctctccactgaggggaaagggtggggggagatggcgaggtaagccaaattccaggaagcccctactccaccccatttgattcaaataggagtttattaagtaaatcaaacgagacaatgtaaagcacttcgcacagcaccgggctggttacgtaagtgtttgttaaataaaagagaactgtatgttcttcaagttcacgtattgtgccttaatttttttttttttttttttgagtgacgtctccctcttgtcccccaggcttgagtgcaatagctccatctcagctcactgcaacctccgcctcccgggttcaaacgattctcctgcctctgcctcccaagtagctaggattaagacgcctgccaccacgcccagctaatttttgtattttttaaaa

SEQ ID NO: 41316 - DNA, 1205 bp, Homo sapiens
gtagctccttcaagtctggcagaagaggaactcgacagggattgacttaatcccagagactgcctcttacccaggggtaaaacaacacttttttttttttttttagcaaaagcggatatctgaacaactaataatgataaccaaatacttgcaatttacagttgacccagctattccacagactttggtatatttatacaaaacacttttcagtatttctgaaagtaaggtggtattatgtacattttaccatgagaaaactgatttaatagaagctttaacaatctcacagctacttaagggacgggcaggatttgcaccctgactgaagagctctgctggttttattctactacaatcggaacaagaccctaggactcgcaataatccgtttctctcccgggagacagggaatggctcgcaaccgccctagaagcctgcggagccttcccctttcccttcttactggcggcgccttcgtagatttttgggtttgcgccgcgtctcaggaattccacagcaatccgcccaaactcggcgaccactgcaatgaaagtcagaaggctgttgagtgccaggcgctgcctttgacctcctccccagcccacagaacaccgcccccacgcccgctgacccgcgctgtccacttgaggcaggaaggccaggtgttccttatgctcctcggacaattccagcagcatcttcactgtcctacgatttcacccggcagcgccgaccccgccttcgccacttccggcgcccgtgtcccggcgcctagaggctccggcgtcgcagcgtccggagctttgggttccggcctacgaactaacgcgttacactcggacgttccctgcagcgcaggctgaggtcagaacattgaaatcatcccgcaaagatgcagtgagcgcctgctgggtgcaaggtgctaggctctatgggagatgaaaaggtgtttcaaatccgacacgccccctcgtggagcatacattaataatatcaatagttcacatttgttaagcactaaccgtgtcaggaagtgttcttacatttattaaatacatttggagttcagaagaaccctatgaggtaggttccattataatttccattagagataaggaaactgatagacaagtccagcaactgacacttttataaagctaatagtttccagagcttctatgttatcttaaatgtatctcagt

SEQ ID NO: 41317 - DNA, 1287 bp, Homo sapiens
atgtacaaaattagactttttcctttataaacaaactgagatgcaaacaaaccaacccaagagatatacacaaagtatcttacttttcaataaaaacaaatacgttctatctcatgagaataattccatgcttaccttcaaaaaacaaatgcaaacttactgtaaattcatacatgtactttaacaataagaaaggaaaagctaaacagaactgactgaaagaaaacaagttaatgaaagttttgaatgtactgctgtattttttctcaagttctgcttttttatattttgctgttttggagttacagcactaagtaagcagaagcttgctgaactattccagagtgaacaaaaggggaagtaatatttgtttttgttgaaccaaatgaattccagtgagatgtctccataaacttctcctcttgtgtggtagtcattctggagagattatccatggagtcttggacactgaattggaacacctttcttcaccagattcttttcataccttttgttatgactcatcttagaaaagagggccatttttaagaaacatgctttcatgtgtaaattttaaagaaacatgtttatacatgtttttgtgtataaaaatgcataaatgtaaaaccacatatattggattttggtgtttatacattaacagtacctctcgaaagctaaaatgtttatcattttgaatcaaatttagacttgtcaagatagtacaaacttctctaacttatctgataaacatctactcaatggtactacagttaactcaatctctcagcataaaacaacttttcacaacattccagggatgtcaggagggattaactatgttttgaccccagcacttggttggtacaagtctggttatagaaggaggcagggaaaccagaaggagtcctagggaggctgagcccatttcacgctctgaaaagcacaacctgctggatagttgccccctttgcagtagagcatggacatgtgacagggtgctcccaatcagacctacctatccaccccaactttgaattacgagccaataaggcagagaagcaacagacacaggaaagtctctaggcaatggcatttctgaagttgccggcctggcagcagggctggcagcatgtccagtgcctgttttgagggctcagtgttgcctgtagtggtgaccttcccagattagttctggggcgtgctttagatgttgtttctggctgcataatctctaagactgattctccaatcttccgaaaactactcaatagcttttcaatactt

SEQ ID NO: 41318 - DNA, 2541 bp, Homo sapiens
tagagatattataaatgtgtttatactaattagtcttcttagtaatattcccaatgctgacttttatttatgactttcttaaaggcagaattgtgatttaagtattgaatgtctttgcaaccaatgaaaagttaagactacatagaatactcataggatacacagaagaggaaagtacctttgatagcttttatttaattttttaaaatttgatcttaaatttcttgtatttgaattttatttgagtaggtaatatttgcaaggttcaaaattcaaaaggcacaaaaggatacacaataaggaaagagtcttttccccattgctgtgtcccacctactcagggctctccaagcaatcaaagtgacaagttacatccaatggtattctactaatactctgtgtgatagcctcctcgccaccatttttaaaagatgatgttgaaggagttgaagcctgtaaaggccttattaagggtgccttattatttgaagcagaagtagtgcctgattctatgtctcctgacatttctttcaggactctgtaatatttgcctaagtcacactgcttttgtaaggtggcgagttggcaatgattaatcaatgtggatggtacaatccggtaatttaagtttcgactggtttaagattgagacaaccagaaaggaaggcttatcagaagggcggcaggggaggagatttttggttcatcaaaaggaggcaagggttttaaaaggctgacctagggcctgaatcacatggtttgacttttgctaagccccggggatggcgcgtgtcaggcccagagtgctgatgccagcgtggatccgagccaggcctcaggggactggcgttcagacctcgggccgctcgcatctctaacaatttgagccctactttaaggtgtggccacggtccccacccactctgatctcagactgggcacggtacggaaggcgggcggatgaggcctcgccctcgcctctttagtaggtcgggtgagtgtagtgtgcagggaagagacgcgtcagcgccagggccaggcccgcccgggggcagcccggcagccgaatcttgggctactctgtcccaacagccggagcagatcagaccgaccggccctgcccgctcggtcccgcgccctccagaccctacggtctccgtttctaggggcacatggttagcggcaggcgcccacagccaatccactttgccagcctgccccttcctctgccaagagcagcttcttcagccgcgctccagttccgcagacgcctgccccaccctgctcttcccttccagggaagacggatcacgcggccaagaacgagactcgcaaactgggcatttctccgagccgggctagagcaagtagcgagactccgcgtgagagtgggaaagagccttaacaggcaaccatgttgcccagtgggttttctgtgcctttgggtgcggaccaatgaggcgcgtggggcgggacttccgcttcgcctaggtgttgtcgtccctgctagtactccgggctgtgggggtcggtgcggatattcagtcatgaaatcagggtagggacttctcccgcagcgacgcggctggcaagactgtttgtgttgcgggggccggacttcaaggtaagaccctgtccggcttcgcggcagccgggcagctcgttatcgagcggcccagagaacataccccgcttgttggccctcgagctcggagtcggccctgctgctgaggtctttgctgctcctctagagctgggtgagaagtcaattaggctttttgcaaaaggaataaaatagccttgccctcgggggaccgagtctcccctgcactctcattccgcgagtttgtgtgtgtccaaagttgagttaccggttttgcttctctcattcccttcttgaggctgcaagagcctgcctggaaaacatgtttggaaggcttttcttggtcaagtacctgccgcaacgtcctcgggcacatcgcttgactttagttgagggggctgttttgtctctgaatagaaggagggcagtcacttcctctcttttacccccaccccctttttctttccctggaagctcagattgcaggtttgggacttaacccctgctagggccagatactacggtcagtcagcagctctgcctgtatgcttgacttgacttgacttgcacttattaaataactttgtcccagagagaaagagagagtgggcagacatcgaagccaaacagcagtatcccggaagcactcatgcaactttggtggcggccactcagttttctctgccagtgtctggtaaattcctctattttgtcctaatctgacaatagtaaatagtaaatttccaaaactgtcgtttcatcatcagtttcagcaccgtgggcagctgctcgggtcctctcttgttgccccaaacctgcccggctattactgttcgtcagtgatgcagcagaaacagtgaaaactgatgcattcctttcaacaatgatgtgtttgttctccaaggagaacatctgcagtttttgatacaatataaata

SEQ ID NO: 41319 - DNA, 1225 bp, Homo sapiens
cgtaaatagagactataaagcaaaactcctgaacattatttaaaaaaggcaataaatgcaaaaaaccctcaaaacatgctacatgtcattgaatacacacaatatacacacatacactgtcatatacgaagtaaaaggaaactggtgactgttgatccatgagcattggcttttgaagcccttgaatacatgtgtaggcaagaagctgtactttactcttcgaacatcaaccttggatggatattgatgctgttttcagtaggggtttagaatgtggactttggaaactgactgttaggtttgaatcctggctctgctattatttgttgttttatcttgggcaagttgcttaacagttcttaagtcttccccatttgtgaaatgatacctaccttacagggaggttaggattaagtgagttaactcaataacatgcttacagcaatgcctggcacttagtaagagatcagtattagttgttttggttattattccaatcttttattttccctccaaactctgtctccctttcccttccccaaagttagctggaaatttagatggaaagtcatagtttttattcagattcagtttcccaaagaggtcactggtcaattaggtacatacttcttcttcctactaaaatttaataacaactataccttattttgtaaatatttgtgtgcttttatggtatgatttctaaccagaaattgtccacattcagtgattcactaggagcatttacaagactcagcacatggttgtacttatggctgtgatttattacagcaaaaggatacaaaacaaaatcagtgagaagaaaaggcacatggggtaaagtccagagtaaatcagtgtaagcgtctaagggtcctttcccagtggagttacatgggatgcgtctaattcctcaagcaagttgtgacaacacatgtaaaatgtttaccagggaagctcattagagactcagtgcccagggtttatattaggggttgttaatatagacactctctgtctagcatgcaccaaaattctagatcctagaaggaaaacaggtattcagcacaaaccacattttttgtaaagtgtaggcacactgagctgttcttactaggaaatagtgggaactgtcctgaaatctaaatttccagatgccagcgaggggccaaccttgcaagcagacctttctagggatagcaatctcaggcctgctgtgttaact

SEQ ID NO: 41320 - DNA, 3216 bp, Homo sapiens
acatgagttgatttgacttcagttaatgatgtcgtctcttaaccaagaccagtctatacaaagaaactgtaaagagttgacagttgacactagacaaagtgcaaacttaaagagttatttataaactgtattaagtcagctggtgcctgaaagtgttcacgtaatggtaaaaattcagctatcaactctgaacaaagctggtctatcatattcagtcccattacagtaaatcatgtttcatcaaatttaaagttgcttcaaagtctcccaaaataaagcctgttctttgatgtgttcacttctctgcttagagtaactagaaatatacgtgatgagatggacttcaacccctggacatcagtgcttttccaaattcatatttccctcctatttttctagccacgactcccgtttctttccaacttcccttcccctcccatctcagtaatcagttttctttctgggcaaacgcaaagtggattctgtctacagcactgcggtaggcaatagtaaaacagaaaaaatggagggagattgggaaagaaactgaggtagccaccagaaccggaaaggagaaaacgtgcattctaacattccatgaataagaaggaaggcgtcgcccccatcagaactgcagagtcatagcaggccccagccatttccaagcacactcccgcaatcttcctagtcagacagcgggaactcacacacaaagacaagaggactgcaggaaaaaagttgatgaccagatgccaattccctacaagaattgtagtccactgcgggtatacgagaccttaaagtactactatcaaggactgagttctaaagttagactttaaaccatgttaagtggtaaaagaataattagcacccttaataggggacctgaattttggtgcttaatggaaagggagcgtggtgctaagaaataaagagaatggtctcgtatttagtacaattatcataattttagaaacagccttgggcagaaacaggcaaaacaataagctggaggttttgtggcaaatattctccaaacatattgcaaccaactcaaaaccatcaagtctcaagaaaatcaggcaatgtgaagcataaaactgcattagttcctttactgccaccactaaagagggagggacttagagaagtgaagtgtgctcctggtcttcgcagataattgaaagcccccgaaaagcaccccttttttgagctatgttgcataactggggataaccgtatatcgatgaatctccatatgagaagagaaatcaatggcagttcgccatcttggagaatttaaaaaaaaaaaaaaaacaacctatagagctagagctgaagtcgagattcacgaatccacctacgcggtcggcgtacatctctcgcaagccccagaggcctggacatcggtaaacctacgcaaagtcgcttcgagaatcccgggggccgggccggggccgccgcctcccacagccggaggcgcgggaggcgcgctgtccgcggagcaagagccggccagagagcctagggacctccacccggggcccgcgcgccccagcccggatccccgacccccgcttccaccccagaacgtgcatagcaaacctcagggcttcaagagaacctaggggaaccgcactaggaggaaaaaaggaacccctccccttgccctggccggtgcgtgccccctcccccaacccgggcacctggaccgacgctgggaacgccgggggcgcccggccagggccagcaaggagtccggccgccgcccccagcctgtcagcgcagccccgggtgagggggcgtccccgggcctcggcctccccgcccgcccggcagccgcatcctcggcgcccgctgcctagcacacctgcgggctcggccctcagtgttccagccccgcgctgcggtgcccccgcggccggccaccccgctccggtgcagggaccagggtaccggccgccactggtcctcaccgtaatgctctgaaagacgcccccggccgtggctgcccagacgtatttggcgtcgcagtagccgacaatggcggcctcctggcagcagccatcgcacatcaggttatccacgtagctctgccaaccggccatcttcgagcccttcgcactgcagcgcggacggcgaggagcagcaggcgcagcggcggcggcggcggtagcgggcggcggcggcgcggggggaggcggggcgggggcggggaggaggcggctctgcgcaggcaccgaccgcccccctccccgaggagctgcggcgggaggacgcgggttcagcgatgagggacgaacctcagagcgcgctcggccgcccggccgcccgcagccgcggggctgacaaaccagcggcgggaggctgcgaagcggctgtgcctgtggcggctgctccttaccgcagcgccctccgttttccgcggacacggctgggcgtgcgcgcgcgcgtgcgtgcgatccttccgcggcgcccgggcacggagggtcccgggaagggcggggggagactgaggcgggggcgcggagggataccgccccgggacaatcacggccgccacgtgcgggaggcgccggccgggagcggtggcgggccgagcttcggacctcgggccggcggagagggtggaccccgcgtcgctctcggcaccccaggaacagcggcggcacggacgccttggagccccgcggccgggccgcgatgtgcttttctcctgtgttcgctgcccgggatgcggaatcttgagcctcggtgtcgggttacagagttgtcctggtgacgggatgcggagcgtttcctcctttttgttgtgggggcggctggtggcaggggcagctggtggcagggttgcccacgctaatctccgagtctctaagggcaccgtctttcctggatccctcttgcgcctcgtccataaaggcagacccgcgggcgcgcgccggcaacctgaaatcagagcaggcgtccgtggcgctcaggaaccttgctgagcttcgccgatctttcattgttgcttcatttgggtaccaagggcctctcattctgtggattctttgcctggaggagcccccttaatgttgctaatcacgtgtggttaaattgctcgtaaattccgaacaaaacaaatagcgacctgtgttacactgtttcttggtaactgggaaagttactggtggcttgaagtatacgcagaaaatacaaagattaaaa

SEQ ID NO: 41321 - DNA, 735 bp, Homo sapiens
aattggaattcatccattattcaaatatatggttattaagcatattctatggaaaagtggctcagttaagttctgtgggatttataaatatgtataagaagactgcctcaaatcactttgaacatgaacagagaactagataggtaggcagataggcggcagacagacagagatgttctcaaacaccagtttagttcagtggaatggagagaaaagaatgcaactatgatgcctgaggaaaataagcagatgttttaaacccagtaaggaaaggagagagagacagcttggcagatttcccagcaatagttctcagttcagatgtccaaaggttagagaagacaaacattaaatcaaccttctaagtttgtagaaaaaattcaattaaagcatgtagtagtacttaccatagtgtgtggtaatgtcaataaatggtagacattgatcactgtaggagatttaagaggctgtggctagtacctttttcaaaaatatttttatctccctccctatcacggtgcctataattccatatcatgaatgatttttgaagtcttttccaatttcaagtattttattaaagaaacaattttgaaaggctcataccttaagcttttagtggttaatctagaaaaacaggggacagtggccagatgagagagcagaagtcagaaaggagataagatggtgtcagaggctaactttcttatatccgataccattctgtgaagccgc

SEQ ID NO: 41322 - DNA, 1283 bp, Homo sapiens
ggttgccttgcagaggcaacactgaagccgagactattctcattaggaatttactatcagctttgtgggggtggaggtgtaggttggtcaggagcagagtgaccccagtacatgtggattacagaccaatcatttactcatttctcctgctaattctcttccttttccctacgatgatgtaatgttattttttcagtaaacaataaaaaatgtattgagtccttctttgtatgctagggggagatagttgctactcagaaggttataatcaaggttgtcgctgaagtgggagttcatggattccgcttccctcccgtctctaaggaaaaggcagtgaactgtaggttcgaaatcatttgatctcacgcttgcctagaagcagaagaatgaagctgactagaacaccccttaagcctcttagctgtcctgagggaaaggagcactgcaccctcccccagagtaaagacatcgcgaattaattcctgggtggtggacggcgacgtccttgtcctgcgggaagtgcaagggcacccgctcagggttgtgagaaactgcggggcccacgctgctggcgagagtcaagaaggaacgaaaagaaggagctccatctagcgttgttacgaaacaagaccagcggcatcctgaacagttagctcctttctgaagggcgagtaccaaatgaaaaacgcaccttatcttccgcctaaaaattttaccgaaaaagccagagccgctgggctgtgggaatttagcgcacagtacaagcctgacatcacctttgtctgggaatgaacccaggaacggaaagaagactaaattatcttaaggtcttgcttatcagtaactacacatgaaatgtttcctcctaggacaggagcgcaggcttctttgttgttataaaatcatgatctggggacttgacaacgtccagagcaatctggggaggcccataaatgggatcctgtatattatgactttggggacatttgtgcaagtatttgtaattgatgggtcatagggttcacataccttcaacttcagtaaacaatgactaactgctttccaagggaaatataacagtttacactctcatcaagactatgagggttccctttgctccttatcatctgcaaaagttagtattgtcagccagtttcatttttgtcattctgatgggtggggtcaggatacttcatggtgttttagttggcattttcttagttactagtgaagtcaagcacttcccatatgtttcttgtctatgtagatatcctcttttgaga

SEQ ID NO: 41323 - DNA, 760 bp, Homo sapiens
gctgtcagggtttgaaggcacccctgcttttggagttggcaaagacctaaggaatccaccgcaaggagagaaggagggggcatggacacacacaggtgatttaggagcctgaggatacacctcactcccaggcaagctctcccaccctctgccgccaaggagagtgctggcacatctctctggcagtcttccacctgaaagagctaatctgccagtcatcgcacactcatcttcctgtgggctgccaggaagaatctgggtcagtgggagtttacagctgtaggagcagccagaccaggtcatgaactatggttcatctactttgcagaaaagatttaatgaatcctttaaggctatgttgcctctcccaggggtatttgcatttataaaagaaccaatgaataaaaccattattttatatgggaaattggcaaatcaagtggaggaggcatttaaggcctagtagatccctcacctagccatagattataccagaagtgtggtcgataactactgtacctattcaacatgcagggcataggaacagcatggagactggcacggaggagggctgaattcccagagggctgccgccaactcaacagtgaggggctcagacccttcacctctgtgggtgtcagtgtgcttctctgtagaatgaagggtaggaagaagaaccagtccacaccgctccttccactacctcctttcctcatccctcttccttctctttcactgttggggcggctgtgtggatatc

SEQ ID NO: 41324 - DNA, 2098 bp, Homo sapiens
aattttatatatgttcactgaattctcacaataccatgtaaggtagatattactgttactctttaatttttagtaaattgaggctctgctaggttaatactttgtccaggtgttcaatgttgacaaagcttacagtcaaggccaaaactacttagtgccacagcccatgattttgaaaagacaaataatttaaaatttaaataatgtttacaagacactagaggttgtctagcaaaggtcaatctctgattgatttcccaataaattgcatgagaagacattgcctaagagttcacttcgatatggagctggcaaccgcagggagctcttcccaccactagacctgaatgaagcatcgaggagccattcttggaagccagggaggggagtggaatggaaagggctgcctggcaggagctgtatctctgggtagagggacacagccaacctgcaggaaccagcagagaaggggccaggaacatactctgatcttacctcctccttcctctctcctgccagtactcttgggtaagcaagccctttgctgctgtctaaataggtcatcctccctgggcagagaacaggatggaaaagagtagagagaggacctgggggtgcaaatgtaagatatccaacacaggaagtttgttataagattagataacttacatggcactgtgtctgctacacagaagatactgaccacctgatggttactattatttcttattatttgtcctgctttggttggcttggtatttatgtgtccagttcagatcctctggcctcaccgcaaacaaaagagttttctaatccctgtagtagcatgagaagtgactcactaaaaagtcaattaagtttcttgtctacaatcttttgcctctattttttttaaaggaagctttcaaatggggttgggggtggggaacttggaaatcatttttttaaacacaagctttgtgatttgtcttattggaagttcttaacagaggaaaggggcctgtttgtttagattgctatgcaacaggaggcattgagtaaatggtttcccagtttttattattttaaacttcacccggagaaaattgatccaagtttaagaaagacaggaggaatggaatatagactctaatgtttccaaaattctaaatggcactgcaaataatagaaccctaaaacaaacattcacaaacagaaaattacctttgtatttctcactttcaaggtaaaatccgtagaaaatatgtcttcatctattcaaacagaattttttccagctaatttatacactacatgctaaataatgacagaaagttgaaagtttatcactttctaccaaatatcagcaaaaggttaagttgctgtagaataattactttttatctccatttttcacccacaacatgcagaaagcacaactaggcagaagccatcattgaccaagaggaaagaggggcagatgcctcctaaaattctttccctatctcaaactcagtcaccagtttttacaaaagcttcacattcccccatcgagctatttttcattaggccaagaggttttgggttgatattcatgttggtgctggctctatcaggctggcaggcttaaggcagtttctgaatttcctgttcaagttagaggggaaaatgcacatgcgtccagtgccctgaacttggtgaaatcagacatctggaagccaatggtggggaaagagagcaaaggttacaagaaaaataacactcagtagcaaccagcaaaacaaacttttgtctggagcaacaagaaggcacagcaaacacatcagcccatgtggcaccagctcatcttcttaaaaacagtgtcttactgcttctcctaatgtcaggagttccaaaaacataaagaagtaaataaaaataattaaaatgcctctacccaataattaaatgccactaccctaacactgtgatatatttccttctagttttttacacacacatattctataggtatatgtacataagtaagattgcaaagaaatacgaaggatattttaaaactaaaaaacagaattattttatacttgcagttttatgtgttgtattttaagtctacatt

SEQ ID NO: 41325 - DNA, 1370 bp, Homo sapiens
tgtgatttaacaacccatgtctgagagtcagaagctcagggttctagctacagctttgtcactaagcagctgtgtgactgtgaaaaggccccttgacattcctgagccttagattttcataactaaaaaaaaaaaaaaaaattggaaaagaccatctcccgtttcaagttctcacaatatttgactttaaaactttgtaacttccattgtattttgatgatgagtgtatccttccagaagagttctttagcatccagaacagacagataggcttacctgttgtctaaaataaagtttcaatccccttttttgtccctgccagtctctcttttccatttttccctcatcctctttgtaaaacaaacgtgttcttttccttaaagcaacagaacctgaattcttctgttggttctaaagcagaacttaaagtttctctggatcttctgtttgtcacacgacttccccagtcacgtctgaatgcccaggccagccagtgtcaatttcagtgttggttccaatgttcccaaatctccgctcatagagcattcttccttcctctttaggtaagctttcctaggtcttaggcagggatttcttaactttctatgtgttgcttcactgaacaaggtaaagtattctgttctcctactcacatagaattcacagagtaaatatttctcagagattttccttcctaatcacgcagcatttttaaacacttggcattgtgctccgttcaagttgtcgagcccagattcagggagagcccagagcttttggtgtcagagtgaacaggagtgctgggtgaatgaggcggcctggcagggacaccataggcctgttggaccctaagaatactgacaaggctgaagagaaagacacagaggcagcctgctcttggcaagcccaggcagggttccctttgatgtgaagtcttgcttgatattgctttgtgtgtctgcatttgtccttggcaggcggaaggcagttcctttccaacaatgaggtgcccttgtgtattgctgccatccaccaaaacagtgatgcatgcaagcagctcccagggtgatgaggtaggcagagtgaggttgaggctggtgaagggggtggggaggacactcaaggagaacccaagtgccaaggtgaagatgttagcaaagaagctgtgacaggcctgaaactctgcaccagggctctcaaaacatttcactgatttcaccttgaagtaggaacaatttgagagggatacagagtaattaggagcaaaatgttgaaagtgatttcttttgattgaaatacaaagaggtttagaaatgctgcctgcaattgcctcaagttagtctgggtcaaatactagcctgtgaatgtta

SEQ ID NO: 41326 - DNA, 514 bp, Homo sapiens
ccttctgccatgcaagtttcctcatcttttgttcctgtaaagatttggtgcaggaaatagaaaagggtttaggtatctcgagtagaagggaatttaatacagggaatggggtgctgcaaaattgttggaagagccgtagaaatgcatgtgaagaggtcctattagacttacagatcatgctgatgctaggttataaggttataaccctgaagctatgaaccagaggtcaggaaatcattgtcaacacgcataggtcaagaaactgctgccagtttcacagttgcttcacattcatgaagctggtcactatagggtgattgtgaagtctgtccactacaaaatgcatttctgccagggcttaccactgccatagaaataaaaacgggctccaccagcatttcactttccaaatctcatgggaaggatcttatttcctggacttcacctcaaaccctggcagcaagggagcctgagaaatgtagttgttagccttccagcccctatgacacaagag

SEQ ID NO: 41327 - DNA, 3062 bp, Homo sapiens
ttatttcatttcatttttctgcttatttataccctgccttggtcctcctccagcccccacaagaaaatatctgggatttgggattgcttgacccatagtagaaactcaaaaatgactgaacaccttgacaagtgaaaaaactgagacccagaaaagttaaactgttgcccaaggccaaccaaataaatttcctctgaaagccacataaggttggaaggcttatcatgaaaggtaagttccgcatcataggcagtgtctgacaacagagtagatgctatgggtcatagatcatcctgaggtcctcgtggccctgttcaagctgtgattctgcaaagcacagagcaggttggcaatttacaatcccttgcagaacttcctaactttaaataaattttacagcaattttatctaagttcaaaattttaaatattttagagaatttttggataatgcctacaaatcttttaaagaagtttaataggttctagacaaatatacattttaatgagaacccaaaattatatttagctatataatataatttagccttttagaaaatcagtatgctataataaaagcataacgcattttgttcttttattcattgattgatttttctctcaccttagacctagaaacacattttgtccaggaaagcagtttcaagtgagtgagttacgttgaatgctctgaaagaataatgcaacttctggaaatcccatggtatcagccaaagttgtcaatgaatcaaaaatcaactttgaggaatgttttggtatgtagatgcttctaatgaatatgctgaaatcatgtgaaacagccctcatcagcatcaacaaatatttgttaggcttatcatgtggatggattaatgaggatatgaaagccttaagtgtccaaaactgacattgcctcaggatgccctcttgggttcttaagcctagtttttatttaactagagtcctcagctttttattggacattgtaccttcaaattataataaaattaattgtaaaaatattattattcttatttcaattgtgcaacccaaatttctggaatatacctggcatagagcagggtgaaatcatacttagaaaaaaacaaaccaaaactttgaagacattttggtaggatttatccctcctgaaaatctgttggtctattccatgacatctgctgaccagtgttgcatatgttcaattctatggtttaatcagttattttttaacttaacactaagcattttcctgcctctctagaaaagccagagaggaatccaatcttctgtaagctctagaaacgcgttaatatttttcttataccacctagtcaaatatcttttttcccagacaggttctgctttgtggaaatgagctgcaaagacctgccaattcaactctcaatgataaacaaagcctacttgtcttaaaattttgtcaaggcagaattttacctgtcaatttcatttcaaattgtacagactgccctatgtttgcaggaaaaaacccagcttgttaacagtaggacccaaatactaaacttacaaaggtagtccaagaggaagcacccacgacaaacagaaacttccaaaacctaacacaatgtggacatgcacatcacactcagatctttgccttcactaaaaaaagtaaacagtgtgatgacatcattcacagccaattaaagcacagccccatggcaaaggaagtgctgggagatccttctgcaagtaagcataagagtgaacatgcaatatgtttgataagctgtcctagtacatgtccaggggctctaagctgtatttacaaaatagcatttgttgctgcttcaaaaacagctgagggtggccagcaatatatcacattccacaagaggagcaattgcggtgatggacacaggatgaccaggaacaacctttgttcgtcgttccatcacatggttcaataataaatattactactcatccagtgtacacataggatgtggtgaggcaaaaccctctcccagaggtcagagttcactcccttttccaggcagatcccttaatcaaatttattgtctttactttggggaaacacaattttcccatcaagtagaaggcaatcttggaacagcagattggggcctatttattacagtcgctttcaagttctcctttttttcttctgagtcccaaacagttcatggtcccctggtcttgattaaaccagtcttgtattttgaagttttgctttctctcttatctagcctcccctaagttccaaatgatctcactttgtagtttcattggctagagataccacaaaagtccgaagtcactgataatgtacttggaggcacaggcccattttatgagattctatcgttttggttcttcatgagaacacagtcttctttcaacacagggttgtagatccattactaggtgttagcagaattataaaatagtattgtgcaatacacaatataatcaatttaacacaaaatattgtattattttaaaaacacaatatactgtggttttgacttttttctttagaaaaataaaatagcccctttttttttttttagaaattcaaagtatatagaaaacatcacactctatgccttcgtatgcagaaaaaccataaagaaagaaaactggcctggcatggtggctcatgcctgtaatccctacactttgggaggccaaggtcggcagatcacctgaggttgggagttcaagaccagcctgaccaacatggagaaaccccatctctactaaagacacaaaattagccaggtgtggtggtgcatgcctgtaatcccagctagttgagagaccaaggcagaagaatcacttgaacagaggttgccccaagctgagattgtgccattgcactccagcctgggcaacaagagcaaaactccacctcaaaaaaaaaaaaaaaaaaagaagagaactgatagaaagaactggcactcaaatgcctacctttgacttaacaacaacaacaaaaaaacaaacagacaacatttgacacagagtacatcctctgaacatctttactaactagca

SEQ ID NO: 41328 - DNA, 948 bp, Homo sapiens
catcagtaacttctactgtataaataagaactttcagatagaataatctccagggtttgtttttttgtctttctagcaataaaaaagtattgactctgttaaccaatatttaatcattttaagtcaaacaaaacaaatttttacatcattgtagtgttacaaatgtatttggtttcttttatactgcttagagataacttcttaaatatatattggatttcagtattctatatataaatttgagcatttcttaatgggggaaaaagattaaaactcatattggctcaattatactggagcagggtgagaacatctcaccaggcaagagcaaagacagccccgaatgtctcctcccctttgttgaaatattaccagcaaaacccaagtgatcaaaaaagactcacaaattatatggcagtccatgcccataaaacatgatacaattcggtcaaggtacactaggtcagttgctaagaacctcgtgtttcttctagtagttacgtaaacagttagatgtgtttgcttttttttttttttttcaaagactaaggaaaagggaaaattgccaacacaattaccaaaataattaattaaaagccagcccagtccgcaacagctgctttcagttgtccggagtgtgccctgaggcaacagcaccttacagctcctttctcaggcaaggaatgctgccattatctcgttctcaatggaaaaccacctcccctgccacatccctgtaaattgttgaacctaaagggcttttttctccacccagaaaagaaggtaatggaaactaaagtaggctgttcaaccataagccttgggaagcttccaaaagctttcattcctgtccagaagcttctaaagaggaggcctacgattagggagataagcaatactatcaaatttttggagcctggaaatgctttccccaaccccatttttctt

SEQ ID NO: 41329 - DNA, 1648 bp, Homo sapiens
tgctttcacaggcacaccgtgtgagttctagtttaaacattataaagtggagtgaggatgtcttcttacattggaagatgatctacaacttatcaagtgctcaccattgaaattgtaattacttcatgcctcattacagataacatgaaatatcttgtttagcatctatggaacagcaataattatatctgcttgaatatatctcagttagagctttccaaaaaaaagatatttaacagtggaacaatactcaacaactataataattataaactagatgtatcctagccctattctatttcattatttggcagtatatgcatgagttcattttatgattttccaaaatctatcaatgataaggaaattattagattgcttctgaattttcaattatagttcttttcctaatgatgtgtattctccttggattccttagctcaccaaaactttttttcatcatagccaaattctgacagaactatgtttgaactatacttaccctttaaattctaaggctaattgtaaatttttcatcatccttttaatatggcaaactttattgagaggtaaagaatcagttaaattaaaaaaattttaattatgaatcatcagggcagctaagacctcaataaaccattttttacatgaatttggaaaggaactatttcctccaagcagactctgccctcccctgcctgcacccagggtacagggcttggtgagtggagcacagacaggatgtcagtgcccttgagtcccctttgtagagcacaacagcacaaccatgcccagcggctctaggaacagtgtcaaaattagctttatttacaaagttactcatctttatttactaagttgatccaaccagttcaaacacacttctaggacaaaacctagaaatgagcatactgaccagaacgtcaaagtaaagttaaagtaaaaaatgaatgaggggtatggtagaatcatgagttagttaaatttataaggataactgaaagaataaaaccaaaattaagctacctacctctgatatggaagtcaatgggctatagacacttttgcttatctcttaagttagtttcatgggacttctggtttgactattttctttaaaaaaatttatggagataaaaattgataaaatcttctcacagtatggtttggaagcaactcttagaaatttgaatgggcaaatcttcggcccagcaatttcattctaaatacctgtcctaaagaaatacacatattaacaaagagtacaaggattgtaacaatatttccaatagcaaaaaaaagactgcacaaaaattcatcaataatgggttgataaaaacaaatctttgtgtgcccatattgtaaatgtaataatcatatgattctatttgaactgacaaggaataagaccaaagaaaatataccaatgaagcaaaaaaggcaaatagcagaatagtagaaatcccattaatgtaagaaaaatgcgtgtggtaaatgtgcagatatatgtatgtatgtgtaaacgcatagagaggtatttaggaggacatattcctaagtggtcattgctgaggaagagtgtgagatttgaggagttggaacagagatgggagggtagaaaattgggagaggggattcataagggact

SEQ ID NO: 41330 - DNA, 1358 bp, Homo sapiens
agaacatattaatgttcttataatcaattgagctttttcttcattttgtaattatttctatcatttcgaagcttataaagatgtctctgttccagagacttgagaaattttcaaatctgttttcttcccatgtgtacatacatgtgtagtatgtacaaatatatgtatgtgaatatattaatgtatttgtacgtgtgcatatatatacataaacacagacatatgcacatactctttttaacccatgcagacattgtcttgctgtacaataatacaaggcatttggggctgtttttctgaccctgacactgttgctgggctgagaattactctgccagtgtccagatgagatactgagccaccaggatttaaatcttcaacttacctttgctccaagtgatatgattaagcagagattacttaacccaagccccagtgagtcattccaaacccttgaatcagtctgacaaatccacaaagcttctgttgaattactgccttggagaattctttgcctgactggttgaacactggatgactgcaagcctgatgatttatagaaaggcacaagtctgacccaatgggcacacccattgtatttctacagagaagaaatatctttggagttaaattggtaggtcccaaatgaatcaatagagcagcacatgtggtatgctatcacttgtggaagagaaaatatatatcttctgtatatagaaaaaaggatagatatagattaagatatggatatatagatatgatatagctatatgggagggtgaggactggctgagacttttcattatcctttcataactttttaaaatttaatttaatttttaatttcaacttctattttagatatggggttatatgtgcagattttttacgtgagaatattacatgatactgaggtttggagtacaaatcctgtaaccctcgtagtgagcatagtacttgataggtagttttttaacttcaccatgccctctagtagtccacagtctctactgttcccatatttatgtccatgtatgctcaaagcttatgtccatgtgttctcacttataagtgagaacatgcagtatttagttttctgttcttgcatttatttgcttacaattatggcctgcagctccatccatgttacagcaaaggacatgactttattctttttttatggctgcatagtattccatggtatatatgtatcacattttctttatccaatccaccattgatgggcacctgggttgattccatgtctttgctattgtgaacagtgtagcactgaacacatgagtgcatgtgtctttttggtagaatgatttactttcttttgggtatatacccagtaa

SEQ ID NO: 41331 - DNA, 1563 bp, Homo sapiens
tttatcgtcttttggtaacagatattctcccaggaatctccactctcgctgttaaacttcccagcaagttcaaaggggctctcatctctccaagatctgctagttaacttactgctgctacatggcattgcctttgataatttagcccctcccagaggctgatttttctccatctcaggataaaataaggtgtgttttttgttgttgttgtttttgtttttgtttttttttgttgttgttttttgagacagagtttcgctcttgttgcccaggctggagtacaatggcgcagtctcggctgactgcaacctccaactcccgggtccaagcgattctcctgtctcagcctcccgagtagctgggattacagatatgcgccaccatgcccggctaattttgtatttttagtagagacggggtttcaccatggtggtcaggctggtctcgaactcctgacctcgggtgatccgcccgcctcggtctcctaaagtgttgggattacaggcgtgagccaccgcacttggcctaaaataaggttttatcaagccgtcaaagccctggactttggcactgttttcaaagggtgttaaaacattcccaaaggatgaaccctcttgaactaaggaatcactgaggggaaaggaatgcaagcaggtctgacaggatctgcagctttcccctgatttattgcaccttgctttagaggaactaaatgctcattctgatgagtttagtgaatatgagacactctctgtggatccaggatttcaccatatgctattgggtcatatgtctcaaaactcaggtgtgctcatcgttgaactaataacctcagttattcatttggtttcaaaatgcttatcctggcacgtacagtactgttttcttttagggctgagattttatctaacacaattacagtttctgataagctattctgtgtttaaagcacatatttttaaaaaatcagaggtctgcatctccaagcacagggcagtccaggataaatcagacccactaaaaatataaggactatagctgatctttgtattattgttgttagaaaggtaattattccaaattgcagaaagaatgaaaatagaaaaaagaaaaatatgacaagtaattctaggctattcttttgatgtgtttccttttagtctttttaaaaaaagataaaattttgaattttttttttcatttaacttatcacagatattttgcctttattttgccagtctgcttcatgactatggcttttagagatcgcttttcaaaaggacatgttttagtgaacgctatcaagctggaaattttaaaaagcaagaaatccagatcatcacacattttttcattattttttagtcatcaaattatttttcatgtgtatttcagaggattgctcttccaagaaatactctgtaatacactgtatgcatttgagagaaaactctgaacttgtttttaaagtttgtatattcaaccaggtatcaatgacactttttcatctttttttttttaattactaaagaatccagtcacatcaagcatcatgagcttcca

SEQ ID NO: 41332 - DNA, 2215 bp, Homo sapiens
catccacatgcatcagattcagctgtctcctaaatctgcaaagtgttatctgcctcaccgtgcacaaactactgtcccaaactgtattcaatccagatgggaggttttatcacttcctgacttcccttccattgtaaggatgaatattttgaaaccaggcaactaggaaaaccataccccactaaatgggagcatatactatttagggaaaactttctaattgtcccccagaaaatgaagaaattatgctcttcttgtaccctgattgtacaaaatgttcagctccctgggatatgcaccagatcacattcacaagagaacctaccatgggtgtgtccagcgtcacgcacaattctcagtgaaacagcttaatctccacacttttctgtctcacaagcaaattaggatgcaagtgaggttgaaattatcacaggaatacatgttatcctattttaaaaaataattttcaaatgctggcacttcactattaataacaacaatttacttgtgacagctgataagacacattgatatttcaatcctgattcactcagaccaccaccactcctataagtacctccaatcagggaacttgtcaatcataaagtggaagttggtttatgttctatttcctcctcagggacagggcccaagtcttgatcatcactttacataaatcagtgcccaggctattgcaggggtgcaataacacttatgtaaaccaagggaaaggcacataatatgcctagaatatctctagaaggatcctccaagaaactgctagcagtgattgtccctcaacagagaaactaggggttgaggtgagacacttgatttcactgtttttttttgtttgtttgtttgtttgtttactaattaaactttttacccagtattttgtattttattgggtacattagaatatttattgaatgaatcaacacacagatgaacgaacaagctatatccaggaacacaagagttgacgcccaaatatttttgtctgtaccaacttaacagcagtggctttttccaacccgaagtttcaaatccttctggtgactcatgtcaagttgcgtgcgccaagttaagagagtgctgacactctgactcagtgtgtacagaaattcttggccaaggaggagacaaagaactgtcacaaaggctagactttattggttcagttttgattcattaatcagaagtggaaatgctcacagtttttctccatattagatgttgctgtatcttgtctgtgaagagcaagcgtggttacttctcaagataaagctctatccaagatccagaaaaatggcaattctttagagaaaaaaaatccatttatctcatgtccctagtttcatgtctcctttcagctccagagaggtggcttactgcagtgaattgaagagcactggctttgggatcaggcagaactgtctaactatcctttgtctcagaatttgcagttgtatataaactggggacaaaggtacctacctgacaaggctgccattaggcttaaattagctaatatatttaaaatccctgtaacatagtgcttaaaaagtggtagctattattcctaccgtaaaatagttttacagcccttttcatcctttaaattgactgagaatcaacaccagtcgttgctttaaaacaaagctttgaggctttaagtcttacctataaggtgccactacattataagcttaagaacgttttgcctcctcccataataaaaatattctgtggtgtttttgacatgttacttcttttgcctacagtgtaaagattaggaataagcttgctattaatacttccaatattcactgtgtcatctgtctgactgtcataatcctcaatcaatcacctttgtgctagcatcactttttatccaaccaggtcaagatcatgtaatttgacggctgcttaggaatttgtcagcactgttatttgaagggtgttagaaagacactggcactacaatcagactctgtagcaatatgccatgccaaaggaatttttaatgaggtggatttttttttttgagttgggggatcccttgtccccaactcaaattcatgcttcagtctggttccaaaagaaaccagactttttggaaccacaatccccagattcctcaatgtttggcaagtttgccaagaggttcaagctgccctctagctcatctggctgctgctcttgcccaggc

SEQ ID NO: 41333 - DNA, 1141 bp, Homo sapiens
caattcacctgtctttatgttgagtaaacccagatttacgacacttacctgactggtaactttacatttacctgcttgccttgattaatgtgtgtcttgcactaaaccatgcatggcctatgcctgtttctgttcaaccctgagtcaccagtgctagcccatagccagacacagttagagctcaagaaatagttgtttaatgaatgaataaatagatatatctgcttatgagtggccttcctgtaaaaggtggttctcattgagagacggggtgtggacagaaggcaggttgtcatacaggatacaggttgtcatatctgaatcacctgcagtgatttttaaaagttagctgacaccttctccccagggcataccataccagagcttacaaggtgctaccccaggggcagcaaggcccacctcacccaaaatacacctcaaataactagtcagtggtgatgaaaatttctttaataggacccaaaacctttcattcataatcagagatcaaggttaaggtacaaataccttcagccagtgtgatatgatagaaacacccctgattgaaccagaagtcaacaaagcaggactttagacctgccttggctttggaaatgggtagatgacaggaagggaagggggataagtacacaaatacacaggctgctgagaatccaaaggtgtagaaaagcagcaggctgctgagaatccaaaggtgtagagaagcagagcaaggggcaagcacaaacaagataaggtacttaaggcttcatcttcataattttgctagcatcaagcctaccctctcttgggcccaactgctttctgctgtcaaggtgaaaaacttatcagtcatactccccaggtttaggaactgccttggcaaccaggttcagactactgacccacccagtgatatttaaaaaatataagccaggagatagtttattgtgtgctaccctaattcttatgtcccaacacgtgttagttgtttttaaacagaaccttaattgctagttcatggtcaccttttgatccagtctgattttcaagatcctatgctgtatttatactctactttctcttttcctgtctgtggagaacaggatcttgctctgttgccccgtcaggtcttgaactc

SEQ ID NO: 41334 - DNA, 4666 bp, Homo sapiens
caaaaaaaaaaaaaaaaaaaaaaaaatccatccccagtcactgattaggaccacaaacagcacatgagagaagttcccataccttatttactgactctctgaatagaaggaccttgcaatttttcagcaatataaactcagagcagggaagatgggatgattcacccgaggtcactgagaagatcagatgacccaggaggtcatctgattaggatccaggtcttaatcaggagtagactccctgcccattgagagttattggagtgaattttagaggagcacaccttttgggggctgttgagttgcttataatgctgagtctacttctatcttcattaaagggagatgcatgggtccagggaatggccaactcatagcacatcaatatgttaagcttttcccctttctaattttaagatgagacacatttccactacttcctattctctgctataaaagcaaacaaataactgaccatcccgtcatatttttataaaatattctatattacttaatagctatttaccctcaaggaggattcatggcctcatcccttattcttgtctttttgtctcacactagttccctgtatgggctgtcctttccttaacttctaatatcaacctcttgttgttctaccagttctgttagttccagccaagtctctcctccttcaagaagattccctgatcatttgcttcaggggatttgtttccttattagaacaaccctattttaccatttgtttcactcttaggacatttgacttttttttttttcttttttttgagacggagtttccctcttgttgcccaggctggagtgcaatggtgtgatctcggctcactgcaacctctgcctctcgggttcaagcgattctcctgcctcagtctcccaagtagctgagattacaggcatgtgccaccacacccagctaattttacatattttttttagtagagacagggtttctccatgttggtcaggctggtctcgaactcctgacctcaggtgatctgcccaccttggcctcccaaagtgctgggattacaagcatgagccactgcacctggccttgacttcactttttaagtatttaggtacatgctggatgtgtcatacatatttttattctctgtgtccccaggaataaatgaatacatttgatttcctttaatagaataagaatttaaataaaccacagaggctctttatacttaaaaactctggggtaaattttcttgcaatattcaaactgtttttcagtctttgtttgttttgctttttattgtgatttccgatttttaaaattattatatttttgaaggcaggatgcccatactgtgaaattaacaggttacatatgtgcagtattgatacacttcccctttaacaaaatttaattcactaatcacatgcatttctaaagccctttgaaaatgtgtgtcatgcttatgggtggccacattccagagggctgaatatgtgctagaaaaggagaggaggcttgggggtggggagaaaacccttacaaggcaagagaactgagcatgtgcaagactccttactaaacgaaggagggcagaggagtgccgttttggaaatatcaaggggaatgaaaagagaaagagaattgacgggagagagaggaatctgcccacactcaggggatcatccagaattcacagatgaacagggtgcactcaaggaagactgcccctccatcagagcaccacccctcagtgactgctgacgtgtaagacacttccagcatctttttaccaggccccacccttggggatgcccagaccaagatatcactctttgcactaagtgactcctgagataccagccctttacctgacttacattctgtcatcctgcatcagaattgtttcgaatttttagaggtattgtgttataatggtgttcaatgaagttggaagaattctggctctgctgcttagaaactggcaagttacctgatttcttgggacctccattctctcatctgtaaattaggactaataatacctacaatgcaggatatttgttaggattacacattagttggtactcaataaatggcagctattgaaaagcagtgtagtatggtggttaaaagcatggagtctggatctagacagaggttgaatccttgctttgttacctactgtctgtgtgactgattttctatgtgtctcattttcctaatctatcaagtggggataataatggcacagtttctatctcgtagagttgatgaagagatatgatggttataattcagagtctgtcagataaaaagcatttagtagatggaagtagcagtggtagtatcaacagcaggagtagtaataattgttgttgttattattattacaaaatatacagtgcaaggcaacagttaagactgtgtgctgtggtgctgaaccacttggattcacatcctggttctactcctttccagttttgtgatctcacagtctccattccctcatccttaacctgggaataataatagtattgccttcataggatttaatgaattaatatatgtaaattacttcgaacctgataataaacaataaatagtaaacaataaattttagccagaacagtgatggtaaacaataaatagtaaacaataaaggttagccattatattcccaaatttcaatcagctattgctccaggatttaggcatttctgtgggtagttttaaagtttgatatcttatacaattaaatcaaatgtatgtattatgtggtgattaacctgtataccagttccctgggaaataaacgggctttcagccataaaaggttttcagctgggtccccgctgaccatctcttcagtttctatgtgtatagcagatggtggactgcatttttttaaagtattgcttctaaagggaagactataaagttcttagaaaaataaaatgctctaattacaagagaatgccattgtctcggctgtctcaccccacatcttaatgaccgatactgtggaatatgacacaaagggaagagatctcataattaggcacattggagaatctcctcgtgtgctacagactgtgatttccagtgacacaccaaaagccagccactataaatccctttttacttttctctctggctgtactgcagtaacagcacaagtcgttcgttcagataccggaaaggcttacagtccaggaaacttttttttcttgtctccagccaataatcttgtagcatggtgatgtcaccccacagttatgcaatatgacttaactgttggataggtgacaggaattccacggacaccaagatcacaatgaaattgcttagctgctaaattagtcatattgtacattagagataagtcacttttaaaaaagctgtgattaactgccagttcaaatagtactattctttgggtagggaagtcaggaccccatcactcatagtttaaatgatcccatccagttattccagcatctgagtaatacaaacaaggtagttatcaaacttcacaatatcacaggccacttgaaaagggacccagtgtgaaaaggaaacactttctatcctctatatttaggaggaattttgtacaaaatttcctgattgtcttccaaaattagtaattttaatctcttgatgactttcctaatcgaaataggatgagagtaggatcctgttcctcaatgatgacaaggattgtttagtattgttttctttttctcacacaaactgggctctgtcctacaagtcaactacactgtgaaaggggactttttactgaccacaagccatgatgaggtagatgtcacttattctacaatatcgattgttagaataatccttaaatcttcccatttttaacacatgtgttagaaaaacttagaaaacactgaaaagtacaaaaataagcaaagcccccacagtcccatccttcccaaaacaaccataactaaaacttggttgtaatttcttctagcctcaacaaagattgaataaatacaacagcctaacaaacttcttgcctggcagtgtgctgagtgctgggcatagaaagataaataagacttcatcactgcccctcaggaagtacacagcttactgtaatggggtatgtaaacacaaaaaaggcatttagcccaggctgcagagaacggaatgtggggtggagaagatgcaagggattatcagagcagattagagaaatcctagagtgggactattcaaagttttgtccactaggtgactgcagattttacaagcaaccaatagaaactgagagtcctcatttaaaattttcagagcaatttgacagagtaactgtaattctgttgaatctaataatttttaaaattgggtttgtcttttatattttttatctcatttttgttgtatttatttttattgtattttcaaaaatatcagtccacaatggattggagatttaaaaatatataaaactctattctcatgatgaagagtttgaaaaccactatactcagagattcaatagcttagccaagtgtagggtgaccaaccatccggtttgtgctaaaactgggaaagttacaagcaaatcaggtgaattggccaccttaaaagtgtttatttctaagaaataattatcttcatgagtgaatagatgagatgaag

SEQ ID NO: 41335 - DNA, 1846 bp, Homo sapiens
caaacctggcttcagtccaatacaagtattggaggaataaggagacttagtctcatttttcccttgttcactactttagagatgagaaagggaggaaaaggaagacttactgcggatctactaaatatcaggcactatgttacgtgtgttactttgcttaaggaaggttctctattttttcccaaacacttaaacatctgtgaagtgtctcaagtttctaccttattaatacatttatctctggagaactatttacattatatcaccactcatactaaagcagtttcgttattcctgtttttatcctcaaagactcttagctgtgacatagaggtttggtgagttaggtcaccatcacagttaggtcacatttttagaacttcatttcatagcatttggaaccctagaagtgtatattttatttttctatccctttatttgcatgtcagtatgtctccagtctttattttttacattaattgggcactattctgtctctttaatatatggtaaatgtgccttgtttaaatgaacctcattctgtgtggaaaaagttagacagaaagctaatgaaatgggtatctccaatcaccagtcctcagttttgaaaatttgactaaattaaccttactaaaaagaactgaatctcatcaaatttacaacactggaaaacattccactatgagaatgtttctgggtctgtgacaattcattttctatataactttgcctcaatatttcagacagagacagttaagcaattgtagagaggcctgcagcatttgggaatggggcctcccttcctaatgatctattgcagttgtattgcacatggattgcacaacaaaggtttctattttcctactttttttctttatcacgtgccaactaagcctttttttctacactcccttaaaatctgaccctttctcatcttctatgcttttgtcttcctgaggtgaaaaccctaagaaggcaaattactaattgcatccctcaaagcctcaaataaatatgatgtaattagccacacaaacatgacctgcatcttttcccctgaaagctttcccagctatttgtccactaaagcatggttttctgcaaactcatttcccaggaaatgtcctcgaatggcatgtgatctttccattttagacaaactgccttgatcaggtgtcacccaactgacctgctttttttctgcctttatttccaacacagtgttgtctctacagactatcaactaagtcctggtttttcctcacagaattccattctcagccctatccctacaccacagttgacacatgcactagttggttaacatatgttttattactccctcatgattctcactggacctctgagtgaccttgaagtgctgtggtcatttccccagtgctttcctccaatactttggtggtatggagcttggcttcaggtttgttgtcatctcatttacttgtttagtttccagttggctgggagccagcactctgcactctgctccatgcttacgttgcaagctacctatccaggtcacaatttttatttttgtgtctctcactatttgagggagtaaatccaacacaaagcagtgaaggtgaatgacaagggaagaaattaacaagggctctgggatgctcttagagcatgaattgcagagcagaagaggtcctagatgccagctagtccaattctatcattttccaggcagagttgatacctccgagtttaaagtcataagccattcaaataaattaatacaagagctgccaggaggaacatttccaagtggttgaaatctttgactttgaaatcatgtagacctgggttaaaatcccaa

SEQ ID NO: 41336 - DNA, 5553 bp, Homo sapiens
aaaactgcctctaacaattactgaaattacagacttagaaatgaaacattccattagctatctctgccacaatagcataacgttacattttgttccattactttcgcccagccccttaagaaatagggattttatgtcgtcttatttcacattctgactccagtcacttgggtttggagggcatggtttccactaaagttaaaagacctagctctataaattacaactaaagacctaaaaaattctctgcaaatttaattctcaaaacatcttttgggataaaaagtatttctattcttcaaagattagagaaccgagttcaacgatttactgatttaagttatcattatgtgattgctaacgctgcagtagatatgaaatcacgatttccattaagacttagattttacctaaatgacgactgctttagtatgtcaaagtttaggagcccatccccatttttttaaactgcttaaaagaatggccttagcatgccaaagtttaagagcccatccccatttttttttaactgcttaaaagaatggccttaccattttctttggccaggaactaactacaagatgataaatttgccagtactttcttttcatagttgttctttgcattggaacaggaaagggtgctttatcactcgttacggttgttcatggcccaatccaaatcatataatacgctggctgctactaacagttttagaataaacaaaaagaagaactataatgcagtaggttctacatttataaagcccatgagctgatttcgtgccgaaagtaaaacagtctcaagagtttaaatgaatcctggaatcacagcaaattcaggaaatttaggaatatgttggtaacccttaagctttttaaaaactgactacaccctgggcaagtaaccaccccctgatgccgttgtgggagacagaatttctggcaggaagataattttctgactcaatctggcttgccgttcttgtttaatcatccccatttctctgaacattttactcctctgactacaatggtcaacatttattttcagaagttttaaagtgatttagttcttccagccgcacctctttttatcccatctaagtcttccccagcccccattcctatcgccctcgtttcactaagattttgctaaacattagacacaagcacatgacctccagtcttccactgtctcggaacaaaccgacataaaaacatctgattagttccattgtaagcttccctaggcttagaatttaaaatggtctttagctcgtcaatgcttaaagaacctacaacacaaaatttaaattttaaaaattttaaataaagaaaccgctcccttttttaacctttagccccgcccattgccccccaccccaggttccacgcgaaactgcaggaaaccggagggggcggagcggtgacgtcacgacgccggtgcgtcacggaacggcggcggctgcggcgctggcggtggctgcggcagcggcggcattttagtcggcagcggcggcggcagcggggctgctgctcctcccagcatccctggcgcggccatttcagccccatcttggcccagcggagggagctgcagccgccgcttcagcagtttgaatttcagtttcttcggggtttaggaattgggcgcaccgaggaggagccggagaagccaccaccgctacctcacacagccggggcgcctccggtcccgtgccagcggtctgccgccgccgcccctctctgagagaagccgcgaggggaggccgagaccgccgtcgccgcccgcccgcaggggtggttccccctgtaaggggaggaccgagccggctttcccctcccccagagcgggtttccgcctgaggcagtcgacatgtccctggggctgagctccggctagagccggggagggagggccgcctgcccgcgccacagccccaccgcccgcccgcggaccttcagccagctccggcccgcggctcccggctgaattaggcatctccgactccggactcgccgctccttccctcagtcagagagcccagcgctgacgccggcaccggcctgaggagcccgagcggggcagcaccgcccctcacgccgccgccaccgcctcctcctcctcctcttcgccctcccactcccacccccagccaaggcctgctgaccgcgccgagcgccgagctggactgaccacggctgcccggagacgagagaggaagcagccggcccgcccctgggttcgcgctctcgccgcctctgagggaattgaattgaggcgccgcggctgcgagagctaaaaaggaaggaggagccgccgcgggactgagacgggggcagagccgaagagaccgacacagagaaggaaacgaggaggaggatgtctcaccgggcggccagcgcctggatcagcccgtgactcttaacagcggcgggcctcagaccccagcgcagactcggactttgtctttgggggcccgtgctctgccctccccggtttccgacaggacccagaggagccggcgtgcctctctgccctccagccttcttcaccatgtccaagatgccggccaagaagaagagctgcttccagatcaccagtgtcaccacggcccaggtggccactagcatcaccgaggacaccgagagcttggacgacccggacgagtcacgcacagaggacgtctcctccgagattttcgacgtctctcgggccacggattatggccctgaggaggtctgcgagcgcagctcttccgaagagacgcttaacaatgttggggatgcggagactcccgggaccgtctccccaaacctcctcctagatgggcagctggcagcggcggctgctgctcccgccaacggaggaggagtcgtttcggcccggagcgtgtctggggcgctcgccagtaccctggcggcggctgccacttcggcccccgcccccggagcacccggcggcccccagctcgcgggctcatccgccgggccagtgactgcagccccatctcagcctcccaccacatgtagttcccgttttcgcgtgatcaagctggaccacgggagcggagagccctatagacgcggccgatggacgtgtatggaatactatgagagggattcagacagcagcgtcctgactagatccggggattgcattagacacagcagtacttttgaccagactgcggagcgggacagcggcctgggcgccaccggagggtcggtggtggtagtagtggcctccatgcagggggcgcacgggcccgagtcgggaactgacagctccttgactgctgtgtcacagctacccccgtcggagaaaatgagccagcccactccggcccagccgcagagttttagcgttgggcagccacagccgccgccgccacccgtaggtggggctgtggctcaaagctcggctccgctgccgccgttcccgggagccgcgaccgggccgcagccaatgatggcagccgcgcagcccagccagccccagggagcggggcccgggggacagactctgccgccgacgaatgtaaccctggcgcagccggctatgtccctgcctccgcagccgggccctgcagtgggcgcccccgcggcgcagcagccccagcagttcgcgtatcctcagcctcagataccgcccggacatttgctgcccgtccagccctccggccagagtgagtacctgcagcagcacgtggccggcctgcagccgccaagccccgcgcagccctcgtccaccggcgccgcagcgagccccgccacggcggccacccttcccgtgggcaccggccagaatgcttcctcggtgggcgcgcagctcatgggcgcgtcttcccagcccagcgaagccatggccccccggacgggaccagcgcaaggcgggcaggtcgcgccttgtcagccgactggagtgcccccggctactgtgggaggcgtggtgcagccgtgcctcggtcctgccggggctgggcagccccagtccgtgcctccgccgcagatgggtggcagtggtccgctgtcagccgtacctggtggccctcacgccgtggtgcccggagttccaaacgtgcctgcagccgtgcccgctccaagcgtgcctagtgtgtctaccacttctgttactatgccaaatgtacccgcgcctctggcccagtcgcaacagctgagcagccatacgccagtcagcaggagcagcagcataatccagcatgttgggctgcccttagcgccaggcacacacagcgcaccaacaagtctaccacagtctgacctaagccagtttcaaactcagacccagcctttagtcgggcaagtcgacgatactagaagaaaatcagaacccctacctcaaccaccactttctctcattgctgaaaataagcctgttgtgaagccgcctgttgcagattccctggcaaacccccttcagttaacacctatgaacagtctggccacctctgtattcagcatagctattcctgttgatggtgatgaagacaggtatggaaatctctattttaaatatttgatagaaatgcttggccaacattgtagcttaggatgcaactttgggagattgttgtcaacggaggcccttagcatttttaaatacaaaatttagtttttggtaaaattgatttagattgctgatgctgatgtcaaagggtgtaatgagcgaattggtcttgtcaccgttgtttaaaagcactaaaatgggtagggatgcaacattgtttactcaaaaaaaggtgaatttaagcttaatgcttaccatttaatggtggtagctagtgtgttatgctcccatagaattgtccttttcttacatatcaatcacacttgaacacgtaaggcagagagatttgtcagtgtgagttttgaggctgagacataataatactacaagttttcctttctggaaaaccagaaggtcctctagtgaaaaaaaaaatctatgtaaggaatcttctccagtgtatctggaaaggctggagacataatggtgaaatgtcaaatccggctttgaagatcatacttagttcagccttttgattaaaggaggtacaaggtcacgagtcttcccagggacttctctaagatactatttttttgttgttaagcaaaaaatgtactggaaagatattcttactttccatcagtctatttattataggaaagggaggttgagatcgatcctttaactgtagtgaaagctatagttcttgaaattaagagtaattttataataaaagtgtaaatgttaataattggctccctgtatttagggatgctttttttaatggcctaaataagaattagtgtattgctacaccagtgccacaacagctgatgtttggttatggtttagtgaggatttttgtggttttgaggagatgtcacatgtaaatttgacatacatattgcaaaattttaaaagctgacttgttgcaatgttttaaaattatatttaaaaattatagaaaaagtttcaggaatttcacagttagacatttctttgctggggtttttgtttagc

SEQ ID NO: 41337 - DNA, 901 bp, Homo sapiens
actaatattatggatttccagaataattagtatgtggaagaatacaatgacatgtatgttaaagctttctcttcctatggtttcttctgagttccttcacatttcttaacctcccatttctaattagccttgtatttttgttatatacttctgttggtttgaaaaatactcactgactgaaattcattcatcttctctgctttttgtaatttaaagttcatctttttttgtaggtgacttgcttatggggagtctttcttcacttgagaacgcttagagaataccacgtgtccataagtgagctcagctagctagtcattgagaaattttgtgtgtgtgggactactaagtaaactgactccacaagccactcagaaaaatccctctacttttatagttgctcccattgtcacacacagggacacacctgtaacacagattgagtttattttttcacctttggtaataatcaacaggcatcttcacttttctagctgccacaagccaattttttcctgataagttggcaaataaccttttgctttcctctgttcctgtatactgcccatatctcttcaagaaatgatgactggtttcctgagctaccccgctttctatacacacacacacccctccacccgagaatgcagattacattttcccttctgtgcacacctctctcagtttacagcatccatacttagattcctcagaactttagtacgatgataaggcatgaagcagagacttctgttgatagatggaaactgaaatgtattctttagggtatgacatcaaaaatgcatttattttttcctcttactgtattaagagttggtaatctgaaaactctgatttccaaatttgtgaatggttgaactacagatactactgtatcagt

SEQ ID NO: 41338 - DNA, 643 bp, Homo sapiens
ttttgggtagaatttttttatgttcacttttctgtgaaaggttcagagcatttgtcagatttttttttcagagcatttgtcagattttcatctgtcaaaaacagttaagaaacattgctagtgaatgttttgtgtcaaaaggacaatccttgttagacacctaagtatgagtcgtgaaagaaatttctaatgagaacattggtcatatgacttctactgatgtttattcaatgctgggttactataaatgcccattagactgatgggacaaatcagagccaagccacatttagtttaggaatttcgtactgtcagtctctgtgctcaaaggtcaattggatttttctgcagagtagtcgtgttttggctattgagtgtcaggcactgtgctgaatatttttggcacattatctcatttaattttcacaaagtcatatattaatagatattatcaatatcctcagtttacagagaagaaaattgaaagcttagggaagttaagtaacttgctcaagtcgcatagccattgagtggtggagctagaattcaaatcttattactgactggaacctgggtatcagtatgctggtatcctctgaaaatttgaaggataagataaaggagaattttacattgtatgaag

SEQ ID NO: 41339 - DNA, 1678 bp, Homo sapiens
ccgggttcaagccattctcctgtctcagcctccctggtagctgggattacaggcatgcgccaccatgccaggctaattttttgtatttttgtagagacagagtttcaccatgttggtcaggctggtctcaaactcctaacctcaggtgatccacccaccttggcctcccaaagtgctaggattaccggcgtgagccaccgcgcccggccaacatgcaacaatacttctaagcaaggcgatacagatcagcaactctggtgccgatgtgttctatttcctttggtatctgtgtcttgattcttcacgcagaccaattttgttatcatcttaatggtctttcccataaggaacccactaagaggtttcagtgttgggacattagcttaagaacctaggtagtcagcacgagaacctaggtctgtgggactctcctattaatgactcctcttacctaccattctccagccagcgttgtctcctgttcttctcacctccccctattccatcctgccccgagtagtctattcgtgctaaagcattcactgagaaaaactgtaaagggagagtcccttctcagaaacaccagcttcttttaaaatggaacttttgaagacctccctgttctgttctctggagagagtgaacaagtagagacttggcaatagctgtggaaacaccgccagcctcttgcttccagcaaccttgagttccaaacctgtgagtcttagttttatattcactgacttcagcttcctgaacccatcccagttcagcattaggtaatggctgtgatgacagctgactcatctggtaatgcagctttcctggaggcttcctctgctcagataatcacactctgggagggaaaaaaggttacaacaatcttctaccccaggatactcaagaatgtcatcccccagaagggagttctacgaggaggaggagaatgtcagccccaggaggggaggtccagcgggaggaggagaagaggctctgggccctacatagggggtttaaagtgaagagcctaggaaacttggggtgagaaggtgccagtacttagagacagaaactgagtggtataaaatggaatgagaatcccctcattgccctttgacagctgagaaacttcaaactgggccccgtttgagggtaagttctgcgagagtagagacttctacttatttattcacaattgtattcctggtaactagtacggtgatgtattgcttgacagaaatacattctgagaaatgtgtcgttaggattttgtcattgtgcaaacattatagagtgtacttatacaaacctggatgatctagcctactacacacctgggttatattgtatagctattgctgctaggctataaaactacagcatgtcactgtactgatactatactgtgacacatggtaagtatttgtgtacctaaacatagaaaaggtacagtaaggatacagtataaaagatttaaaatggtacacctgtatagggcacttaccatgaatggagcttgcaggactggaatttgttctgggtgagtcagtgagtgagtggtgagtgaatacgaaggcctgggggcattactgtgcactactgtggacattataaacactgtacacttaggctacactaaatttatttttaaaacattttcctttaataataaatcaac

SEQ ID NO: 41340 - DNA, 516 bp, Homo sapiens
tggggaactgcttgttcaccactattacctcagagtgtactgccttacctatggtcaatactcaataaagaaaacatgaatgaacaaataaatgcaaagcactttatgtagttttgtttcttatatcttttcttgccctcttattgtcttgctcttttaaatatacggtgtttcacaattctaccgttttcctattttaatactgcagagaaattgggatgagtcatacaatctgatggtatcttgtgtttgctgttggccaggcagtagctgtgacagagatgtcattgcctgtgattcatgaacctggtcatagttgtttatattctcttcactttactatttttaatttatttttcttttttaggttttagagacaggggtcttgctatgttgctcaggctggtctcaaactcctggcctcctgcctcagcctcccagaggctgggattatgggtgtgagccactgcacctggcttatataccttcacttctgttgagtcgtgtgcattgttc

SEQ ID NO: 41341 - DNA, 3245 bp, Homo sapiens
tttggtttataagcatccttttaaggcctggcctgtaacacatgcatgtttcctcattctcacaaagctgaaattcaatcatcttcaggttatataaactgcttggctctcatccatttatcaggaaagcttccaattggtaagtgaagaagaaaggcaaagtgaaacgttaaacagaaatctcagtaattttagaatgtggaaaacaaacatctacttcaatattaacagcttgcatattaaaatgataaatgaagagaggaaagaccttttttttgtaatctatttgcaaaggcaagtgtctgttactcttaggggacagcaggctaccccgacactttttttttaaaccatgtatcaaacgtttcttttattaacctaaaaacatttgactcacacattaaaatgccaatcaggtaatttcctctatagtgaatcaattctttgcacaagctttattttataaaatatactcaattttgacattaagacattagattctggtatatgttaaatcaagttctaacatctatagtacatatttataattttctttgcaaagactgataatggagttacaaaacattctaaattctcatttcgttaggttttgtccggtcttaacatttattccaactggatcattaccaagacctgacctcctttttgatctcctgtgagtacaaattaagctgggagaagtttctggagcaccaccctctgtgcatatgtggaacaagtaatttggttcagacgaaacagaattatgtggagtcctcggcaggtgggttgagaactacgcaggtaggactcactactgaccggtcaccacgtcatcccaaatcctttcaacccaagactctacctgatgggagcccccaagccacttaccagaaccacagacaacaaaaatgaagagagccaataaccagggtcctacagacgccttctcttcgggggcatttctctgcaaaagcgaaaatccaccatttcagatgcagagaaaccactcggaccccaggctcccacgcctgcacgccggtcgccggccccctcacctcacaggtctccccttccgttcccgagcccccacagtctggcggttcgcagactcgggcccctacccctccacggcaccagcccacggtcggccggatccgggagaaaacgcgacgcggccccagggacccggactcagctccggctgcggaacgcagaggggcgcccgctctttccttaccgaggtcttggcgacgttgccgcgctgggtgatgttcttgctgtgcttctcgttggccatacggatcctttgcttggcgaccatcttcgcggcgccaccacctgccccggccacccctcggactcgctcactcgcctgcctcctctggagccgctgcgaggctcggctcgtggtgcccgcgccgccggagcgccgaggttctcaggccagacgctagctacggccgctgggcctgggcgccgcaagcgcgaggtctgagcacaagccgggcgccggccgccgactgactgaccgagcggggcaggtgcgcaggaggaagagaactggccgccgggtcgttctcgcgccgccgtcgccgccgctttggccgccgccgtgagcgcggagtgaaagaggaaggaaacgcaacgcaacaacgggaatgtgcagcccgccgcctcgatctactttgggttcggctgccaacgtcagcactagacggactccgccccgcggaagtgcgcgcccctcccgctggagaaggagggcgaaagcaggcgcaccctcccaagctctgtcaagcgtcgccctagatttgcgcgtgcgcgtttgggcgccttttccgcgtcactccgtaaccggaagtgaattggccccgaggctgatggctccggaaacaccaattcgctgtctccacgcatgaggagacgtgtaggggccgggttcggccctggtgaactctcacccgagcggtttctctttccgggacaacatggcgccgtccacgccgctcttgacaggtgagttctgaagaagcgagggactctctttcttcagactagtttcttatttttgtctttgcctttgagaactacccgaggagccggggagtctgatctgccttttcttgtggcttgcggaaaggccagactgttggctttcttgatatagcgtggcaatcggaagtgaagtctccgcctctgggctttcgtattccccctccctttcacccatccatcattcttgcctgcggattcatcttctacagaaatagaagaagggggagaaaaacaatgtgctagttgaatttgtgacacatgggtctgcaatactggtgttacacgggcccttgtgaagtcatttaggtctacaataagaacaaagacaaacatgagttagtcctctagaatgatcacgcactttaaatacacctggacttaagtaattccagattctggccttcctgccttaatgaggtttgtaggactgaatagggagagtggagctgtaatgcaggtttcaaatgatgaaggtgtggttgggagagggtgtagcagtgagcatgatagagatattctagcaacatttgattttgaaatggttatgagcatattagaaatagaacattagaggactcttgaaattttgaagctaaagactgtagtgttggaggagataataaacttagattggaaaatgctggggaagttgctttactagggtgtggctaagagtctgcatatgagtattacgtaaggaaaagagagtcgggaaggaaaagaaggttttggttaagttctgataactatatagaaggaaaaagtcattaagagaaaggttgtctgcatttaaggagggaggctattccctcccttcccccccgcgaaaggaaccttaaaacatttttgcactttttgccagtctacatttctatttttacattttaaaatctttgttattaagcgccatgcccactgatgctcagtctgtcttctgcagtttagtcatcatttatcaaacgccgagtataatcttctagataatataccaggcaaagactgtttaaaaggcaaagttacataataaatttttttttaggtttgtaaaggtagcttgttattcacaatttttaatactaaatgcttatttgaactctaatgaaaaaattacattctaaaatctgataaataacccctcctttaaaaatgcctacagtaggtagttcctctctgcttacagggtagat

SEQ ID NO: 41342 - DNA, 1248 bp, Homo sapiens
ggggtgaattattcatgagttttctggggaaaagggcaagaattccccagaataaagagttcctctttcttttcaaccatatagggtagtttccaggtgttgccatggcatttgtaaactttcactgcactggtgggggtgtcctttagcatgctagtgtgttaaattagcatacaataagcagtaaaggagatagcatgtgaatatattataattagcaagaagtcacttttgtctctatcttggttttggcttctttaccgtatcctgttttatcagctgggtctttgtgacttgaatcttgtgctgacctcctatctcatcctgtgactaagaatgcctaacctcctgggaatgcagcccagcaggtctccaactcattttactcagtccctactcaagatgaagtcactctggtttgaacatctctgataatagaaccgctcagcaccccagctccattttccaaatcatccaatcaagccccagatcctaacacctcctaattgagtcttctcatggtttcccatggtgtgcgttcccccgtcttagtccatcttgggctgctataacagaataactgagattgggtaattaataaagacagagatttatttcttatagttctggaagctgaaaattccaagatcaagggctccacatcttatgggggctttgtgttgttatccaatggaggaaggtaaatgtgcaggagagtgcaagagtgaaagagcaacagatagaaatcgaagccttaagccctttcataattggcattaatccattcatgagggtggagccctcccattaggccccatctcccaacactgttacattgggcattaagtttccaacatatgctttttgggggacatattcaaaccatagcatccctcttgctgcaattaatgataaacaaaatttttcaattactggtgtgttcctggtcttaaaagtctttgacttgtcctaaaagacacatcaaccaatgacaatgtataaatttcattttgattctgattttaacaaatgaacagtaggaaaataagtagttattgagaccacaggatatttgaacactgactaatattacgcaattactattttttaaaggtgagacaatgatactgtgtgtcaggcctctgagcaaggccgtacttccaaaggaagtggagtctcactgcaacagccatcacaaggcatcagatctcactgctcaaggcaacgcttatgctgataaggtagcta

SEQ ID NO: 41343 - DNA, 2251 bp, Homo sapiens
ggtgaaataaacagctgtgttgctcacacaaagcctgtttggtagtctcttcacacggacatgtgaaacactgtggtcaattttttttctttttaataataattcttttttagaaatatgtgcttaaataattgtaagccaggcatagttgcctgtgcctgtattcctaaccacttgggaagctgaggcaggactgcttgagcccaggggtgtgaggctgcagtaagctatgatcacgccactgaactccagcctgggtgacagtgagaccgtgtttaaaaatatatatatacagatgaaatgatatgatgtctgagatttgcttccaaatatgcctaggaagggaagaagtgtttagagatatagacaaatcaagattgtcaaaatgtatagtaactgttaaagcttgctaaggtagttattctatttttggatatgtttggaattgtccaaaggtttcctaaaacttatgtttaatattctttcaggagaaagcaatattgtaagatcaaagaaaaggccataacagcgcacccaaaaaatttcagcattaccattctgagggtcaggagtctcctcccttccatccgccaacacttgaatcaggactataaagtaggtgtttccaagtctcaggcaggtaaatggataaattgcaaaactggatgcagaactcacatctgcctcatacataggccctgtgacaccccaccagctcctttgctccctttctgcctttctcatgccgtcccagagtcttgcacactaccaagatggtggtgagtcaggacagtgaaacaggtcggctcttcactccaggagtgtgcgcgggcgccgggccgcgcaggcgcattactgctcccctcccccgaccttggctgatcgcgcctgcgcagtggggagcagctcgctcctgggctttgggctggctgcagtctgtctgagggcggccgaagtggctggctcatttaagatgaggcttctgctgcttctcctagtggcggcgtctgcgatggtccggagcgaggcctcggccaatctgggcggcgtgcccagcaagagattaaagatgcagtacgccacggggccgctgctcaagttccagatttggtgagtatgtgcactgggccccggccaccccgccgcgcctctgctcggcgccattggctacgcgaggccccggcttcgcggcctaaatggccgcatcttcgctggcctcgtagaactgtgccggcgcccttccacagccagccttctcgcggccccttagcgcggtcaggccgccctccttttccaggtataactgctcacttgttttttgcctcctagaacagtgggaatggggaaggagggcgcgagaaggttaaacgctgaaaggcgaagactgggggacacctgttagtacggaggactggttggcggcgtcacgccatagccaccccggctgcctgcggagatggggatgagtaggcgccgcgtcggcggaggagcgccaaccgtttgtcagttcactttttctgccctcttttccggggtaatgccgggcggcttcgctgcctggctagatgaaggttaattcgggtcattggagaggatccgggagtgacagacgccgtttttctcctgaacttgctggggggactgttgagtttgcgaatggggcgtctgacagctggagggggtggaaggaaggtctggggatgctggttctgtttgccatttccaaagtgtcagaaaaggagcacgttgttcttctaaacattgacagttcgctcgcattccctcctcacctgcctcccaggagttgcctgctctggcatctctttctacctttcagttgtcttgtgtatccagcagatctcggcagttttcgacagtgttctttaaatgattttgtttttaacctaatcgttagaagcagggcaatgatgcattttatacggtaagtggggttgcgggtggggattgaaaggctctgaagatgggggaaaaaacaccaaaattgtaaaattatagaaatgagaatcttacacctccaaagatgacattttctcaggataaaccgaccatcccagaatagccagattagtaaatcatcagagtccggatacattggaatgttggtgttggacatcattcatttaaaaccttcttttaagaacttcatgtattagtatattaaagttttgattttctacttctccaactagctttttacttactcactgaagaccaagcaaacctttaaaat

SEQ ID NO: 41344 - DNA, 1466 bp, Homo sapiens
gcagcctgggcaacatagtgagacgccagattagctgggtgtggtggcgtgtgcctgtagttccagttactcgagaggctgcggtgggaggcttgagcccaggaggtcgaggctgcagccactgcactccagcctgggcgacagagcgagactcttgtctaaaaaaaaaaaagcacttcatacagccatgcccaagttcaacttttatggtgtttcgcctatatcctaaatcgtgcctcatcacaacagctcagccaagggttcagtgtctctgacaagggcgtgagagagattaggtgtgtggaatggtgcatgcatttagaaatcaggcacgacgcgcaggtcgacgaaggcaccacccaggagtgggtggaccaggtgccccctggagacgagaaaccctcgaggaaggggtgggtcgggggcggtacttttatgcgaggaggtgctggagggtgggcttgcgctcggcgtttcagtgctggtcgcgctctggctgggcacgaacgtagaggtcaggctagggctgacgatgctggctaagcgggggcgcacgtctgggaagtcgtcgtcgtagtcaccgatgtccgtgaccttccagaggtactcttcgctgaacgtctcaggggcctccaactcctgctcttcccccaccaactcctcctccaccacctcctcctcctcctcctccacctcttcctcctcctcctccacctcttcctcctcctcctccacctcttcctcctcctcctcctcctctaactcctcctctgactccttctggtccttcttccccgggtctccgaagccgctaggcgagcgcaagtgggccatggctggcgggaggcgggattacagccagctctttggccgcggccccggtcggctctcgcgagcgcgagcctctgttgtgcgttggtctccccgggcaactgcttgccctgcgccaccgagcctcccggatttaaagcggcaggagctggttagccggatagaatgtgggtgccgagggccggtgggggccaccgcagacttctttctgtccctgctcttcagcgtctctgaaacccctggcagcctgcggagaaacgatcttttcttcgtctctcagcttatttggggcctttttttttttttttaacttgggtggaggaagtggcttctagcgacggacacacacggtgccatttggtattgcggatgctggagtctggttattgagtagacagatgcttgctggaacgtccagtgaaactttatttacaaaatcaggcgccagcccttgggccctcgtttgcggatatttttaaaatagctttaaatattaataagcgtattaaaattgccttaaatgttagttatcttaaatattgttagattaatattaattaatcttgattggcgacatttttagcgtcccataaattttgctccttgctgtgatctgggtcctgcttcttacttgg

SEQ ID NO: 41345 - DNA, 4179 bp, Homo sapiens
tttttgttgttttgttttgttttaattgaacagctacagctctttttaaaaacccgaatcccatcatccatgctccttgaaactttccagtggcctcccattgtacctggaaagaaagccagacccctagctggcctcacagggcaaggctctagctccttacctgcctcacctcaaagcattttccctgctggttctgcctcaggcctctgcacttgctgttcctttcttgctgcaatgcttccctccaggtggtttttacattcacttgcattcctcagccttccctggttattcaatctacagtattggcaggtgacatcacttgtctcagcggctgtatgagaaatacaagagaaaatgaggcagtgaggttggactgggtcagaggttctcaaccctgactgtgtgctggtcccttctgggaagctttaaaaagcacacagaagctcagccttactgccaagaattctaacttaggtcctggcattctttaaagttccccacatgattccaaaggacgtgtggggtgataacctttgatccaaccagtgcttcccaaacttgaacatgcatccacatcacctgcatactgtgttaaaatgcggattctggtcaggaggtctggggtggaggctgagatgctgcatttctgacaagttcccaggtgatgctgatgccgctggtgcacggaccacactttaactagtgagggtctgaacgatttctaggtctccatccccttctagcatgccatgacagtggggaaggcagttccaaagcacaggtggtatgttctgtattcaccaagcatcctgcacccctccatcttgttcatctttatctgttacaagtaagcaatatttctgctgatggtcaaaatatgtgaaagccaaataagaataatgatggatcacgtgatatggtgaaggggcatggactccacgatgggttcatattccaattctgtttcttaccagctgtgtgagtgtaggcaaattacttaatctctctgagccttcatttcctcgactccaaaatggggataataaacactgcttattttattgagaggattaaatgggttaatacagacaaagcactttgcacacgataggtacctaatggatggcaactgctgtgatcttggtgtactttgcaaattgatctaatcttgtaatccaattgctgcaggtcacaggaaccttgatctgtgcttgctgcaaggatcatcaaacatagagcggagtcggcctttgatctgaatgtcaggtgactccatgacataagaaatttcaaggcacagaaacttcaaaccagccttagtgaccttgcctggaggatgacaggggcagagaaaccctttgtttcttcccttctctggattgttagattatctccccatctctgttccctgcctacttgcgtaatttccccagggacttttggtacaaaaccagaaaaccttaactcttaaagtgttgacttcaatgctgctctcacactagcctgttagtagttatttattcattcagatattaattgggtgcctaggtgccagggacttcattgtctctattaccctgcaggttgtcaaggggaggcaggcgctgaacaataaaaaaaaatatgtaatcacaattgtggtgccatgaaggaaaagaaatagggtgcaccgcaagagaatattgaagagctgtgatgccaatgattttcatgtcaaaagagcctctgcctatgtgtagaatacattggagcaggcaggaagaaggaggacaaacagttaggagccccaacagtggtcctggcccagatggtggcaatggaaatggggaatcaagactgggagccacttcccttagtcatggtaaaatgttggcttgtactttaagctgttttgtaattttttcccttttactcaatacagaagacaccatgtcatcatcacagaaaattctaatcagcagtgtggtttggggccagtgtgtttccctctgtaggtcttacttgtttattctgtaaaatggtagtggtggtgggtgttggtgtcaatgggatcaaggttctttctgcttgtcatttgaagactccaagacacattaacggtattcacaaataagagattttaagcttcaaattagaagaaggtttaacaatatggggaattagatttctccctttaagcactcttgcctccctttcacaggtcagtgaaattataatcatactttcaagcacagcctgcatgaatcaggaaggttcaaggccacaggcctctcaagccagagccacaaagcaaaactggtctctctacccaggcaccacccctagctctaaaccatgggaatctgagaggtagctggagcatgactcacctgccaacactgatagacagacacatgctgggccacagtgataccagaaccacctcgtacaaaggctggcaggaatgatttacatacctcaacctaacattgaatagcttgattgtctcacagaaattagtactaaagtaaaaacgtttagaaaataaaccttcaaatgttgcagattaggaaacttaagaccagagatgtcaactgaccaagttaaggtcacattgctggctatttggcaagccccaagaacctgaatgaagttagatacaaggagaatttcttcaggaaaattactttgggtggtattgtaaaggagttgcttgatgctgctaaaaaagacactcagccattagtttggatgtgtcagttgaggccgaggttctagttggcagagttccaagatagttgatgcttcggtgcctcttctccgaagtatttcccataatcccctggacagttccctctaagaactccactgtctcaatcctttaagtcttctggattcagggaaaccaagaccagttcctccttacaagaacgctgggaacccctaatctcaaggttggttggttttttgaaaaaaattaaaaacgtagaacaatgcaattaataatataccatatacccaggttctaggcacccagaattaatgactgttaacattttctcccaaggtattttgagaacccttttttctttagaatgactcatgcgtcataagacacaggcttaatctaccatcgtttaatcgccagattaccaaattagaatattgaactaggacaggaaagataaaatattcttattttattttttaaaatatggtacttaagtggaccacgtgatgagttttgacaaatgcctatcattacttttctttttttttctcactttttttaaaagcaacaagtcaaggaatatactcatcatgttttaaattgcatttgcaattggaactgcataaaaaggcattttaatttacataatctttttctgctgttttcacttcctgttaaaacggaataacctggggatttttattttctggtagaaaatgcacagtttcaagaaagtcaagagtaaaggttaagtttacagatttccagtgacagagatgaaagggaactacgtaactctggaaaataaaagttcagagttgcgttgcttacaactttttcatttgttaagttctaggagcaagtttgaatggggaatcaagaagcctgaattatagaaccagtgctgccagtaatgcactgtgtggctgctggcccatcactttacctttttgggctaaaactctttttgtgcttttggaataacttgtgtccactttctccttctttatgtcttttgtttataggtttgcgttttatgcactgttaaccaatcagtcctgattcctctaccacacgtagtaagagggtaagccgtggacatgaagtgatgctgccaagcttggctagtgtatgcacactgcaccttgcatgggtgccgtgagggccctggaggccatatctggactggctctggtcctgagggtcagagttcatctgctcctggatcctagtttcaccttcataggttcctctgtatatggacttgaaatgtgactttcttagtgataagagttgtggtttttattcattcaccacagatgttgtaaacccctacttttgtgtagggcaccgtttttcacttttacagaagaggttactttagcaattctttaaatgtcagagccctgtgctggctaaaaactcaacgctgtatctcacttaaaaaacaaaatcaactccaa

SEQ ID NO: 41346 - DNA, 4838 bp, Homo sapiens
ggacactgaggtaagcagccttcaatccttgctgagcatttggccctaatcctctaaattcttttgagagtttagggttgggactgagggagtgggtcagcttggatcaacgccagcactctggatgtcagcagtggccaagcgtcttccttctgactctgtaaagctggagcaatcctcttattgcacaggtactggcactgtcagatagaaacgacagccctgggaggagacctgcagcactgacagtcagtggttcagacacatgagcccggaccccagtgctgtcatggacccgtgccatgaccttggcccaatgactgtttccacagtggaaacaaacagtgaaagttccaaccccagatgtagtgacgaaggttcattgcacttgcacacagtagatgctcaataaatacccattactcaattagggaaatgaagcacaatatccatttttggaaaatatttattaaaaaactagtgaatgtggcagaaaaacaaaaccaacacacagctttaaatagcaagcatatgacacaccggttataaagcttttccaactctactgatttagtctttcacaccagctactgttgaggagggcttccgagggaagccacgtgtaaacgggtcatctgtactagtggtgagcaaaactaattacatgagaactatcaatggccatatgacttgctttcctaggcaatccacccaaaacataggtgagtggccaaatctcaggcgtgcgttcatgtggatctatagttctagttttaatttgagggttgggggaagttaggggatgaaacagtagaaagacaaacagtatcggcagagggcaaccttaaagcacctttaaaatctggaccctttcccacaatttaacccagtaattctcaaacattactgttgaaaagaatcacctgatgagactgttaaattggcaggctccctaaatctgcaattttaagataagcactccgggtgattcagtgtctattagccagccatccaatttcagaaacactgtttaaaatgcattaaaacaattcctacctcccacaaacaaaagtaaaggaatctgctgacagtcactgtgcttttgtcaatgtcaagggaccaatatgggaaggcaggcaggaaggggcctcccattcctaacacactgatctatagaagccctgtgcaacagcctgtcaagtgttgtttagggagtaaatacaattcaataagagttgttttagatcacagaacagcatccaaatcaccaacaggccaaccccattcatcccaggttaatgaactttgttgggtcgaagccagatgggacactgctgttcaaacaaaacacgggtaattgtgggtcctgacttgtgaagacatatggaataaaacatctataaaaacctttattaaacatagagcactatgcccaaataattttgaaggtttacgaaagtcacatcatggacaacatgtagaaatagtaacattgattccaaggttcccattatctgcaaaaagatgtgctatggctgtgtcgaaaacaaggcagtcgctgttcatgatggccgcagccacaccgtcatgaatcgaacggggcgtggcctcccaggtcaatctccgccggttcccattcaactccagtctgtaggcaaagttctcggcttgcttgcgggtgccaatgagcaggacgatggcaaaaaactgctggtggccttcgtacttctcttgtttctccagcaccagcatgaagtgatggccaaaacatgactgcatcatcacccagtcgacagcccctggcaagttaatgtctgtagctagaaagacgatgtcttctccctgaagggtggtaatgctcttgtgggcgtgcatgagatgggacatcacagcttccagggacccctgccacttgcaggaagcaccaggacatgggcaggagtagggacggtattcacatatgtcttcatgttctggtttctccgtatggtgcagggtcagggaacagcccgtggtggcatactgcaaagaaagaaatgcattgagccattgggccttctcaaaacttctattgcttcaaccctctatgagtacttaactactccattttcctgggcttaaactgtgttcttaactacttttgctcaaagcaagtgaaatattcaagactaaaagtctccgtctctattcatcatcaatgctgtcatgcataaaatgaagggtatttcctgaaccagaaatacgctgttttccatgccccctgttccgctgtcaaagggatcagaactaaagttctcttactgtgcacatctcaaaattgttgagcaagccctataaaagctggtcttccccatattttctgtgaagctgttttttaaagaattcaattgcttgggtggtggggatggggttgggcaaggaatattatattatcccaagattagttttcacatatagacaatattaacaacagtataattctgtcgtccccctccactgctttctggctcaaactggtgactggcaggcaggccgtggggaaggctgccctttggttccttgctctttgctgctggcatcaccaggctagggcagcggaggcctggagaccccttcatacagctagaaatattaccccactgcatccttttgaccttccctctggggggctttgcccatattttttgggtggaaggaaatcacatccaagagctacttaactaactcagaagactactggtcagtctggttctggccagtagaggttaacatgagaagggcctaaccctcctctcaaagcttgctgacccccaacacttcctcagattcaagagcacatcatttcatggtcaggtatgtcaggtcctcacaacaggcccgggaggaagcagaactagacaagtttgctgacatgatcagtctgcccctcagacactgccttaatagggtaggagaacaaaatcattttctcccttgcacttgggatgacattcctaatggataaatcatacctgccgtggcaaaagaccacaccaagaggaactgaacttctactccagactctcacaaggatgacagtgttaattcctagataccagatggagatcagcccacaagtagacacctgccctgagtactaagctgttctgtaaagaattaagaaacctgaatcaccttttcaggtgaaactaggtgtcagccttagacccctggagcacagaatggcaggggaactgtctggctaactacacttggattcccctgctccactgagacatgaaggcaccaaataagggcaaggccaggtcatttttctaagatgctatgtccagttgctaaaaaaaaaaaaaagcaccactgctgtttttgcttctctctaccctgctttatagaataatcccccttttaaacttgaagtcggtcaaattctaaccttcatagatgaatttatcactagcaacaagcagatggtatgcactatgtgacttctccatacaagacgctaagttacagtcactcagaggattccgaagcaaggatgacagcctccactctcagggggattagtctcccctaatcggaaaggagagtggcttaaagaaagaaatgtagctcatcctccaacccccacttccccatacctaagcggattataatatttaacagaaattggcagaaatatttcagttacttatttgcccataggaattgtttgttcatcttttaaaactctgaactaatttctaaagcctggctgtaaaaaaactcactcaggagaaacaaatttatttatccatgtgtattcatactttgtgttccttactttataaggcctgaaaaacaaatccctattaactgtgttttaaatctagggtgtggctaggaatacagagcctcctcatgttcttctgtgagtgatgggtgagacatttctgtccagtttaaaaaaacacacacacacaataaaaatagcaagaaatagcccagagcctggcagagtctcgaaacaagctctcaatatctgaagatgtttcaagacgaacttttccccatagctgcccaggaatgagatgaactttggccaatggcacccagaaaggtaccagctgcacctctgcccaaagtcccaaaccactcctcattcatgacgaactcaacatttacagcaaatatttatcacttggcaatcattttataactttccccactcaagtaggagtatttatactctgaattatttgatttgccttacaaatcacatattcaacacttctttccacccaaatatacagaacagggaacctccccaaactgcacaaatagaaaaggcattactttgcatttgtgtggacaacgatctcatgttttttcataaggatcttgctacatcctctattaacttaaataaatagttttaaagccttaggtgcttactctgcttttactgaacaagcagaactttcatggcaatctatcccttctctttccatcatgggtaaggttcatgtcttcataacaactggtgccacttttatgatgactaaagtctaaattttaaccccctacacacacacacacacacacacacacacacacacacaccccacatttcatacttcaagcagttttggcattgttctggaatggcatgtcagagcaccatgggtgttttgtcactttcatcaggggctctcatccagggatccgagggaggactttagtagtttgtgaattccccaagactgtatgtaaaactgtctaggtgcttctgagcagcaaagccaagtctcactggcccctggccttgggcttgtgttttcttttcttttttttttttg

SEQ ID NO: 41347 - DNA, 4793 bp, Homo sapiens
ttggtttttttcacatgagccagcccatgagagattctgagagcaggtggggacagtaaaaaggcagtcccataatttctaggagcctcaaactgtaggccaaagggctaggtaaacagatctgccttgttttaagtttgatacaggccttacggctctctgttgtttctcatcctctacaactaacacatcttggttggtcgctgggcctatgtatacattcaagtttggtttatccagactaactggctgagctgccctgccaatagtttggattattgatcaaccaaaggtgagggacacacaccccagctttatacaactcacacacatgcacacacaaaagcatccccaagatcacatcctaagcttggttcttggtctgcaggggaataattggcccttttaaatttcagcttgcaaagtaatagctttaccccactgcattcttatagaatagagactcagaaaaccactgacatgtacagaaaggctgagaacccctgattcccagaactactcttcaaggttgatttcagtagcctgtttcacgttaggaaagaacgtatgctttcataggaaccagagttctagatcctgaaagtgaaacttcatgctccatatagcataactgtttccttccctttctcttgggaacaacacaattctattatggttacattttaaaaacaaattatggattactgactaatatcaaatgctcatttgtgaactaaaactcacctaaaagccatttcttttgttagccgctgcgcgtttaagggaaagtaaaggggtgagaaaatggctccccagaaatcctatggggcatcccccacccctgcaatatatctcaagcatcaaatagccactctatgttaactaccaccaaaccttttccaaccactaggttgtcacctttttcacaaccctaagacaactatgcaaatactttatctaaattttgagaaactgggctgagtgaattagtaagcactatatgaggaggggttaacagcaatttattaaggttgcctgaaacaccctagtccaaacaccgattcaaactcttatttaaatatgctattttaaacctgatttgcagcagggcagcagaccaaattaaagcactcattttactgacctgagtcccaagcctgaattctctggtggattatttttaatttaaaaatgagctcttgtcctataaaataagcagcaccaaggagaaatgcaagacagcttaaatggcccaagaggcagcgcaagttacttttacaaaaaaactggaaagtattagtgacattatctccacttctaatttcagaaaatgactttacagtatacttctaggttataacgtagacaagtatgtctgtgaaactgctcctgaaggtttccacgtaatagctgcaggtaaacaaatgttataatatgaccacacaatgcaatactatgcagccatttaaaatacaatgaagtcgactaggtttcaggcatagagaaatatgtgtgataatatgaatttaagaacagcaagttgcagatgccatttttggagaaaaacttacatctatgtgtgggtattaaaaaacctccctgacatacactgacatctatgattctatatttagctgcgagggtgtatgtatatatagtttaaaaagatacacactaaacctaacaatggtgggaaaggaggggagagatcttggtctttcattttacttcttgtcttggtggcttgcatttttcgcaagggcattgaaaactttttacattaaataaaaaatgaagtgatgagctttaaacaactgtaacaacagctcttgagtgcccttgttaatttcttgattgactgttttcaccccacttagtacaacaacgcagccacaactcctcagtccttcccagtctttggaaggctaggagagaaaaaggcgtggcttgcagggttttcttctagctagaggaaaacaggctgtaggcgccctttttttagctacaatcccgagagctcccacgtgtcaggggtgcgcagacggtaggcgcggggtgcaggactccaattatcaattcagccgagcccagcgctggtaaagggggcgtttagctcgcccgtttcctccctcctcaatccccacacagtcagtttctcggtccaagttttactggtgcggcccagccctaccgagagtacccgaatacacgtctgcagaggacgcgggcattgggccgggtgagctacgatgttctaacgatcagcaaatgccaattaatctgttaattgtctattaacaattattactcggtaaatgtcaacccagacctacacccaaagtgggcttgagggagggtggacgaagtgtaaacattttttcttttttttttttaaatgagagatgccgcccgcctctccgggcctgcgagtgggctggcggataccggagtccctgaggtcaccggcggaggtacgtgggctgtccctgggcttaccttacagggaaacaggactgccgaggccaccttctccatagccaggttcctgatgctgggcgtcagggcgcccctgcacgtcgggcagcagctcaacttctggcggcattggttacacaccaggtgcccggcctggcactgcagaataggaggcaggacatagtcaaagcagaccggacactcgaagagcgaggtcagctcgtggtgctgcggggacaccgggccggccccgccgccgccgccggggcccgagatcaccgccgccgcggcgggcaccgcggacgagccggggcccgcagccgagatggtggcggcggccgggggcgcagccggggacggagtgtgctggggctgcggcggcggctgcttgctgcagggtttattagcgctggggccggtggaggacgggcggctcatcgcgctccgaaccaaccatggaactgcgggcgcctgcctgccgcggggccgcccgggtcaaggcggtgcgcgccccgcgggcagcgagctccgaggcaacgccacggcgcccagcccaggtccgggcggcggagacgctcggcgcccggcaggcggagggctggaccgcgctgatgcactccgcagcccccggcgttccgagcacgcctccgcgtcggaccccgcgcggtgccctcctcccggcggcgtcccgggccccgaaccccagcggtgcgcagagccctggcccacccgcttctggaacagccgctgacgcaagccccgggggcgcgcgcggacgtgacgcctggacacgtgtgcggccgcccaggcgcgcggggactggcagagccaccctgcgccggggcgctggctccgcccggctccagctggcagcgcagggggccgcctagcgccggcgcttcctgctcgggctgcgggccgggcctgcgccagtgagcatgcctggctcgctgcagccccgcggggttgtcttttctgggttgaggaggggggctactctcggggaagcgtcgccgaagtcctctggccacaccccggggtgcctggctgacgcgtccctcagctcaaacgagaaaggcaacttcaggcggggcgggagcgtggacggtgggtgggaccggacgcgggcgggcaggggcggggcgcgggcgcccctgcactagtcggaaaaaaccgagaggtttctcttctcagggctgagtcaccagcacgcaggagaagagggcgaagcggccacccgcgttctgtgttcggagtcaggacgagaagcattgggtgggagcagggcgaggggctcgagttgggtctgcagcgggcacaggacctagttttgtacagttaacggtggggttgagtaaagaggggggcggtggggaggatgtaagctccctttattcctttcccagcggaccaggaggaagcttcgttgaattgagcgcccctggctcgtatagcaggccgaggagggagctcatgggcagcgttggctaagagttcgagatcatctagaaatgtcagaaacgtaggttgggtcgtgaggtctctgaagacagtgggtgaaactccagtgtaaggcgctgcgtccgcttggtagagagccggccgaagtccgagtctttgttgcgaggcgtagggccaccctgcgcgcccagcagaagcgctagagggcacggttgcccggggtgaaccgcatgtccaaatgtaactgtgtgctccgagttaaaattgtttttctgcagactttgcttgagccaacgattccggaattggggaaagggttaccttaggtagaaatcggaaatttataggagacacagaggtaaggaccaactgttaggactgagtgaaaaatggttccctccaactgtaaaagtggaaaaaaaaatacctatcttataggtggggcagtgaggagtaaatgagtttaatatatttcaagcttttaaaacaacctcgcccatcataagcactgtttaaacattagctcttatcttttaaaaatattagtggatgtttaaaatgaatgaatacaatttgtccaagaaatatggcgtaagagcccagaagaaataaagtttaatcttacaaagggcttctgtagaaagaatacatgcatggaattgatggaatttggtataaatcttgaaaaaacttaataggtgtattcaatcgttcagtaaatgtttcctgagcatttatcatgtgtcagctactgttggagctctgagaatggttctcatgcagtttacattctagtaagagagcaaggcccaataaccaagcactcgtgggagaagaaggatttcagataccacggg

SEQ ID NO: 41348 - DNA, 971 bp, Homo sapiens
atcattgcacacctgattaagtcaaccagggtaattaaaatacaaaagcaaaacaaaaaaactctgggcagttgctgaaggtaggcagggggagagtggataggtctgctatgtgagccacatcaatgaccaggctggtcttcccagtcgcctttcttcttcctccttccttggtgacttttgaaacaaagaaaggtgacctttgcataccgggcactatgagctagagcctcctcttccagcgggcagtccgctcagaggtcgaatttagcgtgtactcaaaatgtgtgctgagttgagttgttgggaggtttatttaccctttggagtgtcgctgctgcttcttggcctgtttagtgagtgactttgtggtctgggggagcagggtccagccttttgttatctcctgattcatgactcatttaccacatctactgtatgagaggttggtctcattcgcccacctactgagtcccagattgcatatgtcaagcaggacacctctccttaacccatctgctctatgctaagcttgaaagactaggggtgtactgagtagccttttctttccttaaaatagcagggtgagtcttaaaaaaaacacctcacaggtgagttcctaatttcactaaactgctgagcacagtgagaaatgctccagctaggcagacaagctcttgcccttttttctgtaacttacaaattgtgtggttttgcaaatcaggcaacttctgccatcaggcaaatgtgcatttgcagagcaaattgtggttggctttttagagatgactcaggtatgcattggagcttgctgcatggaaattcctcatcaggggaagcttgtgggaaatctggaggtgatgtaaggccccctggtaattatagtaggaacttttaacttcatctgtttctggggtaatttccaaatgctcaaacttcttttgaataattgtaggtctcttaattcaaat

SEQ ID NO: 41349 - DNA, 2929 bp, Homo sapiens
atttaaattaatattaaatattaaatttaagaagagtaacccaaaggcagtatgtgagtataacttggagatcccagaaagaaggaaataggttggaggatctagtgctccaagaggggcttcctgggtcgagtagagatgaaggttatgagccaggttgtggccactggtcagctggctaagtgcaaagatttattcagtcaatagtgtcatatttggaggccatggataatatcaagcccaggcttgatttttggagagatagtagcctggtaggggaataacattaattataaaacccttacacaatgctcactggatatcagacactcttttttttttcttttctttttttttttttttttgagatggagtttcactcttgttgcccaggctggagtgcaatggtgtgatctaggctcaccacaacctccacctctcgagttcaagcgattctcctgcctcagcctcctgagtagctgggattacaggcatgagccaccatgcgctgctaattttttatctttagtagagacagggtttctccatgttgatcaggctggtctcaaactcctaacatcaggtgatccacccacctcggcctcccaaagtgctgggattacaggcgtgagccactgtgcccggcccccagacactcttttaagcacatggcatttaatccttattagaacgctctaaggcatgtagtctattaatcccctttaagcgatgaacaaacctccaagaggaggtttaatcccttgtcctaggtcacatgctgataagtgacagaaacatgatttggatccaggctgttttaactccagtgactgtgctcttaaccatttggctgtcctgccagacatcatatggaaaatctaatacagtgtgatacgtgtattatggagatgggaaaggagaggagggtgaagttcagcacttcctgggcaagtgtgaggaagacatcaagaaaaagcaagagtaggaatgtgacaaccaaagaagagggtaaagactgcagtccagagagagggcagcgtatacccgaaggtacagagctcctgaaactttcctaccttggggagtcttctgtcctctctcctctaggaaccatccttggatccctgctggcctcctttctgaacccgctgttgaggcagagttgcatatacagcatttctcctaggactgtttgttcttagatctctatcccttagtgagaagtgaagaaaggcagaggggagagagtccggaataatctccttattctccatccccacatccctaagtctgatctgagattcccccaaagagcctcgtccacgccagcctaacccaacagacagtgtggatcactgagaaccagcaaaattgacataaccttgaggcctcaaataatacattcctttcctttgacatcagttttgtcagattaaaaatccaataacagactgtcattgagtccaagaaaagagatggtaataaaagggagaatctgactccataatggaaagcaggtgatttttaaaattggttcctccagctgtctatgctacagaaattccaagaaaaagtagaaaagctgctccttccccttctgtcttctccgacttggttgtggccccgttactgccctgtttgtcttgcttcgactccaggaggtgtccttatgtctccctccctccagcttagccaaattctgtgcgtcctgcacacctagctcaccacgccatccctgctgcccctgccttcaccaagggcctacacaagtcacctagggactctgccttccaccacctcaccagcctctccctcctccagcccctgtttcactgtctccacagcataaacataaataattctggcaaatgaatagctgatctaccgtgtaatgagtgctatagcattgagtaataagatgcaaaccatttaccttattggtgcattcatcaagtgtgaaaatatttactgtatgcccagccttgggctaggtccattgtaaattccttcgaataagatgaaacttatttcagactacttcagggggtctcatggaaaacaggggtgggcagtgtccacaggcctgagacccctagaatcaggagctgcaaacctccagtaaacaggcaacttgtgctctccaattatttgtcatagagtttatttaacccttcccctttctgcaaactggctcttactgctttccagagcccaaggtcaaaggtagccagcctgcagattttgagtttatcatcctgtgttccagctgcctctcctgagggatgaggcactgccagatctcagatttaagccaaatctcagaagagagaatctgactggacagcttaggtcacgtgaccattcccagtccattaagctaaggccacacagacaggctcactgggtggaaacatggctgccactcgtctgcccttgtgggtgggtgggaggaattctgacaagagcagtttggggctggccagatactccaaaagttgtctgttatgtgtggttggttggttggttttttaagactgggtttcactcagttgcccagtctggagtgcagtggcatgatatgtagcttactgtaactcgaactcctggacttaagtgattctccggcctctgtctcttgagtagctggtaccatgggcacccgccaccacactaggctgattttttattttttgtagagacaaggtctggctatgttgcccacattagtgtcgaactcctgggctcaagtgatcctcctgcttcagcctcccaaaatgctgggattacaggcataagccatggcacccagcctattatgtgttttaaggaaagacatgacctctggcttctcagcacttaagccccgttggggaaattaaatggtaagttgaggttatttcaaatgaatgcaaaatctttgattttgtgg

SEQ ID NO: 41350 - DNA, 596 bp, Homo sapiens
cttcctcaggaccctttcccttcatccattggaaattgttttatttcatatacagatttatgatatatatggtgtgaatggtgcctctttacatgtggtgctgtgtatattacacaacctgtccagccatacaaagctgctctgaccctggctaactagagcagtctacccttggccacagatcagggaaagggaagtgacccaggccaatgggagataattgcttgctagaaaagtggtgatggatttcctaagctcagtgttctttggttgcaatgtaaatgtaaccgtgtgcaaagtatccatctgagccatgctgtgtcaccgtggaaggacatggtgtctcgggatccttgggctgtcaccttgccagctggaaaccttgtgtgcgacagtgcctcctgcctgagtattgctaatgccctctgggctcattctacccactcggcctggcaggctgtgctcagcttgcgctaccagcccagatcccatacctgccaagggcaagctggacacggagcagtgatgggtgtgtgggtgagcgagtgtgggttcaagctactacgcacagctaggcatgccggctgctgtgatgg

SEQ ID NO: 41351 - DNA, 888 bp, Homo sapiens
acttagaatcagtcgtgggttcaaattccgactcgtttcgtggctttcggcaagtgagtggtcctctctgagctggctcaatttctccatccataaaaagggtacagtaagaccgtggaaggttgtaaggaccagagattctgactatcaagatcctggcacgtagcgaaggctccataaatggcagccatcattcttggccaagtgcgggcgcattctcccgggcacgcctcccgcggggtccctcaggacaggccgagcccgcctccgcggctccggtctcgcagagctcgcgccaggtggcccagcatcttggtgcccgcgccccgaagcgaggagcgagggcgggttggatgaccaaggtctgccctggaggatcaccccccccgccccttccacgctcccggcgcaggtgaggttttcggcccaggccacggggaccgcgacctctggggaggtcgaggcggagggtgcagcggggggcttggagcagggctccagagggcgctccctccctcgcccaggttcaccccagggccagcctcggcgccggggcccgcgggctgcgcgctctgcggctgcgaaaacccggagaggcggattggagcgcgctcaccgcgctctcagccaactcctccgcggtccggccgccgagctgggcatgctcagtgcggacgccgcgccgccgtccgccaactcggaagctcgcgctcccgggccgtgggggcgagaacgccggcggcgagccggcgtcgctcgccgcccccagacagtggcaaacttcgcggcgttcccggagctcgtccgggcgaggcagataccgcacaaataaaatcaaatccaagtcccccatcccaacccgaatgatggaggctgcggcggccggag

SEQ ID NO: 41352 - DNA, 975 bp, Homo sapiens
tctttccttcatctccactttagggtgtttcctcttctgcctcacaaaggtgtcgcacctgcctctttgttccctgctgcagtcacctccctgatggagttggcagcctcctttccagggtttcccctacaacttcctgagaaatagcgttaatttacgtatctgatcttgccgttgctgtgtttaaaatgtttcagttacccatttgtgataaaaaaccaaactccatagcttgccactgcctgggtcagagtcctccaggctgctgattaaaaaagcagatttctccacccgactccagacctctggagttgaaatccctggagttggaaataaacgtgtgcgttgaaccagcaccctctggtgaccattttgtgcactagcgtttgaggaactctggcctctggggaccttcctgcgcctcactggtgactccctctgccttcctgccatctgcattgcctgaaatgtcacacgctgccatttctgtgtgtggaactcctttgtaccttccccaatatgtggatgaaacgcctctttgcttcctttcctgggtctcagggtacaatggagcacttaccttgttgctgtctacttttgtgtcatgtgcacctcaggcagggccactttcttctctttgtagcctcatatcccagtagagggtcgtggtaggcatttagtgtttgctgctacatattgatgggttttattttatttgatcttgagctgcctacttgatccctaagtaatagtactttgcacggtgtcattgcacaataattaaaaccagagggaaatggctggtttaaaataacatagtaaaatgagtcatccagacaaaaacaggcactctgtatttgtccccagtgttctacaggtaattctgttagaggaaaactttttaaaagcaaaaatgtatttcagtaatgtatcacgctgtgtcatttccactgtgtaccaacagcccatccccac

SEQ ID NO: 41353 - DNA, 2568 bp, Homo sapiens
ctgcctcccaggttcaaatgattctcctgcctcagcctcctaagtcgctgagattacaggcgtgcactatcacagcaggctaaattttgtatttttagtacagagggggtttcatcatgtgggccaggctaatctctaacccttgacctgagatctgcccacctcagcctcccaaagtgtgtgagccaccacgcccggctggagtcacctatactttaaactggggccctacgtggagtcaggctcatctttctggacctgggtggcactgagtagctcggcctgtgctacattcctaacacggccttgctatgcgaagtcagtgtatctgttttataaagaccatctgactggtgctgttttaccattgatgtgctatcgatgtgattttctagttccaaaacactagtttcagtagttagtataacttaacaactccctctgaaatgttacagggcctctgtgtttcatgttacttcaaaatagaaatgagaagtcactaaatgtattattactaacatcaggaagcctttattataacctacaggtagaatataattacaaataatacattaaagattgtctatatttttcaagcctttttataaataaaagcttttggttattgtgttagaaaaaaattcgacattaaaaattggaggaataatgagttgaaagattaccatcttttgaagtgatagattagaaataaaataggcacaagttgttatatgtaagctgcattttttaaaagtaatctgaaaggctttaaaattatgttgctggtgggctttctggtaacttacatggaaattattttttatatttttatcaagaagtcagttccaggcatttaaatgaataactcatgaatacctttgggtctatgtcatggacctcttttggatttcaaggatattgcaggattttacattcgttcaatgagactctttagttttttgtacaaatatttgggttaatgagtagcagcaagcctaacaataaagcttgacttgcatttagaaacaggatttctaagtaaacctgtccatatttgctagctaactgtattttttcatactgagtttttttttgttttttttttttttatctttcaaagctataattaactttatggtccagtaaggccagaattggtagcacaaaaaatcctgtcttttatgcattattttcacatcttaatttttctttctgagccttggtctctttaggtgaggcaaaagtctcagtgacctttgagcggaatgcttttgagaggtgatagtacaggataggatcaaagcacaggttcgacacagccaggagcagtgtagcctctttggctttgaagagtgaaatcctggttgagcaatcagttatgacttctgtctggctgagggtatacgggattcggacaatgtggtaaggaacaaagcatatgatgtagcccgtggtcactaaaagtatgttgatgagagcctttttcacatttgggtaattttcattatctttgtttctgtagagctgtcgaattacaaggcaattggatattaaaatgatggctgagaaatttaaaaatattgctacacatatgaaatttgtcagcaaatgccaatttcttccaaattcctttttaaactccatacaacccacatttgacttttccttgatgtctttgatgggaatcatcatatttggcaccattataagaaggaccattagccacacaacggttgatatcattttggcaaatccgggttcttgtattcggtagatcttgcagctgtgtgtcagctgaagacagcggtcaatgctgacaaatgctaagaagataattgataaatacatattgatatagatgaggcaggctgttacttggcagtggaatatcttcagcttccaaggtgccacacccaagtcaacaacaattttcactggtaatgccagagtaagcaggaaatcggctgtaagcaaattaattaagtagatgctcacacacctgtgattcgtattcttctgtataaaagcccaggttgcaaaacaacttccaataattccaacaaggaaaactaaataaaaaaaatacgtgaatggctccagatctttataaactgggcagaagaacgaactgtttgtcatcttgagggaaagtaaggatgactgcttattgaaaagaaaaaatttctaagactctgtaaaagaaacaaggaaagggaggttagtaattaaaattagcaactattttctttaaaagacattggtcttcacaataccgttgtctttccagttcttagaattttattggtgaacttaccagaccatatggcctggtgagaacatactagattgtgaagatgcctgggttttccattgtctgattttgtgactttcaggaaatcccatgcaggtttgcttttggtagggatattttcaacctcaggtttttccattctggtagttcttgttaccagttgggttggaagttagtttgcagaggagataagtgaaccgagattctgagaagtagagagaggaaactagggttgtggttgagcatgaagagctttc

SEQ ID NO: 41354 - DNA, 1874 bp, Homo sapiens
gcctagaacttgctcttattaggtcaaattggatcatgttccatcccaacttgtggccagtggaatcagacatgctgattgcctagagtcagttatggctggccccttatgtgggggatggggtcagctgcatatgatagctgcatggttgagaacaggacagaatgactttcccaaaggaaaagttttgcttctgtttctggacaaagaagacggaggctgaagatgaccaacgaatgagcactagtgatgacaacatttcgtaaaagaccattgcagggttcatccacctcagtgggtagatgtcagtgtgtgatctttttatatgattatgatctttctatgatctgtttctttattactcttatctcaaatattccttttataaaaacaccttaaaacattttgtataggtagttgaatcacttatgcatcaaaatggaatgtaaggatttctgttaaagggaggtttttagtcgtcatgagtgacttttgaatatctttctgtgagatttctgcattccacatgttacagagtagccattagcatattctatctgcaggtatattttcttttcattggtgccccagcaatggaaaaactttgtgacttttcgtatcttgaaaaatgaggaaataattgactagagctgagagccctttggcctctcttggcagagactctgaggcagaggctctcagcagactgtcattagcttcccctgtttccttacagctgtgtttacagtgccttctgcaggcacctgagttgtaagcctcggtgggcaccctgaacactggcgtgcctgcactatagctttatctacaaaaggacctggcaagtgttccctgttgcccacctacactagtgctagtgatttctgggaagtcgctgggttaatttattattgctggtgctctgccacttggtttttagttgttactctggacctgaaagttctaataggtagtaactattactcagctgttgcttcacaatatccttatctgcaatccatgttgtttcctgaaaaatattacttttgcattgctattctgctttagcacatgcttacaaaggcatttcttggtgctactcatcttctctttttcactttcacttttttaccatggcccagtagggggcatttaaaaccctagtatttactcatttgtcctggccaatgtaagttgtgaagaataaacactgcctttgttttttttttttgtttcgtttttgttttttgttttttttttgcagatgtagttagataaacaattatagcaagcttagtttaccaagcacatttgtgatagcatagcaattttcgttttttattttttgagacggtctgattgacccagaattgggaactattagaacagtggaaagtagatactgagggaaaaaaaacctgtccagcttttccccaatttagggtatttttttctgagttttgcctaaaatattgatgaggttataggacatatgaagtacttttgtttctttttttgacataggttcttgctctgttgcccaggctggagtgcagtagcacaatcatggctcactgcaacctctgcctcttgggcccaggtgatcatcccacctcagtctccccagtaactgggactatcggcgtatgccacgacgcctggctaattatatttttttgtagagacagagtttcgccatgttgcccaggctggtcttgaactcctggacttcagtgatctgcccacctttgccttccaaagtgttgggagtacaggtgtgagccaccatgccctatctggagtacttcttctgaaaagtcactggcagatagaatttttgaattctctatgtaactgtctccattgtattagcatgc

SEQ ID NO: 41355 - DNA, 1355 bp, Homo sapiens
gcaccttgtttatgctgagatggctgtgtggctggtggcctcagctgccctctcaggagtcatttgactgatacttttgctccaatagcttgcccttcctttaaattgtctcagagccttacctgcctgctgtctttctgaatgatcagtgcctcagcttcagcgctccctgtgtgcttttactacagtggctctgcattgtctgcatgtcccagcacttgcagggtgttgcaaggaagattgcttcagtggtagtaaagggcttggttccaggacctggatcccgggcgggaatcctgccctgccacctactgttccttcagctgagagctgatgaaaccacacaagaatgtgatgtttgtggtaggcctaggtttcacagtcattcctgaggttagatggtatcgctgcttagagacctgttttttttccagccacccattggtattttcctttggctattttactaaccatgtttctttgttgttggttgtaaaatgaggttggtggaaaaggattaacacattctcagtttctccttgcttttggaccccgaacttggtggttgataccttaagcaatcttcagagctaccctaggacctagatatatttccacccccgccaggtaggaagatacgagattcagacagtttaattaagttgccctgactcacactgtgagtaatgggtagagctgggattcatatcaaatacaatagaaactgaaattgcagttctattatactgttgtggagtaaaagtgaagaatgattctggggggttattttagaggacaggaagtgggaggggggcagtattgggcagaggtaggagtctgttttctccatcaagcttgtgaaggaactgctaatcttccaaactagaggtctagttttatttggcctgaacaatgttgaaaacatcaggaaatttcacataagaatccagatttggaacccattttgaaagatgagaagatttgctagcatccagcatgaacaatccagcactattagttgcctcttcctgatggggaagtgagctctctccagttctctggctcacagcatacgcgttgacatccctgggccacctctttcaggagcattacctgccgggtcctacagtcagttgatttggcaatgattattccgcttatcatttaatcttatgtggctatacttaacctctatagatccccaattgttctactttgattataaatgtatctttcccttcttctgtgtctctcctccctgcaaacgcctgatttttcttgtattactgaccatcacttaaccatttcttttcaaatggtttttcttatacctcttagcaacccagaaaaaagta

SEQ ID NO: 41356 - DNA, 1072 bp, Homo sapiens
tatttataaattggtgcaaaaagcacaagtaaattatacatcaaatttattataaagaaatagtaactattttaactttgttcaagtatgtggtaatttgctcctattagagtaaaaaagaaaccagtaaattatcagtttgtgtaacttaagagtattctatataatatttttttagatttagatgcataaaattttgaatgtgaaaattgcagggcattttaaaacatatgtgggggatattttcccatgttctctgttatttcattttcttttgccatatgattttacatataatatagtcaagcatactgtgaatagacttgtctataatgagcagaccatgtaaatctactttttttaaaatgtagctagtacaactttagtagacattttcttttgcaaatcattatctataaataatttatatcttcctgggtgagttactcattgcaaagtttgactcatgcaaatgacctcaaatacatgtcagcttactttgctgtggcaacatccatgtgaactgctttgtacactgtgaaaatatttcactccagcctgcccattttgtgtttactctgggctggaaaagactttgccaaaacattaaaaactattcttttcactaaattaatagtctatctgctttcagaagatgtatcatctatctgtacacatttttgctggttttgtatatcagattttttcctctcaagaaacatacttagataagctaatgaagttgttttcttcaaagtaatatatctatataatgactgcattggcaaatcaaccgaaatgtgaatgttgtgcctagtgagtgagtcatgttccatcattatttctttccaaatttctttgccagttcagtttgaaccatatattttgtagctcagcattgcaaacaacagtaatactgttttaagaatgagtgttataattgcatagcatttgtatgcactttatactttgcagaggtgagttaaattattaatcattttgcacatgaaagctgtggggcatatcttttttctttttttaggtgaggaagttatgctacgactctaattaa

SEQ ID NO: 41357 - DNA, 2800 bp, Homo sapiens
catcatcatctttttctttctcccatttttattgcttttgtgatcctgtcctgaattactggcaatgcctcgaacaactttaagtctcttgccgtaacttggacttacgtgctacagttaataaaaaagtctttaaagagcattaaggtcttaaatagcaaaagcattttgatatttcaggactattgctaaccaggggaatcaaagaacatatggcaaaaagctgtgctttttcacattctgagtaggacggggcaggggaaattgtgaagaaaatgagataggcctgaagacgtcctgtgattccctccctcctggcagcccaagtgggccctggaactcccagttactccccaacccccaccctcacaacagcatcctccccaatgtcttttggtcttagaaatagatctgacaaatatttccactctgaggtatccatgttaaggtcatgatgtataaacacgatgagggagtgaaaagtaaacaagcaaagctacagaagttttaaaccaacaaatgagcatctaattgtggaatgtggggcactaagaagctggttgagggagaatttggagagtgtcagttcttcctataaaaggttaccctaatcctagaggataatattctgatcttctctgaagaaagtatacaacttacaagaaaattcagagggcatcaactccacctggaagaaaatccagctgtttttaagttctgatgttttgttttgatttatcattttttccttgccagtgatttatagttgtagaatgtttagaattgggttaatgggtacaaaaattcagttagatagaaggaatacgttctagtatttaatagtacagaagggaaattatagttaataataacttatttatatttcaaaatagctaaaagagaagaagtgtaatgttcccaacacaaagaaaagataaaagataaatgtttgagatgacagatatccaattaccatgatttaatcattgcatgttgtatacatgtatcaaaatataacatgtaactccaaatacatacaagtatgatatatcaattaaagaaatccaagaaaggggtgtctccatttttaggacagttcaaaccaaaatgttcttcagctgaagttgtctgctgtggtggggcttggggagagactagactgcagggaggaatgagccagtggtggaggtggggggatagacaggaagctatcacaggagttctcagctgggaagatggaagtcagcactaggaaaagtcacaggaggatcaaattattctcttcacctatctctggctcctccagctgcccccttccatcagctggtttccacaaataactggccctctagaatcttacttaaaaaatgttctcaacaaagggttcctactcccactcacattactttgaagagataagctggaatgttttacaaacaaccagctgaacaggttgaaagagcagatgttaagctgaaatgttgcaatgactagttttggttcttggaacaccaaacactagatgacatcaagtgtgtatttttagccttatttataatgtgacaagtcacatttcactctctcctcattgtcaaaggctatttccaaaggattacgaaggaagatctgacttgcattaaagcttctttgactttgaacacagcacatgttttccataaggaaatcaataaaatctgagagtagaacttgaataatatatttcatttctaatgcagcactcacctagataatttatagtgtctcattttaaactttgcaaaatcacttggatgggttcttgttcttctagttttttatagttcattaattcaacaactatttattgtgcacttgccatatagcatagggacacatatattcataaattgttggagataaacagatagctctgatgaacttcatactttgaaggaggagacagccccatgaagaaacaatgagaaatacagtctgatcattaatataaagagaggtgtgaacaacatgtgaacctggcttttgaaaggagaggcaggaggagccagggaaggcttcatggagaaatctggttttgaaagacatagaaatgagataagtgagcaaaagaggttccaggttgaagggcaatgtgtgcaagcctgtacctcatattctaacatcacagcatatgtacgacactgtatctagcacagttgtacattgtgtcatcagtctgtacaatatgcttttgtacttgactctataaatcatgaagcttgacaacagtggtgcaatttttttgttgttattgttttgtttttcttttttccttgtggttaagttggtgatctcaagctttagcctgtgaatgaatcaacctgattgattaaacatgggtgacccgggccatattcccaaagacatgattcagttgatctaggtggggcctgggaacctgtatagtgtttttaaaagccctctagtgattttaattaagagcatcagaagatcatgcattgagaaacactagattagggaggatagaaagtaaggaatttctgtttcttttttaggtttttatttgcagaaggagaaaatgaggaagagaaagggttggtaaacagtgtaggacaaaggaaaacaaaagtagctgagagaggaattgagaggtgttggccagtaggaatctaggtatcaagaagataagctgctgattgtcagcgtttgggagggagatttgcacaggaaggtacacagtgtgagaaaatagcaataatactatgtaatgtaaaaatcttaacacagaaatgggctgcagcta

SEQ ID NO: 41358 - DNA, 1350 bp, Homo sapiens
atatatatcaatatagtttattacatcaaaaaatttatagatttagcagagcacaaacaaaaaaaaaaaaagaaaaggaattaatggagaagaaccatatgaatgaaccaattaaggaaaaggcatgataaaattaatagctggtcctaatgtatgtaaatctgaggaaacatgaatagattccttaacatgatgaaggtgaaatgaccaagcacaatggaaagggttatcataaataatgaatcacaaaacaatttcctgttgaaattgtaaataggaagtgatgactattatcactcatatctcttgaattcatactatttccaattcaaatgagtttatcaacctttttatcttatatctatatcttcttttcttcacactaagattcctgcttctcatatacactggagacaacagaattgtattgttttttcacctgctttatcacacattacacagaagacatttttagaattacataccaatacatccagcagtgtgagtattgaaaacagtttaaaatgttttgcatgcgttctctccatttgctccccattttgtaaaaataaactttttattttgaaataatatttagattttcagaaaaattgcacagatggtatagagaatttctgtattactttcacccatttcccctattgttaacatattgcataaccataatacatttgccaaaaataagaaaccaacattagtatattactgttaactaaactccagactttttcaaaaatttcaatattttttccagtcatggccttgttcaattctagaatttaatctaggatgacccattgtttctatttgtcacatctgtttagacttctctggtctatgacaatttctcagtgtttgcttatttttcatgacttcatagttttgaggagtactcatcaggtattttgtgaaatgtccctcaatttgtatttgtcttatgttttctcataatcagtctggatcatgggtttgaacggaagaccccacaggagcaatgaccttttcatatcacatcagggaaaacaatgctatcaccatgactcatagctgatgatattaaccttattcatttggccaaggcagtttttcccaggagtctctactataaaattactttttcctccatctttccgtattccttagaagcaactcattaagttcagcccacactcaaggagcagggaaaattgaactttatctcctatagggtaagagctacataaattattaggaattcttccgtaaggaagacttgtctcttctctttcatttgtttatttattcaattatttatttatatcaatgtgtcgagatgtatttatatataaa

SEQ ID NO: 41359 - DNA, 1579 bp, Homo sapiens
gaggtcaggagttcgagaccagcctggccaacatggtgaaaccccatctctattagaaatacaaaaattagccaggcgtggtggtgtgcacctgtaatctcagctacttgagaggctgaggcaggagaattgcttgaacccttgaggcggaggtagcagtgagtggagatcgtgccactgcactccagcctgggcgacagagtgagattctcatctcaaaaaaacaaaacaaaacataacaacaacgaaaaaattctgtttgttcttccttactcgaaggtttgttatttgagacatacactgcgtttcttgcactgtcacatggcctttttaaaaataaggtattcagctcttagtaattgtgcattaaatgtttgtttactaactgcctagcaacgtaataaggctgttggatttgacagaacttgcagaaaataagtgctgattgtttctcagagctcgcctttgtatttctgctaagtatatttatttagggtctgcccatgaaatgaaaactgaacagtggaatttgtactcaggaagttatgtaacactttatggcagggcttaaaacaatgaaaattcagccactgcatgtttcaaacaagtatttgctgtgttgccaaagtagaaagagcagaagggaaacatcatgggaagaaagactattttgtttctgattgcaggggtccttggggcatattatgtttatactcctctctcagataatattgaggaactctggtgactggtgtggatagctacacctgtgaaaatggtaacaaatttggtaagttcagaatttcattgtctctgtgaatatttaagtttaatcaggagaaaataattaccagctatattatttttaaaactttctgctgtcttggaaattttgctcttaaagtttgcttgacgattttcaaaccttaaaaaaaaaaacaaacttcattctttaacacaaatccctaacagaataagtatgaaggaagtattcaagtaattttaattttaaatattagaaaacaaaatatgctggctgagaaaaacaatcttactgtgattttcatggcatgaatactgacagaatgaagcatttatgaagtataaacttcagaaaaggtagaattgagcagcactgtgattagttatagaaaattctacacaacaatcttggattcaggcatgaaaatgcattctcactgaaatattctgtcaaaaggtcaactggtaaaaggtcaagggaaattgaacacacggcatgattctcagttgaaggagagtgagccgctgaggcgacagggcagctccctggctggctgcccccagtgtccacactggccctcggagacctgtggtttttttctagtgaggctaactacttggatatgaagccattcatgatttcctggaaacttctctgtagcaaactgccttcttgtagcaaaagaaaaagataattcaaggacacttagcctggatatttaacacttggctcacactctgtttccttgcatatattttttaggtgtttcaacattctctactggcatttaatgcagctctgaataagtgtgataca

SEQ ID NO: 41360 - DNA, 3562 bp, Homo sapiens
acgggagaaacatcaggattctgcaataactgacacaggccctgcatagaaatcgcagggtggaacacttgcctaaaccccgtccccacttcccaatgcatggaaatcccactgcctaacacaccctcaaacaaactacttattgacacaaaacgcttcttatggactcagcctgggtgacagaggaagattctgtatcaaaaaatatatatatatacacacacacatatatatgtatatatatgtgtgtgtgtatatatataatttgttttttccatgataagctattttaaaacaaagattctgaattctgtatgttttctatggataattttgttagagttaaagaatttgttcccgagttattactcaatacatgctgtttattggaatacagataacagcatgatcattgacaaactttgccctagtttcctattactcattaaaccttgaagttgcacttaacatgactgtatctggataacagataaaattttggccttattatgccaacccttaaactaagtgagcaactctgttttcaaagcttttgggtggagctgaagcacactgcttattaaagtacactattcaggcatatcatgtaggtttactttctgtgtttctagagaccaagaagcgggacgttcaccatgggaagaaaatcgctgtaccttctgattgtggggatcctcatagcatattatatttatacgcctctcccagataacgttgaggagccatggagaatgatgtggataaacgcacatctgaaaactatacaaaatttggtaagtttggaattttatgaattcagatgtgcatacaccaccatttgacccagagaattaagtttttcaagattctattcttttgatttattgacttattcatcttttaaaataactgctgtggcctttgacaatgtgttacttagaaatgttgtttgttttctgtcttatgtattggaatcatgttaaaaaaatatcaagaacagcaagcaaggagtcatttgaataggttttgctaaaaagtactttgtttaggtagctttaatatcacgatagtggctctcctttgaaattcttatcttaggtatggtttgttccttaaattttatactcaaattagagatcatctgattatgcagcactgtgttagttacagatttttatgcacttatctttgggattcagaatatagactaaggacacgtaaataagttctcaagaaaagattcaatgggcaggctggttggcacatgcctagggttaaccacgagacggcacaatatgcacaaatgagagggggagggagacctgggtgtcctggcaactgggcagcttggatgctggcaaattaaaaaggtgtagctctctctggatccttgatgatattttactattacttctttggttattttattatcttcattaaaacaaatctcttttcagaacttaaaccagataaatgttgtaactcctggattaatcttttattttgcatttattcaacaattcaactgtctcaaatcctattaggcaaacaagtagtctatccccacacagttgacattctagtggtggagaaaaaaataaattagaattaaatgaataaatgattttagttcatgagaagtacctttaaggaggtaagatggaagaaaagagagtaatttgggcagaaggcaagagtgggctactgtatgcatggtgagaaaaagccattctgaagaggaaacagctacttagggaccagaagaatgaaaagaaaccaaccattctaagtgctaagaaaaatgttttccagcagagacaccaacaagtaaaaacaccccagctacagaatattgacaagtccaagaaatcatatgaaacatttgggtttaatggggaaattgttgcaattagtttggagaggttagaagccatatcatacagtgctttgtgggcactggtagtaagttttgatttaattctgtatgtgatgcagagctattaaagagctttaagaaagggacacatttttttccctcatatttgctgtctgtgctacaatatgtgagaggtctttgatttttttcttggagtctttatattaatttttatttatttaagcaattatatatatattcttctctggtagccttttaattaattaattcattcatttacttacattctgtccacaatttatgaaagtaatgtattttcagagctctcagtcgatataccttttaaaagttgttttaatgccctttcttattcctgaattatctgcttgtttgtttgcttgcttttttgtgatcgtttatgctcctggtttgtcccttttttcctgattagttttgctggcttctctgaaatgtctggcaatctttgagtgttcataccctttattaaaggattatgttatgaacattacatcaagaatcaaactactggattgagaatcctggtaaatatcatttactagttgtgtaggcatggacgacatatttaaccttcctgggctcactttcctcatatctgacatggataagaaaatgttatcttcctcccatataagcaagttgttaatattactgagatgactacaatagagtgctcagaacactgactcattctacagtgaaaggatgggctgcaggcaggcaagctgccctccctttttctcccactcattccttccctcccaaccctgactcccagctcccatgtgcaaccagctccatagccacacctcactgcacctccctatttctaaactaaaccagttcctcgacctgccagggtttttccttttcttatttggttagcaaaagacttaggaaaaggtatttatttcaagcctcagacaaaattgcttttccagtttctactcccaagtagctttttgtaatcacctgctgttcgctcccaaagtactttgtacagagctctgtaatagtatttacattgttttgtaaccatttatttgtctttcacacttaactctgagattcttgagaagagcatttgtctggttcatctctgaaaccgtaaagcttggtagagagcctgacacattttagtgacataggaactaaattagtagcaggggtcacaataaaacttcatctttgccctctgaaagttgctgaaagtcaactgacaggtctggttaatagaagaaaaaggcatatacatttttagcatacataatagacttacaaaatataaaatctcaaagaaatggccagatggttgacactttttttttactatcttgaggttacagaaagaatggtggcttggccaaaaaatgatatggtggcaagacaggttatgggaaggagagaagaggagacatggttagcaaaagtggtcttgttatatagatggatcctcacaggtagcagccctcagagagaacagatggtaaaaatttctttcagacttttaaaggtgtcagattctcagttgatttttcctagatctggacaaatgaaggctctcagaagccatcaatgcagattttctctacagatgcaaatcacctccacaaaagaaaagctttc

SEQ ID NO: 41361 - DNA, 1211 bp, Homo sapiens
ttaaaactgaagtctcttataaaaaatcaagaggaggctgagaggaggcttctctctcatttgccaatttctttaaaacaagaggcaccgttgtcagtacttttaaagtgctgaaaaagactacaagcctgcaaaagaaggctgagtgtttcattctagagctgttttttcttagtgaacatccattgacttcatttggaggttgtatctgagtgagccctctttcttacaagtaaagtaaaacaccagtcagctgaactctttatcaaacatactcttcatttatctcttgatgacacaatgtcactcttccctttcaagctgagccttcagattctccaaaggtttcgacctcccacaaagtcttcacgaggtgactcgctcttcaaggagccctgctattatgccatatggtgttatgactcagcaaacctgcagtcccttctacttccgagacctggaaagacatgttctaactgcttctggatgaaccaggcataccagtattagttcatgccatccaaaaagaaacttcatgttctttttaactctaaattactaaagctaaaagttacagtcttctgatcttcaagagttcccagaattatgctctctggtgattaaactcccttccctaaaaagtggctcatcctaatagtgcaatgttcactatgtgtcagctttaaaattctatgcctgtaaaatactcgaagtttagagaatgcatcttttttcaaacgcttcttaactttctgagggtgaggaccaatttaacaggattacatgtaaattggcctttcagctatgaccatttcaaatcttggaaaatttttctcctgcatacgctttatccttaagtaaagatacatagtatctatttagagatctaatcacaactttataacctttaaaatatttattctataaattaaataccaaatatgaacatatagcgtgtacacatatgcatatatgtacatatgtatgtgtgtgtatatataggtatacacatatacataaaatctcaaacaaagaaattgtcaataagattaaactgtggctccctggagtatacgagaagttatatacatgagctagaactcaatcagtaatttggaattgaagattggcttaggaaataagaaacttcatactttatactaatttaagtaaaacactttgcttgaatatatttaagtatatagactgtt

SEQ ID NO: 41362 - DNA, 2261 bp, Homo sapiens
atttttgactgtagagttgagagtttaacataaaagttgtttggaatgttatgttgcagttgatataaaaacattggtcaaagtttttatttttgtcaaataaataaaaatactcaatgctttaaatcagtatgatttgctgaagtttatcatatgtcctttggaacttctaattaatgtatccaagagtttaattctgaaacttacagaacaaagaaaaatgcttttaaaaatatgaaacagaaaagtaaacctaagattcagtttaatagcatttccatttaattcaagtaacatttattgggctctatgtgcccataatatgagaggtgctctagaactttaacaatgacaaaattaaacttactatattcatacagcagaatgtgttatttgccctattaaaaagtgctaagagaaggctaagctttgaattagttaagaggaggaaaggttaagagcacagtacaaaatagtagccaataagacaattattaacacatttcctctagaaaataaataacagagttcataaatcaaggttctgtaatgttgaatggaaaataatttgtatctgcaattccgtctgtgtgtgtaaatatattgctgcaaaatgaatcagaaaagtgggacattttaaaacagttaatagatttctctatgagtctggccaagaatcaacatcaaataaattatatcttgggccatgaatgtcataagaacaaatatgcatgaattatgcacttgttgctcaagttgagctaacaggagctctactctagctaacatcttccatacttccccacccacacgctctgtatccaaacatatgcatgaagacttgggccacacaattatcatgaacaaatatttatagagaaaaaaagacttttcttctcttgatatggagaaagagactgcaatgattaatccaatttgaaataagacccaagagggataggaaaaaattgagttaacagtataaaactaaaattgtaaaagaaaaacaatacaatgacctgcccctacctataaaatatttttaaatacgggaaagattaatcagttgtgcctctttctctaggttttatttctaggtagcagtactcataagtttactttttaaaaaggttagatgtatttgaattctcctttcaacagcccttaaagtatagagaccaaacaatgaagagagccagacattctgggtgtcagggatggtaagaaatcctgtctggaaaaaggaatggaggcaggaaataacacagacatagaatggagtaggtgttcatttatcattgtccagctggctcccttgaagttaagtaaggtaaaattaatcagtaacttgcccattaaagagttagcattaggattaaaacaactacagcaagtccagatgtcctgaatctcctggttacaaatactccaatttcctgttaggctaggcagaaactatggtagtgatatttctggaagcagagtgcctagaacaaaaacccagttctatcttttactgtctcggtcactttgagtaagttacttaagcatgctaagtctctgtttccctatctataaaacatggatactctattaaatttgaacttattttcagaaattaaaatattgtaaataaagtgaacggcacttaagtcataaaatgaaggaatcataacaatttcagaactgattgaatgtgcaggggagatagggaagagaaatcaatgatgtctgctatcctcttagattagataaccagataaatgatgatgccattcatcaatataagggaaacaaagagtacaagtatggtgtgcacgtgagctgaggaacggtgtggagaagagaaagatgattctagctttaggcatattgtgattaaggtgcctgtttataaggtatacttttaactacctacttcatccatatccctttctaaggaaaactacattcatataccatactactctatgccctgcctacaacttagtcagagccacagaactagctgggaaatgtaagcttgaacaattagaccactcattcaaaaactgggagttaagtcatttaagctaagaagtgctgaaggaacatgcaatcctattggctaagagaaccatttgaagccctgcagaaatgggtaagctaagaaagccactagagaaagaataatgaagtaaatattgtgatgatagacgaatgatagatagatggggcgagggaatatacagacaggtagactagatagatagacactagtt

SEQ ID NO: 41363 - DNA, 757 bp, Homo sapiens
agaagaggaggcagggttctctttaaagattcccaaacctttaacatgactccttctaatgtccacagccataattgcacagatccacctgaatcgtctatccaaataggagacattacttattccttgctcatgagtgcatacctgtgagaaaaagaggacttctagatacttttagaacatatgctatagggcttaatatcactattattgtttctaatttactgcagggagagaacttgagtgaactcaccaaaggaaataaagaatttttcagcaatcatttctgcaaatacttgtttaattaccagtcgttctcaagaaatatttgtttcatgactcacaggaaaaaatgaggcaaagatgaggggaaaatttcacaatattgttttttttttttttcaactagatactcccttgcagataaggcagggtacctccttaagtcatgttcgtgtcctctaatactagtacagtttctgccaaagagtagttttaaaatgtgcacttgttggaaaagtagtctttgagtatgtgtgtgtgtgtgtgtgtgtgcacgcgcattggatgtgtttgtcttatatatatatttcccataggcaataataatgacaaatgcaaggatttatggagtggtgtactgataaatgtttaacaaccaagtctttgtaaaaagtagggtctgaggagagaatgttgctgttttatagggttttaaaacaaatttgcttcatatatgagaaaatcaaggcttaga

SEQ ID NO: 41364 - DNA, 1279 bp, Homo sapiens
gatacctggtaatcaatgaatgggtaaatgagtaaatgaatgaatgcaaaatggccttctctttcatcaaactttatgttctcaagccatacacgtttcatctagactccacaatgctagacgttttagggggagtttttcatttttttgttttttaatgatattcctaaggtttgagcagaacaccataaagatcataacattaaaatgaaatcaaaattggccttttgcttccattttagggttaacagaaacactgcaagttagactgccaatcatctcccaatcaaataaaattctttgtttttcttctttagttgttatgttttatctacatccttctgctattcagatgtttttctcaagtgacttggacattgtagttctcagaaaagatctatttttaccagtatgaatgaattgtagcttaagctgcttcctggctgaggaaggtagctattaaaacactaaccaatagaggctggaatatgcccagtggaaagtgagtgtacaggaaagcaagcaagaacactgtcagaaaaaggaacattttaatgcattccaatgaggccaaagatgccactagggtttgaaaggcaaccagttgtgatgagcatcaatgactcatgaaaaccacaatttagtttactttacagctcctgctgctgtttcagatgacttaagtcctaaactaattaaggaaagtcacagatttcagtatggccaaagataggaattgacctatttccatcgattttcatttcagtgacacaatcattgctggaggcaatccaacttctgtgagtttgacctttgtcattagaaaaatgaaaaaaattagatttaatgatttacaggctccaatgcagaatgattgctccaaaaataaggttttctaaagagaaagaactttagcgacattcaaaatatttccaattgacacacagaaaagtcttgctgtgcatttggaactctctatttccacacatatcaaggaaggttcgtgatgccagagttgcattggaggttcccaaagacctcctggttttccatatggtagaaccagaacagaaagtctttctaaaccctgggaagcagagtagcttaaaagtcagctaacttccattctaatagcagcttctgtggagtgaggacatcacaatgtaaaaatgtaatcatatctttaaattttccttgtggaaataaggtgtacaaaattgagcaaatcattaacagtacataaatggtccactgacagactttttttttttttttttga

SEQ ID NO: 41365 - DNA, 1146 bp, Homo sapiens
aacctgagactaggaaaaaattgtccaaaatcttatgcctaataacagattctaaagcctgtctttatgtctaatagccaaggccatgggaaattacacttaatcttttcctgccctgattcttctaaaaagtgtgtgggtcatgtgcaggccattgcaccaagttggttgtcagggggaggtgggtatgccctgttgccaagagcagccaacaacaaaggcagcagggcaaggttgcagcaaagaccaaggttgcaacatcaataactactgccagtggaaactagcccatgtgtcatacttggtatgtatatatctgttgccaataaccccaaagtagacagtgttttccttttagtcactgagtaatctagtcataaacaaaacagatttacttcatcggctgcttctttcatcatgggaaggaaaatgcccaaagttatgccacatatcgtctaagcataccttctttctaacaattaattttggctgccttctatgaatctgatattggtgccaaacattccctttcccacaagttcaagagtaatcaagaaaagttgacaccttctagtgtccacgtgggcttcttggtatttagggaccttggcaaattatttacagcttctttcagacgagccttccagagctttgtaagaataaacaaacttcaaaggtctccgaaggggaaaaactgtcctggctaagtctataatttaggctatctttagagagtacaactccataaagagagaggtccaagaaaccagcttcttttatacaattaactttttctttacttaattgtaaagactaaatgacaagtaggaaagtgcttttgcagaagcgtgggagtcttaaagctgtagaaggaagaaacactgtgcatgggagtaagtatgtgggtgggagttatagattactgctcttttgctagtctagaataactatgcataaacatctttatagtagtaacttgaacagaatcgttaaacttctattaaaggcacttgatacatcattcaaaataagcacaggttaccttatatccagaaacagaaaaaaatcattttacatccagccaaaaaagattttaaaagagcctttgatttttgacaaaacaagtgataataaaattaaattttt

SEQ ID NO: 41366 - DNA, 3117 bp, Homo sapiens
aaaacttcatcacatcacagacgttcaggattctttccattcaaagcaaagccaagttacatcttatagcacccagtgaattatgatatggggctgcggtttatttgctctggcgacaatatggcttacttgccgtggaatatcccggtatttcagaagtaacatattatttttaaagagggagctttgctttctctaaatcacatggtgcaaagttgggaatacagtggcctgtaaattacaaatattatttacaaactagaaggaaagctgacatgtgtttgtgcctgtgtgacagtttcactaaggaattccaaaactgtggatagcctgttacttgagaaaaatacacggtggcagtcttgcagatgtttttcccgcctgttagccctccaggttcaaaaactgtttggtgcattttaaggcggcagtctcaccagatcgcaggattctagtctaattggcttctaaccttcaatctaaccttgccggcttccttgcaaagcccggtgcaagggcctctttcaaaatgaacccactggtgtgcctagcagtcggtagaagaagcgggagggcgtccggtctgcacgcccgccgcgaggttacaatgctgaacgcatgagatggaagataccaacgggaggccgaggggatccacggcgcccgcgcgggctccggcttcctcctgctctcggcgccgctgggcgaccgcccatgacccgctcttgcgggctctgtccggttgacaggcgaccctgtggcccggggaagcgcgggagggcgccggcggaaagttgaagagcgtttttctcgccgccgcgtgcattaggagctcgacgagtccgccctgggcttcctggtggggctgggcgggcgggggaggggccgcgcagcagcagcggaagccagacctcggcgataagaggctgcacagcgacatgcaacagtcttttcactgcagctgaatgagttgtggcgcccacaatgctcccatgacaaggagctgacaagttccattttccgtcgcgggcatcttggaatcatgactcccacaatgccttgggcacttggtcgacagtggggccgcctctgaaaaaaaaatgtgagaggtaagtttccattttcacagtttccccgcgccgcttcattgttcggactccggcgggtctgcccgtggctgaaggaggaagtgcgaggaggtgctcgccggccgcggttctcccgggcaggggcgggccgctcgcggtagttggtttcgcgtccctcagcacctcctgcccgggggaaggcgggagggtgagccgcagccgctcctgcgcccttccctgccgcgggctctgcggacgctgtcacggcacagcccgcgcacggcttggcagcccagcgggacccagggagaaacaggggggcgagaagagaaacaggtgcgtgcaagtgtactcacaacttaatgacctttgtcgggggaaggtgtgagtccctctgagtcgagcggcgcgcgggtcttcccggcggctcccgcatccctggccccggggctgccatcccgcccggttttcatctgggccaaatatgtgcacgcaaaggttaattctctgcttgctacccataaattacgcatgacatgtttagctgggctgccttatatggagagtgctgtatttcaggccagtttgccttttgccaagtttacagggcggaagacgccctgtaggagagggctgcctcctccttttcttcttcttcttttttttttcatcgttttgtagtgcgtcactcaaaaactgtaagaaaagtaagtatagaagctctttgggtggagccgcagttggttgaattgctttcatgaaaggttgaaaagaatgaaaagtagttagtacttgggttctggtttttagacaaaagcaggacaaatatgtagccaccccccaacttttttttttttttttaaacggagccggaatctgttattggtagtaatgtgtcatgtgagaatactttgattccagagcctgtaacacgagcaggtatatggtggcgcttatgccttcccctcgcacagcactttacaactacaggggtgttgctgccagagtaatattgtattcttaaggctctctggggccgggagagtatgcggctgttgggattctggggtgtatttccgtggagtatgtctccccaggattaaagttaagaagctgccggaaaggttgttgccgctgacttcactttgtgtgcccaccagcacaggcacaagtcatagcagatggatggcaaactctgccatatactctgaggagtttcttaaattaatacgctaggagagaagtcataattaatgcttttagactttcgagccctctgcagcgtgctttgaaatactacaccggtggacactatgtcccttcctcctgggtttgaacacagtgtctgtttatacacagagggtgtttagtacctaagtattctataccagcacaagagagccactccacagttatctctctgtgtggattcctaagtgtgttggtgtttctccttgctgttgagataaaatattatcacccagagagaaaatgaaagttcaacgactgtaaaatttatcccaggaatgtgcagttcaatacttagaatgtcttagatgtagttatagatagaggcactgaataagttattttgtagcctgagaatgcacatcgctgtcacttgtatcttgctttcttaaagttggtgacaactaaggctaaacttctttagaaaacctaatgttctagtttttatctgttttgtgtatttgcatgggagttactttattattattattatattgttaggtcttctttgaaaatgtaggcatagcttttttagtcttatttgtttaatggggggtttccttgctgaagactacaaaagttgccttttgtgttttaaggaacaggttgggtcagcaacagaaaacctgttcatctataattatagtgtcacttaagacataataatcagatttcattattactaagagactcagaaaaacctcacatatgcctagtttaatttttttccttatgtaactgtgaacaaatttgtgtgtagatacacatcaagtgtggtact

SEQ ID NO: 41367 - DNA, 5873 bp, Homo sapiens
gatcatcaggcaacaggggatccctcatcccccaccctccagctttgtttggaattgtacttctgaagtgcatcacgctgctcaaatcaaattgctcacttaatatttaatgtttctgcgatggaatcactttctcccttgaggttgacttcagatttaccagacacactgacaacactgtactccttattttccccacatgacctcagcttctgctttaaaaatgtacgaataaaggatgcttttgttcatatcttgcctgcctgtgatatattgacaaagtgtctgcgggctcaatggaatagttttacagtatgagtgctgttttcagtggaggggcaggacttgggctttagaaggaagtgaattggataggtcaggagaatgtaccatttgtaaacacccctttccttttttattcacgtgtcaggacagcaggagcaggctgttcagtgcccgtccctgcgcagagccggagggaaagcagcttggaagtcagctgcaatttttaaaccttgctttttattccctggtaatgatcttcaagtgcttagacttgtctgagaagctgttttgaaactaacatggtttagtccactaactgcatgttgggtaaattcaaaacccacatgctcgtcctcttgcagtggaataagtcacatctgatggacattttctgtgcttatagcatagtaatgaacgtctgacaggcgcgacctttcataagacaacccacactattggctttctgcccagaatattgctgcaacactatctgtgattggttatctctctatcatgcattgcttcacaaggggaaacggcccctttttttaataaatctacgatggctggctgcaatatgcctcactgtaagtattttgtgtatgtatgtgtgggagagagagagagaggctgacttgaatattacttagtctggtatcacatggcaaggttgtgatactgtaggacatcagtgaagtgctacttagtaaatcttaacctatctcttttttctacaggttggtactaagaagtgcctttcctgacgtctctgctgcttggaaccgcttctagagcagtctctgcttttgccttgcttgctgccagctagactgtgacgacagcacatccaccctccacctctagcccagacacccccatttctacttataatcaagagaaaagctctaagtatctggcattgccctaggctgctttagtgttaaaagaaaagtttgctgaaaaagtaagatatcttctgccaggaaatcaaggaggaaaaaaaaaatcattttctcgattttgctctaaactgctgcatctgtctatgccaaactaatcaataccgattgcaccaccaaactccattgcaaattcagctgtgaggagattccctttcagacaactttgctgaaagcagcttggaaattcggtgtcgaagggtctgccacgttttcatgcttgcattttgggctccaaattggcactgggaaggggttactgagagcacaaggctgataccaggccctacttttaaacgttcatctacttacaatcctagtatttctctaaaaaccaaaacctctttgaattaacagtttcatgctgtgaatttctagtgggagatcttttccttgatattgacgacacaattttccatgtacttttaaagcagggagtggggaaaagtattttgaggggacattttcatcatcagttcagctttttttttttggttgttgctcttttttgggggggttgggtttgttggtttcactgaaacatttaactacctgtaaaatctaaacatggctgttagtgtcacaccaattcgggacacaaaatggctaacactggaagtatgtagagagttccagagggggacttgctcacggccagacacggaatgtaaatttgcacatccttcgaaaagctgccaagttgaaaatggacgagtaatcgcctgctttgattcattgaaagtgagtaactattatattcttttaaggatattcaatgattgaatgaggggtatatggacatacagttctctgcatatgggattatggattgctttgttcatagtttagttatacagtgtgttgatgatgttgggctggggaactttacgagaagcagtagaatcaagtctggccaaactttgttatgaataactttatcagtcctttcactgcatgtttttttttgctagggcagaaagtgttgacatatttttcacttagtaatggcaaagtgtctgtctgtccctggaaatggtaaatgtagctacctgtgagtgtttagcatatgcatatattatatataaggccatggcaatagctgaatgaggatgatttttatttgttggtaaaggcattgtacagttgcaaaagagaagcagatttaaaatcagctaaacttggatagactttttactcttttaatattttgacattttagattttctttttattttgtgggcattttattttcaggccagagccacgcattttatggaaaatgtaactagaagtaaggtgctgaactgctgctacagcaccttacctgaggcacaaactttgttgcatgtgagttatataaataagtagaaactcataagtactattgtttattggatttttccagcttcaaaaattctaatgtgaattagcagtttattttctgttagatcatgatttttttttatttgtaatagtcttagctagaaatgttaaaagttagcttttgtgggcaccataatactaaaatatttactttagtgtttcttgacattcaaaaatgtcattggatttgtaattcaggtatcatatttgaaaatgagtcttttaaaagataacataaatatctttattttgacacacaaggtcaagactagaaatgtgttcctgggtactttcagcctacttggtttaatcaaattgcttttgaatatgaatgtcctaatttaattctttggacctttgaggggaggacactatcacttctacatatgtagagaagtaaaagtctcatagatccatcttgtctttaaaaatatatggtgctataataatcttttctttaataacatcagggtgagttatgagttaattgtttcagttcattgtttcctggtccattttaggctgttcattttgctaaagtttttgccaaagatttcgagaatatgatctttagagttgaacagaaaggaggtattaacaacaaaaatattttaaaatgttagattcttcttaatgtcatagtcctaaagatcaataagcaaaagttataaactcccattgagactttcttcaccctttcctttgagaggcatcagtgaagggcacagtggttgtacctccgtgaatgtgtattcctaaattcatgctggctgaattcaggtgtaattagagactgagacccataaaatgaggggcaaggagctaattactcttgtcggtaaccagctgtggccataagtaaccctgttttgacccaattaatagtaaatccaatttttaatcctacagacagttgatggtgcactcgtagctgcaaaatgaaggacattaaatttggctgtgacattgagtggttacacagaagacctgcttctacaacatttggaaacattgtgaaacattactattcagttgctatttttccatctcaaaatatttttttttagttgctgctcacttatggccacagaacagtccctttttgagtaaagcagcaaggttgcttaatgacatgctatgtggttaacaagattcaactgccacatcaaggactttaaataatttcaagattttaaatgtatttatgaaatgaactcattacagcagctaatcaatgcaaactttgtcctttttctttgtctttctaagagaaactgaatttaatttaaatttaaattacagtgtctaaaacttggtaaaatattttaaatttgaataagaggaaaaaaaaaacatgaatttatttatgatggagcttcatacccaggacagtagcttcttaaatgttagtaaaataattatgttaagcattaaaacaattttgaatatgtaattaagcatttatgttaaaaaacatgtttcttacgtgtgtgtgtatatatttataactgacacatgtgattctttgtacagtatttagaatccttcccttcagatagcagtcctcttgtattcagtcttgtggctaaaatagatcaaaaacatattttaaaactgttaaagtaactgtatgactcatgcttgaagttctgaaatttgggagcgttatgaggtttccatgccattaaccgctagatcatttgcattctctcacagagtaaacggaaaaaaatttagaaaacttgtaataatcctgacttctttaataaaatgtgtcctgtgtattgcttaaatccatagtccagccttttctgagttcttgagccatgagatggaggtggcctgtgtaatctactatttttagaaagttaggaaagcaaaccaaatactctctgagaggaccctatgaaatggctgtacccttcagctgtgctgcttcagactttggccaggctcccaggtgacttacgttaatagcagacttctagttagaagaggagaatttatttcattaaaaaaaaaaaaaataagtcaaacagttcaagaaagtattcatttatgtaaaagaagtcaattggtatgttactaaagataataggaagaaaattagctcactattttagttgcatactgatgattttaaggtttaaataattagatttaaatataccgtatgtaaatgtagaagtctgtatcgtaataaatctgttgctaagtaaaatgggaatacatgacaacgaggaatgtaggtattaagaatgtcagaattagaacgagaacagtaaaagagcaaaagctgtaataatgtgtgctagtatataaacaatactctaaatacttagtttctctaattttccttttacaattgcagttttaatttataatagtctaagagcgtattcaagctgagacttaaattgcttacgtgctatagatttaggtgtattagctatttcagaaatccagaacatttgcaaaggtgcattattttatgccaaagaggattatgttcccctatggcttgtgaaagagataggaaaaaagaaaagaaaaatattaacactgcaagccaccattagaaaattatatttcaaaaatgatgtttcaaatcaatgacaaattgcctattcagtcatgagctctcaactaaaatttggggagtcaatgtaaagaaagcctacagaatgtattttaatatttgccaagttatttataccctcaaaaaaaaagcttttacgatatgatcaacagaaatagacttattgtttactgaattctatttcaaatacccattcatttttcaggtactagggatgggagaaagagaatataacctttatatttactatctattttccaaaaatctagcaaaattcttttacctttgaaaactttagtcacttgttcctttatcaaattgagccattttatttaagataattaaaatttctttttgctatatacagtgatatctatctataaatagcaccccgatcagatttatcatagacacatttgagatcagattccactgcaaagtggcatacaatcaagggtgctgagaacagttttaaagagcctctgcaggcttagcagaatatatgaagtatggaaattaggtattagaaggcacacaaatatatgtacatacaggtaaatgaacaactaaagcactcaaaatcagtaaggcaaacaagtatccagatggtcacatatggattggatggcataactagacatgataaa

SEQ ID NO: 41368 - DNA, 1840 bp, Homo sapiens
tgaagtcttctcatcttgacaaacttgtcatcacttctgtcttgcttatttagtaaataaaacctggcatatcacaaatggatttatttttccttatagagaaaactaaaacagcttcattttttatcttcttataactgtacttatttatttatttatttgagacagagtcttactctgttgtccaggcttgagtgcagtggtgtgatctcggctcattgtaaccttcgcctcccacgttcaagcaattctcctgcctcaacctcccgagtagctggtcctacaggcgtgtatcaccatgcccagctaatttttgcatttttagtagagacagggtttcaccgtgttggccaggctggcttgaactcttgacctcaggtgatcagcccgccttggccttccaaagtgctgggattacaggcgtgagtcaccgcgcccagcctactattcatatttatataaacagtcacatttttataactggaatatagcagaaatgccatgtcattaaaaacaggtcccaagtgattttatatgacaaaagaatctgcactttgatttgtatttctgctgcttccacaaatacactttcttattttttccgtatggagtaaaataacaaggtgagttaatatttattgaaacttaatgtatgtcaatcagtgttttcagtgcttttcatttttttcatagtattttgtccctataaaatctcatcgagatagttactggtgttacttccatttcacagatggacacactgaaatacagagaagttaggtaatacatgcaaggtcagtcagccagtaaaatgtggacttggagcctcgtaatctgatttcacagcctgtactcttaattgttttgttatgtttgctggaaaacattgcttcttaatttccatatgcatattctaaggattcgacaaagaaaatataactaacagcagtacttaagaataaaaatgaatatccaagacaaatttatagtacagggcctaaaacagtaagtactcagaagtaatcactgtattttaagtcaacaaatgagtcaaggagtgaacccaaaatagcagaaagaatgctgccaccaactttcaaagatgttgtatctgttgtaaaatatatggccatataggaaaaattttaaatgaatcatcttagataactagtcactgtataaactatatagctgcctccccagtgcataaaaagccatattcaaaaggtttaattgtttagaaaatgtttttccacagaagcaaggtgattaagtcatcgggtcaaccctgagaagccaaagtagcccagaggatgcttgagttatagttcagtacaaacagtaccttggaaaccctggttattaattaaacccaagaggctccatagaagtgttatcttatcataaatcttgagaactcctagagtcacagaccccagctgcttttgtcaaactatttctgtggcaaagatgtattttaaatttcagtttagggttccagaaattcagcttgcctagtgcaggggaggtggcctttcccaaagtcctggaactcatgctgtgagccagtgtagttttccccagctttaactttgggctgcttctgtttcctgaagctagtctttaatagggcatttgcttagaatcagcaggatctaaagacagggtatgcagtgaggagctggagtccaaagcttcccacctgtgtaacctttagggtgggaaggtgtcgtcaatatgtcttccaagtgacccccatgtttctaaggactcagcctgcctgttttttgaatgtagtgctcattgatcctgggccctgtctactgcagagcttaatgaa

SEQ ID NO: 41369 - DNA, 741 bp, Homo sapiens
atgagtttgagacttttaacatcattagaaataggagagcatgtactttttccagcaagtgtaaagggggaaacaaacaccaaaaccccatctccctgatttttttggcttttcagaaataatacagcctagtcctatggccagttctgggtttttcttgacagcgtctgtaactgttcttgttatagtctaattctgggtatgagttatgtgtttacagtttgatttactgagccatgccactgcattcttgttaaggttattgattattgcccattctgttctgctgtgtattattgatttagtgtgtgacaatgagttaattgtattacttgatgttgaagaaggatcaaatatctgttcaaaggggatgcttgtagcctgtgtaattgagttggctatttcaggcttttaacatgttgtgaaacaattaggagaaagtacaggaggacctctgagggcagggaacataaaatttgttttcagctttttcgcagttgccaaaaatggtgccgtaaggctttcctggaattaagtagtcagttggtatttggttagcagatgctttgtaaaacctaatatattcccactatatttcctttaaaaatcaagggggggttaacacctttagattgtcatgttttattgagaaaaatccacttctctgaaactccctattactggatataagaaaaaataacaagcaagatgtgttgtgtatgttggtgcccacattttgga

SEQ ID NO: 41370 - DNA, 1746 bp, Homo sapiens
tgaaattttagggatgtctttatctcctatagtgtgtgttttgccaagatttattaagggtaattttggattttagaaaatgtacagtttctaaaggcttgtgaacgttttatattgatagaaaatgtaagtaagactagtaacacattattttctccaaaggatcctgtgactgacacaaaaaatatgatataatattgaatctgccaaaagatgcactgttaatctagggttatgttatgttgttattttattaggtatgtgatactatggtgtgaattttagaatataggtaattatttaagtaattactgtaattctaaacatcttctgagatgttttctctaaagcagaaactcagcttttactcatgtttagataatgtgatatagctgttctagatatttgagattagggttgaggcaaattgttgacatataattaaaatgtattttataactaaaatttagaagaatggaaaaagtttacattgtatttataagactttgctaacatgctttatgacattacggagaagtactaggaagaaggagatctttaaaaggagtgatattctgtttgctttgctggagtaccttatcaggaaatttgaaatcttagccctttaattgtgatatctgttaattctaaaacttacactgaatttaactttgaaggtcaacatatggatttttttaaaaacaatatttactctatcaaaagattagttgtatttttgacttgaggaaatagcttaatctgaacagcacgaaacttgacaaaaaagtttgctaatacataaatattggctattttaatctgttgaaaacggaaggctagtaccaagggagacggtagtaaaattatagaaggagctagtgaaaagtaaacattatgcaacatgaaaagaatactaggggaaaaactgacagagtagaataacaggaagattagtcacttctggaaggaaaaaagtaggtaggggcagggggatgaagtactttaaacaggaatgtggaactggaagtgctagggctaaaagacagatgtgagcttatttgggagctaaactgggctttgaaaaaggaataatactggtagcatttaatatcaaaatttaaattttatgttaacaataagaaaaaaatggagaaaaatttttgttagggattataaaatgcctgttaaaataaaaagacttatatttactcctttgtggagctgaattggtttcggtcagacagcaatgtcaaatgcaaatcaagaaaatacatttctgaggccaaggcaggagatttcttgaccccagaaatttgcaacaaccccaaggaacatagtgagactctgtctctaccaaaaagaaaagaaaaggaaaagaaaagaaaaaaaattagccaggcatggtggtgagcacctgtagtcacagctactcaggaggctgaggtgggaggattgcatgagcttgggaagtcaaggatgcagtgagccatgatcagccattgcactccagcctgggcaatgaaacaagaccctgtctcaagaaatatacatatatattttatcttatatatatatatcttatatattatatatatatataatatatatgtcatatataatatataatatatataagaaatatatatataatttctttcaaaaccggtcaaagttcttttactttcaagtgatggataaaataaaaccattgtggatatcatgggatatatgtgctattggtttgaa

SEQ ID NO: 41371 - DNA, 611 bp, Homo sapiens
tatcaagacatctggctctttccagttagtgatattttggaaatcttttcattgaaaaaatgcataactaaaagtccttgtaacttttgcaatactttaaatgaaactgtattttgttaatcacaacagcatatacatgcatctgaaaaattattttcagaagagttattattacaacgcccactaggagtcctcagctcacagaatgggactctgttagaagtcattcgtttttcatttggagaacaaaatcgtttgctagagctattacttcatcacatacccttggtactcatggaatttaaactttgaaatgatactaaaggtcagtgatgtagcaatctattatttcactgagacatacttttgaatgcctgtatgaatgctttcatacaggaagtagtcactaaagcactggggagacattgcagtggtcgaggaacggctcaaaaatcagaacacctggaatcacgtcgcagctccctgaccttggcaaattacttctctgactcagtttccactttaataaaataagtacgagaatataaatactgcaccattattgagtggtttccagactttgctgcaaactggaattgtcggggggattt

SEQ ID NO: 41372 - DNA, 703 bp, Homo sapiens
caccagctcatgactccaacatgacttacctgatttacattcagatagacaacccccctcctccttgatcactttagtcacttctgctaactttgccatgttccttgtgtcctttgtccttttctacacctcacctctttcgcttacctagccttaatcttaaaccaatctaatatcttaagtccttcagttctggtgtggaaaccataccaaccctatccaccagggctggcctgcagtccactctggccaaccatgtatatgctcaccgtaagtagtctctgccatccctcactttggcaagtcaaaaccacccactagcaaactgttacattgtccttcactttctctggtgaccctccatcctacttgctctgtgaaaggagtatcagcaaagttggggtggactttaattcgggatcaaatatttgaattggcattatctcgagtttcctgggctttgatcaccggaagtacatctaggaactgtgccaaggcaaaaagaaacatgcagaggagcataaggagcaaggtgtgatgctgggtgagaggagtgagattgactggggaaattaggaagacataaccttcaatataagccttgagatggaactagtggaaaagaagtttagagaacttttccagaaaggaagacagtaatgcaaaaacgtggaagcacgagcatatttgggggagttcatta

SEQ ID NO: 41373 - DNA, 1482 bp, Homo sapiens
gataaaatattgtaaaggctgacataataactgatgttcagagcagtaactgtaagtgacaaggagctgtggctcatggaaaataaaagcaaaacagctttcccaatgctctgatgatattgactaactagcaacgaggggtctcatgatatatttatgatattttctaaataactcatgcattttttaaaaaatcgattcatttttcagggtgataagagtagctgtggttttctttcacttagggtatgtgtgtttattcctgatgtctttgtaaacacagagctgaggatggtgatccatcttcatgaaattcactaggcgcaggcttcactgtacttaaacagagtgccaaagctgacatcaccttccttgttctcacagggctccagctgggtgaactatggggcatttgcccggagttcatgctcagcatcagggtcaaagcaaagggaactctgacaatgattccattgtgaacttgttctgggaatgccatgatgattctctatcatgttcctcgtacactgcaccagcaccactgcttcccttcccagtgagaacccgatcaagctttatcatgcagcccagaagggtgggggaaagaaaaagaattaggagaaaatgtaagttgaaacagttgctgtactaacctgttgcatccccaaatgatgaatcttatttttcctgcttctgtaatttctgccatctactctaaaatagaaatattagaatagagaaaatgtaaatgtcattttacatgtaaggaaatcaggacacacagtgttcaaagtattgactctagaagtggaaatcaggggttctgtaatccattcaggagctgattcctatatattattttagaaacccttaatacattctaaatctgtctcattattggctaagtagaaataatctgagtacagtatcaagacatagaaaaatgtacagttggtatctttcctagctttaagagttaaactgttaggaaaaaatgtgaaaaacatttcaatggacaaaatcattactgaatgttctgttagagttatctcttttccttgtctttgaactatttcacaactctatgtgttgtaaaaaaactaataataggggctgggtgcagtggctcatgcctgtaatcctagcactttgggaggccaaggtgggcggatcacctgaggtcaaaagttcaagatcagcctggccaacatggtgaaaccccatctctactaaaaatacaaaaaaattaagtgggtgtggtggcacacttctgtaatcccagctacttgggaggctggggcaggagaagcgcttgaacgcaggaggcagaggttgcagtgaaccgagatagcacccctgcactccagcctgggtgacagagtgagactctgtctaaaaaaggaaaagaaaactaataataggtatccatggcaatgcaaatgaattgtgtgtggtagaacttaattagttattgtcaggtgg

SEQ ID NO: 41374 - DNA, 606 bp, Homo sapiens
acataatgtatccaacaaatgataatttatcttcctctggtttatgtaattaagttttccagttcaaaaaccattactcttactgtagttctgaagtagtaaatgtagcagggaaagccaacctgtggctcatgtatggtcatgtcctcctcccatgtctaaagcaaacatcatttatccattatgtcgctcattcttaccaagcccagaggagacctcagaattcttttcaacatagccttaaagccagttactccaaaaattagaattggaaccaaaggtcagctcacagctatacaattattagctgcaaatgggaggtgagggagcattgctaaatatgtgcctatcaaagacctgagcaaagtgaagcgattacataaacagctttcactttgctaatgaagtaactgagtaccttcttcaaatataactagtgagtcatgattctagaactgagattcaagtcttcagtatctttgaattccatcttttcaccatttcacatgtcccctcatacatctgtctacacagatttatgtttatattacatacatttttatttacctaatctacactttaattcattgtcagaagcgccttcta

SEQ ID NO: 41375 - DNA, 1180 bp, Homo sapiens
gttagccgagattgcaccattgcactccagcctgagcaacagaatgagactctgtctcaaaaattttatatatatatataaaataactaatttgatatgaaaatatctataaattatattcgttgtttgttacctacatgcataactgaaggaaatgctaaatctcagtgagaactaaattaaaacaaagacatgaagtggaagccagaggtgagttcaaattccagatctgttactcatttgtacaaataagttagataattgcttaagcccttcgaactacagtctccttatgtttcaacggagataatactttctacttcacagggctgttggaaggattgttagatgatctaagaagactctagcaatgtctctagtagatttgcctgccatctgaagcccttatattccacccactctctgtgaataagccaaatcttgacctctccccaatctctctcagttttaactcagcttccaacctcaattttcaagcagaagatttccaaataaagatgtatattttcttatttatttgaaatgatatctggaatagtagtttccaacctcctcattggattagattatatccctgtacattctgcaggtaagaataaaatgtttgacagagaaacacgttgtattgtttctgtcaatatggatgctgttatattgtttgaagcaaattattttacacaaatatgggtctcgatatgattatatgctatgcaaacaaacatatacatgcataagagactggaaacagaattctgaactggctcagcttaaatccagtcatctggatcatgaaatcagcatatctgctaccacctggtggtagtttacccaaattctggttacactttcttgtgtgcttgaataccttgatcaatacaactctcagtctacaaatctaaagcatgttgccaaactcaaaccagtccggggagtacatttccacatttttaggcatctgtccagatgcttcatttgctttccttcacagagtaaatcattaccaaatggaagtagtgttgatgctttcgctatagtaccattccagccttatttcctattatttccattgaggccacacacactccagcaaaattatctgctcactgcttcttacacattgcctgtactcctctccccagcttgtcatgtcgtctcttat

SEQ ID NO: 41376 - DNA, 2272 bp, Homo sapiens
ccccttccccatttgccatgtgaagaatatgtgactgtaatagtctatctttcaccaatattataaaaggattctgttgtatgattgaggaactaacagaagagtggtgagatttgatatcatgcaacaaatgctcacttcctattactccaggtggtaagaaagtgggggtaaagtcttatgcgaaagagagtgtgatgaagtttcaggagaggcaggaaatgtaagtaagttaagaaattcttttttttttcttctttcttttttttttgagatggagtttcactcttttcacccaggctggagtgcaatggcacgatctcaactcactgcagcctccgcctcctggattcaagcgattctcctgcctcagtagctggggttacaggcgcccgccaccacacttggctaatttttgtatttttagtgagatggggtttcaccatattggccaggctggtctcaaactcctgacctcaggtgatcctccagcctcagcctcccaaagtattgggattacaggcgtgagccacctcgcctggccaaacaattcttaaaagaaaaacattctagggacagatcctaaagcaaacaggaagtgattggagaagcggaggactaaatatctttggaaaaaacttcagaggcctgaaatctaactctaaatgccagtgggtgtggaatgtgagtggaccaggtaatagccaatatgggtaatggctacagacctcccttctaaagcatgacctctttccttggccagtacatgctagtacatacccttaagtagttctagggctcttaagggaacccttgagtcaatagcattcctttggtaacctttatctggggccaaaatgttcccctccttgtcatgatgggaatagaatacaggaattgcaaggaaatgaaggtatgcacataatttaggataacattttgataccacatcataatttatgagaatgttgcccaaggatacagtgcataagtctcattaatggaaactgctgtaaagaacctcagtgggtgaaactaccctgcccatttcctatgatactaagtgcagtgtgttccagaaaccagtgggtagggaaagcatgactcggcattgccatggcggaagctggcagggaggaaaatccccaacatgttctgtcaggtcagcagtcagtttggctataaacaagtaagattgcaatgttgtgaggtaatcttagtctgactcagtcctttgtcagaacctcacaggttactttcatgaatctttcctggagcaaataaaacagtttcacaacgatgccatatttaaatgttatgtctctgcttatccaattctccacttatcctttcttttatttacttttcttgaaatgggttcagtcataacatcaagcgacagaaaagaaaacaaaggaggaagcagtgtaaccttcctctctttaagtcccatttatctctctacctgaggccattgtgtgcagatacctgggaaagtggatgatagagaataaagaaagcattttaaagcagaggcaaccttcaaaatcactgcattcaattctctaaatttatagatgaaaaaaattgaaggcctgaagaggagtgacatgcctacattacacagcaagttagtggaagaacctaaatcgtaattccagtgttttgattctaatctgtgtctaaaaccttataaagctgaaaaggcctcggaaattatgaggcggaagagttctcatgctctactaacattgtgttccagagaggtcttttcttagggtacaaactaactaaaatggtgttgtcattgcttttgaattggagggagttagcagtccaccttcagtcctcagtccaccctgaagcccaccttcagcctgaagcttctcctgctagaggaggcccttcgagtgctgctccaaaataatttggaaagtatggatgcttcctgatgcttttattgtactgataagaactctgaggcctagtaaggtgaagtaatctgtgcactgtccaggaaactcaaggggaaatgttagaatgcatagactggcagcccttgggccgggcgtggtggctcacgcctgtaatgccagcattttgggaggccgaggcaggtggatcacctgaggtcaggagttcgagaccagcctggccaacacggcgaaaacccgtctctactaaaaatacaaaaattagctgggcgtggtggcgggcccctgtaatcccagctactggggaggctgaggcaggagaatcgcttgaacctggg

SEQ ID NO: 41377 - DNA, 1143 bp, Homo sapiens
tggctaacacggtgaaaccccgtctctactaaaaatacacaaaattagtcagccttggtggcgggcacctgtagtcccagctacttgggaggctgaggcaggagaatgacatgaacccaggaggcgaaacttgcagtgagccgagattgcagtcactggactccagcctgggcgacagagcgagactccgtctgaaaaaaaaaaaaaaaaaaaaaaaaaagatagcccttcgcattttaaacaactaaaaatttgaactaaagtggagttttgaatttatttcctggatgctaaagaaaaagagaaaaaacaattcacactgtctaccaagaggaaacatccagcatctaaagagaaagtcatagccttccctaaaatcaaacccagagttctcagtactgtacatctcacaagacgtacacattctgctaaagtgtaaatatgtgaagtgaatcactctacccctgagtgcacatacatgtctttttatgagctttaggctataaaattctaaggtcatgtaatatatataaacaaatcaaatattttcttagttactcatcattcaaaaatgactggacagatttcttttaagaaaagtggataatattttggggatggtctggtttctattatatgcacacatgaaattcattttagaggccctaaagactattacaatttataaccagtcacctttttagagggactattggtgaacctcccttctctattgaacattggagacagacatgccctttgtattcagatgctgctatgcacagataaaacaaatatggttttagaaacatgcagcaaagatcaatagaagccacagggcatttgttaaaccacaggcaatgagtcacgtaacagcactagggtagttcactaatattacacatttttttttttttgagtcggagtctcgctctgtcgcccaggctggagtgcagtggcacaatcttggctcactgcaacctccacctcctgggttcaagtgattctcctgcctcagcctcccgagtagctgagattacaggtgcccaccaccatgcccacctaatttttgtatttttagtagagacagctactaaaatactggtcttttatcggtcaggctggtctcgaactcctgagctc

SEQ ID NO: 41378 - DNA, 3982 bp, Homo sapiens
tgaactatgaattcctggacttctctaagggccaggctggaaggtgtcatggaggataaagctgatcgcgaatgatccctcttcctgcattacgaggggcccaaagcacctgggagtgcacaccttagcccacaggtccaggtactgtccacaccccaaagaagagctatttcttggacacaggagtgagttcagagtcccgaccagatcctgaaagtgaacttggcaccatttgggcagagcagtccagagttctgactacatggagcgtatgtagtctagaagagggtcaggctccagctgggccatcagcctgaccggaagaggggcactgccagaggagagccagagggtggctgtgggcggaggtccctcttgggtttaagagccagtctgatcacacagcctctaaaatcaccctaagaaagaataacataccggaacattcatgtgacgggtaagtatggtccagtggttatgagactaggctctgcaggcaaatccctgggttggaatcttaggttggccactttctagttgtggcatcgcaggcaaattattgatcatctcacagcctcagtttcctcatctttaaaatgggtaaataatcattattatgaggagtggcagtatatgtaaaacgcttggtggacattacacattgggtggatgttgacagggttctctccagcttaggcgagtttgcctctgagaggtttttctggagaattatataagcttcataacatccaagcactctgacagtcaaggtgaaagtctcctctctctactaaattggggtgaggcgcgggtgtgggcaccacccaccccacccaaggcatcaggggcagcccacgtcccgcccggttctgtgcccaaggacttcacgctgcagacgtgcacggaagctgctttggccaggggtttggaggttaactagcaaacgcagcgtgagtcacggcggcactaggaactgaaaccgtgttagccatgcccaggtttaccctccgatgcggacggtgaaaccagggagcagtgacatcaggacggggagccagcgctgacgcagctccaccgcctccctccccatcccgcacccgccgccgccgagctcagcctgcagacaggtcttgacatccctcctcagcgaggagcgagggagtcggaacaagtcggggcatctcccttgcacctcccgggagcgccagcccagccaagtctagcgattgcccggcccgccagcgaagacgcttcctctgaagcaagcttggacactcccctacccctccgggtgaaacgaattccaagtggcccatttcggctcctcgccccctcccactccctgcaaaaaaacttggcaactctgcggtttcttgcggaccaaaacctgtaattagccctttgtgctccctttaaggggcagtcgtgactggaaaccgaggagtcagaccctctcgaaaacaccaacaaagaactatatttagttctgagctctcagcctaaatgcctcttattttttcacttttacttcaaaacgccagggttggggaagtgggaggcagagggtgggggagcaacggagaaagaacagctgtgcctccgcctctccgctcaatctctataaataaccaatcgcgagcggaggctactttttagccaatgaagcgccccaaactgataaagccttggcggcagccaatgaacaacacttaggggtgtcagactcgcgccccgagaccaatgagtgcagagtctgggagaggtaatttgagctagagtgtgggtgtgtggtgcaaaagcttcctacttccaagcccaaaaacctgctctgcgactgagcatgccctgaactaactgcgggcgccctgagacttctggattgggatgtaatccggtctccgggttttgaccgcactcgagcggggaggtgggtacgacccgcgggaccctgccccgagagagctgcaggtaccagaagctacccctttcctagtcggaacagtatctcagacttggagtacctcctgttttctttgtgcaaggctgcagtgcacagagtcggtcagagaagacagagtagcgtttctgtggcgaacggtttagaaaaatctatggggcaggtttgctccgccggctgctcgtgcattccacggcacccacaggacttcgggtttccggcccccagacccacgcccgcccggggctgagtgaatggcgtccttgggcctttgataacgggagttggcaagaccacagcctactccatccctgaggcggcccgccgcgcccacgtgcttctcgcagagccgccgcccttgtccaccactcccacagctgtaaaataaagcggcctgcatgcttcctacagcgctttcctcgctcccatatacgcacacacaccccatcttccagccagttcctaactcgcgccactccccaaatcggactcaaatccggagccccgcccactgccccgccccctcccggccccgcggaaaaccaggagcggccgcttgggcaaggcgcggccggaacgcactgggcatgctcgccggggaggggcgggccgggctgcgcgcggcgagtaggaagccctcgcccagtagaggctgtgggagagagcgcgatgggccgcggcggtgggcgcacgttccgcggggactcatgccacgcgcgtcccggcccgacgcgcaattagcagccacctccgcagcccgccgccaccgcctccctgccctcccgggctgccgcagctaggagctccagccgtcgcctcgcgcaggctgcgggcattgtcctctcggttcgccgcccgggctgctgctgccgccgcggactgctgcggggcccggacccgcaccccagggatacgctgccgccgccgccggccggcccggcgcccggcctccgttcggtggtttccgccctgcgttctctgggttgctctctcctgggtttttcctgcgtagctgaggaaggggaagagaagtccagccgccaagcccagccttccccggcgcgcagccccgacggggccgcggcaggcgcggcgagagcgctgacggagccatgagagagtacaaagtggtggtgctgggctcgggcggcgtgggcaagtccgcgctcaccgtgcagttcgtgacgggctccttcatcgagaagtacgacccgaccatcgaagacttttaccgcaaggagattgaggtggactcgtcgccgtcggtgctggagatcctggatacggcgggcaccgagcagttcgcgtccatgcgggacctgtacatcaagaacggccagggcttcatcctggtctacagcctcgtcaaccagcagagcttccaggacatcaagcccatgcgggaccagatcatccgcgtgaagcggtacgagcgcgtgcccatgatcctggtgggcaacaaggtggacctggagggtgagcgcgaggtctcgtacggggagggcaaggccctggctgaggagtggagctgccccttcatggagacgtcggccaaaaacaaagcctcggtagacgagctatttgccgagatcgtgcggcagatgaactacgcggcgcagcccaacggcgatgagggctgctgctcggcctgcgtgatcctctgaggcggccaccgcgcgccggccgcgctctgcgcacaaaagccaaacgcatccgactctctaaatgtgatttatttcttgctttgagattggagaccactttgcattggccagggtgtcttgggagcccggctggcctccgcggccggcgtcccctgcctccaccctgtgcccgagggggtgtccggtcctgcccatccgatactctggtggaaatgtggctctttgcagcatgtacgtttctccctgattttggttgatgcatatttccccgtttaagtagccgttagggcgcagtatcggcagcttgacacccaccaagcaaaagtttcagcctggaaaaaaaatgggggggaagggtgga

SEQ ID NO: 41379 - DNA, 904 bp, Homo sapiens
aaccatagtgctgtcattgagaaacactagcaggataaagcaaatttcacaggttatcatagataatagacttcaagttcagaaaggtgatctggataggcagattcaggaatctgcctggactgagcagtggaacaaagtcttagaaacaaggtgttggctaaaatcaccagagtctactaattgatggccattaccaccaacgatcagtgcctattgtgttcaaaacccatatccagcacttcaggggaaagacagacaataaggaccttacccctagtccactgtgggcacgaatcctttatcacacagagctcccagccagactgggtgatcaacactgccttcaggaaaacataaatatggttcatagcacacactgccactgccagccttgcaaagtcactaataagacacagaaagcacaatggatctattatcttgccctgatttgtgacccttataccttacttccctgactgtggccagacttatttgagtccaaagagtaaactgtggtcagcaaagctggctggccatcaacaaagattcatggtcacccctgtggtttctgttctccgtgagtgaatcattccttggcttctgccactcctcagccctccgagtctatggggaagagtgcttccttaggctcatgtgtggctggactgcctgccagaacctaagcacatacattagtccctgtaggctatgttggagcctctaatctccctccaccttgtgcctttttgtattaaatcacctagatttttatttctgagacttaattatcaaggacatttaacttggctaattttagaggcaatagttggtttttatctttagagttaataaaagaggtaaatcatatatccaattgtttgggttttttggtttttaaaac

SEQ ID NO: 41380 - DNA, 3252 bp, Homo sapiens
gcccacgcatctcacaaagtctactacgccgcgcgttctcggtttcaacgcacctccaggattcagggcttcctaagctgcaattcagcagggctcccttgcttgttctcactctgtgcccccggcaacgaccccgcgcgcctacactcccgtgccgcctcagctactagtccgcaacttctagccccaaaacgctggagctcagaacccagctcaggtgcgctcgtcggtttcccagggagactggggctgattgtaggcacgcgggggcgggaagacagcttcttgcttctggctgcgatggaggcggatctgggcggggccgaaacgggggcggggccaagtgtgggggcgtagtcaggcgtgggggcgggccggcgccggcgccgcggtcggcggcagcgctctcctaagctctcgcggctgcgcttcggtcccggacccgggccacccacggggtagtgggtgctcctcggccccggacattgcaagccccagaaggtaaatttgcgtgggagccgcgcacctggagcgcgagggtacccatgatgagggcgggaggctggatggcgacagaagggagcgtcccgcggcgagtttcccaagaaagctgaactcgtcccaagtttcttgtgcctcggcttgcactcagtgaatgggtggcgggctcatttgctgcgggtggtcttttggcgcgggagggacgcggaggtgattggattaatccgcctgggcggcagcccagatttctgccgggaaccgcgcaccgcagtggtgcagtttttgcccgagaaagggcgggtaagtgcggtgcagtcgtgtcctgcgcagcagcagggggaccgccggtctgggagcacgcgagtcggccaggcgtccccggttgtccagaggcacagtttcctaacttctttcctctttaggcaagactaactcggtgttgctcctcccggcgctgacttcgaggcccggctatggacggcgagagcgaggtggatttttctagcaacagcataacccctttgtggcggaggcggtcgattcctcagccccaccaggttctgggccggagcaagccgaggccccagtcctaccagagccccaacgggttactaattacggatttcccggtggaggacggagggacgctcctcgcagcgcagattcccgcccaggtgcccaccgcctcggacagcaggacggtacataggagccccctgcttctgggcgcccagcggagagcggtggccaatggtgggacggcatccccggagtacagggctgcctctcctcgacttcgacggcccaagtcacccaagctccccaaagcggtgcctggcggctccccgaaatccccagcaaatggcgcggtgaccttgcctgcgccgccgccgccgccggttctgcgccccccgcggactcctaacgcgcccgccccctgcacccccgaggaggaccttactgggttgactgccagcccggtgccttcgcccactgcaaatggccttgccgctaataacgactctcctgggtcaggttcgcagtccggccggaaggcaaaggaccccgaacgggggctctttcctgggccccagaaaagttcttcggaacaaaaactccccctccaaaggctgccctcccaggagaacgagctcctcgagaatccttccgtggttttgagtacaaacagccccgccgccctcaaagtggggaagcagcagatcattccgaagagtctggcctcggaaattaaaataagtaaatccaacaatcaaaatgtggagccccacaagagactcctcaaggtgcgcagcatggtggagggcctaggaggacccctgggtcacgcaggggaggagagtgaggtcgataacgacgtggatagcccagggtctctgcggagaggcttgcggtccacgtcttatcgcagggcagtggtcagtggctttgattttgacagtcctaccagctcgaagaagaagaacagaatgtcccagcctgttctgaaagtggtgatggaagacaaggagaagttttccagtctgggaaggataaaggtaaaagtgggcaggagtgtggcacgccattcactaagcggaaagtaaatgtgttgggagtggggaggaggagcgtagaggaaacccgaagaagtcattccgttttaattctgtgttttgctcttgattgctagtgtacatccagctcttggccactttgatgctggcaggcacagccgagtttagtgcaactttgtgggaagaagtgaaattcatcacttttaaatttctaagctcaggcagaattgggggggacaagagtgaaatatggcagattattggctgagtgagtctttaccacttttaaaagagatagctgaaagggggaggagcatgttcagaaccgcactctgcagtcaagttgtctggagtttgcttagaggtttcagtcaatgatagctgttatcacagctgattcagaaaaatactgattcctgtttgagcctgttgattattttttgcttttacttactgaattttgagtggttactacgcacttgatgtcattcaggtagaatgtgaatttgaaaatcagttgccaggatcacaaaagacataaatattttgtcatcttttttgttgcttgtttttgtcaccgtggcctttggttgtgttttattcccgttgtatgcccattcatccttgagtgcatgtaacagattggcagctgaaaacttaaggttagggtggacactgtgtggtattgctcccctatattgtcccattagctgcacttattaaaatattgtcaaatatgacataaagaaacagggaaaactgaagaggggtattttggagtgtgtgcttccttccacagaaacaacacaggtttcagcaataaggcagattctttttggcagccacattttttcttggttaatcagagcactggaaccagtctatataaatggcacatatgcaaaacacaagcaagcctgttttattttagagcccgtggtcttaaagaaaataaattacataacattttatgtgttttttccaactctgcaagtatagcaaagttcaatttaacagtgatggtgaatcacgagttgtaaaatgagctgacctgctagttatttgaggattctcaatctgttttgacagggtgtgggggatcttgtacattttatttcattgtttcagtgaattgtagtgatcaaatgagtgaactcctccagggctcagcttctgt

SEQ ID NO: 41381 - DNA, 793 bp, Homo sapiens
ctgagaggtttggtaacctgtctgctgtcacacctagttacacagccagtagtaggacacagatcgagttcttagtccagtttgctgcttcttatagcactctgactatgaagtgaacagcatctacctaatatttacctaaggagatgctttacattccctggaatttgatatttattttgtgacctctgcctaagagagtttaaaatttttagattttttttgaagtcagagagtagacttcattataactagttttacgttatttccttttataaggagctgtttctgtgtatcctctcatttcttctcaaatataatgacctagaaatttttttcatgtacatacatatgtacatgaggaatgcaggattcttacagttaatgattaacaagaatgtaactaaagaagcagtgtgtctaaatggtgagaatctgtgatattagagccaggcagacctgggttcctgtcttgctgttcctgttcatcagttaagtgatactgagaaaaacccttaatatcacagggacctcactgagccacctcatgtgtgaaatgaggttaataatactgttgcctaagttgttgtgaaaatgaatgagaaatctgtcaacaatgttatgcatatatactttgtgccaactacttagtactttgaagactaggggagactcagcctttaccctcataatctgctttacatagcatgacaatcagagaccagtaaaatcttgaatagactccagtgttactttagtcatagtgcatacagaatattctgtagttgatgag

SEQ ID NO: 41382 - DNA, 1301 bp, Homo sapiens
atcagctcctgaatattgagatttttagtgtctattattgtatttcacgtgctaagctgttgccggttcctagtaggtgttttctaagtaacagttgaatgaataaatgcatgagtgaatttgacagtttttttaattaaactgttagctcatgagaggtggatgagggcatgagagctcatgaggcatcagaggtgtctttcttttgttttccattttactctcagcccttggcacgtcatagatacacaataaatgtttattaaatagataaatgaatggtgatggaccttaaataaaagataggatgtaatttaacctaaattacagtgatttaacaggcctgactgtccttcatgagtagtggacagagacatggaaactgcttctgttggcattctctgtatgggctggtccccttcccctgcagttgagtttgagatagagctatgtgaatgagaaaatcacttttctgtaattattcttcagggactaaatctgtttgtctctctgtttataaaattggaggccaaacattgggtacatatgatgtttatttagaacaagtaacataatgattgagaacaattagtgacacataggccttgttttcttgcagaaaatgctgtcctgtatcaaaactacaaggaaaaggcccttgacattgattctgatgaagagtcagagcccaaagaacagaagtcagatgaaaaaattgtgattcaccataagccattgagatccacatggagccaactctctgcggtgagtgtttatcttcttttctatctgtggtaggaaaaaaacaagttttggaaattatgtgtggatttggcttttgttcttttctgccagtgatcctgtaactaaggagaaagactctttttagattgtgaaatgtttctcggaactctgcccgcactaatgagaacatgaactttgacacttctgatcaggaaaattaggtttgataaaataaagtgctatgagattgatgtactgtgacctctggaaactctttctgcgagatctctctttttgttaaatatagcctgcactttatcataattatggctatttacatatatatgcgtgtgtgtttatgtatgtatgcgtgtatatgtacatgtatgtatgtacctgtatatgtatctctgcacaatagaaagctagttacaattcttccttggaaatttttttttttttttttgagatgaggtcttgctctgtcgcccaggctggagttcagtggcgtgatctcggctcactgcagtctcccaggttcatgtgattctcctgcc

SEQ ID NO: 41383 - DNA, 1213 bp, Homo sapiens
gttcattaaggatattggcttgaagtttttttcttttgttgttgtatctctgccaggttttagtatcaggatgatgctggcctcatagaatgagagaggagttcctcttctccaattttttttggaatagtttcagtaggaatggtaccagttctttttacatctggtagaatttagctatgaatctgcttggtcctgggcttttcttggctggtaggctatttattactgcctcaatttcagaaatcgtgattggtctcttcagggatttgatttctccctagttcagtcttgggagggtatatgtgttcacgaatttatccatttcttctcgattttctactttatgtgcctagaggtattcataatgttttctgatggttgtttgtatttctgtggggtcagtggtaatatcccccttgtcctgaaataatgttaatggtcgtagttcccagtttgggttggtcaaatgtggaagggatttgaggttttgaaacctcaatgactttgaaaagtaagttttgacccctggagattatctggaactctactcagagacaaaaaccctgctgcacgcaggtaaatcaccggtgcctcacccaaaacagcagcacaaacattaagccagcagttcttggatctctgggaaaagcatgtgggtttgaaggaaaatattgattgtattagtcagggatggaacactgtgtacttgttacagttaatgccaggtgtgtagtcagctgaacttcaggttttccaaagggttcattcattagtaggaccccggaagtatttattgtcttttcttttagatagattttgactagagtttttgcttttcactgtaagtaccccctccacctctccaagatcatgtactatgcatgtatgaagaaatgactgttgcaacaccagtgtttgttatgttaagttcggtgatggaaccaaaaccatatttgccagctgtgccctgacctgatttatttgccatggggtgcgtttgtgtaatttccatcaccttgaaatgccagatacctttgaaaagggtgttctctgttcagcacctaatagagtcatcctctactgcactcttcttttgtacttgctgacatgtggctttatcagtaatcttaagtcattggaatgtttcttcagtttgctcaaatattttgaactctgtagtcagaaatggtttgatttcttaaagtatttt

SEQ ID NO: 41384 - DNA, 784 bp, Homo sapiens
ttgttactcaaattttgtggatttatctggagcacatatagcctgttaattctctagattattagcctgtactctaatatcttaatattaggatgtttattatctatatttctattattttgaggagataagaactatacagtcagtggacaacttctgtagcaggaagtattattgacagtaaaataaaattgcagattatttccctctttgtaggaaataagcctatccaactataataatacaaaaatggagcaatttccacttagcctggttagaaaccctgcttctggtagtggagtgcaaaggagtctgattgttgtgtgcccacctgggcaacagggagcccttatatccacatgggtccaaagttctgaatgagcagactgagttgcaggatagctgttagctctgggatcatcacagtattgatttgtttacatgcagttaaattactgaccacatatttgcaggagacttattgtgtaccaggattgtgttaggtaatttcagatacagtttatgtagtcccgggacaatgccacgagggtaagtacaaattctttactttgtaacaagtcagctgagaggccaggatgttaaatgcggctgctagttaaggtcttgagattacttggaacagcctctgcagtgacctcaaaagatggatacatgtacctagggctctggaagagcaggaactatgtttctcccaggtgctcagccaataatgtgactgcaactctgacttgggcttttttttcttctcataaattggcttatt

SEQ ID NO: 41385 - DNA, 2284 bp, Homo sapiens
gaatattccgtaaactgaattgataaagcagtggcaaagtttgagacgattgactccaattttgcaagaagttctgcagaggataaaatactatcaaacagcattgcatgctatacagaaatctttcatgaatgaaagagtcaattgatgcagcaaacttcactgtggtcttaagaaacggccacagccacccaaaccttcagcaaccatcaccctagtcagcagccatcaaaaaaaaaagggagcttcatcttcatgtgtttgtttacaaaacaaacaaatgcctttctctgagatcccagagttcttcccctaaaggtgctgaaaagcgctgatggcattccaagcatgcccctctgtgtttgcggctgtggggaggtgagcttgggtgggcgtgtgcttgctgatctgtgaggtgaccagcaagtgacacacccaagaccagggtcaaggggaggcattacttgaactccaaaagtggtttaaacctcttggccagtgaggacaaactagacttcctttgtgtggggaaacttctcctcaaaacagaatttttagtatgcctgtgctttggattttatatgactttaaggatgagaatgactttaacactttggaaatcagtaattttccagtgttccagagaattctcagaaactagagacttccctttccccgtatagttagtaatggtgaaagtgttgctggttttgccttgtgttttccttttctttggtttacaaggattgtttgttctttattcaggccttgccaacatctcaacagagattttcctgactgtctcattcataatttatgtagtctccaccactcatttctgagatgattccaagagagtaggaggtgaactgacatgtccagcttatttcacgccaaggctagatcctttcctgggacattctgtagcatttgttccatccttttgccttttaatcttgccaaagactgaatggttgttcgtttcctcaatcagacatgttctcagaatatttagtcatgtcacttggaaacccataggtctgactcatatttgtagttatttaattaatagcaagagaacattccagaaggggcatgggacagaggtctccttgggtacagagggagtgactctctcattctctttgctctccccacccccaccctcaattacagttgagaagtaaataaatggacatgctttcaagacataaaatagtattggtgttgaaaaaatatatttaacaactaaagacgcactttccttaaaaataaaaaagactattaaaaaacctggcaaattgttacatgccatgtttgcaaatatgcaggttagctttgggctaccgagttttgagcaattagagttttgatatgcatagaatgtgttattttcttccaacatttgtgaaatgcatcaataagtatatattgtttaggttttctttcttttatgtctttttggttaatatggttcattggcaatctagttgaaaaaacaaggtttgcactaccattctagccttaagtaattgaagaacttagagtcaggtatataatttcactacttactctttgacctgaaaaataatgaattttacacctaaatctttactttctttgaaaaactgttgtcactaaaggccacctgaggatatacaacatgtaaaatcagcagtaggaggggtgcagctgtttggcacaaggacaattcaacttcataagacagtgaaattgtggaagaaaaatcaatggctttgattacgtaaagaatgcagaaatgctcaccaaaaggagttggggcaaacagtgagcatctgggatatgccaggcactgagccagctatagaacatgacgaagggacccatgggtgtttctagaggaggacagaattttgagctgaagaaagcatatagggaagtgatcagacatcttggttttcccagaatcagttgttcaagtttgggtccgttgtcctggtgaaattatgaatgatactctttttgactctcaaaaggtcctcgtttatacaatgaaatatatggtgaccctaattatatataattataatattacataaaacaaaatattatcaataacaaattataaatatatacacatatttataattatatacatggtccaactctctcattttcttcccccatgtgaagtgactcacaaaggccatacaggaagtgagttattgccaaagctggaactagaatctggccttcctgacagtctagcagtctttctagtaacaaattttattctttttac

SEQ ID NO: 41386 - DNA, 1190 bp, Homo sapiens
tttcagactgcctgggttaggtgcttaacataccagacttgctttgtcctctgaaaaaaatagaaataattttggtaatattttcttttcaagattgttgtaaaaattagattagatgatacttgcaattgtttagtaccatacctgacacataggtgcttcagaatattatttagaacaaggcccaattcctgccattctggagtttatagcctggtaagagaagcagatgagtcagtaaatgattgggctcaatatgtgatgagttatataattcattcattagcagacatatactgagcccctgttacgtgttgggcaatgttgtagagataatgcagtgaaccaaatggataagctgcctgcttttatgaggcttactgttgaccagcaatataatagaattgtgcagaggggtgccctagaaacaggattatcagactgggatggagatggaaggattggtttatgtatcagaggagcccccactggaggaagtgagccttgtgttttcagcattgagtggatatatgttgagcaaaagaagccaaatacaaaagcatacatactaaaggatttcatttgcaaaaagtacaaaagaagcatggtaatagaaattccatggtaatggaaaacaagagcagtcacctttggacagaggttattgattggaaagggtcagaatggaaatgcctggcgcatctgtgtcttggtaagtaaacacagagctgtacacgcttatgattaactcagtttatgttatgtatgttaagaaattttaatggcaataatgagtgggcttatctacgcaaaaacagggaaggaataggaaaggctggggcaagggtgctatgttccaatgcggtaagtcatcctctctgcctgggttggaaggatgcatatggggatgaaggtggggtgacagcgacaagcatctgtagattcaggctgctatgagagaagagtttttttccccaggtgttggtcatgaaggcattttttcttaagaatgtagagtggcacagtagaaactgactttggtttgaattgcttgcctctgaacttctgtctgatcttagcatccttcagatgggcttttgagaggattacatggaatagtggatgttgagtgcagtgtctgacatgtagcatgtgtttaataaatacataagagagttaaaagtatgtgt

SEQ ID NO: 41387 - DNA, 1881 bp, Homo sapiens
tctataatacattttataaggtgcttttaaaaagtcaccaaaggcctatactaagaaagttcctgcttaatgataaaaattattttttattagaattttatttactagtcactcggagaactttgtttcccttactacagatctttaagacacaaatcaacctgacaatcacctgaagagaggagagtaagccaaatcatctctggagattcctttcattttccttttcaaagagaatctgctcatcaatagaaatttctccaccccaacataaaaaacaaaaacctaggtttgcagataattttaacactaataataaaagctggactatttttctgaatgatccacatccaaaacagtgtctgcctgcttttgttccgcgcaaacctatctcaaatgtagaaaggtcgctatgtgcttcttcaccaggcaaagaccttaaagtgacaattattattctaagggaaaggacggccagagatacgacaacgacactcctaataaagttaatttcggttggaacgtgaacttaacatttgctttgtcacagttctcaagtcctttaagcaaagtatatattcagcctgcataaatcctgcctgtttttggtcagatgagcatggctaatgttacgcagtacacccgctacggggagcgccagcataatatatttgcgcctcatttacatttcacaaaacacgtgcatcacttaagaaacaaaaccaagaaaaagggggcagcgggagagagaagaaaacctgtgctgcctcatcctctccactactgaatccgagattacctcttgcctctccgcttccttgttcttctgcccctgttttttcgcgtaccacatgccgatttcgcggcctttcaggtgcccgggatgccggcccctgccgcctcgaccaccccctccgccgccgccgcctcctccggagcctcggttacctccatgaccccctgctggcccccctccatagcccccaccggagctgcggggacccccatcacggccccagttctgatggtagtcataactcattgtcctggcagactacaacccgtcagaaccagcaaccgctggaaatggcgtccgggcccggaagccactgtgcgcccacttccgttttgcttccgtagcaccgcacaagagggcgggccatttagcgtcacaagcagtggtttctggtgacgtcacgggaggacgaccccggtggtctggagggtggcagggatcaggttctgtctgagcccccgagttgtttatctttgtacctctggagcaacagccagccaaaggctcgtagattttctttccctaggcccagcaagtgagccaatagcttttggtttttactttcttattcctggtaaatccgcagtttttttgcacttaggtcctagggtagtaaacgttgattgaaacaaaagaacccttggatcaattcgccgtcttctaaagaaaagtctctaaaaaatgagttcttctagtcttgaaaacagcctgacaactattcaaatatgtaatttaaaatccccttacctccttgaaagtgttgtcactatttagtacgtttatccaatagtgttaagatgagcgtgtctacccaaattcggtgcagagctcttaggcaatgtaaataaactactttgaagattcatgtgttcatatgaagccacatactgtttattaaccagcacactgagtgttttgtacaagctgttcttgaataatcaagtaattgggccacacaggcttggatgtacaccaggagatatccagctcatgttacagttaactgatgtaaaggtgctgggaatactcactgaacaaagcaagtatggcatgagcttttatttgcctacagtcttaagggaaag

SEQ ID NO: 41388 - DNA, 1512 bp, Homo sapiens
gtcctgcagcggcgaggcggggtagggggtggggggggtgggccgtgagagcgccgagacgcgcggggcgcggagatgtgcaagtggcgaagcttgaccgagagcaggctggagcagccgcccaactcctggcgcgggatctgctgaggggtcacggtgagtctctgtgggtgcgggtcggagggatgcccaggtgcctcgtcgccccacggcccgggcggaggcgggtccggaacctcccccaagtccggcctcagcctggagcccgcgcgccttgggcggatgcacggactgagaggcgcttggctgggctctcagcccgccactgccacccggccccgtgcgctcattggtcgggatgtgtcggctcagcagcctccaacttctcccgaatcccactggtgagtcccaggagagcgagctgagggagaaaggtccaaagggcgcgagcgcccagggcgctgggagcccgtgggacgggcacggggagggcagagccagccgaggggagcggctgccgggaggtgcgctgagcagggtccgcagctaaggtccagcgcgatccgagcgcccaggaccctgcggccgtggaggaggcgtgccctgggaaggagccgctactgggacctgaagagtgaggggagggagaggggcccagagggtgacctggaggagggctctggaagtcacgtcaggttggctcttcaggttcatttccatagttccctgcggcctctgccttggggagttatgttttgttaccgagatccgcgctaccagattgcaccggggctgatttgggggctgggaatttgccattctgctgtacagacactgatttttttttcttctttttaaaaagcaaggtttgttttcattttggtttctgtcggattttctcatttgtaactcacttttctatttttacttttcttaaccggaagatcttttcattatcccacctcttcatcttgcttttaacctgatttcctattatataattaatgcttaaatctcacaagggttggtcggtgcggggctggtgtgtccttttgtagatgaaagtttaagacctcttaactggtttcagtctatttgtctggtttcaaaataagggtaattgcaaccaaatatccctctttagcttctcgatcaagtcgattcctcccccatatatgattcaaatggcaattttattaaactgaaaactagtacctgacttgcagcgtcagcatttggaaagtgcttgtcggcaaatcgactgtatgaaggcgtgtagcttcatcccctgccatttttgtgggttctagcactttaaaaaattgtctggtaatttcttggacttaaccctgtgtctttggttgtagagcagcactaaccaggggagtaatatggttggcacttcgtgtccagaactccgtatttcaggctgggaaacacctaattaatgtctgggaaacaagaagatgatttatcctgagtacctctgtcctcagcttctgcagacacagt

SEQ ID NO: 41389 - DNA, 688 bp, Homo sapiens
ggggctattccttttgaccataaagtctcagcatctagcatactgaagaatctcagttaaaacaaaattaatgagtgagtgagcaagtgaaaaataaatatactaacttgatttgtgtggtaactaacacagtaacatgccaaagaggtgcttgtttcattcatgcattcatttatcctttcatgcatttattaacattttggaacacgaagtccaggtgtcattgggtactgggagaatcaaaggtgaactttgattacattacaagagcagaaggtagacaagacatggtgtaataaactgcaccaccaagagggaaatgtcgtgccaagcaaagtacaaagtgctgtgggcttatttgatgataagactgttctgttctcagtaaaccaagtacaggttggacaaaactgctaatggaaatgccagtgcattttaatccttactcaacatgttgaactcttgcaacactgacgtgtcctgaaagagagagcaactcttttgctgacttctaagttcatattggaacaaatattgtgttatctgatgctaaaaatgggattgcaaatattatagaatgtttagtgtcccatctgggaaagaaagagagtgaatacacatgcttggcattataatcaagttaccatatcctgtctcttgaaacacacaaaaagttatgcaaaataat

SEQ ID NO: 41390 - DNA, 2607 bp, Homo sapiens
aaagtataataaagaaaaagaaattttcatttaaaatattaacaaaaatgcttttgttataatgtcttcctgtaccataggtcaaaaattggtagcctaaggcctaatctgcagatgtgtcttatatgaaccacagagtaatttgtttcattacaacttgaattggtggccaatatttaagactcaggggtttcatttgctatgttgactttctggcttcttgtggaaacaaacaaacaaaaaaaaactgaaagagctatcatccttgagaccacatcctcatgtgaccacaacagctggtgctgggcttctgcgtccccattcggattaaagacctggtcccagtagccctgtctacaccaccaaccagacctgtggcctacttctcttgtccatgctacctgcctggccctaggaaatattggaatgtgtgcccctgttccagactgacactgaaccacttgggtccttttctagtacttaacactgtcttctctaacttcaatgtttcaaattttcaagacactagtcttcacagtcaaatccagaaattgagccttatctgcccaagtcacaaatcagagaaccacagagctggaatggacccgcctttctgatcatggtgtaggattctgaaggctgccacataatcacagggatcagaaagagccccaagttcacctgagtgacacttgaggaaagagtcaggattaaaatatacatcttccccaaatacagagtcccaggaaaatcaggcaaagagagattaaaagaaggttagaccaggttattttagagcattcactcttatcacagggcacagactccatcccacagttgggaaaggggaaaagaggatcccaaatgtctttagattctggcaagaataagtgggcgtagcctcttcactaagacaagcaggaaaatggatcccaaatttccatagcactctgtgtgtgtggttgtcactgtatccacctcagggacagtgaacattcaccatgagtcatggttttgttttctgggctcagtagcctgtggtctggcaggaatcgaggtctgtgattttgcaacagctgttcgtgtcacctggaaaggcaactgagcaagcaatgggataatttttatcagctcatgagcactggctttgcctgccaaaaggccatgtttctcagctagaaaattatattcatatctggaaccagtatagagtcttaaatgccttaaatgccaggatctaaattcttactttatgctacatagtcctaaattattctcatagtctcgaattcaaatttaaggcatactaactcctaaaggtcatggctataacatattttcagatgttaccataacttggagagaatcttcagcaaatagggtggagatgaaggctcattctatctctttaacttaaaattactttcttaaaatgactttctgatggcatcagggagcagccgtcctgttctctatttaggactttaatacataaacttctctcaagcaactgttccaagctcgttcatgtcaccttttagctctggtctttccagatctcatttttggcccatcttctgggcaagtctccctagcccatgatcttgcatttgcctttctctgggccccttccagcttctctatggagagaggcacaatgtcctttggactgcagccaagggagaaacactgactccatgatgaccataggcactgactgttccctgaaaacagcacatagcagtgacagaaggatgccagggggactgctcattcccttcctgctgtgggaacctctattaacgtgtgtgggataataaaaccagctacttttatcagcagatgtcacataaaaactgaccaacatacttaactagcaggtcaaagatctgagccatagtcaagttctgaaaaatgattaagtgaaaatctaacaaatctgtcagtaacactaattggaaactcatcaagattttctaatctaaatgccctcaaaataacattattattttgaaagcagtctgatggtgacagggaggtttcaaggcaaaaagtatttacatgtgtggaatatgagaggagagtggagtgaaatattttatttaggtcattatctaataagattatctgtctgctgtttccagattcaaagatagtgtcaacagaaaattatagatacaatatattgcagtccatgtgtgtggttgtcattttttgatatgcaatcatctacttttaatactgcttcttggtctcatccactctgggcctgttattgcaaagtactgactccaacactaataattctttttctttttctaattactgtcactattttttttttttacttttattttaggtgcaggggcacatgtgcaggtttgttgtataggtaaattgtgtgttgcagggatttggtgtacagactatttcatcacccatgtattcagcatagtacccgaggggttttccaatcctcgccctcctcccaccttccaccatcaagtaggcccagatgtctgatgttcccttttttgtgtccatatgtactcagtgtttagctcccacttataaaaaagaacatgcaatatttggttttctgttccc

SEQ ID NO: 41391 - DNA, 1020 bp, Homo sapiens
aaaagtgagcattaatttatctatttcttattctaaaagatattacctaatcttaaagccatttgcaaagcaggtaataaaatatgctttcaacctaaatttttctatttccctaatattttaatgttgataaagacagacataaaaatagagtgttgtctcagtgtcattcttaccatagtgctcatgttcttcgagtctggtatcagcaatctcctctaaagcagaaacaaaaagtgttactacttcagatagatgtttattgactgagttggatgatttcatcctccagagaatctttgtgcttcagagaagtcttggctgtgaaaaagaattatttgcaaagacctgatagattccaacattcttaaaaatacaaactaactcattgctgagtcataacaaagggttgagtacaaggtctgtggagtcacagagactgaggttcaaatcgctgctccactagctaatatttgtgggaacaggttactgtcacaaaaaatttctccaaacttggaagtaagggaaaaaaggtgggaacagagcttttcaatatcatatggggacaaaggtcccccaggattgtctagacctgtaattagttcatctcattttcactattgattaaaggtctcgtacttaaggaatttactgattaatttgcagggttttgtccagtagagatgcaaataatttccaaccaatggaacagacaatgtaaaatattaatggcctgttaaacattaaccagttttacatctagctcagcaattttatcttaacatttctttgtcaagctgccaataactgccatcacttcttaaatgctctttgaactgattatgacatcttacttgttccctcattaattaattagttcaataaaatatttgacatatgtcccttttatatttacctgagagttattattttatccttttgaaaattataccctaacacgacttaactctctttacctctgtttctctatctgtaaaatggaaaagacctactttttaa

SEQ ID NO: 41392 - DNA, 675 bp, Homo sapiens
ttccaagtatgcgaatgttgaacaatgctgaatccgttgtacactgtgattgtgtttcctttctcacagaacattttttatgattacttgctgacattcctactcatttggttaacttttaatgtacctatcacaaattcttcccaatgactctaatggtctctcaagttccacataatcaaaggcaacagataatccatgaattgtgctttttttctccctacaaaagttctccttctttccttctggttgggttctggaactgtattcagcttttgctctgactttactctgtcactcttgtgaaagagctctcaggaagtaaattatttatttccctcatgtgtttttgtgtgtgctctggtgtatttgtcttttattccacacacacatttgtttgacagtttttggcagaaaattctaggttgaatcattgctctcacgatttttggcttccagaactgctgttgagaaatctgatgccattctgattccagtccttttcacaggaccagttgttgtttgctaattagtttagtttagttttctctttttacaagcactcagggttccactttatccttggcactgtgaaatttcactctgatttgcctctttgtggatctttatactgaggttggccctcgtttgggtttgtcagtctagagaatctta

SEQ ID NO: 41393 - DNA, 1326 bp, Homo sapiens
aaggtctcatgctaccataagcccatttctgagagtaaattcttggggatcatggaaatgcctactctaccccctctctagaaatatttcttgcttgtatgattttaaaaaataaaaaaataaaaatctgaaaaattaccatttgactttaaagaacttttggattgagttgctattagaactaagtacactattaaaacaaaaaggactttagcaatctcttattctcaataattttttaaaggtttaaattaaaagaaggatgcattataatgtcatcattagccttaaaaatcatcttaagcagttaaaatccttttcaagcccgaaaatgcctgctctaggctccttctgggaaaaataatggcaattgccccatgctacagctcggtagcaaaggctttgcccttttgcaatggcagcccgagttcaactgctggcttagagaatgagttctttctggtctgttgtttgtgtgacctttgccatttattgattttttttctctccatgaacaacttctaacttcctgtgttgaattttcccttctctgagctacctttggggtgattctagatcttgtaaaaacaactcgccctccctttggagacacctcatgtatctgtggctaagtcataacctaagttaaggcttactggtttcacttgggaaaatatcttcgtgggagggaaaaaaaaaagaaggcttaaaagccaagggtgtcagctatttgtcccagctctagctggtaaaaagagattttaaagaatttttttttaagaaaaaagagctctagaattaaaagtcagcttaattaaaaacagatatcaaagctatacgtatattcaaaagggctttatgcttttttttcttcttgaatcttgttttttgaggaaaaaaagttttcttctcagtccattgaattgtttctccatttacttcttcttgctacccttgatgcccacaagtgaggacctaaggtaatttctgacagcctgggactccttaggaaaaacagaggaggagaccccgttttaggaaaaaactctgttttcctcatggaaccccaagaactgtaaatggacagatctgctcaaaatctaagacttcgctctgttttgcattgcatcacttgatcttttttactttggggagcatcaaaaataactccacattatgaggaaactttcagccttggtgtgtaatagctaggtaagaaatatacttttagagatatagtttatgcttggtatataattagctacgtaggaaatatacttttactattgctctgtagtagtaaccattcactctaagtggcagttg

SEQ ID NO: 41394 - DNA, 624 bp, Homo sapiens
aaaataaattttcaatacctcctatatcactcaaagataagaaagagctatttggcaaaaagaaataggatgtctggagaactacattgcatatgattttatagcaaatcaactcactgaatttctggtccaggattctgacctgaaaaacctgtgtagatcttccaagttcccagcagaaataattctgcagaagttttattagcactccatgcagatctaaggtccagaagcctcttcaacttaattgaagagggagagaagagggaagtgggaagctgaattcaaatgtttggttcttgtggactagcaacaaggaagtgaagacagatgaaagagaaaccttgagtgccttggatcagttaatcagtaactcactgacgctggcactaaactagatcccgctgacatccagtggcaattgaccgggtaaggctagacaagtttgtaagtctcttgctcagtgcaaaagaaccagccacagagagaagaggctgcttggagaataagctacagaaaacaactaaagagcaaaacccagagagccctccagggacctgtgtggtgtctgaggcagaggctgaattccaagacagagtccagcacccactttttttgaaaccc

SEQ ID NO: 41395 - DNA, 614 bp, Homo sapiens
aatttatagacaaagaacagatggggttgctggatgaaaaatcactaagaggaaacatcaggaatatgaggaactctagctaacccgacataactggattcttgctgaacacaggccagggagatcagacatgacctgggcaatagtggaggatgagggatctgatcagatattgagaatgatcagatatggagagtgggggttcttgctaaactgacttggcagaactcttttctaaaactgagttttacaagaaaacgcacatatgggcccaggagaaggctcagaagcatgactaatgtttgtttggccaagcaaggaatttttgtcactctcacactttcacctttgctcctactatttccctgtctctgcttttctcagtgttttgatcctattctctcctattccatatgagctttctgtacaagctgggggtggggagagcatgactagagacagctccaggtttcaatcgtctcagctagagaggcctttttgcttttaccatctgtaaataagatggtaggaaaggattcgaactgacctgacttaggtcatgtgtccatccataggtcaattactgtggacaacaataagtagagtatatgtgt

SEQ ID NO: 41396 - DNA, 1127 bp, Homo sapiens
cgggaggctgaggtgggagatcacttgaggccaggagttggaggacagcctggacaacatagcaagactcccagtctctaactctaaaagaaagtagtcgatggggtagcgcacgcaacctgtggttccagctactcgggaggctgaagtgggaggatcttttcggccgaagtgggtggagcagcagcagtgagctatgatcgtgccactgcactccagcttgggccagagaggaataccgtgtccctaaaaaataaaattaaaaataaataaaaattagaaatgctctctcccaaggcgtacaggacttccctgctcttcctcggtctcctctctgggccctccccaaatgctctaatggaccaggtggcatccccgagctgggctgcgtctcaccctttgaggtgccccctacagcccagcaaggatccagaacagtccttgtaataatgaggccgaactggccccctggcccgcccccggccctctgcagccccgcacacacgacactcgcgatgtcgccctctcgagctcattcccccgcagttttctgtcgctccccggccccggcgggatccacgcctgaggcctcacgttgttctcagggtcgctctgtgccgccccgcgcccaccacccgcccagactgcgtggccccagtacccggactaggcgcaggtggtcgtctgcccactgcgagatccgagccacgacgttgggctccattccgtccttgtcggcagacggcgagccggtggccgcgggctgccccgccatgttcccggcctcctgcgagcggccctgagctcctccggctggcggcagggggcgccgctcacctcgggaaggcggcggggtccccttccccgcggaccggggtggccccgcgacctgcagtcgccagtgggcgggccccagatatcagacgtcttaacagtgccccaaccgcttttatgcagggtgattccacgatgcaggagatctctgagcagcactgtgggggctgaagcattccctatcaagctagtaggatgattgtcagctggtgacttcaattcactcagctgcaacgtggttttcgcaggtgccacacaaggaaggaaattgaagtaattcattccttccacct

SEQ ID NO: 41397 - DNA, 2686 bp, Homo sapiens
ctggactcggttgtgttatttgatgggttgcctctccctgttaaccgcatagtgatcatttgattgctctaatatcattcattttggctttaatatttcaaagaagctcatttggacgaaacagaaaacttaccttgagttatctcccatacaatgatttccagtaaattaatgagcttccctccaacgtcacacactctttcaaaaggataaataaacctaacaccataatagcttaaatacactacctgaaagagtaacgattcctctgggttgaggctgaaaccgcaaatatttgttacaaaagtcggcagattcaagggccaaaaacaaaacattgcccaaaaagtaacccgctgtttggcccaccgaattgcaagtagaagcataacccacattttccctggataacatagttaacgcccaaccatcgacggcaatgtcctgagtggcggccaagaattcaaacaaaaagaacgccacagtgagagcaatcacgtcgggtgttctgtcatcggtattcccaagcaaacggtccacctgagtggataaatagatcatgaagagtcctagtatatactgtgtcgggacaagccaagatttgcgacgaccgaagttcttaacgtagaccgcatcaaccaacggggcccagagtaatttgagactgaagggccaaaagacaaaactgaagaaagcttggtctgtatagctaacatttttgctttgcaaaatgagtgggatgcttcccgccaagcccaggggaataccctgaagcacgtaaagaaagagtagtagcaaaatgctgcttagttcggcccggaagctctgtggggcttttaagaagtcgccagtgccggtatcccccagaagagcttctctgtccccttcccggcccgctgagtccaaatgactgtcatcccaaccgcctggcggcaggggaccgctcttcatatccagagagtgactgaaattccctggccgccgttgccggctgctgtccttgtgggagatggtgggtgacatatcagagacgatgcagagccccgtctgtggggggccgaggctgagcgttttggatccgtccagtcccaggtccaaggctgtcgcgctggaccagggtttcggtggttcacgggatggtggcagggctcagagcgataagggcacttcttactgcagcccggagtgctgaagccgggagccagtcctctggctagaggcccagaggatgcctggataggtgccccctggaacggcgtcaaagagcctgaaggagacccccgggcagcagcgccgggctcgaggctggaggtgtgtgccgtggtgccaggatggaaaccagctcctacctgcggcgggatcgaacggctggtctcccgacccaacacctccagctctcgctgctatcaatgcggcagagagcactttctctacaggactccagaaaaagcatataacttcctgcctcgcgcttcaggaagtggtcccagtctctaacaggtcccttcccagcctccagagcaagccaatcagggacacgctctcgtggcccagttcggaaacaatgcttggtgggaacctgcaatcttggctgccggaaccttcggggaggattaacgccggcgcaccgtgcggccggggcggggcgccgcccaaactcaggccctgtgacagcgactgtggcggtctggaaagcgtgggcctcggtcattgggcacgagcggtcacgtgacagcgggttcctccaggccagcgctggtggttgagtgatgtaatcacgtggggtctgaagtcttcgtgggtgtaggtttcttcgttatgctgacgacaggcagtgcccgaactctaggctgggagttgtgccatgctgctgctttcgtgggctgaccagaaaagggtagaaggattgacgtttacgaagtttttgaatcaggaggcaaggtcgccttgtgcccccaaaaggatagaaaaaggcctggcaaactggagaatcgcgtccttacggtgcctacatatttatagtacgaattaaactgctcaaggggtgctaggtttgtctgcagtccgtttctccctcatggtggaagacgcgtggggaaacttggtaaccaactctaattacattggtgattggaagactcgttacatcctgtttttatgttgcaataaaacgtcttgtggccgggcgcggtggctcacgcctgtaatcccagcactttggaaggccgaggcgggcggatcacctgagattgggagttcaagatcagcctgaccaacaaggagaaacccgtctctactaagagacgtacaggaatttgagaatctgattaattttttttctgctctctcacctctggcagaaagattattatttttttttcttttgagaggaatctcacactgtcgcctgggctggtgttcagtagggccatctcggctcgctgcagcctccacctcccgggttcaagcgattctcctgcctcagcctcccgagtagctgggactacaggcacgcgccaccacgcccggctaatttttgtatttttagtagagacggggtttcactatgttggccaggctggtctcgaactcctgacctcgtgatccgcctgcctcggcctcccaaagtgctgggattacaaacgtaatggcaggctaggcacagtggctcacgcctataatccca

SEQ ID NO: 41398 - DNA, 2124 bp, Homo sapiens
ttggttaaagttagcttttaaagtattttctcactctggctccttaataccctagctacagtctgacacaagaatgactgcagcaaaatgttggctgtattataataaaaatatttgtggaaaggctttgttagctggaagccatctcaagtattattctttataccccaatctcgatttaggcctctaggtaaccaaattcaaagtaacacctcatcatcatgatggttgccaaggggtaggtggagggactgcagccccttccccacaaacaattccaataaaaacactgttgtgcaaacagagcttcacgaccagttccctgggccagctgctcaccagattaccactcccaaactcccttttctttggaaatactgcacctgctgtatttgtggggagctgtataacttttgaagtatctaagtgatcagttcctacaatgacatccttgagatatggccacggaactttccaaagcagccttggcctccttcatgtccagcaacctgagataaggccacgccaccggctaagagttccgccaggggcccagctctcaggaggcctcttcggtgccgccagcctcccgaagtcatccaaggtagcaggcaaatccggcagcagcaaactagctcggattcggcttcggtttttctcctggccggcgccacaggcccctcctccggggcgggctcctcggtgcgagggcaggaggggcggagccggtggatgccgcgggctcctcctcccaagggcgggccgcgggagacccggccggctttgccggcggggaccgggctgggggcggggccgggcgccgcgagcccctcctctcgagggccggccggtttggcggcggctgcggagggtatctgaggctcggctgccaagccgaacgggctctggctcctcccagtggccggccggggcggaagcaggaggcgggggcagcgtgcgcgctgctggtcttctctcccgcggcgctggggcccgcgctccgctgctgttgctccattcggcgcttttctggcggctggctcctctccgctgccggctgctcctcgaccaggcctccttctcaacctcagcccgcggcgccgacccttccggcaccctcccgccccgtctcgtactgtcgccgtcaccgccgcggctccggccctggccccgatggctctgtgcaacggagactccaaggtcagcgtgggggtccctgcagcaccgcatcccggcggaggcgaggctcccggaccggggagccaccccgcgaggcccttccccacccccttcccccagcccgtccgcgcagccctgcgccccgggcagccacgcgtcgtagagtccctggtcggggcctgtggcatgttttatctcgggagcggcgatgctttgttgatcttgtctgcgtgtcgaggtccgggcgtcggggagggcatcagctccccgcggccgcgtcgctggcccccgcctcccccgcgccgctgtggggcgcagagcccgcgagcgcggcgcgagggtgggggtagggcggcgagcgggcttgtgtgtctgcgtgtcggggtgggggcttcctcggctcccaccccgtccctctgggaggctgggggcccgttgtggcgatcccggggcccgccgaaggcagggcagggtcggggcctcctgtgcggcgttggagctgggccggcctctggtcttcccgccaccccgtttcccgcctgccctcggcgaggcccgctccattccccccgccagccttgggctccgcggcggttaggccggttctggacgaacccctcggagctgcactgtcttccccctcccccaacgcccctgcaggcccgcgtgagggctggtggccccagggtcgcgcactccgttctccctccccgcttccttctcagagaggaaagggtgtgtgtccaggtcccgcccccgtccagcttgctccctgtcgagcttgctggtttgcggggtaacccgcttccccgcctttggggtccctccccgggacgcgagccgtgccagctcgcccgaggcctgggcagtccggagttccggagtgctggaaaagttgccgccttgacgtacccggcggggagagcacgtttgaccgctgctgct

SEQ ID NO: 41399 - DNA, 499 bp, Homo sapiens
caaaataagtaacagttccatttattaatagttatgaaacaacttaaaaatatgctaacaacatagccatttgaaaaaatattatatgtaaatgaaaaaattcattcttttcattcttaaactatgaatgggatatatgcatctgttgagcactgtatagcttatcaaatcactgccatctttgttttgtttcatgctgatttttgcaccatacatgtttttaatcacagccactgaaaacccagccagctttgtaaacatgacatcattaaatggaatgtagcatgatgctgtgttgaaaactgaccacaagctaatagttcactttgtgtctatgtgagtttgttacagtggcttggagttgccttggtgcacggtttgagaaccgtggtgtctgattattgtgattttttttcttttctcaatttttcttaactttaaaggatatatcttaaaatatatatgtgtccttgggtggctgcagtggctcatgcctact

SEQ ID NO: 41400 - DNA, 1526 bp, Homo sapiens
tcacctgcacaggttccatcctccccactcccacctaaaaggtgggagaaccgcctctccccctcctccccacatgccttaaaacccttctgaggcttcccatcacccatcagagaaggccaggctccacagcagtcgggcctcatcactccccaccacaccttcctggaatctgaatcttgagccgctctcaaccactcagagcttcggcgataacagtggccctctgcctacaaactgaccactatcccagcctagcaaaatcctactccatccccaagttccagatcaataggaacccaatcctgggaggactttactaatgcccagccagccccagcaacattagccagacctcccccaacccaccacctatcccaggcagtgtaacatcaagtttgcaaaactagtagcctgtggggtgtttgtaaaatctgtagtagtttacaatgtttcaaagtggggcttctcttgaaaattctggtcttgtgatactatgtcttgttttattcgagtacttttatggtttcatttttttaatgtttaaatctctttcctatagagatttgctttggtgtaatgaatgaaggattcttctcctcacgtggctaacccgctgtattttagacaaaaaaaaaaatccaacaaatccagtttctaggtttttggtctcattgttacaatctcattttaaataacacattagctgtttggacactgaaattccagagctagtgggaaaccaaattcttccttcagcttcagacagtaaaacattaaccagaatgaagtttcccaggctggcagctctattttgccaaaccctaaggcttctgaggatagcacttgactggagacaaggtcaccttggccagcaggattgcaacaaaggaagaatgaggttgaaacctcagaattggtcgtcagaattgtatttcaccacagtctccacacagggtcagacttttccagtgagaaagtctgcctttgtcccttgtcttatggtgtaatgtgtacccttggcccacttctcacagtaaatgctagccttggatgagctcatcctttcccggggcttcagtcagcatgtcggtgcaaatgactcacaaaccctcaactccagtcctccggcagctactaagctccacagctgcacttgcagctgctcagtcactcctaggtggatattccacaggcactttacactcaacacatcctattctctcccaacttcttattccccaaactacttctcctttggtttctaatctcaataatcaataccaatatacttctagttactcagtcttgaaaccaccatcttcccccaaaatgtctctcaggtccacttttctgctccactgccctagttaaggccctattgcctggcttggattgtaatacatatctaatatctgtgtcccctttccacctcctccagctcatccttcaaactacctccaggtgtctgatagggttactcctagatcagaagtcctgacaggttccccactgcctaaagtggg

SEQ ID NO: 41401 - DNA, 2193 bp, Homo sapiens
gttcagaacatttgaaaaacatcaccttcctattactagtccagatgagatttcaacttctaaaatgagaacaaactctggctcaacgtaatcacaagtcagacttcaaatttcattcatcagggtactagcatgcgaaacacaggccattccaaaatgccacgtgcagccccaaaccatagtttccttgctgacgtggctgttatcagaactccaagcagtgctatgtccaattagtgagccatcatatggcttcacatcacgttaatggcacgctgggttgtataaggacaaaagagaaaaatacatttagttttaaatgcccaacaacagtgcagcaaaagacaggagttctggaaacttgagctctactaaaaacgaccttgtccaagtctgcagtttcccaaccaagtgagaattctagaattggtccagtaggattattaaaaagtataaataaggtagatccctaacccctggcacttcaacctctctctttttgcaaaaaccaggaaaattatgcaatggtgtgaagtagctcacgtaaagatgcacttataattcagtgggtcacttcatgggtttctcacctaactaatttatgcaaaataagtaataagtttaaaatttcgtaacggcaagcaacagttgtatagaaaagggcagaggcagtatgcttgagtttgtctgtttaaatagagattcggggccgccaccccagaactagttaaccaccttctcctggggtggagctcgggaacgtgcgtacttttaacaagtgacctccccgagtgctgcacaggacaatcccaagcgacaacactgtgcccaaagaagaggctccgtgcctccccgagctcaggggagctggagagattgccgacccccggccggcacccacgccttccctgctcgccgggtcctgccacgtccccgcccagcccgactagccggcggcctgcctaacccgcctcgctcccagcactcacagatggggatggcagacacgatgaacgcgtttccgaagaagagcgcggaggacttggccgagagattgcggctgaaatcctgcaggagcaggtcctcctcagactgctgtttggagctgcctttaggagccatggcggagctgcaggcgagaacagggaacgtagagccggccgccaaggcgggcaaaggcccttgactccgcccctgcggccgccgtatccgctaacgacccgtcagcgcggcgcgcggaggcgggacccggtttggcgaagagcaagcgtccccaggattggccagcttggcgccactagataggcttccgggcgtgattgggcgagcgggccagacttccggattcctgacaagccacgtgacccacccacctggaggagagagaagggatttgtagtttagtcggtgctttaaaaaaaattaacaaaactttattgatattccacttcagagctgctgacagactcacgagttctcagttcttcagaattccaaaattaaaagctcttctggccccacgccattagtgccctctgtgcgtacccaggactgagtacgttgaagaagaaagaagagaaaggtatagctaactcatgtaaaatcccttctcctttacacatcctttatttcattaaataccttgaagaatcttatgacgtgcgcatcattaccgccattgcagctgaagagcctgagggtcgtagacctgcggtgtgggtctccaaggcgtgggctcttttcactaaacaataggccacctctgtaggaagaagaaaatgggactcttgcttttaagaaactcatgatctcattgatgaaggcaatatttaatatatgtctgatacaagttactactattttattttatttcaactagacctatagagttttgtggcttccaaagccatgctaaataaaacataatactaagaacaggttggctaggcaagactccctctctgaagctcagaaggattaagtatgtctattaaaacagctagattccatttttaactcaacacattatcattttttcttcaaaaaaaaattcaaccacatcactcccagcaaatgctacttttgattactgagaacactctagtgcattaggcacaatttcctcaacctccagcctccttattaaccgtttggtagatatctttcttcctcacagtatccaaattgtaatct

SEQ ID NO: 41402 - DNA, 788 bp, Homo sapiens
tggctgtagggaaatacagtggaagtagaggtaacatttaaaaaactattgcagtagtcctttcagtagatgtaagtggcttggataaatagtggcaaaggggttagagagaagtgaaaagatgcaagatatattttggaggaagcctagcaaatgtacctacccactggccatgggggagaaaaggaggaatcaaaggtggcctaaacagcagaatgaatgctggtacgtttcccatgatgtggaaaccccagagcgggtccattgaatgttaggaggaaaattataggagatgaaagaagagactgaatcataccgcagcaaactatgccaaccccaaagtaaaatttaaaaaattccagtcacaaactgtgctcaaagagacattctgggcagagaactgcaatggactttgacttgcttcctgtcttgcaaatgaactctgtagcactgtgcagtatgagtttgccagcaaaacttatatgacttattttatcactaatgtcgggttttttgttctttccttccaagaataaatatgtctctacataatgaaatgaaaaatcaagaaatttaaaattagattagtttggaaattactggcatttttcttcttgtgtaaggtcactctgcccttgcaggccagtgctggggaagtgacacatttctttctccatcccacacttctgcttattttcatgccataaaaagcagatcttcaacatttcaaacgcttagtgcatgtgcaaatatttttctcctcatttaagactttaagttatgttatg

SEQ ID NO: 41403 - DNA, 584 bp, Homo sapiens
tgtcccaaattcttcatttgtaaattccaacagtctatttaccagaatgttgtggcagctcattatttaaatgtgttcatagttccttgcaagaaaggctacataaatattacagaactgttttaaaaatatatgaaatgtgttcgcctgaatatatgacggttgtatttctcactataaataaataaatgagtgctgattttctaagtcctaaggacgtggttgcaccaggtccctcttcatgagctcacagtccaggctgctgaggctatggggctgaaggtcagactctgtcccaggtgactgtcccctgaggcctcaggaaagtgcctcccgggcagtggctaggcctcctcatgcctttgcattcaaaccttatacaatgctgagtgccatgggaaaaatatgaagaagcagcgagaaaatggataaattgtggttcactcacacagcgacatactaactcagcaagcaagaaagaatgaattaaataaatgtacaacatggatgaatttcacaagcactgatgttgaaagaagcaggcataaaataatacatattatataaatttatttatataaagt

SEQ ID NO: 41404 - DNA, 1651 bp, Homo sapiens
tatttcattgtctccctttatctcacttctttgtaagcaaaatggcaacacttggaggcactgagagacttgtcctagaatctgcaattagttttcttattagtgtttcagggagagtttcattcgcattactgttattttatcacttggtttccaaggtccaaaaggaaaaaaaaaaaaaaaaggccacgtattttcccttctgggggctcctgctttttatcttaaagcagtgggggtgggggaacatgtacaccagcaagcagttctcctgtccagcttccaagtcacactcattagtaacgggcctcagcccctcccagcacccggccacttctctcctctgctgagggctggagagggtggggactggggctctgagagggaccaggggatcaggaaagctcagatccacgccttaccgctccttgaccacactggaatgtgatgactagcttttttcagcctgggctctgcatgacaaaagttagtggaaaacggtcatcaaacatttccagcaagcttcagacttctccaaaggacagggcccttctccaaagaccgcctggcgcctggattaggccgctcctagcctagcctccctgctgctccttttcccagagtggtcggtacacaggacgtgccgaacgtgcgattattagaaggctattaccagaagcaaggggatgtgctcagggtgaggcgcaggcaaggaaaagacatttccaaacaacccaaacagcttgcgactggggacaaaccatttcaccagggcggtggggagccagccggccggccggccggccgacccggggtgcgtgtgcccagaagctgtgcgggctcagtgtgtagacgctctggctgcgcagcgcgcgtgctcaagttccaaagcgctgcactccacggcggctggaaaaggtggaagaaggacaaaataaaacgaaatttccccacacatcgctaaagggagggggcaggcagggggccaagctctgaagaaaagctctaagagatctgtggtgaacggaggagagacccagggcagaggctggtgctgtatttgtgtccaaaatttgcccgctttcctgctgtttgctgctggcttggttggccagaaaaagtccccacagtttacccctagatacggaggcctttctcagtactccacacacacacattatccggatttatttaaataagaaaaaaagtagagggaaaaatatttttcataaatatctagtactaatagtttcatgtataaactgccagtaactgcatatatacatacatgtatatgtttttaaaccagaacataccagagttgtgtaatctattttaaaaataattttattgtggtagaaaactcagaacttaaaatttaccatcttaaccatttttcagtgtatagttcaggagtgctaagcatatttacattgttgtgcaacagatctctaggacttctccatcttgtaaaagtgaaaccccgttcaacgctaattcgctctcccctctgccttagtaactgcctttcaactttctgtttaattttgactattttagactctatatctgagtggaatcatgcagtatttgtacttttgtgaatgtttagcataatgtcctcaagtttcatccgtgttgtagcatgtga

SEQ ID NO: 41405 - DNA, 723 bp, Homo sapiens
aggacccagacacagtagtgaatcatccttaagtacagcatttacattttaaacacaggaacctattcaaatcaaatgtggaaggccctctctatttggcagtatatttgtcatccggaagctcaaaatagccttttagagatctaagcagtttgagctagtggcatctcaacctattactagctgtcagatattttatccattcaagcagataggtgggcaaaggttatgttttctttgaattgctaatgcagaggtctgccttttaagttgagatgtgaaatgagaagaggagtaaaagaggaaattctcaaagacgaaagctagataggtcatttcattcacctcttcaccttcagaaagaatgacattaaaacattctaaacaggtgagaatctatactatttttatagctcttcaatgacaggattgcacaaccacattcctaccataccacatttcattgcaacaatttgcagctaggaaatttctttttacatctaacccaaggattctgaccaggttgatcccatttcctcctcgctgttcttcagagggacaacaccattcttttataaaattatcttggtacttacataattacattaatcttcaggtttctcttttacaatccaaatactaataacatcccttcacaccttccttttaaatagttttcaaatataatcagctttgcagcaatcttcttttaacctaggggtt

SEQ ID NO: 41406 - DNA, 564 bp, Homo sapiens
aagtaaaaataatgcatacactaaataatgctgcaagtgttttatttggcttagtatagatttccctggtaccataaatttccatctgttttgcatttgaaaataaatgacagctgcttctttaaagtctgtaggcaagaagaataataggaatgctaattgatactataagtttttgttttaaggccaaatttaggcttacattactagaagcttgcatgagcctgtatcgattttttattttcatatgcttggcctgactattttttctttctttagtcacataacatacaaatatcaactgtttgatttctttagcctcaaagtcatttcttagtcagcttcccagaatggggtcatgaggtcacaattgggtaatgggaactttaaattcgctcatgtttatagggattacagcttccttctgctagagaaatgtgatatgagtggacacactactgggcaacacttcactcccagactttgtgaaaataaatctccctcctctgcaaatgcagaatatggcccactgctcctcttttaaaaaacacacttttaagacct

SEQ ID NO: 41407 - DNA, 1467 bp, Homo sapiens
tcaagtcccccatagaaaatggcatagtatttgcatactatgcacatccttctatctacttcaagtaatctctaggttacctatactacttaataaaatgctatgtaaatagttattatattgtacttttatttgcattaattttttattgttttctttcctaaatatttttgatctatggttggacgaatctgtggatgtggagtgtgcagatgctgagggctgactgtatttggccttgcatgtaaatctctattatggcacttaccatgctagtgtgtttgttttcctacttggccacacccgtaagccacctcctccccacccccaagtgttttaaaagactatgagctcttaaagcagtagtgcctagagaatttctgcaaagtgcagattctcctgacctgttctctgagattcaggaggactacggtgggactggggcatctgcagcaggctttcccaagtgattctgggtggtcagtacacagacttccctacaagaaactaacaagtggagactgtcttagtcaccattgcataactaccgctagataaatgtgtgttgaatcaattgattgaatgatcaggaaaacatctggggatttctctgaggaaatcatcacatacagacctaaagccagttagatcagacagtactttcagtatgtgctgtaagaattactcaacaggtccaaaactgaaggggattcaagagaatacttgactgttagggatcttgagaaaacaaaacagtcaagcagatgattaggcaatttacaaatgcaaatcttagataatcagaatagtttgtgatcttgcttaagcattttagaacttgtcctattcacacttttatctgtttcattttctactaggccttttaaccctcacctttcctaaacagaagcactctggtgccttgtcagaggcagagaaaaaagtgagtttcaagagggaggaaactataactgagagatatttttaaaacttggaaatggtctgcaagctgcatgttccatcaccttatgaaaatatgaattttaagtttacatttatcaaagcatgttcatgacaggctctaaaccaacctacctttgaggttacctttaattcattaattcacgtttgttaacttccctaccttgttgcttgacatattccctaggagcattttctaatcttctctcgccaacatcatatttgaagtaaataaattacacccaaatcttatcttgttctagaatcccacgagtgcagaactccttctcagggaaataggaaatcttcctttgggtaagttccaggagttggttcattataacaacatcaagacagtatttttaataataaattttataggtttaaaaacagcagtacttcagttgcctagagaataatagtttcattttatttatttatttatttatttatttacttatttatttagacagggtcttgctctgc

SEQ ID NO: 41408 - DNA, 2822 bp, Homo sapiens
accttagtttaatggccctgccttgatgcaatttgaaataagctgctaaggagataacacccttaatctattcattgctggtgcgcttacccagtctggtttagaaccgtttaacaaaggcttagaatcataatgtctatgattattacctcttagctcctagttttactgacttccatgtctggaattaccagcacttctttttcgtacatatggattatatgaactaaatgtattgtttcttccctcactactgaaaatctattcaatatatggagttacaattcaaagtattttacaacccagaaaatatggccattccgtatgtggtgtgtatttcagaggtgctctgcaagctccatgaggacaggcgtgaagttcaggctacatgcctggtacgtaatagacgctctgacagacatttgctgaatgaataagttagtcactacggcgtttgtgggctttaaaacacaagtaaatgcgcttctatcgccaaaacctcacagcttcccttctgcaaggtggcgtacaaggcccacgaaatagtcggccgccgcaggtgcgcagcctgtccagcctgtccggctcggggcaggcgacctcgtctggtggcagtgggggaggcagccgtttgcttcctcacagggtgtgccggaatcagaggctggaggcgtctggggagtaggcaaataaacaaagccaaccgcaccgaaacgggtcgttccgtttcacatcctccctcgggtgtctgggtcttctcggaacaaagtgaccctccatctgtccgcaggcaggtggagcccgtcccacgcggcacgcgccttccttcctcacagccgcgtgtagacgcggaccctcagggacactgcggacgcgagaaaggacacgccccctcgcgggagcataagtccaccgcacagaactcgcgcgcctcccctcgaacgaacgcgcacgcgcgcgcagggggcgggtcttcttcccgacacccactgagcgcccggcctcctcaccccaccccaccgaactccggccgcccaggctccgcctccgcgacgggccgtcgggaggaggcgaccggaagccacttaaagcagagatcgaggtgacaggcgagctggctggactcggagcgcggtcgaggctttctgcgttcgcggcggcggaatggcccgtgcgcggctcgccgcgtcgcggctctgtggtccctagacgtcggctcccgccctcggcgctgatctccggcgcgggcactgctttccactcggctcctgtcgtccgttctctcaggctcccgttcaggtaaagggctccgggagggcactgaggggctgaagaaccctagcggggagtgcgagcgccggcctcgcggctccggccccggccccggccccgcgccggcagtgtgcggggctctcgcggatcggggtgattgattttgagactgccctttgtaccgaattcactcgggtcccgtcagcatgaagatggaattggtttacacttcttaggcacttagagcctgtggcaggtgtatacatcagaccgaggcgccgaaggatttagttggggtcgcaggcgcctgccccttccccgttcgtcagggtgggggcgcgtctatgcggcctcccccgcgggccgaccccgggtgctctgaggcgcctaggagcccttcccagaccccgggggggagggcacggcagctacgggagccttccggctaccccgcgtttcgggctgcagcccagaagtttggaagatgttttcacattaactttgagagcgcacaagtcttcgtcttcctccccgccgccgcgggaagcgctcgccgcctttcccccgcgcttcgcggctcagttctgcgagcccccaagacccgttggacgctcctcgggaggtgagctgagggggtaaagaagaattagagagagaaggcgccgcgagtagtctctgggatgcagggaggccggggcgggtcgttggtccgaaggaggctggacaggagttggggggcgcccaggcgcctgctgaggggaaggcgggggcggggacgcccgggaacacccggaattgcagagccgggcggcgcctcagctgcactgcgcggagttggcgcggcccgggaccaggagctgagcaaaccgccgcggccaacaggaggcgtcactcggacccgggctcggcgccggggtgtcgcgcggcggcgggcgggcaggctttggagcggcagttttttcggaaagtgcttttggccgggagtgccgcagaaccccagcgtcacgaggtgaggggtgtcgcggtgtgtcgcctgccgctggagaccggaggatgtgttcttctcatctttatttttctgttatgaaaactaattgaggagctaggttctagtggctttccccctccagccacttctccagttctctgcttcttcctcccagttttgtttccgagtttgatgaaagggcaataataggaaaagttgcgcgcgcgcgcttgcgtgtgtacgcgcagacacacatataaataaaatcgatttagtgtctattttaccttgattgggtttgataggagtggttagagagtgtgcgcgtggggaaagcacaggccggtttggtatggtggagagggaataccacaatctgtgccaattgtgccttgaggcaataacaccaaatgatgaataataacgcctggcttggctcctttccagttgatttatgtctcatgtcagatccctccttcttcgtgaagctttccctaacaatgccagcttacagtgaactctcctttttctgccttttccttttgtacttatcatgtaaatt

SEQ ID NO: 41409 - DNA, 1344 bp, Homo sapiens
ttatgcccttataagatattaactgcaagtttgttttatcatttatattatgcacacatttgtacatttttaaaagttacatttaaaaggttacatttatgataatcacatcatacaaagatctaattaacctggagttgttgagcaataattgtaccttcaaagtgccaggagatttaaggtgtatgcagggtgtggcccatccacccagaatttcaaaaccacatggttcttcaggtcctgttggggctcatctatttgcacgtctcccctgcaggagtttggactaatcaggtcactacaccctgacacagcagtctccagtctctaccactcattgtttgcaacatgacgtaatgtcaacagaccacagagaagttagcaacagggaagggaaaacactttaatctcaaggtcatccccagggttcagcaggacatatatcctatatcgaatcatctgatatcaaatcctacaaatgagctcggccaaaaggttgagccacgctgtctgactgtatcatgttctccagttgcaatgcaagactgaggcaatcagttgtgagctgacaattcttcctgtttgctaaaattgaaaagacaggttgttgtctatcattgctttgctttctttttgctgcaaaacatttcacacagtatcattatgccttagctagtcttcatttatctagatattagacatcttggaagctgatagggcttggttcacttcttcagccttggcttctcctcatcccccaatgttccctgtcttgcaactcatagcagagcaatgctattaaatacaacaagaaaatacatgccaaagggcaggtaggggttagatgcctgagaactctgaagaaaaagagagctactgtggccccatggtgcttttattcaagatgcccctatctcgggaggatgcaaaacacctgtgttggcagatgaagctaggtctggagttttatgcctacctacctcctccaccaggcaccaccatgcagtcagcaaactgcacgagtgcctatgactctggtaaaacttatacacatagacttaatatgatggcagagagaattaagaaacatgaggccaactttagtggggagaatgatgggaagcaaagtattgtatgcttttgtcttatgattttcttaacaggagactttgatgaaggactggtatctgccttctgattccagttaaaactgcctaccactgttctgccttcaactccctttccagaaagcccctctgtcattacttttccaaaccctcttaaggaccctctaccaagagcttagaacaggaaagggtttacgcaaagatgtgcacagtgcat

SEQ ID NO: 41410 - DNA, 4097 bp, Homo sapiens
tggcatgaaccctggaggcggagcttgcagtgagccgagatcgcaccactgcactccaggctgggtgacagagcaagactccgtctcaaaaaaaaaaaaaaaagatatacgctgttacgttatagatgttattcatgtgtctgtctctaacatgaggctttttgatgcttgcccacacagctaatacttgcgttttctgtgtctaattagaagtttccgctgggtattattgttgagttggtataagatgttcaagaccatgaaaagatgaatgtaacagcttcctcatggactgatttttttttcagttcatctgtccttttaagtaatctggctgtttgtaccctgactttaactgaattcacaattattcctcttgccaaaccatgcttccagacttgactgtataaattaaatttcatgcacgcatatgtgagccgtgtgtactgcctgttaaactaagtaatataaacaaattgaaggcacatttgaatgacctttgaattccgtgttagagtagtttttaaacagttatctactgggcaaagtgtaagagacaaccatttacagaggttattttcagtgtgcttcttgaaaacccatttgctcatagaattcagcctcctaatcatgcaagttgcattttgtatggttttcttctctggctccccaccctcttagaatagttctgacgcccccaccggcgaccacctggaaggggctgatccacccccacctccctctgcgaagcgcggagcggctgcggccacccggccagagccagcgctgagctgcgctgcgctgcgtgactggctgcatttctcagccccgacggctgtggttactcaaactgatctcatcgcaggtcgtcacgacacgcgcttcccctcgcctgcacgcggcgtggcgtgagaggggccctggcagccggcgcgcccacccctgatccttcgaggcccacgatgaagcccatcctacttgcaataacggccccgttctcattcttcaaaagacggctcccagacgtcaacaaagaatctaacctacacagcgccggccctcgctcctttcagcctcagcgagcgctgcccttcattaccccccagcgcacttctggacactgcgccgggtcgccggggtcagccgcccggccacgaaagtcgcccccagcgtgccccaggcgtcagtgcacgccgggctcccggctccaggcaggcggggtgaggcagctccgcgaaggccactcgctggcgaccccttcccgggtctcctagccctggccgggctgcccccgcgcccgcccccgccctcgaaatccaggcagtgcgggaggccgccttgctgctctctccgcccgcacagggccgcccgacggagcgggcagggagcaggcgccaaggaggccgagaggggcccaggggcgaggtcgactctcagcccgctgtccccttatcccacgtttcgcagcctgaggtgtttgttgtatatcgggaactgacacttttcggcgttaaaatgagggcgtcacctgctcgaactaaagtcggtggagggcgtctggagccgggcggaatctgggatgcctcgccggattacgcggcggggtcggcacgcgaggcaggctccgggcgcaccaggaagcccgagcgtgcactaaagcggcggaagcaggcagcgggggcggggccggcgggctgcaggcacgcaggcggcgcggcggcctggggttgcgtgacctgccgggctgcggtcgcacgcacttcgtgcttcaggcggccgtcgccgggcgggaggtgcaggtgctggagggcggcgcccggcttctactttcaaaacaccgccggggagggcagtcacgctatatttctgggacagggagtgagttcaccgggggaggacacagcgtccccttgttatcacaacgtgggtaacattcggtaataaaacgcgctcggacaggatgtattaaacgaattgggaaccggagctgctctttccataagcaatcaagctggggaaactttacaaggaaagctttaaattgcgatgcatggcgcaggagtgtggttcgtgtgacatgcttacagagaaaggaaccagagcaaggacggtggctttgggacgaaatttctgtccgctctgcacaaagactaattacagagtcgtgatttggggcatgctctcattcctcccggaagctttctttgcagtgttttattttaaaatcagaggtggttgatctccctggcatacgaacatgagagacctcatttatatggtgactcaaaagccccaaggacataaaaaaggtgccacgttttaagacaccagaatctaagttccttctcaagatcatgtgagcaaaaagtgttttgcccgcacagatatctatttacataattaaaatgtttgtagatttgcagataaatcaagtttagaggacaaaacaaaaaatgttaccacgatagtttttaacacaagagcaccccagtcaactgaaagcttgggaaattccacattagtttattttctatgtacttaaactttgatttggtgaatctatgctctcttatttccctattatgactcttaggcctatagtgcctagttacacacacatttgtttttgtgatacatgtaacattataggaaaggggggattctctagggttagaatagacacaataaactcctaggaagctttctcaaaaatacatattctcatctcagcttaccatatgtgggaaaaggcagcaagattcactgtttaattttaaaatgttctaccagctgactgattctcacgtgggattttttttttttttcctggtctgcccagcacgcttaatttcttctgggacagaactgcctacccttcctgcctggattgtgcttctgcctttactcttctagaatgtagttagaaagggaggtgtcattgtgtgtggccttgcctacttggtccccacacttggtcgagaggcatatacctgactcaaggtaagccaatgacaaacagcacttgactcctcctggccttagtaatttggttaaagagattgcatatcatccaagttgtgccaaagaaagtcatttcctggcaattttctaacaggagggtgggcatagatgccttctccccagttccttttggtgacaaaattggaccgtcagccaccactgctctgccatgtgcagagactgccaacaataaaagaaaatggaaccaactttcattaagtggtagattctaagggctgagcctttttatggcttttgcaaattccacattgcatatctgaggttctcaaagcaatactggctcctgctttcctgaaacttgattgtttacctcttctgattctatgagaagagatatgtatttatagaaataataaaatatacatttagaatgctgtttagaatattacggttttttttttttgtagttataacacaatttttaacttgctttttgtcacagaacaatctattgggacattcaaccacatcagcaaagaaccacatcatcatttctaacagctgcacactgttgttcgagtaaatcaatgtatttcacattttagtatttcctgttttaaaacattataagactgtggtgaacactgaatatatgtgctaataagaaagaattttcctaaagcttccagcaaacgtctcttggaacttctagtcataattggatcatagacgcattcctgatttaatcactggtaaaggggaaggtgctaacagaattgatctaatctgaactcacttctggacttgggctgattcatgcatgcttgggggtaggacagggggagggcagtacagaggtctgaattcctgaacaaaaggaagaaggaggatcatgtgtcaactgtaatagttttgaacattttaaggggtttaaaacataataaatgttctaatttttcaccccaacagcagtgtttaagattgctaattgctctacatcattgcaaaccagggctactatacttattttaatatttttcatgtggttgatagatctcataaaatgcttgatatttgatatcagtagtccctaagaaaatatctttaagatgatt

SEQ ID NO: 41411 - DNA, 2509 bp, Homo sapiens
atgatctcgatctcctgaccttgtgatctgcccgccttggcctcccaaagtgctggaattacaggcccgagccaccgcgcccagccacatctactagactttttagtgccaaggaacaaggcactagtgttcagtacttcctggtgtcattaattagtagttatcaataagcagtttggtgtaccgatactgctctgcgtcatttaatcacttctctaaatctataggttcaattaattttctttgtatttacttaatcttattttattcaatagcaaaccagtctctttgcctgctacagagccatcgatgttttctttggttcttggaagaactgtacttcgaccttatataatcctcagaaaggcaagatctggactacgaatgagtcacctgctaattacaccaatggctgctcctgccttgaccagtcacagagtatcaccctatctcggtatgctgctctgcttgtcgcgtagtaggtctataaatacttgttttatgaatgaatgtatgaacaaagggaagttagtcacgtgtaagggtgggtagcctgcgataaataaagtgtagactaggaggtctcaaaatactttttgaactaagcccttaatcttcactactttggactagaatggaaatgtcaccaacgccttcccaattaatttgtcctggctgtaatgactgaaaccagaacttccctttacacccatgacctctacaggcatctctttttcctctgctcaagaacagtaactgctcactgctgtgtctaccacataggccccagagcaaggggtgataggtagggctataggctcccgactcccgactcccggcagtgcctctctccaaccccccacgaggctgggacagctccctccatctcagcagtcgctaccaagcacccgacccactctcgcccacctcatccctcgatccccttccctccctctcacagcattccgcgtaagactagcccagccttccgagccccaccaccagttttcccacttccgcccggcgcgtgagaccctgggcggtgcaggggagcgttgacgacagacgtgggccgtgacgtcgccgcgccctgacgtccagccgactggcggcgcggtcgcccgggagaccgggaaagccgtttcacacccgtcctagtcgaagtcgaggtgagggacgatggctttcctcagcctgggatgacccggtcctccaaatgcagttccggagtggaggcgtgctcgcacccggggagagagccagaaagctgagccgcggcgccccagcgagagcacgaggccccgggtctggactccgccaccacgctcctctgcggccccttcctggtgtctgccagcccgcggggcccaggcgcggtccgccttcctcccagccccggggaacgcgcggctctgcttcctcacccccgcaccctcctcctcctcctcttccggccactgcaggtccagggggaacggggttagaaagggacagatttgaaagccattccagcagttttgtctggccttgcggttggtttctgtgtggaagagcctgccgcttcaggaaagtcttaggatgtgaactcccgccttcacctgcccctgacctgctcgttgtgggtgattcacgccatgggaatggttctttacgtaagggcttgaaagctgaacgtgagttaatggcctgacgtgacactagtgtgagaaacggaattggaaacgaacaaggacgtgtctgcattttaaaaaatgtcttttcggtgatcttgttagagaggaggttcacaaacacccacgtagctgcagccacttatcactgcacctcttgccaaagtgcggtccacatacgtgcaatgagaaaggattaaagggacttgtttgataacacacgcaaaactatgtaagactaaatttaaaaaattacagattttccctgttgccaaaagggaaagacccttcttttttcttgagaaacttagtatttgtgaatgcttcctctatttaatatgtatgcaaatgtttttaaagacctaggaatgcttttcttgaggacctggaagccatttctttaaaatgtaaacatcaaggaagatagggccccagtctccttgtcactttgggagtttaacctaggtgcgttattcctaattgtaaacacctgtttcgttatggagctgtgcattacttaggaggaaagccgttagctaacacaggtggttaccccaattaccagatgaattaaagaggaaatataaaagaatgtatagaacactatgttaagccctcttacatgaggacacgttaccagtttccttgagaatgtgtaatggattgtgtctccttggctgtataaaagagggatttccttctctctttgtaacctcattagcagattagccgtgatgtgcatcaaagtctagttgaatgcctaataaaattgttgtctttctgcattgtggagcattttctgggttggcaggacttttaatttttagtttccccccgat

SEQ ID NO: 41412 - DNA, 1480 bp, Homo sapiens
aggtgagagagtaactattgtccagactcaattgcccagagatcaaggaggtagacttgggggtagagggatacaggcttaaagggcagtaggaagccacccaagctcaagatttattggagggcagattctcatctctatactgattgagtgaccccagccagtgagatctcctggaagcagatgtggggaacagttgtgattgttgtaagtcagaggacaaagttcatctggagagagcatctgtccagggaatctctggagactggagccactgtaggaaattcgggatttcaacagagaaaaagcttcccttgggtgtgggcaggcaggggatatccctggggatcttgaccgtaagtgaccaccaagatgtgctccaacccagacttccctgactctgggcagcctgtggactctcctaccctggctcagaatctccgccttggttacagttcgaactgagatgacctcttgtttcccatcaaaaatgcacccttttcctctcaacatccccagtatggggctcactgccacatcatttgccccactccagggcagggcccacccgggaaaaagccctggttttctttctgaagaccaccctagtttataatagcaaataaatatggattatttttctcagtacaagttcctgggtatgggactcagagagttgcttttgtcagctcatgagatggagaaggaaacagtgtggggaaatcccaaacccttggctaccccatttcctaaagtgaactttacccctggcatcattaagtgactttaacagccttgtacttgcaaagtgaactaaaaaggcaaatgtataaaaatcaggtccttttggggggatcacagaaatgctttatgagatccttttacagctgccagtaatcatttactcacgttttgctcaacacaggggaggtcctcttctgctcaaaagaaaggcaacttcctataaaacagacttgcgtagaatccttggcagggagaagaaagcagtgagatcacttctaggcatggcttctggggactgctgatttccttgacgataatgccagtcaggcccatagcagtgcctggcagctgcttccctcccacaccaaagaagcccaggcctccttaggtttacaggcccctggccatgggctctctgtaggaagttggttgtgtatttgttctggaagtgagcccttggggccaatgcaccaggctatcactggtaatgtcttctttggagcaaattcaggtaaacgactctgctacatgtggccttgttaaaacagacagttctgctcagcacatttccctggacattctaacactcgtcgttacacaggagtgagtaaccaaaggcaaaaggcatccatgttagcacttaaggtctgtttccactttgggttccagtcccatggcctgtgtccttttcctcagaaactgtggtctcacggggtaccctcttcctcaagctgat

SEQ ID NO: 41413 - DNA, 4324 bp, Homo sapiens
cttggcactcacactgttattattaaatggattcagccaaaagctgcctgtgggggtagagatcggtgggaaggtagggcggcagagaaaggaagtgctcaggaccccaaattgaataaagaaaaaggtcacacgccaactgcaagttagaaatgaatctgagtgaaagtaagtatcctggttgacagctcacacatgatgccaacttgccacagcttggcagcgcctttggttttcccacatgcaactgaaaatagctagcattcatcctgagagagtgctactaaaataagtaactacttggagctatacctcactgctcattcaagctggaagctgtgtgcaattattttgctgaaattagatacaaattaagttgccacttccggaactctttctcctgtgctatattacaaaaaagaaagtgatttttgaactcggatagcttagatgttgcttcttaaaaataaatgtaatctcttgacagaatatctaaaaagacagattattgattttaatctctcaggagacctaacctcttcacgatccaggtttcctgattttcagacctgagttaagttgctatggatacagagtgacaggccagtgaaggaaactggggacagggagtggcctgcccacaggtgagatatactgtctttaagcttgttagggatagaaaagggggctagcctagaattgtcctctgggacataaggtaatggtcctgctcccactttttaaacagtggtttgaaagttttctcagggtgtgcatacatttggacgtacaagttctgctacgttttaaaaagcaaaacagaataaacaaacatatatgaaaacaaacaataataatgataatctggggctttcctcaaacttggctggaagttactggcacacaaatagtagaggtgtttgggggttttctgctatgaaggagtccttgatttgtactatctcaataaagcaaccttcttttgacctgcctttggaagaagtaggtgaatttctaagagcccagctgtgctggaccctaggaggctgtcaagactcccagggtaggaatgttcctccacaactttgaatttcaatttccctttacaaaaggcaaaatttgttttattccccattgttggagacattagtcatggatgaaacaaatttaaaactccccctatgccctgcttcttgcccaccccacacattcccactctatatcctcattccaatctagtgaatcttagaaatgacacattgaatgaagagctttgcaggtaaccttcccttcctaatgaagtttcctttttgcggggttttggtgtgtgtgtgtgtgtgtgtttgtagttccataattctcaaatgaaaaattgctaaaaggtcatctatacaaatccttaagatggtgaacctctacaaccttactttaattttaggagatatttcatttcatgccttaagttttgcaattattttcagtgtctccttttccagacttcttagaggacttggaaagaaaatgaaatgacgttgaacgaaatcaaagtaaattgagtgatctgaaacgatttgatgtcagcaagaattccccatacagctcacagccctaccccgagcacgcctccctcttgggtatggtgagttcagctccaaatttattctgacaagaaagcacaggcaatggcttcagtgggtctaaatcaggtgaaaattcaaagcaatcacccttcctggacaatcttctgctttctcagtgcttatcatggtctgaaaattcctatttaaagaagcagagctttcttttaagtcctaacagaacaaagtcacactcaacagtgcacaggcacacgccgggatcgagaatgcatttttggcaaaaagtctcctcttttctctgtctcctccagctctctgcaggcccaaaccttgcagaagccattccatgtttcctgagcaggaaaagacaaactcagaccgacaaccttggacttcaaaagactgcacacaaggggaggaaggactgagagtaccaaggcgtgagaattcagaatgctgctatctcatttatttttaccatttaggaaacgttttgatctgcattccttttcccttccctgatttcaaaaaataaaaataaaaatgcttcggttctgaggagtaactctccagatggaaggggaagatcaggggatgaatgggggagggctgcttgcgtcctctcccctgccacacacacgctctctgtttcagccagtgtaaaaatagccgcccaggtttatgtattcatccctaagctgcaatgaagcgcctgcctcccggccagagtccgctgccttttagtagcttataacatcaggtgacgcctccagccctcccattccccgccccagcccggataaacgtcctccgtgaccttagaagttttcagtttaatcagcggtatcgtttttgagaggaaaatcctcccagctttgcgggctggcagggctctggggccctcccctgcctcccagcccaggccgcagagcgagagcgtttccatctgtgctgcgagcgggaagagcctctctgtgctccccggcacgtccagcgcgcgggcgggaacacgctctcctgtggggggcagctttcccagggaccttgcctaacgagggccaggcggctcccccgtgggccccgaatggctcctggcaggcagacccctatccctgtcgagagcactgatttccccagcgtcgggggaggcagccgcgccctcctggagcgaggcaatccagcggtcaggcggcggcgagggcctgcgcgtgcgcagaaaagagctgcctccgcgccaggcaaggggcgcgagggcggaggatggagggcgagggcgcatgcgtcagccgtgccgctggggccgcgtaggagagctgagctgctgggtcctgccgtcagtgcagtttcttggcagcacgttggggacactgcgccatgagaacagagccacagaatgttaaaggcacagcctccttcgagggcatttgcataatgcctcccgtttacagatgaggaaattgaggcccaaagaggtgatgggaaaggcccaaagctgcatttctggcttctggcagctgggaccagatccagctcgtattgacatggtttaagcacttcttcaatgagcacttatcaaaagcctagatactgtgtactcagtgtcttgagtggcagcgaaagataaccacgaatacgtcagaagcagtgtagccacggctgccctggatttgggcatagaatcagacagacctgggtttgatatgatgatttccagaaccacactactagttggatggccttagtgaagcagttaaccgctccatgccctagctttctggtctgcaaaacggagataaaaataggctagggtcgtgggatttaaatgagataaggtgcacattgtttagcacagtgcctgcgcatggaaggctctcaaataaatattcgtgcaatgttttgagaagtagaaagtgctaggcacgtaggcgttcaggagacagtcacggtactcgtttccagacagaagtcatgaggaacaagagggaaggtgctttcccgtgtgcagcgcttggggagactcacacagacagaggatctggcatgacagggaaaggaggaaatggcttctgttaatctctccttcagcttctcccgcccttcccatgcactcttcctgtttccctttccagttctcacggtgactcaaggtaggtggctgcagagagacattgggacctcttaccagggaaaatatgttctgtaatctggcataatttaagttttaagtcccattttatcataggggttcccctcccctttacctaggtgtgataggcacaagaaaaaggaatggagttaagtggataagtgactaaggtgtcacattggagtagtgtggatcatagatctcagagctgaagatcatctaggtggactccctcatattaaagaagaagcagtgaaaaactgtgaaaggcaaaatgacatcaagtttcagactcaagttggagccatggtgttctgtagcaccatagttcattcatccactcatacacactactctgggtggatatctgatatactgccaggtacaaggttctgcctcagtaggcagggaaaggggaaaggaaatagaaatccgggaggattctcgggttctttgtgcagcttcatggatgttgataccatttactgtgattgcaagtagaggaacagaaatggacctgagaggaagatggcatgttttgaacatgggtttgaggtggctgtaggacatccaggtggag

SEQ ID NO: 41414 - DNA, 4589 bp, Homo sapiens
gaggacttataaacagcagagttgaaacatgagtgaatctgaaagagccagtccctcaagatgaatcctgagtggctacataaatttaatatagagccaaacggccatttactgactagagattacacactactctgagttcctggaaaacccacagtcggcttaacactggggctttgacagctgactgttaccgctcatgtggcctgaagcaacggaataggctgtgctccccatcaaccaatcaggactcagctgcattgatcaatcagaaccaagccagtttgaattgttcatttgcataaatggacctgattgggaacccaggtaggaattttctctgtaaacgccaaactgtctctttgttctcttcattttacacttagggctatgtttcctcgtctgtaaactgttcattgtaataaagtctgtttcctctaaattccttttcagagaacttttgttcacacataaaaccacaggtcacgtgatttttttgtttgtttttggaatggtatgcacagataaatttaaaattacagtcaagggaggggtagctaagacagcccagtgacgatgatcaattctacgtcaggaagaaatcaagaagaaaatggggttcacaaatgagttagtaacaaccgagatttccactttgaaagtatcttcacaccgttatttcacgggatcctcaaaaccccctgaggtggtaggaaggtgattgttggtgtcagtcccattttgcagaagagaaaaatgagtgtcaggcagagtggctcgctcggtgccctggcggcggcagcgcgccaaggcccaaggcccctctggtctctgggcttagacctacggcaggaggcgggggaagcctgcagcgcagctcagcagcaggtggcaagccctctacccgctgggaacgttcagggttatcagcccgtgggaagcaaggtaggacccgcagcttgcaagaatctgcaaggtgggaacggcgttcgggatgtgtttggccccccaaggccaaggcacgaaggggtcccaggcgggtcgccagcggcgcggcttacaatggccggttcgacccagaacggtcgccgccgcaaggcgggtgaactttcccgccctatgcgcctgtttccgcgggccaggccgtccgcccgcgccgcgtggcctgcctagctgcaccttagcccccatgcgccgggtaggcccgggccccgccgccgcgctctgagcccgcgtgggtctcacaaccatggccctcttatctgctcctgtgcttcggtgtttggttttccctgtttgacagactgaaccttgtactttcgcaaataacaagtgtttgctcagcaatccaagcagcaccggcaagattgcaggtgctgcggcgggcatgagaggtcatgcattcgggatgccaggaggtcctggagtcaggagccctgcagccccttcagggatgccagtggcttgggctgaaccccagactctgccctcgaacttgaagggaacttgaagcttctttaggccaagttttattgaagggtgtcctgggacacaattcagtgactagtaaattttggccatcggaaagctctctttaccctaaagaaagacgaatacacttaatgacaattatgataataataaatttagaaaggcaatggtaattctttttttcctaacttgtctcactctacttcttttaaattcaaaacaggtcccctttttgctgttgttaaaaaggattttttaacttctgaaattaaagcagagtatttcacttttgttaaaaaatagaacttaatccacagttgagatttttgtttttctagacttgaaaatctgcttgtaatttgcacaaatgcctttcacttcaaaaccttttatccaaatagaagcacaaagttgtacttgcctttccttccacagaaggcgtttccagtatcttgcatacacaacaacttgctcaggttaaacatagtttcattaaagagctattaaatggtgctcttaaagtttatctttgcattttaaaaggggtatagatgttgccaaaacagcaaggatagcatgtagggtactttgcagttctctaaactttttcctccctggagtcactgaagtcccttcctggcttaagtcactttggtactcaatacagtgtttgtttacatcatttagcattatgccccttagctttacccagtgtcattttaagaaatgatcgggtgaaaaacagctttaaattatctgtaaaattgccatagatattcattatgttgcttcacataaaaaattccttgcaactaatttccacttggactttagtactagaatgaagtttgcctatgttttcttttttcagttaatgaaagctgtggaatgcatgggactattctttttgcctaggaatctcagaacttaattttgaggatcctccttagcctacattttctgacatagttcttaccctacatctccctttcccccaaccaccatcagatatttctttctctaagttattcatcccatctttgttttaaggtacctatatattcttttatgattccctttaaaaaatcgcagaagtaggaagatataaaaattagttattctagacttcctcaaaatgttctttcaatctgcttttaaatggcatatacaatcattctcggctttggcatttggttcaggtgacacctgcaagttaccttaccaaaggcctacccagaattgtgtacaatcccagcaaacaaggctctgcccctctcaagagtactctcaaacagcaatgcatatctcatctaatgcattactattttgtgagtcactaacaagcttcagtactttgttttattagtaacaactgactcacagcacaccttgtagctgtggaagccccatctgatacccagacccctgatgcaatgcagctgctctgagatatgccgggaaaccacagctcaggaatcagttcttattttccttcaagtagcagcacagatttccttactttcaactgtcatgagctgaactcatttttcaacgaagcctaacatctgtgcttccttccatccagcaggaaaactttatttccccagaacttatttcttcagtcaaaggtgtctgccagttctcaagagagctgtacttacaaagatgcccaagaagcaactgggaaaaactctttggggttctgaggacccttagaggaaaagctgatggaaaagaggaagggagtgaatgtctcctgaaccccggctctgtgctaggcactccttggcaaatttcttttagccttaccagcaggcctctgatttagacacatttatatgcattttccccatgagaaaacaggctcagaagggctaaagagcttgatcaaattgcatcactgttgtcttagtccattttgtcctgctataactgaattccaaaaactaggtaatttataaacaacagaaatgtatttctcacagttcagaaggctggaaagttcaaggtcatggtgctggtaggtttggtgtccggtaaaggttgtctccattcatagatgatgccctggacactgcatcctctgtaggagagaaacactgttcttcacatagcagaagcatgagggaagagctctaatgacatgaacacctcccgttaggccccacctcccaacactgttgccttgggaattaagttccaacatgagttttggaggggacaaaaatgtttaaaccatagcaacttattaagtggtgaatcctggataatagcccagttggctggatgatggggcccattcagtgttcactatagaaactgcccagagagagtgaggctgttaatatgctccctcagactggttacacagagtaccctatagttcaggccacgtgcagggactctgaggctgcagggcctgggttcaaattccagctctgttacttgtgcatgaccttggacaagttacttaatttcatgggatgcctgtttcatcacctttaagatggggatagttgtttggagcaaattatttaatcctggcacaatataagtattcaacaactgttagctatcgttatccattcatatcccactgttattttattgcagggtaaaaaaaatgatgctttcttgcccaaatggtggtgtttttatgttgcctatcatttggaaatcattcacttggaatggtagacctggtagtggggtcatctttggaatcacctagacagttttttaaaatactgatgcttgtgtcctactcctagagattctgattcagttggtctcctaggcatgtaggagaaggaaatttttaaatgctatgaaatgctcttagtggttcccaaagtctatccctggaccagcaggcttagtatcacctaggagcttgtttgctggaaacacaaattcccaggccccaccccagacctagtgaatcagttactttgggaatacagcccaacaaaataagccctctgcatcatttgatgtccatgaaagtctgaaaaccattgctctaagggaaggcagtgccctgcaagactgcttcatcctaaacacaaggcccaaagactgatgccaacctacagggc

SEQ ID NO: 41415 - DNA, 11539 bp, Homo sapiens
ccctctagtttatttgaatcttgcctctacaatatcatcatattcgccctcaattaacctttcatgcaaaggaaaggatctttcatgataacccaatagcagaattatggaggaataaccaaccctcatcttccctctacatagtagcggctactattatctaccacaaaaaaatccaatggtcacagctggccaaaatggcttaggacagttcatcacactgaagctaacctgaaaaaaatctaagttgagtgacagcaggagctgcctgggattgaagagtgaagggggggctgattaagtgagctgagcacagcagagaaaggagcttagctttggggtgtcatctcaaaggagaccccacccaaggagatagctgcaggagtgagatggcaccaacagaaaactgggttcttgcaggggtagtattgatgtaggaactgaggggagagttgttaggggaaccgccagtgattagtttgccttgccagagaactttgtggttggatgtctctgaaaggctcgctgagtgaagagccacacactgagtcaatgaagtcttagctaccccttacctctcctccctcccatttaccctctcccaccctcgaaggagccagaggcagcagagtgagtggcagagcagtggaagaataaggagggaaactagttaggaaactgaccatcttgctccccagcacctgctcttcatttctgtaggccttggggcctcatcaggcccaaattagggcagaaaaaaagctttatattggatgagacattgaagctttgatgggagactggactgaacttcccagaccaaaaattagatgtttagtaaaacctgaaagcgaccaggaaagctttggaatatgcctggcatttcatccaggaaagttgaagaataattcaacagagtgagcttaaaaagatggcaatgaaagagaattaagttggttactttttgtatccaaccgggtccaacttgatcgatcttctacaggtttcattattgaatgaaagggacttagtgtctttcctgtagtttttcaaattatttattcttatatctcattaagtaaaaatcagggggagggggatgacttagttttcaagcatgttctttaaaaccacaaactagagagcagtggggtggggaggtgcagggacatgtatgggttcccattggtgctataacaaatcacataacaaagcttggcaggtcaggatgggtttcaccgggctaacatcaaggtgtaggccgggctgcattccttctggaggctctagggcagaatctgtttccttactttccagcttccaaaggccacctgcatttctcagctcatggccccttccccgccagcagcagggtagcatcttcaaattcctctctgaccctggctcccctgcctcctcctttcacgtagaaggacccttgtgatgacattggactcccccagtaatccagataatccagaataatcttttcatctcaagatacttaatcacatttgcaaagtcctttttgctatatagagtaacactgtatattcacaagtttcagagattggggaatggacgtctttgggggaccagtcctctgcctattacagaagaggcccaggtgcatgagctgggcctgtgattcacctctcagagaacaccctcccccttgcctgtgggtcagccaggaataatggtgacggagaggaaagaggctctgtgtaatcttggggaaagtacacaatctgccagtacttcagtttcttcatctgtgaaattatagccttagctgtccctaaagtcccttccaaatctaagccctttgctccttttatcttttggcaaaataagcatttgaagaaatctggctatctcaagaaccccagctgatcttctaatgcacactgccaggcctccaccacccccgggccaagagggagtctctgacagctgaattgtggaaacctctgggtgaggcaagcagccctttgctttctccaaggaacaaagaggcacgaggaaggcactggtgggaggcttggggtgagaggcctctccaccagggcaatgagttatcctgtccctttctactgactcaccactgaaggccttgggcaattgtgccagccagaatcacagaagtggctgcgaactcagagataacagagtggtccagggaagccccagtggactgagtcatggccaggctctcacagccctcttctcgagtcagcatcgactccctgtgatctccctggagcctcagactctcagaagagcaggtctcagaacactggagatgaaaggaacctgagacaccatgtcataagccctgcccaccaacctccctatcatgtgacttctcgggctggttgtgttttttttttccccagctactctgataaatcacattgtttggatggctgagctctgtctctggtctgactttaaaattaaggttcactttgcccctcaacgccatgggtccagctctcaggactcctccaggctacctttaccttccatttttgaggtagtgtcatctaccagcaagagctctgagccataaatcaggaaaccagggcttcctgcttctgtcctctgaccagacagaaatggagcattcaccaagtcacatcatctctttgggactcatcagggtttgactgtgttttccccagagtcccttctagtaccaacaggagaggatcagatcatcctaaaagccctcttcaattctgaagtcagtcatcctctatcagagttcctgaacacagccaggctggttctgccggggatagccgtggcttgtgactgccatgcctctcctcctcccaggaaggtacagaatccacagcctcaggaatgccaggcattctgccaagggcgcccttccttttctcggtctggtttctcagtctctctcttcccaatctagactagactgtcacctccactcaccaatcccgtggaggggtcaggggtgggacggaggagagccagaaacgatgaactgcgactctactcctcatctgtgtggcaggcctgtcattcctcctccagtcgggcctgcctaactagaccagcactggggtcactctgcgtgtgagtggggagggattcctgcctatccagtgaccctgcttagtgggtggatgccacctctgtccctggagcacccgaagcacccaggggcccccacctacctgtttcacttctccagggcttccgtgtaaggccacctcccccacctcaggcctggcccctctttgctaaggactgcttatccccaggatgtttttggcaccttctgggccacaaaggtgcttcctgtaaaagaacaaaccgccccaggttgccttttgacacatctatttcagggtcagttggcatcttatgtttcgcctaaaaaactgaacaatcttttttctctcatccagtaagaaaagtcttttttttattttcacatgggtttatgcaccccctgccccccaccttttcagaaggaggctcaatgcaagtatctgtgttataaactagcttcctacactggccctgcccctgcgcggacttagccttcctaagaaggggctccttttctcctggcatgtgctcggctgctggagagaaaggcctattgttcttcatgtgcccagtacactcagccaggcaacacgctgggtgttcctcccaggaggtagaaaaccgcctccccaagatcggatcattttataccttgtgttttgtttggttttgtttctggcctttccttctttgctgtacctccttcccgagcgctcagagcccatagagcacttatttctttccgttccctttgcacagtgaattgccttttgtatgcctttgatgtgattgctcagcttccaagggaggggaacgagtgtctcgtctctcccacctagaggctcgtgctgcctgtggtcaggaagagagcgaacaaaggcgtgcttggccccgagggaggctggggtagggcccacgcgtggaatgtagggtctcttctgcccagaggtggaaagtcgagcagtgctttggggtctgcggggctctccagcgatgatttggggtgctcatggcagggctgagctgggcaacaatatgaggagaggttttgcttcttggtccctgtcccatctgcttagagtatccgggttgtctggggctccgagggaggagcactacagcaggagccaggaattcgcctgcctctgccaccgtgtgaccccgcatgacactgaccctcccagggggagcctccctttcctggcccttgagtggggcaataactcctgccccacccgctggctttctgggtctcatgtggtgaggagcaaacacgacactctctgaggaaacgcggtgagaagcaagagccctttgtgagtcagaggtggtggctgttgctgtctttcccactgtttaccaggcgccccccacccaatttcccgtgagcatctagtgaccccatgctacccccttgtggccaaaatgcgactcatcattcattgctgtgaaattaccttgctattaaaatcgtaaggaaaaataaataatgaaagtaattaataataatgaatatatagtaattaacccagactggaatacctttacttttcatcaataaatccataaaatataatttttaatactttttgatggaggaaatggcgcatgaagaaaaaagtgcttaatgtgggcccagacccaaggtgagcgtgggactgagggcgcccttcccggctactacccagctgctggcggcgccagggaggcctgcccgaggccagacggtggccacttgccgaggctcccctaaaaggtcctatatgtccccaagatgatggggccaggatgaggaacaggtgagaaagcacttggccgctcttcctcagctctttaaaatcttttcaggtccctcaagattacaaaacactttaatagctatctttttctttactgagatagaaccggttgtctggaggcaaattagagctcctgcatgttgaaaaataagtgaccaataactgcgtgtttcctcgttacaatctccttcctcagacacaatctcaccttccactcaccacagccctgaagcagaactatcctcgttttcagacgaggaacttggggtctgagagatcatatgctggtcagatggagcaacagcctgaacccagggattctgatatcaaacccctcacttttttcttttctttttctgttggggggggtggttggggggacagggtctctcactctgtcacccaggctggagagcagtggtgtgatcacagctcactgcagcctcacacatgtgggctcaagcaatcctaccacctcagcctccagagtagctgggaccacaggcatgcaccaccacacccagctaatttttgtatttttagtagagacagggtttcaccatgttgcccaggttggggtcgaactcctgagctcaatgaatctgcctgctttgccctcccaaagtgctgggtttacaggtgtaagccaccatgcctggctccccttacttcttttactatgtgaagggcttggagttgaatactgggtgaaccccagccctgcagaatgagaacagtctatatggagaggaggaaatgctgcaaaaaatgtaccaagacttttccttccatacctgtggaataaatctagtcaacagtcatcctctagtcacgatgaataatctcctggaaactcatgcctttgacctggataagtgctttccttttcccttctcctctggcagagattccttcagaatattcgcctctccagatgtcttctttactttcccgatagcctatgcccaggtttctgaggagtttcctttcagacgtggcttcctggtgttgtaactgggatgcagtcttgccctctgtgtccctccagccgcatgtcctccctcttttcctgagaaggcagggtcatggacatctagagacccactgcagaagtgagaattttgtcgacttagtgccaagtattgtcctgctttgatgaaaccaatgagcacaacactgaagagcttgtgagggtctgacagtggaggaaggcgcaggtggacaggcacagaagagcaccccagaagacacccctagagcaccccagaagacagttggacaccccctctaaaatgctgctggttgcagtaccaggcatccacagaagggtttccaacactcacagtgcagtgaagtgacacacaggctcactttcttaccaatgaggacctgagccagagtgcagaaagccttcttgcagatcttccatgtctggggtacactaagtgagatcatatttgtgttcttacactgtctaggaaagctcatagttcataaacatctcttgtgtaccagtctctggcattttttaatacatcatctcataaacatcaggaaaaccctctgaggtaaggattatttgccctgttttgcatattattaaattgaggttcagagaggttaatagacttgcccaagataacaaagctatttaggagagtcagggcatgatgtgagctccagaaaatgttacacccttgaaactatggtttgcctgaccaaggacacctctggccacttttctgctttggggtgggagtcccttgcatcacattagatgagtgcatatgatctttccattgattgcatttatacattgagtgatcaggtaacttggttacacatggatatgcctgcacccagaattggccattgtgccagtttcctgcccccttcttccaccacacacaaaggccaagtcatgattgtgtcagtccctgtggcctcattcgtctgtctgccacagatgtctgagcagctgtggggcaactgaccaagaacagagagaacgtgggctttggagccaggcaggcttggatttaaattctaactgccatattttcaggaaaaactacccagattctaagatggggatggggacaaggaaaggtggagaggaagttagagtcagaatcatgggacctcatcctagttctgagaagaggagggggcaggtgccagggccactgccctatgccaccagccctctccagaacaattggggcccactgctggtcactggcaaccctctgctcagaggacacaatttcaggggtccaaagaagactccagtggtctcccaaattctctcttatacactgatttaaaactcttttaaggccctggccataagctaaatgtaaacatccctggaaagtttacaatgtgagagaagcagcatggagtttgggggagcacttgctgtggagcacagtggaatccaatctttatacatgagcaataagcctctgtcttctcatctctgacatataatagctaatactacaataagaatggttaacatttccctctagctattctaaatgctttttatacataagttaacttctttaatgctcacaatagcccaattcccattttgctggtgcagtgggcacataggtccaatcctctgcccagggtcacaacagctggactttgaagtgacgcagtcaggcagcagtgtccctgagtgtcacctccacaccattctggtacttaggagaataatgaggccttcctcttaggtatgaaggcaggattaagtgagacatgaatctaaagcttctggcacaaagcaaggactcaattaatgctcctttctttccctggcttttttcatttgtgaggagacagctccagcccacctctctcagcaaaggtctgccttgcatatataagtgctcagtcaatgtctgaagaatggacgaaagggcaaactttgataaggtgagtggcaggaggtgaggggagcatgagaataagaggtgttgataggaggctgtcggagggctgtggctaagtgcggtggttttcctggtgccattatgctgcctggggcctttcagtccatgatatgggctttggtgccttcctgccccttataacatggtgtaaacctcagagctcacccaaagtcctggagtcccaggtgaagaccagcgccaaactcagcagagtggttcatggcgtgtgtgtgtgtgtgtgtgtgtgtatttgtgtgtcatgagaaacagcacagaggtgacagaagcattactctgacagccccctctagtgcagagaaaggtttgaggctactccttggtggtggcagtggtgtgggggtggagggtgggatgtaggggcctagtgtggagaaatagggctgttctgttccaggcctaagatagcccagagccacaaccaagtagtggctgtcccacccctaccctggcctgtgtcaaccactggcaaatggaaagtgtctcttagaatccagaaagaggtctctgtagggccagatatagcccaggcctctgatggaaggtctccaagccatactggcccaattcagccataatctggcttcaccaacacaggctgtacaggcaatgattactgaggtgcattcctttctgtttatcaagattccatgggccaaggccaggtgtacccaggccaaaacaagcagaccttgaccaggcaacaaagcagtgcattggtttcaccatgttctctctgaatgtccctcagctcaactgatgcagcatgatagggatggtctagggtgacaaacacggactgccacaccctgcttatgctttaactatttctgtttatatgcacagccttcatatccaatgcaaagtgaaacaaggtggtttttgcccacagagtggagttgctgaatgtcagttgcttgtatgtctggggagtggttatttaaaaatcctacccactgcttcagtttgctctgctctttataagtacagtcacaacccaagactccaggagagattaatccggtgtccttgttctgtttcattccatgtgaacagctgaactgggcctttcttgttcgagatttgcaaaggatagtcaagatccttcttcaatcactagcatttcaaaagggttcttgaaatgacaaaatggttcctttgcactgtcgacattttcatcatcaatgaatatttatgaagtgcccacatggaggttgcttgccagttccgaacccagataagagggaaggttctttattctgttgcagaggggcgtttagtcagtaaactgcatttcttttaacttctgaaagccttccttttttctggggaaaaaaatgtcattttgcttttgcaaatgagagagtaaagcttttggctattgcgtagtatttcttcaattattatttgggtttccagacagcacttgttttctgaaaccctcaaattgcctcaaagatataatatctttgtgctaaaaatacttgttagtcaaacattggttgaactcatgacttgtggcactcatgaattcaaaagatggtttcattttttccaaatcattctctccttttcatccactccatcccagaacaaatcattccgataatgtattgctagaatgactcacaaggggaatccatcactgaccgggtttgtccaaggtcttgcactgacctctcatggtgaggagagcagcaagctgtcccccacacttgcaggctgttatcttgatgggaatgagagctgttgggctgctcttcaggagcaggaggtaagaacagcctgtggggtcctgaatggccccagcgtccttgggtactaaatgcaatgctatgtactccccagtgtaaaaagcttcctggttgcatacttggcttttgccttctgtttgagacacagtgagccagattacttcaacaaagtcattccctgggaattagatgctcagaaaagtacattaacttttcatgtcttggcaaagcttttagccacagcaggagctccctgagtgaggggctgggtttcttttacctcagtattcttggaatctggcccactgcctgacacatagtaaatactccataaatacttgttaactgacttcagttaataattgtcatcgacagtcattgagagcacctaccgttttgggtccctgattaagactaaggatacaatgaagtataacaaacagtcctggctctgattggagtctagttggcgaatcaggccaaacacgataaatgacacttgccagcatagagtgatgtgttttaattgctcaaggaataacacaggccataaggggcactaatgtttaggaaaaacaagagatccacctaggacaagataccagggtcagcctttctgcttgctaggaattgggctatgcctttaaggaagagataatagcaagatgtatcaagtacctcctactctgtgctaatgtctctttacatacattactgaatctcacaacaatcacacaagggaaatgtttatcattgtcaacccacagatgaagaaactcaggctcagagaggttaagcaattctgtccaaggccacatggccactgagtaggaggactagacttctaatgcaggccagttgaactccagaacccatgcctctttcaccacctcggccaaggaggaaagacctcaaactttatcagctaccttggggcttaatttgaagcagcttccaaagcaagctgacactgcttctaggaagcaatagcaaagcaaggaaaagctgacaccctcaggttctctgagcaccacactgaatggggtggcaggtggagccacagggttactggagttgatctctggacctggacagcttgcaaccacaagcaacgggctgggtgcaggtgtgggtatgtgcatgactctgctggacaatttcccagtagcacacacgtggcaagcagcgtctactgctgagctctaaaagacttttgatgagttcaaacctcattatgtggatgctttgtaatgagaccagtcagcccgggcttggtagagtggttaagtatacagactctgcaacaaactaaatcctggctcaatcacttactagctgggtgaaatcaccaactcatgggttcctctcccaccacacggttttagaaagaggtcaaatgagttaatatatgtgaagcagaatggcatctggcacatagtgcttatataaataagggttgctatctattcttctgccagcagaatctagcaaaggtatgtacctttagagttattgccaaaggttcaagtctggattaaaggcctaaatgaggcttaaatggatgtagctaaagacattagtgttcctttgtaaacagacaagcctttattgtgttcagaataaggcttgccagtcagctgaagtaaaacttagagcaagatcttgtatcacagacagccaaagagtgacctctagtggcgtaggttcttattactgactatgcaaactgaaaggcgttcaaggaaccacagattgtaggactatggaaaccgatcgtgcatgggtgtctttgtccgtttgtgtaactataaaggaatacatgaagctgggtaatttttattttattttatttttgagacggagtcttgctctgtcacccaagctggagtgcagtggcgcgatctcagctcac

SEQ ID NO: 41416 - DNA, 3356 bp, Homo sapiens
acttaaactacagtgtttaaacttccagccttcagtcttccagagaggggagaggaaaaataacttacagaatacactcacacttgagccaaatgtactccctttcttgtttaatcttaagccacaggcctggcttcacagcactgttaggattgtccataaatgcaactgcctctacaaactttagataaccggttaattatgtttcttttttcaaattattttaagtatcagtgttcctatatgaactttaacacctaaattaaagtccgttttcttttgcatccgtattcacttgaaaggaaagatgttttgatttgatgactggtgcacggtacagcagtagcaagagatactatgttcaataatgccaatcttacctttttcctcttaactggcggaggtggtggaatacattaatcacatctcttattcttctaggtgcttcttcgatttttgatgcaagattaatacaagccatagcaacaatctgaaagaacccatgagccacaaaagccattgttagattaaactcactttgaagaataaaatttagaacacaattgggacaacctttagtaaaattagagaagacatctctatgccgtaagtctaccagctatgctagtactatactttttgttgtttaactcatcttaattttggttccagagtcaaactcaatcttacaggagttctgcatttggttgaaaactgtacttttcgttaagagggcacttaggctcgtgatcgattttgaaccacattctaaaggtttccacttcctggcgagtgagaagtaggtacaaaggcctaaactaaaccactccctttctggaaaagctggctgctgacactacccctactctgcccatttccggatgaagaaatcccttttacccgcctccgctgtgcttacctcgaaactgtgtttgacgaaagatttggagtagaaaaaacgatgaaacaacacctgccccgttgccatcgccacctgcagacaagagaggagaacggaagcgcaggggtcaggcgggcccgctccaggcgccgccgccattttgtgccgccgatcgcttccctttcccctcccgccgccgccgccgctgcgaacagcccgctgccaagtcctccctccgcctccgcagccccccgccccggcacgccccggccgcggctgggccccgaacgggaaagcctgaaggaaccgtccccaccctcccggggcacggtgatactgagatgcggcgtaggggacggaggagaggagaggagcgcccggccggcccggggccggagcactgacctgcggcagccggaggagaatgccggcggcctggatgagctcgcagcccaggatgcgtaagtccgtctcactgggcaggtcgagcccatcctgcatggatggggtgggcgagagcctctcctccggaatcagagagtggtcgatggtaagtgaaacttccgagtacaggcgatcgccgatcaggatccctcccgtcgtggtcgtcgtcgtggtcgtcgtcccggagctggagccgcccgcgcttggggcggccgatgaggcggctgcggcagcagtagctgtcgaatgaggcccggacgccatagtcttagcgagccgcacgcaagcccaacgcagccggaacccgaaacaagactaaccagcgttctcggcgcgacggatattcccgtgaccgccgggttctgggccgcttcacgccgcgtgcgcttccgccctgacgtcaccacgccgggcagccgcgcgccaactagtccctccaggccgcgcctccgccctcggcatctgggcctgcgaggggagtgttgggtgctgcgacagaccttgggatcctcagaggctgaggaggccttctctagccaaggccggtcgaaaccaccttgtttgtgatagccacacgaataacggagctttacaagatcccttatacccaaaatagaggtggcagcattggctagcatctctgcgccccttcgccctgcattccggcctcttcctttagcctcggcgcggcttgcgttccgcgtgtaccaagggaagtggcggccgacctgagcgcgctttggcgggtggaagtggtgactttgttgtcctgtgtggacgaatgtgtaatataaagtgaccctcaaggaatctggagagggctgctttacagtatttgaagaacacagggctgtggaccctatcggttcccaaatgaaagctccccggggagcgtgtttttgccagtatggggaagtagggcggaggcataggaatgaccgcgagagtggctgctttcatagctccgcttgcgaaactcctgcccggcctttgacaccgccacggctttcagtaatctggaaaatccctagtttccaaaaatagtcttagggcgaggacttgacagaggtaatttgattatgcctgggagtctctattcatacatggttacctaccgcgggtagggtgaggtcaacctcgtgttttttgttttttttcctgtgatattagctagcaatttccagcgtttcctgaaccttgaagtaaaaacaatgatactgatctaaactactagaatctaggttggaaggaaaggaatgcatcacgttttactcttgacgctcagaaagcgataccccaaagacagaggctttagaagctgcctcataatgcaggtcccccaaccttgacttgttgctcccacttttcccaagtgcagggaggtactctctgaaatttcctttcctgactagagaagcctctttgtagaagaatcaatcgcattcctcccctcgctgaaatctcgtatcctatttcaaaaagactcagaaatgcagccattcctggagggactttttcacaagattactcaaaagaaaattatttactaatttctgtccattcattgttcctaataatcatttgctgctcctcaaaataaatgtctacatttctcatctaccctttcccctatgaaaaaaagatataaaatcttctgtactccattaagctactgggtaatcatcctcctgcttttaccccggtgttatgtatcccttttctcctgttaatcgcctgttatcagttgattttttttttctttttttttagatagagtctcactctgtcgcccaagctgaagtgcagtggcgcgatctcggctcactgcagcctccgcctccggggttcaagcgattctcccacctcagcctccccagtagctgggattacaggcacacaccaccacgtccagctaatttttgtatttttgtagagacggggttttgccatgttggctaggctggtcttgaactcctgacctcaggtgatccgcccgcctcggcctcccaaa

SEQ ID NO: 41417 - DNA, 2886 bp, Homo sapiens
gcgcccattgcactccagcctgggtgacaagagcaaaacgctgcctcaaaaaaatacaaaaaacacaaaaaaaaaccccacctgaattatttcttaaggtgggaaagagggatcagtgtaaaatgttggctggattactgtcttgcctttagatataaaaatatctagtgtatacttaattttcagaattacaaaattagggaatgatcaaacgtatatatatattttatttttcaaaagcctgcggcacccagtgtttcaaggtggtctcgcattcaaggactagctaagcaggtcagaccctgcttagcttccaagatcagagaagacagggcaagttcagggtggtgtggctgtggaccatgtttttatacctataatttatttatattcattcactcaatcctgctgtatgcaggacgatctcagcttcaaactcaaaagctggatctggtggtcagctctttcaggcactgttttgtcatgggatttaaagatctcttgtgcttagttttggatctgtaaacataaatcccaacctggattcttccctgggctgacggagttcagggagaaaggtagcagtagataagtcatatgctggaaaagcttggactctaccctgtcatgaaaactttcaggaacatttcttatttctttttagagacaaggtctcactatgttgcccaggctggcctcgaactcccgggcttcagcagtcctcccgcctcaccctccgatgtagctaggactacaggaccgcgacccggcgctgcctaagaactgtttttaaacgtgaaagccacggctatcatttgctttttgctctgctcttcatcttctggataaacctcgtaacacactgcttgttttggggtaagtgaatttaagtattattatggcatttccaattttcacggaaggactctggcgatatcataatcgtcacaagccctgaaacggccatcagaggtcaagcagggaggtgggttttctggagggcttaactgtggggtaagtgactggagggggctgatcagtttcccctttcccttttcccggagctcagtggtagtctgctgcctacgccccgtcagacaagtggcctgagtcccccgcaacccctgcaggtccggccgccggcgccaagcctcaaggcatccaagccaggaacgatcgcggtcagctctgccacggaacatgtgcaagacccggcagcaggttccgggggaggcgaattgatttcacaacggtcgagaaggaggaccccgcccacttcgtcatttctcggaagcccagggactcgccggaagagcggctcaaaagccggaaaactggcaaatccgagtctcccggcgcatgcgcggcgcaatcggcttcgcgtggttgcagtagagaggatccctccgccagccactgcatccggcggccggatctaacttacccgctagcgttttacccttgcgcggccgtggcgtagggcggtcttttcccttggtcctccgcggcgccgcctcttgtgacgtaagccgcagaatcctctgtcttagttcggctctattgccgcgagcttgactcttcctgggtctgaggaaaagtaaaagtaattttgtcatttcctgaaacttcaagttaaacctttaagctgttcatttcctaaaagggtgaaaacgcgggcacccctcgagctagttcatcgccttttaacctgtgagttctgttaaaaggaagtaactgcaaaatgtcttcgctgttaggtttctttggaagttttgggttgtgttcatgcgttctctcggcgtgtgaactgggagaaagtggagtgccagccatatgaaatgacaactgtatatggaggctgggaagtataatgcgcattctggcttgatgaaattaatgaaattttaattaagtttaattttcatttgaattacccaggaatagcatcttgaaaggcggggcataaaaagcagttaaagagcttcgagaaacggttactcgttttgtaaactaaagaccaaatgaaaatccagctgcactagaaaagaaagaaacttataagggccgaaggttttgtctgcaatttacagctaattagtctcaaagatttctgtgatttgcccaagagaggtggagttggggccactgctttacccaggacaccgccgcggcccgcttgaatactgccgccgttaggacccgccgtacctggccgtccagggcctcttttcttgtcttccactctcacttgtcttttctcccctttccatgtttttggttcctttcctgagtttcccttgtctccactcccctgcccctttgcttcctctatctctttaacttctgttttcttgatggtggagccaactttagtttcccttaaaaggccataaaaggaaatagaataattttaaaaatgtcttttcataaggcttgttttcttgtcttaagcctgttttttggtggggggtgaaaaagttcatatgcagatagacataaacttcttttggtaaaagctgccctctattttcttccatagctgtcctgtgaaagtaggagtgtgtgtgaatggtgaagcaaagagagggagacatggggtcaggagaagagggagcacagcgtgtgtaaggagttaattagaaccagagggcctgggtctgtggctcatgcctgtaattccagcactttgggaggctgaggcggaggaccctttgcaccactgcactccagcctgagcaacagagtgagacccagtctcagaacaaaaaaacagaaacaggagaaaaaccatccatataagcagagaggtacttaaaatgttgcaaaactaaattccaaataacgtctgtggattctacaaaatctaggaaatacacatttccaata

SEQ ID NO: 41418 - DNA, 792 bp, Homo sapiens
taagtatcatgcccaaggttacacacagagccaatattcacattcaggtaggccagactccaaaatctcatattttttgtatgatttttaaaagctggcttataaaattcttacagcctttaatttgcttccttcataatttccttccctaatctttaaggggttctaatctgaggcccaccttctcattatttagtttttttttttttttttggcaggtatttgctggcgaatcagctttctgtagggagaaacagaaaccacaaaaacagaaatgatggcgcaaaacgtggcacatttcagggagtcacagctgtcccgcgcaaactcgactttacctgcgtgctactcctcaaaggcgcccttgcagttactcagctgcatggtttgagactgggcgggagattcaggcaggctccgagggcacagcgagtggaatccgctcagctcagtgaacctgaagttgttcattgcggagccggtgccgggtggaagaattcaaggaatgcagcctgatgccaccggcagccccagagaccggtcaggtgacaggctgcacctcacccagcggagttacctcccagtgcaacgctctgtttcctgaggtgaaacacaaagcctgctccagtaaaggagagttgtttttaacagagaaaacagaactccctgtgttcgtgaaaatctatactttcccagggaagaatggggggcgggggcgagccacgcaggaaacaattttcaacagaactcaagcaggtgaacggaatggctgtagggagccacctctcagag

SEQ ID NO: 41419 - DNA, 1459 bp, Homo sapiens
ctctcctattcctctactaaccagttactttaatctgagaaactaatttgcactcaacttgtgagtgccttcaccttcagggcagaagaaacaccgacttttaatgcatttttgcaaataaatcattacaatttaatcacacacgactctatacagacacactcccatgatttattatcgttgggcgagtttccccctcccccagcgtgagataaccaattttgtttcgggtaggtgtcataaacaaaacttcctacgatgcagatttgtttactgattacccatgacgataacgacgactactaagacaataacactctccagtcccacctttattgcttttggtaacaataaaatcaaaataaacaggcacgcaaaacaaacgccaaacaaaaaatcggccgcgttacaatctactccctcggcattcccagcgcctggcagcgtccatcgatgcactcgatatctcggctgaagctgcctggcgctagaaccaggaaggcgctgagcttaaactgaagcaagttcggtggacgccggcggcgccctgatctaaagaaacgactcagggactgcggcgcttgcacgtcaacgggaggtgtgagcccaaaggtctggacccaggtgatgcccacgaccagggcctggggagcggcagccgtggctgcggagctccgaggccctgatccggcgagaggcgacgcggggcctggcgcagtttgcggctcagtgtctgtggagggtgggctgcggcctcggggcgtgcgcagtgtcaccgtgcgcatgcgtcccgcacctgggaggctccggactccttgggtcaaggctggtggctgtagggtgggtgggtggccgcaggcctcaagcttggccttctgtcttgaggacatgtcggagagttcgccgactcctcccctcgccccacgttcctggttcttcatagctgcttttgggtttcctggctcatcttgcaatataagcctggcgcttcctcactagctctaggtagggtggagcaagagggaggctggattctggtgccctctatcccatccactccactgtccctgccttagatccagctctctttctgattccgccctaccctttctggctcacactggcttgctgagagaagtggtgcagggtgaaatagatgttcctctcttgaaatataaatatgctcgccttaaacacactatatattcctttgacttctgtactggtggcatgtgaccaagagcatatggctctgtttacttttgcaagatgttacaatgcaccgtaaggcatgttgcctgctcttgattttaggttaaccttgacgtaatttctctctcagaggttgtgtatctttaaatgcacactggaaacctaaacaaaaaaatatttttttacactttcagaattagcagtaacccaattgtgttccagctaactaggtagtagataaataaat

SEQ ID NO: 41420 - DNA, 389 bp, Homo sapiens
tctacaatagcagcgttggatagttgctacagagacctcatcccccgctctccactgcaagcctaacatttttattatctagccctttaaggaagaatttgtggactattattgcccttgatcatttagcttctaccaccatcaaatgactcagctgatccagctaaccacaagaattagtcatacccactgagcctggatgaacctccagttgatctagagaattgtgtgaaataataaatgtttgttgttttaagctttaaagttttgagacagtttattatgcaataaaaaattaactgatgtcacattgaagcatacgtaccaataggagaacaagagtggtttttccatgtgatttgtttagtcactctcattttgacatatta

SEQ ID NO: 41421 - DNA, 734 bp, Homo sapiens
gtttttatatctctaaattatctattataaagtacaatggaaatgtcattcagaataacaacaaaaatataaaatagctaaaacaaactttattggtaatttaaaatatttattgagcactttctatatgcagacaactctgttagatgctaggagacagtcaagggtgcctgccctcatggaatgtacattctggtggagaaagtaaacagaagatggttatttgttcaactaagaatgtaataataattctgatatgtgcagtgaagcaaaaggatcaagtaatgagagcatataacagacaaggccaaatattcattcgttttttttcttctgttcaacaatttaagtccattttgcctgggagtaaaggggttttcccaagatgttagactttcagtgttgaaatcagggaagtcccaggcaagctgagacaagttagtcatattagaaccttggtacattttcagaacaaagaagatcagtatggattgactcataaggagtaagatgatcgagaatggtctggatggagctgttaagaagataggcaaagaataggtgattcgtggccttataagccatgataattttgaggttttgctttttatcctaagtcaaaaactattgtaggttgtggcatgattagaagtcattctttgagatccacctgcctaagaagaatagatttgatggtgatggtaaatgttatggtagtggtagtgggaatgagg

SEQ ID NO: 41422 - DNA, 803 bp, Homo sapiens
ggattcaggcagttccttgctccctcttcaaagtaacagtatctcactgtgatttcagagaaaataattctgcttgtgataaagaacattaattgataaaaatacctttataattttaagtaacatacaactcagatgcctaccatgtatttctgtatactgatggtgaattcacagaatttgctgtgaatatacaagttgggatgactcagactttcctaagctataaacgacttctgcagacttattgggaatggtaagaaattgttggaatgagaggaaaggaaagaatttagtcatcttattgaatcctatccaaccaacgtagacattattgcttgtgatttggattaagcccagctgtagtgcttctgatgctggcagagtaaacaccaaagtcctaagtacactaagacattttaggaaaataccacattatggttgttttttgtgaaacgacaaaaaatactttatgtaaacagagaataagtcactctgcaaacaattatttaaaaagcactaaaatatagatcactaaaaaataaaaactttatgtaacagcaacattctaggtaccttagtcatttttattatatttaattatacccagcccttgttcctacctaccatatatcaagttggtttttaaatccaagttgttttataattccaagataaggttgttttttattcattatcatttttgagaactttgcaggtcagaagtgctactgaacaacacctactttgggaattgaaaataatatcttctgtctgtaaaataacttgaaattgtgttttgt

SEQ ID NO: 41423 - DNA, 1262 bp, Homo sapiens
ataatttgtccacgttctttttcaggccatgtcatatatatacctattaatatttgtaatagacaattttgctcttttctacttaaattgttatatacatttctccacattgctttataggcctaacaaccatgtttaaattctgtatcttcatacagaggtaatatttaaaaaagaagacgaagacaaaaggactcccttccctcacccatatacctatgccgtcttactgggagcaaacacttctttagctccgcaaagcgattgcactttctcttccaagtcggcagacggcgcgcgagcagcgtaggcactgctccgcctccaatccagttgctcttctttcttttcctcactctctttttcctcgcgtcctttgccccggaagtgctcttacaacattggctgccggcgtgactttgaccgcttcccggtgcgttaccggcagctgaacccacccggcgccacgggactttgacgcgtgctctgcgcttgccatgagactcctgggagctgcagccgtcgcggctctggggcgcggaagggcccccgcctccctaggctggcagaggaagcaggtaccggagcatagagaggctaaatcgggaccattcccggaaccttgtgatcccttctgggcaatggaaggccgtgacaccccctgggtcctcatgactgacagctccgaatactggcagtcgctcgtcagtgctgaaaagcacctcggtgcctgcacattagctcgttagctcgtttgtttcgctctctggtatccctagggtttaatcaactaaaagtgtctgtcactcagatactttgatattttatccaccttttctaaggttttttttttttttttttgcctctcttttcccgtgaataattgtgcattttggatgtgcagtcctatagggaaaggtttatattgtatcttcattccatctaatagggatccccatcccctgccaccagagtaaagttaaaacaagcttcatgaattgtttttgtttggagggaattggaaatctttgggggctgtcttggagctactagcatcactgcatagagcatataagttctcaaacatatttgtcatctgtgaactacaataaaggagaaagggaaaaaaattaagttaaatttaagctaaaatttgtattttctattaaagtattttttggagctgtctttgtgattttatctgccccagtgtgtattttcaaatctgcagtaaaaagtgtctcccattttaattaaattta

SEQ ID NO: 41424 - DNA, 666 bp, Homo sapiens
atttttagtagagatggggtttcactatgttggccagactggtctcgacctcctgacctcgtgatctgcctgccttggcttcccaaagtgctgggattacaggcatgagccaccacccccagcattcatgtttaaatgtagatgttttggatattctgggatctccctcacttattttataatccagaaacatctggagcttcaactagacatcagatgtatgactcatttctagcatagtggttcttcccccttttaaggaattccccagattccttaaccaaataagagaagccagggaacttattccctgaaaaatgcacagatcagcactgggcctagaatttgaggaagttcatgggccactagtcttggccctgcccaaatccaactctcgttggctggttgcatagttgaggtgataatcttctttttacttttgtggttgtttaaactgggtgaagtcccagtgaaaacaactaccaaaaatgaaaaaagtccatgaggaaacaaattgtaatcaaaattctctctgcgcttgagcccaggaagtcaaggttgcagtgagccatgatcatcgcacttccctccagccaggagagcaagaccctgcctcaaaaagaataaataaataaaaattaaaaataaaaaaattggatctgctta

SEQ ID NO: 41425 - DNA, 985 bp, Homo sapiens
cataagtgtcatacatctctggggcgatacactgcttaacagcaagtgagatcaagtttcaggttggatttgggcgagtgtgtgtgtatgtataaccttccatgcctcacaatgtcagtcgttgtgggctgattatttacatgcagtctccagcagaacaacctaggtccttaaaggatgagtctgcagccaagccagacttctggcagttaacagtcatgacccaccactgccggtcttgatgtgggacattactaatgctctgtgattacatgcatccttggctatgactccacatgtggaaagccaagtggaaaatgtcgtgggctggtaaaaaaaaaattgtggtttaaaaacaatttattataaaatggtaaaaaaaacattcctactggctagctcatccgggtgtagttagcttaggagattgaggcaaagtgccaaggaggtcaaagtcaaagctttaaccccgggacctagtggcctttctcaccccatgctagacccagactctgcgatcagagtctgcagaccggatggctgctgtggtgggtgatggggtggagaccgtaggcacatctgtgctatttcagcacaaacattgcctggaaggagagattcctgcctgtctcttctgtgctttcagaattgttatgtttcatccttagggcagtgtgagggcactgaagagatcctagtttatcttgcaaatatccccctccctgctgttctttcctaatgcctataaaagcccttaggagctttccttacatgaaaattaagactagttcacttgagtattttattacttatcttctcccttagttcacttgagtattttattacttatcttctccctctatgttcattgcagcctttttaattctccagtttttgtttcaatggacaatttaatgttttgctttcctagtctcctgaatcacctcaaaattattgacattaatggagagaagacctcaagagc

SEQ ID NO: 41426 - DNA, 1356 bp, Homo sapiens
tgggtacctccggacaaaattaaatgttgccctttcagcctgttcctcaatttcccaaagcatctctttcccaggtgtgggagcagtcaagagcgctgccctgtgaaaaacctatgacctcataaatgctggaaggaacgagccagatttctgcagacgctgtgcaccgaaggggccccttccacgccctgggatacttcaggggcgccaggcccagctgggatctccccgggcgtcgtgcgcactgcaccttccctggcggaccatccgttgggccggcaggcgcgcgtacccaggtgtcacctcccagcgccgtgcgcggacaggcaggcgcgtgccccggcgcgtcgctccgcactcacccacgcgcggccctcctgcacctcggccagcactcgtagcgcgctgggcgagccggaccggaagttgaagaagtgaagcgccgcgcgcgccgcctgctgcaggagcctgcgcgggaccccagcatcctgaggctgcccagggtcgtcggggtccccggaccccgcgggcgccgccaccggggcgagcaacagcagcagcgcgagcagcggggcggtggggcgcgggcccctgggcccggaccagggagcaggcagccgttgccggcggggctgcatggacgcaggaaagttggctcggcacccgacagacacgggctcggagcgggcagtgccggcgctcgcggaaataaggccgtggtgggcccctcccctccgcccccagggcgaaggtctgtagcgagcccgggtccccatggggccactccttttccacgtttcccgcagcccctgggttctctctgcccctccccgctgcccgggcttagtgctaggatgcggcatcgcctccgcagcgcagggccgggtgcttctggcccaggccgcggcgggagagggtcggggttggggggacaatggggacgcctccccgaggaatcgcggcccgcccgtgctacctcgtaccgcgtccctagcccagctcagggacttggcgtttcccctgcggtttcgcaaccctggggttttagagggaaactgcttggattctccaagcattagggctgtgatttcccagcaggtgaaaggggacggcggagaaaggggcaggccgcagcgggcattgatggggctcctcgtggcacagccactgtggaggtgggagaagtcgccagagggctggggctggggaggaggtgaaggtggatgccggcagggagcccgggacgccggagccaggggctggggacgggcctgaacacctgccggtcctgcccagaagaggcgccgaggagggaggagtgggcagcaaggcagggtaagataaggcctgagagtc

SEQ ID NO: 41427 - DNA, 2289 bp, Homo sapiens
agtggagatatgtatagacatctcaaaggcagcacctgatccttgacactctctcctacctccttctctctctaaattttgatctctattggcggcccaagctagaaatctgggagacactctcaagtctttcctctctttcagatcgcataggctattatttacagttattcccattttacctcctaaataattactgattttcttctgtgccattcctgctttttattgctaacaggccctcgtcatctctaatcgttacgactgcagcatcttcctaataatcctcacagttttcagcctctagctttgacgccctcaaaattctgttagtaaagcctgagggctcccagaaagcgacgatggtgctgtgctggcagaccgaatgttttttaaaacacaaagcttgcagtcctgctgctgtgctcaaaatccttgcatggctcttcttgaaacaggtttagtgtttctactcgagttccttctctgtcgttcaacacaaacacatacacacccagttctgtttcacgcttttgtctttattatccctcgtaactgcccgccctgcaaccaacccgctcaaacaagcaccctgactggcgcattcttactcattctagcctgggtttcaacttcaaggagcttcagcgcccctcactcccttgccctgaaagctggctaaactacgcaccttttctccccttttgaaatgacctttccagatatttctatggaattcagtgccattttctgccgctgttctcaccacattcattcatcatgtttagttttaaaagtaccagattctgtcgatttctccaactgaactctgaaatctttgaggtcagggagcttgcctcattctattttgtattcccagtacgtgacacatggctggacacaccagaaattgtccgatcaagtttgtgggtattaagagtggtcaaagacgctggggagggcagtgctgggagaagggcagcgcgcgtcttggcgaccccagcgcagttcgaactactccggagtctggtgtggagccgagagggagccccgcacttttctccccgcggagctgcgctgagtctgaaataggtgtacgcgtcagcggggcaggaaacggaaagacagtgcagtaattggtggaaagctggaagtgggcacctcgagggcctcagccccacgaacacagtcacccaggaaaagcgaaccgcgccaggccctgtcatcgaccgctgggtccgtcctcccagcgctcgcggccgctcacatgggcgtggccctgcgtgacctgccggggcgtcacgtgagctcccggagtcatgtgaccgccgtcttgacagtgttccacgggcgctgcttcctgcctgggtttggagttgtcaccactttcccctctccgtctcctgcgggcgcaatggaggaggaggatgaggaagcgcgggcgctcctggcaggcggccctgacgaggccgacagaggtgccccggccgcccctggagccctgccggccctctgcgaccccagtcgcctggcgcaccggcttttggtgctgttactgatgtgcttccttggctttggtgagccggccgggtgggttggggctgatctttaaggaattcccgactttctcttcgaggtagatcgtcatcgtggtcactggtgccacggggcctcagcgcagcttctgtcttaagctcctgggcctccttattttcccctttgcgatcgattccagccacacctgtggatgttgctagttactccgcgtccggaacgtggaggtcgagggactgagctgggcgagttttgtggcactcctttgctcttcagtaagtcccaggggctagcgactcgccctagaggcgatagatatgaaggtaactccagattttcaaggttcctcttttggcacacgtggtcggaggaaattcagaaagctttaactgttcctaaacaacttttgtttgtttggttttaggtgagacaggggcttgctctgtcacccagcccggagtgcagtgttgtgaaagtggcttactgcagcctccacctcctgggttcaagcaatcctcccgcctcagcctcccgagtagctgggaccacagatggggcgccaccacacccggctttattattattattatttttagacacagggtcttacaatgttgtccagcttttaaaaaacgtgaatgatttcgtcggcagtcttctatatatttttcaccctctttgagaaaatgtatgagtgtgtcttgctgatagcttcagtgaatagatattgttctc

SEQ ID NO: 41428 - DNA, 800 bp, Homo sapiens
attcgaggtgtgctccctcagcaagtcttccaagaggctgttgggagtggccgctggtaagctggggtagatactgttatggggcatgtgtctaatgcatctgcaaatactagggatattggaaacttaatcctgcctatatcataaaattaaattctgtaggaggcaaccctggtatttcctagtctgactggtggacttgcatatacaaggctgccattgatcaaactaaaaattggcaaggtttgcctttgacccctacttatttattctgctggggactcacccaacattcctgttgcccagaaatcaataccagcacaggtatttcttgccatttgaacatgaaaatctactggattcagctactgtgaaattcttgtacttctatagctttttataacatgagttttcatagtccttatctcatttgcctccctatagcaacactattgataaagcaaagcagaataattgatttccattttctgaaaaggaaaattggtcatccaagtcacggagctgaaattggaaccgagaactttctactttcagtttagggctctagtcataacattgcagctcataatttctgttttgcatctcttttttagtgcaccctgctaaatgattgattaataatacattaaaataaagtgagttaaattctcattgggtcatcttagcttaaaatgttgtcctttacagataacatttgaatctcaatcctggaatataatgctatatttaagtggacatttaaagcgtcatgaattgttttgaagatggaagaaagtatt

SEQ ID NO: 41429 - DNA, 1261 bp, Homo sapiens
aaaacaagcctcgaggtgagggcattctgtagctcaggtgatgagttttgagaactttattgagctccccattaaaatgttggcattgggcatccagtcttgtgatttgcctcaaagtttctgctttgaagacactggattagacaagctattataacagaatttttaaaaatctagataacgtattctacagttaaataaaagcattttcagcatttattttattcagcatgtatttactgagctcttattagaaacttgctgatgtgctaagccctgagaatgaatatagggtgaacagagagaaaaggctattgcctctgaggcccataaagggccagctttttattcttggctgaaaacccaatacagaacccaaataaggccttggacttttgacctctacttggtctggcccagaactggaagataacttgcttttgatagactctttggaatgaaaccaaggggcctattgcctaacgctacctcattcgacttgttgctctactttcaaattcataagcaagcactattaaagctgtgactacacgtccttttcaacgaacttgtctctgctacaggtcctgtgaccaacacggcagggcttcgctcctggtgcaccatgctccgcgcggtcaggcggccacaagccatgctgtaactgtcagtccataggatgagttggaattgtccatgctgtagatggcaggaacctagaagtcgctcttcttaacggcagacgttatcagggaagctcgaaggatggcaccagggtccgtttttcagcatagttccctttggatgtgagctgtgtctcacagtgtccatcggtgtccttctcttcatggtcacaagggaggtgtagcatctgacgccccataattctcacattcttgtcctgagagtgaaagcttttcctccctaaggcttcagcaagcaggacctggaatcccgctgctctgattggctgcatgacctattttaaaccaatcactgtggctgggtgggtgggacactattaggcttaagccaatgagaactcttccaccggcgctgggcatgggtcagtccacccaagctaccgaccagagaggtgatttttttaaaggaaatttgggcactatttgaacaggaatagttatggatgcctctgccaccatcattggtgctctcagcctttttctttctttcactttaaaaaaatactttggccgggcgctgtggctcatgcctgtaatcccagcactttgggaggtcg

SEQ ID NO: 41430 - DNA, 1431 bp, Homo sapiens
gaatttatatagtggtgaaacagcctctcataatttctttcagccctgcccccaaagcttcttcaaatacacatataatcagagcaggagcgtggcacttgctgtgcaagtacaccttcaagccaagtgcctttctcctcttcaattccatagcctcccccaaacccatcctataggaaaattttgaagcctttacatgaacaaaattatgacatttgaaaatgttcaaaatacctaactttccacatttagtattctttttttttttttttttttgagacagagtctcgctctgtcgcccaggctggagtgcagtggtgagatctcggctcactgcaagctccacctcctgggttcacaccattctcctgcctcagcctcctgagtagctgggactacaggcacccaccaccacgcccagctaattttttgtatttttagtagagacagggtttcactgtgttagccaggatggtcttgatctcctgacctcgtgatccgcctgcctcggcctccgaagtactgggattacaggcttgagccactgcgcccggcccacatttagtattcttgtaatgactatgagatttaaaaccatcctactaattcactgtaataagctaagattttgtcacaagcatagttaggaacaccattctctatctgaagggcacatgttaaagtacacgtgggtggttatttgtttttatgttaatgtttacacaaccctcttaactctgatgacacatgtctttctatgccagtgggcaagagtgttagacaaagacactgttttcaaaataaaagggagagcttatggataaaccacttgagaatcacaaccattcatctatttctttttaacagcacacatttccactgtgaatgtctgatattgacatttactttgtcattttaggtttaactaaacagtcaattagaaaaacatgaactatgctttaactgatctttggtgtaaattagattataccatttctgttggattcatctgaaaaaaataaatcaatactttaaaatccatgtccaagaatctctagttggcatctgaatttgtcaacaattgttcaattgcttagtcaatacatgtttattcactgaataatctgcctggtgctagggagatgctaagataaatataactgtctctgcccttaggttataatctagaaggaaaaataatgcacgtagagactcattctgctttatataaagcagaatgttctaggaggaagacataaagtgctgtgagagctgaggagaaaggtttgattggagcctgtagagagacagagatcaggcaagccacaaagagcagctgggattagggtccatactgaaaagaggggtagatttttaccctcaaataaatatactctttccttttccagaaaggggagtccagcttttcta

SEQ ID NO: 41431 - DNA, 380 bp, Homo sapiens
aggctttttttaaaaattgttttaattattcttctcatggcatcccttaaactacctaatcatggaattagcctgacagtcggattgtagctctaagtttgtattttctggtatttgcacaaatatgttaagcatctaaaaatataacatttcaacatgccttttataagtaagcaaatgcccagcacctttctgacatcccgactgagtcatctattactcactatgatgggaaggaaatcagcggcaggctatgtgatgagaaacactgttgatgtggtaccatatcactgtcaggtgtgctcccgtgttcacctaaaaccctgcaggttcctgggatgcagaaagctgggaagaatagtaagttgatgagtggacag

SEQ ID NO: 41432 - DNA, 583 bp, Homo sapiens
cactgtgctcagccctgcatgtatgttttaataaggcatctgtctccaagccacaaggcccctggcaaaacctctaaccctttcccttcaacacagcggcatccctttttatcacagaagtgaaggtgtaaatagttccagagattcacaaggcaattccaaagcagctctgttttcagtcaggcttcccagaacctactttgcttcaggcttgaacctagcaagctgacatcatgtttcctaagcaggcaaggtgccaccagaacacacaggcaggggcacagctgaccagaaacgaatggggccatgtgaggtgcaagtccaagacagcaatgtcaacacatctgactgccaggaatagttacactctgggttaaagggctcttccaatttcaactaagataattatataaacaaatagcatctgtaggcataaaagatacatgatctgaaaagaaatgctatttgtttctgatgaattttcccagaagctgaacatagctttatttcatggagtaatatactaggtttacagtatcactagagttctttttatctcaagatcgtaaggacctttgcaatt

SEQ ID NO: 41433 - DNA, 572 bp, Homo sapiens
cttatattttgcagcaactgtcatcattattttgatgccatggcttaatagcgccttcaaatgcaaatttgacaacacaagctgaaaatcatgggtggcaaacaaagcaactaaacttccatgcctgtgttttttgagagctccacctgatctgtaaatgcacacgttttagtagccagccctgcttacaaccttcgtctttgtattataagaagaaccagaattttctgaagatattctgcaaatctaggctgtaaaatggagtttcaattcctcttactctgctttttacaattctaactttgcagatagttgaaatccatctggaggctgtttcccaatgaacctgttctctttgtatcatttatctatgagtgataagtcaaatatttcacaaccacaactgcccaggcattagccaagcaagcagaggagcagtcgggcaggagctcctagccagcacaagccttctacttttagttgctggaccatgggagaggtggtagggatggggggtctctagtcagggactcgaggggcaacgatggtgcttgggaggccagaagagtagc

SEQ ID NO: 41434 - DNA, 595 bp, Homo sapiens
tatgagacagttctacctcacatctgcaatttccatttgaagcaatgcagtctttttcccctcaggcccttttcccctagtgctcccagagtaggttctacaagagaccagaattttcatttaaggaagggctgcatggggtgtttaggagcaagccatgcccgaactccagctccacccccgggtcaagttactcaactttctgacattccatttctttttctggaaaaggatattaataagtaacttgtggtggtgttgtaaaggtcaagaacaatgtacgtaaagcaaaggagagggccaggcacatgaaggtgctgaaaagtcatctgaggaaaaggaggagttgttgtcaagtcgtaagtttccttttaggtagacccaaagaaagcccagctcatttcgacagcaaccaaacaggaaatggatcatgactgtcgtcatcacttatgaagtatttatgaggcagtctactattcacgtcactatataaacatcattagacccagtgtctatccaataggaaggtctttaagatggataacggatgtgatgtgataggattctgtgtgaaaacttaaaattagcagtttac

SEQ ID NO: 41435 - DNA, 5498 bp, Homo sapiens
tctaatttacaaaggtttcaagagacaaatctaagtctgaaagctccaagctcctaacttgaaaaaatgtccctgtaaacaggaagacagaatctttcaatcactttgcaaatcatctccctatcctgctggacatatctgcaggctgttgctgggcctaggagttggcagggcttcctgttccaaagtgggagggttcctggcaggagatggaaggctggaaacagaaaggaaactgggctagccaggcaccttgcatgaagagaaaagaagggaaacctggtactttcccatctgatccagaaattatctggtcggaaaataatttaaaagtacaggtaattcaaagatgtttatatttggctttgaaatgccatgcatttttggcactagacttactttgccaaacatttttcttaggccttattttgcattccctgaacatggaccatctgggcaacagggggatgagcccagagctcagagggagtctgggtgggtggctgaggaggtcctaatattcaaaacttggaatgaaaccacaactctctctcatcaccccaggtgatcagtacttatctgtctacctgtgtcctgccacagagcagggagctttttgtgatctaagccatgccatgtcatatggtgaactgaaaaacagctatctaattcccagcacaccaaatgtttcctacttacatcttcctactcacagggccacctccaccccgctggagtggcaggcagggctccacagcaatctcaaaatcaaaccgtatttggagcacaagacaggctgtttacagatgttaccataaaagacaatttaaataatcatcagtaccgttttacaaaacagctggccagaccggaaggccccttttccagttattcctaagattgctgcttccagaggagttgaaaggttagattaccttccctggctcaggtctacctagcacaggagagtcgtgcctcacagaaatcacttcaaaaaggatctcagcaccacatcccactagggcttagaagaatcctcagggtggcagccactccctacttaggaatcccatgcattcccctcttcttccatctggactgtgccacgccagggaattcatttggtccaggctagaattcactgggaacaattagcaacaggcccaaatctggaagttcagagaaattggttctctccgatttgttataaaattaagtaatatttttcacaatcaccacagagaaaagggcatttcctagtttcccagttcttacaggtcagaatggttggttcacaggaaatccttagtaggcgctctgtgatgcatctatgtttttccaagtgttggtatttttcatttaatagaaccttcttccaaaggagattagctgccagactcaggcagcccgtacgtttttgaaaacgccagcataggtttgactcaggtacctgaaatatctaaggaagcaaaggcagcggatgtgccaagggcaccctcacctgatatctacctcttcccctcctttaaggtccccttgattggaggtggcggaaagagtctctggtggctcgcccaaccctttagaacattcgcccctacccgcttcccctgtctccttgccaggcaggagtcctttctcgcacttaccctccattccccttacacacacctcgctgaggtcatcctcagcgtgcagcccggaggggaagggaaacgtgagctaaagcaacaggttccacccacagcctgaacttggaaggggatgcggcggcggcaaggcggctggagctgcgcggtggagggagaggaagcggcgaggaggaaggtggaagggaaatgatggtgcatgaccaccgagcacacgtcactcgggctcccacatgggcttgtgtatgtgcgtgtgtgaggggagggaggtccttcacagggtcactcgggcacttccgcgtggaataggaggcgccaggctcgtgctttgggatgccgggtggcttcggcggggtaacgagtcacgcagagacggcttgaggcaagccaagaaaatacgggtgtcggcgtgaaaatacaccactcttcccagcgcgccgcccttgctaactggctggacctgcgcccctaacgcccagtgcccccttcttttgggcctatcttggcccctccaaccccatcccagcctgcctcctgctccagcctgccgccgcgaaaaccgggactgcggactgcgccgcgcccggcagcctctgggcatgctcggtggcgggaccggctccaccgccaggagggcgcgtcctccctcccctagggcggtgacggcgcctgcagcgacttgccgccgcgccccggccaggcacaccttttggggaggcgggggaccaccctgcccggcgtgggccgagagcgccccccaccccgagccttccggcgggtgggaggaggggccggccagggagacgcggaggcgggagtgagacctccgactgccagcggttccttacaaagtaaagctcagctcgcgcgcggacccgggctcccagccgcgggcggggaaggggcggggcggggcggggccgggccgggccgggccggggcggggggtggtctcagcgcctagagcgagatgcgaaattagtagccgcccacccccttctcagttcccgcccccagggaattataatttcctgggaaagtgtctggttctcggagaatccttggggcggggtaaaggggcgcgcctggcgcaaaatggttaatacaaagtctgcgcgcgccgcggggccccttgtatgaaaagtgtgcgcgctggtggctgggcacccctttgctaatttgagggttagttaccggcaggaagtctggttgtgcgagaggaaaggcgggcaggagggaagcctcaggctggtgctggctcccgcccccaggcctccttgggggacgcacctctgacccagcgggcgcagggtgcggggcactgagccggggcatttggggcgggtggcgggaggctggagcaggcttggcccagcagctcactctctacctcctccccctaggattaccgagaggatgggatggatctaggcagtgacgccggcagcagcagcagcagcagccgcgccagttcacagtccaactccaccaaagtgaccccttgctccgagtgcaaatcttcatcgtcgccggggggcagcctggacttggtgtctgccctggaggactatgaggagcccttcccggtctaccagaagaaggtgattgatgagtgggcgccggaggaggacggggaggaggaggaagaggaggacgagcgcgaccagcgagggtaccgggatgaccgctctccggcccgggaaccgggggacgtaagcgccaggacccgcagcggcggcggcgggggcaggagcgccaccaccgccatgccgcccccggtgcccaacggcaacctccaccagcacgacccccaggacctcaggcacaatggcaacgtggtggtggctggccggccgagctgttcccggggcccccgccgggcgatccaaaagccccagccggctgggggccggcgcagtggccgcggcccggcggctggggggctctgccttcagcccccagacggcgggacgtgcgtccccgaagagcccccggtgccacctatggattgggaggcgctggagaagcatctggccgggctgcagttccgggagcaggaggtacggaaccagggccaggcgaggaccaactccacctccgtaagttggccggggtgcgtgcccacgcgcgcacacacgcgtacacaccccgcgcacagcccgcacgccccctccctgcgctcccgcccgcccgcggccccattcattcttcctcgagggtgggggccaggccagagagcctgccgtctgctcccctggggataaggttgctcggtctgtgagctgtctgggtttgcaggatgggcggagaggaaggaggagcagccagagggcagcggaaagtcgggttagtggaaccggcgactcattttaatggaattacttatggagaccaggttgtgagtcacttgcctgaaaataaatccggggagattctggcaccaaaagtcagtgcctgcgggggatatttcaaatcgtaatagttgtggctttgtcaatcgtggtggctctcctctcgttgccactaatgtctcatccatatataggcttgttcctatgcacacgcacacattcgcctgcccacaccaccggtctggcagcggggttcgttccgtcttgtgttaagcagatgctcctgtatttgaatgggttgattttcctcctctaagactttcttcctttatgaaacccgagttattgttgacctgggggaacggggtaaatggacctgtcaggataagggaggggttcttccctcggtcgcctgactcactccctctgctgtgaatccctccttgttttgataacggagccacttacagtttcttcccggaggctactgcctcaattcaggaaagccagacagggaggggtgctggagtggaaaagagggagggaggagaggagggctgcatctataataagaagcactggcaggttcacacttgtctcaacatcttttttgcccctgagagaagagcagataaatgacttaaaagaaaaccatcatgaaggtagctcccctgtttagcactgctttgagataaagcaacagttgtaatttgaaatcattaatgatgaccctaattagggctgaagggcgtagttgaaaggagctgctttctgtgtgtggcagctgtgtggcaggtgggaaaatgcttgccttgcgggtgtaatttttgcgacaccaggaccccggggctcctgaaaattgggtgcatgcacttctgacttcaggggtgaggatggtaactgtgtttcacagagaaattgccatggttctatcagagagcgcccttggctgacagagcctgctggttagtttcccttgggaaactacttaataaattagcatactcattttaattccagctgtttaggagtttaccatggccattaacagacgtggaatctttccattacagtcaatactatctcttataccttgcaatagaaaatatccttttcccactttgtgcttgagaaaaatacctcattaatacctgggcttgaacaatgagtgggaaataagcaggaggttagtttgctattgcgtgacatttatacattccaggaaaatttagtacttgggtatacatgcaaagttagggtttgatggtgacaatgagctccattattcaaaagttgtggaacaaattgtttttgagcacccatgtatgtgctgtgtgccagggatggttctgagtgctgtagttacacatcagtccacatggggctgaaattctggtgagggaagggtagggatacagactgccttccctccaggaacttaaaatttgatggcttacctagcaccacctcatacccccacccccaacgcatcttctgg

SEQ ID NO: 41436 - DNA, 550 bp, Homo sapiens
tcccagaagtcctgaaatcacatctagcgatagcttcatctgcggcagcatgtccagcaaagagactgtcaccgaaggaccaggaagggagacaaggttgggaagggggaagttgagggtacacaagctacagggaaatccactaccttctgcaatgtttttacccattcatttacttattcacttaatagtcatttatttgctcagtagctgcactctgctagatacttgggagtcaacctagctaggattttttcccaagtggtctatttattttgttgagggagaggcacatcaaacaaacaccaaggttggttatttaacatccaagataagtgattcagttgactttggagactgacttggccagctgccgaggcagagacagtgctgagggattgacagctgaatggagacctgaagagcttctgggagccaggtgaaagggatggcaagagctgcccagccccaggcaagagggagtttggaaagtttcatggaaactgcaccaggagcatcctcaccaaaatcactcccttacctcacaaac

SEQ ID NO: 41437 - DNA, 2272 bp, Homo sapiens
ctgagaaatggatttcgtgctgctgaaactgaaatgagaaggaatggtcataaatcatagtttagtttcgcacctttagtcagataagcagtgaagtgactctgagtcaaagcgtgtgtgtgtgtgtgtgtgtgtgtgtgtgtctgcgcgtgtgcactgtgtgtgtgtgtgtgtgtgttttgtggtgtgattgtggtctgtgtgtagtggagggatggttaatagaaatgaagcatcacagctggaccagccacagcacgtagaatccttccctggggcctcagtttacaagacaaataatttagagtaaccccttccccctttaaaaagccgaatatttttgtaaaaattaaagtgagcactgaagacagttttgaagacaaagaagaactcacagtaagcgagtctgagtaggtgcgtgactggccagctttggtattgactggcaaggagaagacttgttgagggttgactttgggtctgattagataccagggatttgacctatgtaatcttatttttgtcctctcaacaaactttgtacccctttttagtaaaaagatgagaacattaaaacctaggaagatttagtaacttccacatagctggtaagtggttgagttagaattccaactcccaggtgacttaatttaaaattgacttcaaagtagctcccatatggactgaatataggatacgagcctctgcctagccttcagtcctttttgtttggtttaggtgttggttgtctttgtaaacactggaagctgctgagtcatctccctcggctttttccatcacactttaccccacatacattcatacacacttggctcaagcttttcggttctttctctggacactagatgactgtcagccttacctgggccctgccccagaggctgccccagcatctggtaggagcttagtgagcggaatggattcctagtgaaataatgaatgtctttccttgtattctgtgtttgaaacctccaggatagcaattccatctgctatatgaaataagaaaaagtaaatattctttggttaacctttgtcattcgcctacttaaacctcaatcacatttctttgaaatcatgccagatttgtggagagcaaattgccaggtaaatggagggcaaattcaccaaactaattcttagttttttccttctctaagggaaggaacactttgcagcttaacagcattttcaaagtttcaaacaggactggctactgagttgaagaagcattagttggcccttaagtcctcccctctggccactgttgtccacttcacacatttggaccaacttccctcatctgagcctgaatcctattagccagcactgaaaatctggcatggtttcaaagaaatgtgattgaggtttatgtaggggaatgatgaaggttaaccaaggaatgtttactttttctgatttcatatagcagatggaattgctatcctagaggtttcaaaataatcttatcgagatgacttttgacccgtcttcaatagcattacaacaatccccgcagcctggagactaagctctgctgctgttttgagtgagctggccccacagagggtgtgacgtgggagtagagatgagtgtcggcctcaaagtctgctcccatctctcaggaaagcaccttctttagattaaggtattggggctgacactaaaatagatgatatttgaggctaagttttcaatttcactctttccagaaaaacaaagtactgatagggatctactctaaaagctggttttaaatacaaggcgttacagaagtgccaaatgcagtcactgcacttaaaatcatggcctgtggatagaaacaaagctgaagagtggcctgccgagtgtagagcgttctttcacttgtaagaaattaaatacagagacactcaacacaattcctggatgtgatttcctgttggttcatctacacactctagaagattcctgaggagaggtttattgcccaaaggaattcagtggaggtattttcaggtttggctgatttccaagagccccctctcagggccaaattatccaattccctttcttggtgagttcaccacacttcattcattcaccaaaaatatgcatggagagcctaactactacatactaggcactgagcatacagtgctaaaaataaaaaaagataaaatcctagtcctaatgtaggatacatgcattaaacatatgaacatatgaaccctgtatttgtcagggttcttcagagaaacataaccaatag

SEQ ID NO: 41438 - DNA, 1772 bp, Homo sapiens
agattagggatgcctcaccagtaagcataatgcaaatattccaaaatccaacaaaatccaacatttgagacacttctagtcccaagcatttcagataagagatactcaacctgtatatgtgtatgtatacaggttgtgtgtgtgtatctatatatacagagagagagagagagattgattttaaagaactggttcatgcagtttcgagggctggcaagtccaggccagcaggctggaaattccttcaaaagttaatgttgcaatcttgagtctaaaggctgtctggaggcagaatttcgtccttttcaggggacctctcttttctcttaatgtcatcaactgattggatgagaccggcccactttatggagagtaatctgttttacttagaattgactgatttaaatgttaatcacatcgaaagcacaccttcacagcaacatctcacctggcattgacaaacaactgtgcaccatggcctagccaagttgacacaaaattaaccataatcccccacctccaaataactgtcatttcaatttagtggctctcaaacttgagcaggaatcagaatcccctggaacacttgtttgaaacacaattgctgggctccacactcctgattcaggaggtctagggttgggccccaaaatttgtatttcaaacaagtcccgggtaacgctgattctgctggtccagggatcatactttgagaatgataagattacataattcagggtctgacccttagcctcgtggcccagaaactgattttgttatcataagaaagataattttatttatcagggatgtacccagtaaaccatgattccaaacctgatgtgtaaaatagcaatgccaatttattgatttatgataagcactaaaactacggtggtgagcagaacaatcctgtcagcctgggaggggcagtccatcctgtgggcagctccactgaaaggtgagcagtcagtaattggaaggaactggggatcccagccaatgatccaaaacaggtgatttaattgctgcaaccgctcccaccgccagaagggtcatattctcagttcctgcccaaggcccccctctacctggactttatacttggattaagacaggggcaactttggaggaatggatgttttcagttgaaagctttggtatttactgggctgaaagagtgctcctctctgctcctcagactctactcagcagctgggctcaaagttcatagaaattggaaatgcttttagtgaatcattaaaatgttaccttttacagaaactttttattggatataacttatactgtttttatgaaagaggaacttgagcagcattagaatgtgttaatgtatgtccttcatatgctcggtttcctttcttggtaataatttgagtgaagttacaatctttctgtaaaagactatttccagctgggtgcagtggctcacgcctgtaatcccagcgctttgaaaggcgggcggatcacttgaggtcaggagttccagaacagcctggccaatatggtgaaaccccatctctactaaaaatacaaaaatttagctggccatggtggtatgtacctgtagtcccagcgacttgggaggctggggcaggagaaacacttgaacccaggaggtggaggttgcagtgagccgagattgagcccctgcactccagcctgggtgacagagcgagattgtctcaaaaagaaaacaaaaaggctatttccatctttctctgcacattgagaggacctgactttgaaaa

SEQ ID NO: 41439 - DNA, 1143 bp, Homo sapiens
aaaacaacaacaacaacaaccaaaaaaaacagccaaacaaggcttatttttccagaggcttgctacagttttctatgcctagttggctctgaacacattactaaatctgagcttttaaattagaataatcatgagttaaaacaaagtgaatttaaaattctttccttatttcttgaacttttgcttttaatgatagttgcaaagctcctggaattttccaccaagttatcttccacttggggcctcatgtatgcaaatgagaggagttgggtaatgaagagggagagggagacactgaacagggcaattatttgacctacattcctttactctggtgttcaagaggctttattcatatttgtgtgtgcagtcctttgtaactgtttgcaaatttcgtctcctcagacattctttcttcctgaggtaatagatgtgcacaccactggggcactcagacacaggtatgctgtcttggcttctctgttagaaaggaaaggctaaggccactacgcagcacagtgaaaagaagcagacttcagggtccccagacttgcatttgaatcttaaccctgggcaaattacttcacctcgctgagcatcaacttctctctcatctgtgaaataatgaagtagaggattacaaagaggatggcactgaacctggcacacaaaatatatgtttatccaataaaagtctccttgctgccttcttgaggagtgccagggatacgggtgaccggggatacaggtgtcttgtcacaagacggacaagcctgctggccaactgacagacaatccaacaggtttaagtgtgataataagggaatatgtgtaagtgtgataataagggaatatgtggtagtggtgagaacgtatggaagacttaagctgagacctgatgagtgagttaggagcttgccatacagtctggtgggagtgcaagagagagcctggcacacagaagtttcgtaaggctgcctaggacaggagggatgggttggggccagattaaaagggccttctcagcctcattttaaaatttggactttatcctaagaatagtgagaaacttattgcagcattttaagtggagaagtgatgcaacagatttggattctagaaagataacttaaggtagatatt

SEQ ID NO: 41440 - DNA, 981 bp, Homo sapiens
atgtagatgaagaaggcattttacatcaaagtagcaccttctatgctcttatcgtatggccccagagtgctgtgcctaatgctaaagttctggggagagaaagtggttgaaaagctgtaaacaaatagttgggtagactttaaagtggggacaataacactctgagattcaaagtagaaaagagcaggcaaagtgcagcattgatcacttggaaacctcctgacattttgtcaccagcttctctcctctatctcccctctgaggatttactaatcacctcagctttgtgtcatcctccccaggaaggggcagtgtggagccgtggtagagcactgcctgggaatctgcagggccagtggggccacctgcccgcagcagagcctttgtgtgaccgtagggaagcctggggcagggaaccactgcccctgctaccagcatgctgtctgtcatcagcaccaggagctgtgccaggggctttgcaatcctgatcttatgcagccttcatactgcaagcagcacttgctggagcagcctgtccaaggtcacagagcaaaggtcagctgtgtccagcatggaggccctgctctagtccatggtcatatcacaggtccttttcctttttgacagcatttggcttttgtagattaacaaaattatatattccaagttcttaattttaattgaaaaaaaattaactgtgtggtccttaccctctgtcttagttgtgtattgctgtataaataatagtttactacagtttaaaaaaacagacatttactatctcacaatttctgatcatcaggaatcccagagctgcttagctggtgtttgtggcacagaatttctcatgacactttaggcagaatgtgcattggggctgcagtcatctgaaagcttgactggaactgctggagggtcctcctcattcacatgactggaggctggagccctcaattcctcaccacgtggccctctccgtgg

SEQ ID NO: 41441 - DNA, 2647 bp, Homo sapiens
tataaattggagtaagaagtaccttgaggtgaagcttgatggggtctccaagacagacagtagacgtaaaggtgctagtgtgggaggcaagagaagagttcatacttagagcaagatctctggatctttggactgacagcaatgggcggtaggtggtcttatgaagaggatgagggtcatgaaggaaacctcctcgaaaattacagaatacccctcaggtgtcctacagttcctgcatctcttaacctgctttttctaaacttgaagcagttatgcttaaactcatcaacgacctcagttagattcctcttctgtagtgtggagttaatcctatggtagagctcagtgttggagcaaggacaaatgatgacaatgtcagggccagcgtgggtcccagcagtggtgcttggtagaggtcagtttcctcctctcctccctcagctccctcttgaatttcccctcctatgaagggaagttgtctttccattggtatttgcatgccaaaagtcgaagatgccttttccttcccagactgaaaacctatgtaattctcgacataaatgactgtatgtctggtttctctctacttccatctgcccacctttgacaggcttcatgggtatgtgacctccgtaggctttgaaaggccctgctcttggtttaatgttctgctgttaccaccctaaaattcttaatgttttaacaatggttccccattttcattttgcacagagccctgcaaagtgcccattctaaaccctaaaaactaagtaactggtgaaacatgaccacgggacagtcaggtaatttgatttatcatcccattaatgtgtcagcatttcaggatgaagggtattttgaaagtaatggaaaacaccttaaccatatcctttgtaaacaagaacgtaattgagtacatctaaacccctatgaacgcccaacctttaatcttattttttcagcatgaaaaaacatcatctctttcagaaagattcttcatttattgtcattaaccctcatattaataaattgaaaatctgaaagttattcttaacttcaagtgaagcttgactgaattattattattcatgccaaacagagcattgaattctttctttagagcatttcttacctggatgtagaagtgctcttgttaattttacagcagacatctgtttcctccaatgtgtatgtccaagaggtgtagccttgagatgaggaaagaaataacatgggcagggcaggcatgcataccagactggatcgtcatttgtcatttatctggacagaaggcatactggcctcattccactcaccagctgggaagaacaaactccctacacagatatagccatcaaacttagattatggtgactaatgctaaatgaagagtccacacgggctttctaggttcagcagggccagacctgtactctatgtactcttgacccagattcagaattaatttatcaccttgacaggcaaccaagtgcctggagtactgaaactttagtagttatttaatgtgggaatcacagtaatgatgctgtaatataaaacagcaaatatttcctagagggacagcatttggattggagagagactcacaccacatccacaatttcttcttcaaacattagaatactttttggaaagcgacagcctaaattgtaggttgtttcttggttttaactgtcatttgtatttgtttgttttcctctaagaaaacaaatatgctctttttttcttttctttttaatttactttttttctctcacctaaacccccatagtagacaggcaaatttaaaagtatgtctttcaaaaacccagtttgtcttcctactggccattttgccttctattctctgattagaaaactaattgtgatactttattattctttagatataagaattctgactttttacacttatcaatagacttttttgaagtgtacaagttggcaatattaagttatttgttttgctgggctatttctggaactaaagatttatcacataaggtgacaaattgagaaaaggaaaaaaactaggcttttttttcttcttaactaatttttattaaattgggggcatctagttactgcagttgagtaagtgttagccttacctgggaagctgtaaatgattattttgccctcaagtgcagctggcagagtcatccatgtccctgaggcacatctgcagagtgagtgggcccctttgagcctgcccaagccacagctcacagtgaggagggaagtgtagcccaaaggtcttgccaggcttagctcacaaggtggcagtcacttagcatccaggaaagcttcattcattgtcttgaggtgagcaagtggccacttgaccagctttcccacaggtagtcaatagaactaatgacagctggtcacaggcacactcctgccctcgatcccaaggccctaaagtgagagaacttctcgagaatttcattcattccaatattttttggacacctactatatgcctggcactgtgccagatgctagatgggcaatggttgacgtgatacatatggcccttgctctctcacggagcatacaatctagtggagcaaatcaacgttacaaatcccacaaattagagggaaaaaaaaacagtatgcta

SEQ ID NO: 41442 - DNA, 1972 bp, Homo sapiens
gcagtagcccaaggaaacacacctaataagaagtgcagtcaagtccagaaccaggtctttgatttgatccaaaattttatcaactctagaaccatcaaagatggcctagattgcaactttggatgaattagcattagtgtaacctttatatatatatatacatatatatatacatatatacgtatatatatacgtatatatacgtatatatatacgtatatatacgtatatatatacgtatatatatgtatatatacacacacatacacatacataccaatgtagctgaagatttatgtatttatattacagttattaaaggtattattgaaatgttaatgagaaaatgtatcgtacttttgacatttttttttcataatactatcccaaacagattaaaaaacacaatagtccactagagggcacctttcttcaacatcacggtctgttctcttccccagtactctattaacctggttttaatcagccactatcgcctcggagcattgaaaagcttttttattgtcagagattccatgtactgctttagcaaaatgcatttgtattggtaggcaaggctatctgtgctgctaagatacctggaatgataaaggggaagcatgacccttattcccctacacacatacacgcatgcacacaaactttgtgttagtttgagcttagcccttcttgacatgacaacccaacttatttttatttggaaagtcttgccttagccctggcaaatttatactacttttcactttttctgccactgcgttctctgactccaaatgctggaaaacagagagtaaaagagatggtctttaaatgttgacataaattggggacgaaacgatgtagacttcacccagatttacctatccgtcagttgctgtttttctacagcatgtgaatttcagttactgttgggcataaaatactatgggaaaaataataggattgtgtccaataaacaagtactctggcagattctattgaaatataaaaccatctcattattctagaggcaaagggaggctgcctgctatagcattgcctaatgtattacatttcaaactgtgtctgtagaaacccagggttgctggagatatttttagagattaatttgtacctattatatgagcggctaaacatctcatccccaagccccccaaaaaaaatcaaactggaaattaaagagttgtgaaatgtgaaaataattcagaatacaactacaaatgagatagtctatgggactttggagaaaagtcctgtaaagctgtggtaagaagaatataacgtttcagcccaaactgtaatgatttaattccctcataatctgtgcaaagtatttctctcaacccaatttttcgacgtcagcatatttaatttatcctgccaggtgaagtagtctttcacagtcctcaaaatcaacgaacttataaatatgtgtcattgaccatgaaggtggtagctctgtactggcctttctaaaaaattcatgcctgtgcatgcccaagcaataaaattacgcaagttgcccagaggcccagcttggttcagtgccaggttaggatcaggcacatctgtttggcacagtctctcatcaagcctaacagtcggttgtgcaatgacaagcaaacacccaatatatcaaatgagaaggtactgttatagattaatgacctattgtaagtttgggtactctgtcttatcttgtttataatcagaaatatgagtaattgctatatattgttagtaaaccaattttgaataagtttcttgctactttgcttttaagattctggacatgtttaatgaagaatacgcagagattgcaacataatccattaaaagaaccattaccatttacaactacttacttgtgtgaaacaggattctttcgatgtggcacaaccaaacaaaatcttattccagatgtagctttacatttagttctatgtaaagc

SEQ ID NO: 41443 - DNA, 1095 bp, Homo sapiens
tctctgtgttggaagtgaatttcagtctcgtcctggagctcctaccagatgagacttttacatgagattttaagaaatgatcagttaaagggggaaaaaagcaaacatctgtgttacaggtcagcctttaaattatactgtttccgttttgtcatgggatacccagcttttaactcagtagtgaagtcggctgggctggaagttttcacatctatttttatcccacacaatctacccctggttcagattgctagtttcctcacagagctccagtccacactcggccctgaacgcggagttgaatcagctggctgaagctgagtgcctctcttttcctttcttgggaacaggaaaggtgctgtggagaggaattggggcgggatcattcaggggaaggtgacagcagatggtgggaaggccggagtcagcaagccaagtgtcaggggcagagtgagcctcagaaaacagcagctgcccggtgccagagcaaggaaaggccagggaggctgggcggggcagtgtctgtgggacagagtggggcaagaacacacacggccgggcacagcctcttagccagctctccatgtcagtatgagcagtaaccagggaactgggcaattggcacatcagcctatcagaattcatgggaggttatttcttaagtgaaattctaaagagttaaaggatgaatttggacagtgatggaatggatgacatcatcagtcaagaatcctcattggatatggaggggaattataaaaaggtaaggggggagagctcttttgtttataaacaattgaaccatttttctaactggagaaagatcacccttgaggagtggccaaattccacactcagtggctattgccataatatagtcaggaaaaactaaatgcacagaatcaaatgcattaagctaggaaagttctttctgcttttcccagcttatgttcattaatatgttacagcagcaactaaaacacacatgttgttattctgaagttgaaaaaattctattatgcatttaactgctaggcaggctttttatgtgaaggaattttttaaaaattattgacatatatttacagttcactg

SEQ ID NO: 41444 - DNA, 2222 bp, Homo sapiens
attactagaatgtttaacctatttttccaattttttgtttgattttattggcaatgaaaaatatcaagttttagttaacatgtttggggtttttaaaagttgatacagtatctgttcatcttttccctgcccttttttttgaaagtcagtaaatatattttgagaatgttttatatggtaatgttctggtaatcacaggcccgagtaaaaatagctttagttatatgggtgaggtcatgaaattaaactacaagtatatgcttatctgtccacagaagcctaaaacacacactatgtccttccctcttcattatttgccacaagtcaagtgtagttcacaacatggcataacatgaagaataaaatcccttccatcatgggcctggaaatgaagacctctttacctcagaggcaaatatcagttaatgatagaacagtaaaacttgctacttaatttttaatttgatcaaatacatcactaacttttttcccaggaatgacatatagaaagaagcttctgtcgtgatagatccttacgtatagtaatgtaaaatatggtagtttatatcttatatacatatatgtgtgtgtgtgagtgtggggactgttttaagtatatactgtacttcctagaggagttcacaacagcttatgttctttctccacaagctgaaacttaaatatgtgaaagcggtttcagtaacctgccatgttgccgtttgtgtttttcatcccttgtgatccccaagacaggaatgagcaccaaggtgatagttcgctgagtctcataaccctaacacttcccagctgtccgcttctgccggaagcgatgtgcaaaagatgcttgggacactctgccgtaagagtcagattgcttatccagctctgcagaacaagtgtagccatctcatacttctgctattttcagtgtcaaagaactggtcatggtgtcctttgtcagaccatttctcagatagaagaggataggtcagtttgcacttaggaaaaatgaaacataccattgctaatgcattaacaatgaagtcatgactgttctagttttttcctacttagaaacagagggaacccagatgcctggaataagtaagcagtgatacaccagcaacctgagacagggctgactaaagctacagacatgtacggctcaaggagctttaaaacatcaacaacaacaaaacagaattgcactgtgtaacccattatctaacaaaggcagtagaatgccgcatatgatttcagtatctgataggttagtacaaaaaaactgcaagatgaaacttctagatgtgtggagtgctcagagatcagttcattatgttccggatcttaaacatgagggttgttctcttgtcattccggccttttaaataccttcctcaggcaaagtgttttcaaatgtttatgtgtatcgtgattattatgaagacttcattataattatccttcttttttaaacccactctttgtaattttactatgagctagtgaaacagggcaacatacacttttttaaaaatatgaggaataagaaaatagttacctagtataaaaataactttccctaattagaatcttccttttctaattttttcgctaatatttttcctgttttgttggctaagtagaaaattaaattagatgccgtaaagtggggctctgcaggcttttttgaccttgcattcatcagtaagatggttttgagtccatgcctgtaatatacatatattttattcagaaatagcacccaccactataaaatacaatgtgtgtatgtaaaacatatacacaaatagatattttagagaataaaatgtttaaaatataaatataagtaaaagttgtaattttttttttatctcctgtggtactttcaccccattttgaggtcaattgtcaaaaacaattaaaaaattgatacatccctgcttaggtaccatagaattccctgaaccaattgcactaataaataccacatgtgtatagggattattttacagggttgttttaaagtcagacaaacagccttcagggggaaaggtcactttctgatgactaaaattagattccaccgaagcaaaggaagaaaaagattatgcttctgttctttttccgtggggaaggttttgactgtaagaaagatgtttcattaaggacctctggtttattcaatagtaatagtaaaactgccctcaacagaaaac

SEQ ID NO: 41445 - DNA, 2328 bp, Homo sapiens
tatagaatggctgaataaggacacagctctttcattgggatgcatctaattgaaagtatctaggagtcttttctcttgggctatgaattgcgactgagagaaaccctccaacctcatcttgaggcattttaaacctggctgccaatgttttaagactctagcaggggaaagataggaactgtagcatataaaattttacttaatttccttgatttcagtaaagcatctctttgccacctcagctgtgcctgagcatgctccagtctcaacctcttaagacaataaatttcctgattctgccaggccacaggtggtcagggcagatagcagggcaagagggtcctttcaggtgttaaatcaatctttgtgttcggtcctacttcactcccctactttcagctgtatctgagcatttcgaggatcctgcagtagaaatgcatgtgcttcctctaccagcctcccctgtgggcacatggtagattgaggtagttaagtcaaatactccccacccatctgcatattatcttctaaaatttcatcaaaatcccttgtgtgctgttgtttccatttcctttttctttgtgcatatagatttgtaccttctttttttctttaatattattttagtaagatttcagaagtgagagtagatacttgtgcttaatatgccatggttaactagaaggttttcactgtttttaatagcacaaatatgttgattaaaaccctgtgtggaaacccagcttggcagtcctcctttggttcaggaggactgaaggagagagactggaatacctctgcccagaaaatgtgtcccccatcctaattgcccctttccatgcctgccctttggtacctctctccatccttcccctacaagcccctgaagcctacctgaaactcttctggcaaagcagaatttgaaaatcactgagtcatctgccccctgtggagacacggatatctaaacacaaatgtatttcacagtagctcataacaagctacacttgttgactcaccataaggaagattatttatatcctgttctttctgatactttcatctccacattctgggatgagatcatcttctgagaacacgatgactgtttgggatctctctcagaatgatggttaataatgagactacatatttctaagaaatatcactttatccctataaatttaaagtttgcaaagactgactgtcatcctcctcatcagtaataatgtaggagaaaagcctttagaatgttcagttgcaattgtgtaacccatactccctatccctgttagaatttgtttctgctgcatcactatccctgaaattcttcattgaactggaaataccttacctcttacttacaaaagtacttgagggatgtcagaacattgagttcaccagtatggtactccaaaatgtaccagagcacataatagtatttgaaaaaccattaggtaacttacagaaaagctatcattttttatgccctcctccaaggattacctctagtattctaaaatattacacaatttcaacgtgaaatagattttaagtggatcttttgaggagtaataagattaaaaccaggtaaacctgatatgaatttactactctgaagagctcaatgcccaattttaaatgaggctggagatttaaaattaattgaccaagcagtggattcctaaatgctaagcttactttttaaggcagggcctactgaggtgagtgggatctttggcaaactaatggagttctgtttatgtttctttaaaggctgtatatttgcctgtagaaactaactccatgcacagtatgtgagaaattatcaagtaacatgagggtctgggaagactggagtttcaactgttcctgtgagcgtgagttcctctcagttgtctgttgggttttagccccactggatttttctagatgttgctatctcctaaagcacttcttaagagtgacaagttgttaaatgaaagctaggcttacaataatcccataaagacatttcatgcctaatagtgcagcaaaataatatttgatgttgcttcataactcaactaattaaatttgacttatactgaaatgtggcaagtagagtgtcatttttttcttcaaaatttgctaatccacacattatcagccctttacaaactgaaactgtataacctttgtcattttttctatttaaaagtgtttccgtaaaaagttttttaaagcttaaaatgaaatgagaaaaatgaattatctatttttgaaataaggtttctaagaaatattagggttagtcatattcttgaagaaacattttttctattatta

SEQ ID NO: 41446 - DNA, 944 bp, Homo sapiens
atttagcaatttgggataaacttagagttgtgcaagcatcaccacaatccaatttgagaatgttcctatcaaccagtaagatcccccatatgcccattagcaatcaatccacctcttgtgtctcctccacaggtttacagcctgggttagccagagatgtgtggatagcctaggccttctctggtctctccctacatctgctcagaaggcagctggggtgtgtggacaactttggggtcaagcccctttggggttgtctcatttccagcatatccctactaaatttctagcttatctgccattctgatgctttccccaaccaggactgcaacctcaggttaatgaatcactggccttccctattcacttgtccctaaggtcactgtgtcaccagacaacatggctgggagtaggtttctcaccctctgccaaacctggagtcagtttcttccagcaatcaaacttcaggtctgttcagtctgcctcatgctgccagaacctttgtactgactgagctggggtggggagagaaacagccctggatgagaagccatagactcccactatttttgcagaaatagagcgatttttcatggaaaaaaaaatgcttctcagtttgttgtttgcctttggtcattttctagatttctgaaatggctgttgttgacaatgtcatctagttttatcactgtttccaaggaagatgatttgctgacttgctcattctaccctattggaagtctggaagtctgggtttgatgagaaacagttctcctttgttcagcttctcagtgttccagcagctttgatccttggacttcaggggacattttcctataagtgatgatgcctccagaggaaaagccagggcccaatgccaccttgccagaactgtcaatcaggaagtagccagacatctctcagcatacacagttggacttggt

SEQ ID NO: 41447 - DNA, 2196 bp, Homo sapiens
tgagtggagaaacttcaacagatgggttgagacagatctgcggattagatacagggccctcatgaaatgtcgagtcaaaagtcccctctggggtctatcaggcaaagcactccaactggccctgagcaaggcaggcctgtggaatctggacagaggcctcaagcctgccatctctgagcctgggctgcacacacaccactccttgccttgcagcacatttttgcagctacttcctgctgtcaaagaacagacagactcatctcctttgtgctgatgtttctgggtcccagccatgtcagcatcagcctacttcatgcccctgcaatacaaggaacctggtctgaaaagccttctaactctgctactgctttcagggacccacagccactttaaaaccatcactcatcccatatttattaagcatacaatatgtgccaggcattgtgctcagtgccagagatcaagtggtaaatatggcaaatatggtcccctgctttacagaattgatggtccaatggggacacaggcaatcacaacaaagactaatgattatagggctaggaaacctagcttagtctggggggccaggaaagactttctggaggaaatctgagatttaaaacatgaatggagtttaaacaagcagaatgaagaagaggaaggagaactgggcgaaagaggatttgagtcagagagaggaacacatgcagaggtcttggtttgtgaagaaatcctcagcttttaattagggaatgctgtgaagaatgtgagtgataggatggctatggaatgtggagaaaggaggctggcaggacaaggatgggcaaggtcaccaagggcttgtaaaccaagttagaagttgtacttatgaggacagcagaagccagtgttgggttttatgtaagcaaaagtgtgtctgactcagcattccatggtcatgattcgagtataaaaatgaactggcccagccaggcgaagtggctcacgcctgtaatcccagcgctttggaagaccgaggcaggcagatcacctgagctcaggagtttgagaccaccctgggcaacactaaaacacaaaagagttagccaggtgtggtggcacgtacctgtagtcccagctactagggatgctgaagcacgagaatcacttgagccctggggctggaggttgtagtgagccaagattgcaccactgcactccagcttgggctacggtgagactgattcaaaaaaaaaaaaaaaaaaaaatgagctggcccttgggcttgccgtcacctcctcagataggcctccgctgagcactctagcttgcctggggaggagggacagagctttgatgtgaatggaagctggaaattgtgattgtcccaggcgtgactggtaagttatgggatccaactgggctatgttttaaagacttcaacatggctccgtcgatcacatgtcttgcaaaaaaccaagccttccatttcatagccaaccaacagaagctccatctggcccacttgctatagtgaacaccagagggaaccaaagccagacctttgaggaagaagtgtgaggagggaggtggatgtttcccataaaagagtaaacatgaactttcactttctcttggactccagggaggtatcaacagcaacactaaaacattgaaacagcattacttccgcaaacaactcaccctgacagagtctcattcctcaaaaagaatggttttaaaagaatggtgtgaactccacaaggttcagcagtaatagtgagggaaacacaataggggaaggcctgtgagctcatcctgtgtggggaggggccggcaggaagtccaggccctgccctcagtgacagcaggactccaacactcattctggaagccaaaataaagaaggggcgctgacatggggttggttgggagaaagctgcttacctcacaaagagggaaactaaaactaccacaaatgtgaactatggctctgtgagtggagccaaggggagcgggatttcctcttgctgttcaggaacaagggtttcatgaggcaggtctctgggccagacagagccctctgtttctgcctgcacatggcttcatcctcagagggtcttcaggaagaaatgaggctcgagtgttcaaaagttcccattagtctttacctttgaaaggccattttgaaaagactgatgaaaacttgacacgtgt

SEQ ID NO: 41448 - DNA, 618 bp, Homo sapiens
agaagttgtaccaatttgcggagatagttgtgcaaagtacttgaatgtggaagccatagatgctcacagcatcgtcactgaggaccttacacaaatagatcggaggtagaccaattccgggattagttaattcagtcacagatcatcaagggcccagtttctgctttccattctgcttttctcagtgtgtcatctttattctcaggctgtttgtcttcctaataactccccatccaaacatgagaatgtccagaaagagagggggtaactggcttaggtgttctttctaaatttgcttccataaaagaaaaggatttcactttcttctctccacatacacatagcccttctcagtaccctatctccccaacagagtcatatcacaattctactagagacatattcagtatttacattctgatgacatcttagacattagtcagaaatgagtcagaggcgatactagtatttatattccctttcctgtacagctttgtggggttttttaaagttaataattactaattttatttttaaacatactttctattgtgtcaatcacaaagtctctgtggatcatcttaattcctcttaaggtgtttagaagcgtcaggtatt

SEQ ID NO: 41449 - DNA, 1273 bp, Homo sapiens
gctcccgggagcctttgctgactcctggaccccgttgctccggctgagcgtgggctctttctctaggtctttcctcccaggactctgtgtattcatcctatcgttaaactggattctctacaagagtaataattgcagagtcagccagctctcatcccttttcaggtttcagaaaagacctgtgaacaaaacgccttgagtctgatttagtgtggcaatgccccaagggtcctgttctccctgggtgtcctgcacctggtgcaacgtcggcctggcatctagtgagccatctaaaggaacgatgatgagtgaatgatttgcctaccccttccagtactaggctggaggtcgtggttagggcccatccctacgcaggacatgcaaagtgggaggcactcctctctctacgtcggcagggggcgctgcacagctgcggggcggggtagcttagacacggggcgtccggctaaggccggggacccagggtggtgggcggggtgtcccgcccgcctgtggaccccgcgcagtaactgcgaacatttcgctttcattttgggccgagctggaggcggcggggccgtcccggaacggctgcggccgggcaccccgggagttaatccgaaagcgccgcaagccccgcgggccggccgcaccgcacgtgtcaccgagaagctgatgtagagagagacacagaaggagacagaaagcaagagaccagagtcccgggaaagtcctgccgcgcctcgggacaattataaaaatgtggccccctgggtcagcctcccagccaccgccctcacctgccgcggccacaggtctgcatccagcggctcgccctgtgtccctgcagtgccggctcagcatgtgtccagcgcgcagtgagtactcagcccgccaggtctttggctcgctcgggtgcggaggggcggctgcttgggaagagtgggtagaaactcaagtctgcctaaggagagactggaacagcagcagccgtctcctgcaaagaggaataagaataggggtctcaccgtgtgctaaatagggcatgtctcttttcatctcgaaacagcctgatgagctatcattatgcccacttcgtagaggagaaactgaggcccagcgtgggagatttcctgctttcctgcctagggtccctcagctacaaacagaaggcagatcctagccagttctaaagtcaggcttggccgggtgcaatggctcacgcctgtaatcccagcactttgggaggccaaggcggacagatctcctgagg

SEQ ID NO: 41450 - DNA, 1238 bp, Homo sapiens
gctggggcagattctggtgctgtgccatgcttggacttcagctggtcagagctatggttattagtctcaggaccactctctaatagaaaaatggtgcctgaacaacagataacactgttgcaaagtcaagatggcaagcctgtgcaaacccaagaaactactaaagcagaggataaaatgtgaaggaatgtctcatttattgatcgacatctgcagcttcctgaggaagttttaccaaaatggattgtgagactggctgaggagcagccttctagactttgaatgctgcggactagaagagcatgtctggattgctgcaggacccacagcttattatggaacgataaaagatgcctgtgtatgatcccaacacatgacaggttgtctctgaggggtcagccagcctgctggaatggagaaatgccgctgtagtttgtttaccctgagaaggtaaatcaacatttccctcctttacatgctaagtggcctcccaaaatgaggcagctgatttgccacatatccaatcccggctgtactggctttataatgatcaggttgttcatccccctcatatgtcccttaaccaggtcacagcacctagatagtgatgcagatgaatgcccaaattggagctcagcccagaaaagttcttggcttcacacagaaaagaattcctgagcaaactgacagagtaaagtgaaagcaaagcaagtttattagaacaagagagtacaagaaaatggctgttccgcagacagcacaggcttccccataggcagagaagtagtcgggtattgctggggagctgtgtttatagctactccttcatcataagctaaataaggggcaggttattcacgaattttctacaaaagaggttgggagttcctgagactgaagttcctccccttttagatcacgtacagtaacttcccagggcatcgccatgatatttgtaaactgtcacttgctggtgggagtgtcttttagcatgcaaatgcattacagttagcgtgtaatgagcagtgaaggcaactagaggttgcttttgttgccatcttggttttaggtggtgttggccagtttctttactgcatcctttttgaccagatcctgtttcaatcagctgggttgtgaccagtgttcagaaaacaagtcctgctgatctcctgcctcagtgtgattacgcgagctccttttgcacacgaatcccatggaaacttactgctgcaaaatca

SEQ ID NO: 41451 - DNA, 1135 bp, Homo sapiens
accttcacaccaggaatagatcagaataagacatatcatgtggaatacttagcaaggactgttagtatagttagcctaccttcagaactggccattggccagctcccaggagacaacctctaagcccttagaatattctgccggatgagagtgcttttgtatggctgaggtcttgggccatgctagactcatttaaccacataggtttatgctaataatgttatatgtagggaatgcctatttttgctctgggaaaagggctggtgtcttgtgtctgaggccagtcacacaggggctacatggctgatccgcaacaaaaaccccagtccaatgtctggatgtgcttccctggttgacaacacctctcacacgttgccacatattgttgctggaagagttaagcacactcttgtgcaactccagtgggaggggacagctggaagcttgtgcctggtgtcacctggactttgctccatgtgccttttccctttgctgattttaatgtatatcctttcactgtactaaaacatgtttcacaaactatatatatttagtaaactacaaccatgagtataacagcttttctgagtcccatgagtccaagtcaaagtcacatcaataaaaggacttttaactttaacggacatatgaggaagcaggtaggacggcctcccttgcttgctcccacagacccttggagtgccccaggccatggatgacacagcagtgtcatcagtggttttctctccacccagtggcttcttcagaaacactggggtccttgagaatagagatcgtctcttatctctgcttctgtagtttctggggcagcgcttgggatatagtagatactggaaatgtttatagtatgaatgctttacaaaaatatgcttcagtcttacttagtttgtgaatgttaatctcaaagagactgacacataactttataagataatactattttacctaaagaatgcttccagtcacaagtctgaagtgaagtacatacgggcagatgtaggatagttttcttagcactagcatgcaaggtagcactacaaaggtttattgtgtagtgcagtgacaaaagttatccaagtcactgttaattaaagacatatttttattagacgct

SEQ ID NO: 41452 - DNA, 1872 bp, Homo sapiens
tgataagctttatcaaagcaggtgtaaaagggcttctagaaagtccttggacttttttttttttttttgatggagttttgctcttgtcccccaggctggagtgcaatggcgcaatctcagctcactgcaacctccacctcccgggttcaagcgattctcctgcctcagcctcctgagtagctgtgattacaggcacatgccatcacacccagctaatttttgtatttctcgtagggacggagtttcaccatgttggccaggttagtctcgaactcctgacctcaggtgatctacccacctcgacctcccaaagtactaggattacaggcatgagccactgtgctggccgaaagtccttggactttcttatctcaaacatgtaagcatggacctcctctctttcaggtttttctggccctattttgtctgggtctgacaaacgtgatttcatcttgctatctgcaaatttcacatcatgatcctagtaatcattatataagaatttgggttaccaggttatgtaggaaagtaaatacgttattaaaatgccctcctgagctgtccatttatttaaatcatcccccatgaaacatccctgcccaaacacactagtacccatgccagctatcaatcaaagatctggggtcagtctctcatcggctgtcagatactgtaaatgtacctgccactttcagatgatattcacgactacaaagactactatgcaatcaattgcaaagtgaaattgcaagtctcataaaagatgtggttcatgaagcaatgagtgtgacattggagaattatttgaatcacatacaaagccgcaacagacaggaagaaataattagcaacaggggaagaggaaactgaccagacagatttggcagacatcacagttgactcattcagtatctcccaactttgcttgccttactctgctttaaaggctggaaaagttgaaatagcctctttccctgtcttccctgcagccagcaggaactagattgctcagattcaaatctggctttttctcttacgagctgtgtgaccttgagcaagtcatttaacctctctttacctcagttttctcatctgtaaaatgtaactgcctcatagagttgttctgaggattagatgagttagtatatgtagagctctaagaacagttcctggcacacagcaagtccacagtaattgtgaccaggagtctaacagatgtagaagtcgggttgcacacgtgcgcaactcttgtggtggaagtgaggagccatggttgacattccctcagactgcatattttggaggagggctagttccctgtaggacactctggatgctgggtgggccaaaacctagaggtccaaaagttctctgagatcaccagggacagctcagggtgattgtcatatgtcatgtctttagtcaccagtggcccaaggagaagatacataactgttgaattccagagtcatcaccactgctatcttgcaaggctagttcacatccaaccaagtttggaagtgtttttcttcctaccctgatattccccttacattttcttatgcttacttttctcagccctctatctattcacatacaattatgataaacactccttttcccctccataatgttaatctgtcactatttggaatgcataatcttttttttttttttttgtcagagtctcactctatcttccaggctagagtgcagtggtgtgatctcggatcactgcaacctccacctcctgggttcaagcaattctcctgcctcagctccccgagtagctgggactacaggcgcgtgccaccacacccggctaattttttataattttagtagagatggggtttcaccatagtgaccagg

SEQ ID NO: 41453 - DNA, 566 bp, Homo sapiens
tttagacagaatgtgcccacctactaaactacatatcccagatgccttgcaactagggaagggtacatgactcatcctagccagtatggtacagatagaattgtttaggtagagcttctaggaaagctccttaaggcaatggtggacacagtgagaatacacttttttaaaaaaattggcatgtacctttttatattttgcctttccttcttcctcctgcctagagctcaaatgtgatgtctggaaagggagttgatatattgtaaccatgaggcaacaagatgacatcaccgaaccacataccagctccctgctgcctccctctggacttcttttacatgagaaaaaaataaaagttcttatttgtttaagccaccatttcttcaggttttctgttacttgcagccaaacacaatgttaagtgttcttcctttgaaccagtccagtacagaagcagacatttcccagtggccaaagtgtatacgagatcttctgattcctcctgcatcccaaaccacattctctagagtccctgaaaagatggtgactgtgggtatgaaggctga

SEQ ID NO: 41454 - DNA, 1203 bp, Homo sapiens
gtctcatttaccaggatatattatgcggactgatattatgtctgactggagagcgtttcctctattaaggaatgtgaaacagagagcatgtaaatccaccctttaagcaatattaattaggaatgcaaaatgggaatcaataagattactctagttcaacaggcctttaatatcaatcagtatatgaactagtatggatgaattctctatacaaaaacgctgggtagaatacagattggaacttacaggcgaaagcctatgaacacctctcagtgaaaattactgggattttggactagagaattcccatctgagaggcaattactagcttgctatttgacattaattgaaactgcccctataaccgaagaatagaaaataatcttgaaatctaatgtacccatagtatcttaggtgatactggagacacattctactaggaaaggcaatgcccagaagagtttcataataaaatgaaatgtattgagtaggaacacattactgggaaatgcaaaaagttacacagtgtattcatgagtctacctgctctgatggactttggaaccacttgagttgctgccagattctgttgacactcggacagtggcctataaacagctctcaattaaccaacaaatagctgcttggtttatgaatagcagttcaattgtgaacatacaacattttatttgtaaggccattcctctgacagaagaaggtgaaaacaaataagcgtggtgggctgcactgcatgctgtttgcctcaatatctgagtttttattaactcgcaggccatggtcacatggtcaggcaagaaggacagtggaaaactggcctattataggcatgcccatatagggtacagcctcaaggaacttactgtgggaatctgatgggtgcattaaggtatgtcgtatcaatgcctatggggagacttccccttcaaggttcaaaaggtgattggaattgacgagcaaatacctcaggatgcctgcttgaggtggccccctgggtatatgaagcaagtggacactgggggctgcagcaatgcagagatgaactgaatctagaaatgttcctctcaaaccctctgaggcacaaaataccagtaagaactttctgtctgcccatgacagactgcagatggctatagggcagattccctcagaggaaggccctacacatagctggaaacttggact

SEQ ID NO: 41455 - DNA, 3667 bp, Homo sapiens
tctgcttattaatccataattaacaaactttgagaacaataaaattaaaataggacaaaaatgatagtcatttcaaagtcatttgatattaaggaaaacacattttaaatgttgatgggtaatatcattacatgatatgatgaatacataagaaaatcaactgtattatatggtataatctgtattttaccttttaagaaaatcttgtttacccatctatgggagggcagtgagaggaagagcatcaccatcccctctctaaaataaacactgcacacaaaaaccaactcaaaatgaatcacagaccagaatgtaaacactgaaatttcactgtaagtgaaatttttatggcatgggattaggcaatagcttcatcactagaatatcaaaagcagaagcaaattttgtattttttgtagagatggggttttgccatgttgcccaggctggtctcaaattcctgagctcaagtgatccacccatcttggcctcctgaagtgctgggattacaggagtgagccacgatgcctggccaaaatgtcctgatttttaatattgggtctccaccatgctaatgggccagattaagctcagaggtcatctatttgtgatctccaattcttcattgtgaacatgtgcttccaaccagcctttccaagtctggagactctgaatgcattttccccatgagaataaaataagtagcaatttggtttccagactcattatacaggaaaactatagcactaaactactagcactattatcacctaaaccagtgattcccagcctttttggcagcagggactggttttgtggaagacaatttttccatggaccaggtaggggtggttcaggataattcaagggcattacatttattttgcactttatttctattattacattgtaatatataatgaaataattatacaactcaccataacatagaatcagtgggagccctgaacttgttttcctgcaacaagatggtcactgctgggggtgatgggagacagtgacagatcatcaggcattagattctcataaggagtgaatgacccagatccctcgtatgcacagttcacaatagggtttatgcttctatgagaatctaatgtcaccactgatctgacaggaggtgtaggtcaggcagtaatggaagtgatggggaacagctgtaaatacagataaagctttactcactcgcccacccactgctcatctcctgctgtactgcccagttcctaacagacagcagacagctactggtctgtggcccaagggttggggacccctgacatagactaaacaattaacaatgtttatattaaacaacttattccaagtttccattttagactctggaacatctgaaatggtgaatccacaggtagtaaatgggaaggagataacagaaaaattgaaggaagtggaagaagcactgggagggcactggtgaagggtctcgggaaagaattcaaatcttcagactggcacagtggctcacacctgcaatcccaacactttgggaggctaaagcaggaggatcacttgagcccaggagttcaagaccagcctgggaacatggcaaaatcccggctctacacatgtactcccagcaacttgggaagctgaggtggcaagatcgattgagtccaggaggaggaggttacagtgagccaagatggtgccactgtactccagtcgggagacagagcaagaccgtctaaaaaaaaaaaaagaaaaaagaaaagaaagaaaaagaaaaaatcttccatggtggatagtgggatgggcttttagaatttctctgaagatctgtgtcatctacaggcaacaaattgatagaagaaagagaaaagaaaggaaaaacggatatagcacttcagctgctgcacactgtctcagtagtaacagcagctgaaattcttgtagttcttccaaaaggccagtgatctctgaaagaattctgtcaattattcataagtcatttgtcacaaagtgagaatgtcaaataatgagtcttaaaagaaaaatctatgaagccaaaagtaaatccatctgcctactaggagattaaagtaagatttatgttctaaaggtacatttattactaaagtaacaataagttgacttttgctgttaactgaaacttacccacggctacttctatgaactctgaattttctactcatgaataaatattctgccttgagattatctgtagcaaacatttaagcttagaaaagaaatactacttagtatttctggttacctttgctaacattcagttaatatacagctaaagaaatgcaagtgatttgaaccttatcctaaaagtaaacatggttttaaaaataaaatttggaaatttttggaagtcagttatcgaaaatgtttcacaatatgactttatcaaatagttctgaggaatagtcagcaagttttttggcaacctaaagatcagctgatacatactcaggtaaacattaaaactgcttactgttcctatgtaaaatctaattaagaaaatctgttacacagaaaaaatcatatgtaatctaacttccaataggaaggaccattggattgactttatggccactcctttctattaacataaaaaattaagatgctcctctaaatagtgtggtttcagattcttagtgtgtctgttcccctccatcagtatagaaatcaaacatacaacttaatttggaaagggtgttaatattatgaagttatcggggatttttaagtaaggagatactcaatatcttttcgtactatgatttacttaactagacctccaattctatataagatatgcttcaaacgtttcacaattattttttgaaaatatttagcttgtaactgcctttctagagattcactaacataaaaaaaagcccttgagtatttcctatatttcttggcttgaaataatagtgttaccatggtacatcaggtaccaagcaaagaaagacaaaacagtgtaaaatataagagattactgttttgaactcaaccaaagtcagtctcaaccaccgtattagattgtttctaaaggaaaactttaaggcatttttgtattgtataatttgcaaaaatgaaattgtcaattgtaaaacataccttgctgagctaaagttgatctaagcatcccagtctttgaccaaatttttatttgtccatcttctccaactatacagggaaaaaaaaattaatcagtatttttacctatagaaaataaatttaaacattaaatttgcatataagaatcaacagtatctaccgcatattcttttttcttctaggcttcctgaaatcatggaatattactacatatttaaaattcagaaacagtttaaatgacagagtactttataactatcatttaatagaaattacgttgaaacgattttatcaaagtagcttaactttcatgacgaaaatttttatttccttcaatcttagaagacttgtaagtatattactcaaataatgtttcctttgtcactgcagtctccatcttagaattctaagaaaagtgtttccagtgtaataagaagagctgcagccaaattccagtgagttggggactgaatgaagtgaggtaatagactactcttttgaacagctttgctgaaaaagggagaaagaa

SEQ ID NO: 41456 - DNA, 3504 bp, Homo sapiens
ggagcaagtatgagattctgattataaagttgtaggaaaactaacttcccagaaaaatgcacatagaattatgtatacaatgtcaggcgagttatgaactctgaagcccaatcacctaccaccagatccacagacctcaggttaaaaacccactaaaactaagttctcggggaacaggaatcgccaaacttgcttactaattctaattatgccttacccagggcaatgtatacaaacactacttagggaatatttgctgatcgataatttcctcataaaaataaccataacactggcgagtcgttttttccactaaagagccttttagtcaaattattttaaaagtcctaaacctttcactagtaacaccaatgatctcgaaaatcattattgcgctattcacatgtcgactaagctatcacgaatccaggtcttccagttgtctctctactcccttaaaatttagggcttcctccttcgcatcccaaaagctacacccggagccccgctgccgccagggagacagaaaatgatgctccacgaagcacacagcttcaaaacaggaaagatgggatccagtgatggctacaacttccaaacccttttctcaccaggtccagaggtgaagggatttacctcaagttccaggaaagcggtggcgattgctctcaaatacctggtacctccccgtcaccatagtgacttctaagagttacgctcccttcctcttcccgcgatacttctacgcggcacgtcatccgagtgggcccgagaccccgcctctcggcgagcccgccctcttctgaagaggcgtttctggaccactgagccccgcctcccactgtgagcggaaccctaccgtttttaaaaaaatctttttcaaaacttgccaggttgtctttccaaatatttttaataatagtgctgctgctgtagaccacagagaaaagaatccctcgctcttccttttcacttagtagaaacttctaccgcgtaggtcccgccaggagttcgcgcatgcgcaggagcgacaataagatggcggtgataatcgccgcactttttttcaaattagtggatcccagaaatcattgcgcgcatttgtaacgaatttccgttcgagtttgtattttaggcgccattttcgagtgaaggacccggagccgaaacaccggtaggagcggggaggtgggtactacacaaccgtctccagccttggtctgagtggactgtcctgcaggtaaagtacttctcttcctggtcaggttgtcacgctcttacttcctgccttgtccgcgagcgcctggaaaatagaggccttgagcccgagcggcgaagtccgggcttgaagctgccgctgggagatttctcttgctgtcacccctcccccctcggccgctccccggcggcccgggctcccgcgcgcagctcccgggcgccacttttccaagctactcaaatgtctcggggaggccctgagcctcgcagatcttttctttaaaaaatcctagtctctatctggaaaagggcgtctccccctacccctcttccttctgccaacggactagtcaccgggtctcagccttcgctggtgacctttcatggtttactgtccaacgggactccgcctggggagctggagagacaaactcttgccactccaaaattagcaagcgctgccagcgtccgacttgaagttgctagtggttagtcccagccttcgcccttcgcggtccgaccgctgagaggagggagacttcgttatgccccgggccgtcaacggcgccaggagctaaagggcgggcagacgaaagcgggcggcgagtcgccagttagtcttcaccgctctggagagagttgctagccacgggatcctgacccggacacgaactcgtttctccacgtcggtgcgcgcttgcatccctggccccgaaagcgtgggaatgtccggaaatgctggcgtatgggagttccttaattagaaatgcgttagcgaatattatacgcttatactatgggcggacgggtggagagccttaaaaacaacaacaacaaactaagcagttgctcaatcgttgattgatcctcaggcacgtctagattttcccacttacataggtcttgttaagaaaccagtcctgccttcttgccactcgtgtctttcgatggctcccttcccgaagtcccgctgcctctaagcggagtgttaagcggggctctcggaagccggtggaccgagatttccccgggtggggcgggcgcggtgtagcggcccgcgggctgacttgctcccggctgtcccccggccccagcgaccatgccccgtaaaggcacccagccctccactgcccggcgcagagaggaagggccgccgccgccgtcccctgacggcgccagcagcgacgcggagcctgagccgccgtccggccgcacggagagcccagccaccgccgcaggtgagtgacccgccgcgactcggcgggaacgcgcgctgtgggactggcaggcaaacgcgcccagcccgaggctggctggggttgttgagcgcggagttgacatctgaaggtccggtgtcggtccggtagaggctcaggaaagccatttggcaactttgagataggattcccgtgcaattttggtgtaacggcgctggaagggatgggggcgagcaaacgggttcagttgtgaatttttgtttgtgacctgtggaatggtacaggtcacaaacaaaaattcaatatctttattgtattcccgctaaaatcgagacggtcaatcaagagagcaagtggacttttttcccagagacaatcaatatgactatgtgagcatgatgaaaagttttttgaccctaacctcacctccgtggtgttagattgccgttaaagagaagacgataatttatttgaagccactgtagcttttgtgagtccaggagttgggtgacattattaaaccctcgtggcagtgtcgctgaagttcatgagtttccaaaatgaaggttccaggtgctcagcggtacggagaattgcatctagagccttaggatttaacctcctgtttaggataggcagcaggaaatagcttgttacggttttcccagatttgctctatgatgtagtgttttgactcttaagaggtataggtgtatagaattttgtgaccggtggcatttctttcaagaatttcttttttagtaaaaccaagctgaaggtttagtcacccccgtgagtttaagataataacatatttaagtggaaaatatagactcctaagtttcataaataacatccctccatcccctactttaaagatgggcagtcattagttctccgaactaattgcactaatgtaggcttttcccccgccgtttgccttcgttttcctttcctttcactgacttagagactgcaagtgaggaacttgataatagaagtttagaagagattttgaacagcattcctcctcccccgcctccagcaatgaccaatgaagctggagctc

SEQ ID NO: 41457 - DNA, 3059 bp, Homo sapiens
ggaagtattaaatctatttatctaaactcttaaaagctgaagggaagaagtcttctatcaaaaatctcagtggggtgtgtgggtatgcgtgtgtgcatgtgtgtatttaacccatacaccttatgtagacaatctcgggagcagctgtatctaagacaatgaagctttttttttcctttttaaataatcaaacgtgatggtgccattccctagcccaccccatcccccactaccaccaccagcaggtggagggaaaggatactgtagactagaggatgacagctttgtataaccctttagactttatatgtaagaatgcagctggtggtctcctctcaggagggggtaaagagatttgtggacaagctgaaataaggggtatcctttgcctggaagagggcacaccgtgagccacatcttgaatcagctatatccagagtaaaacacaggccgctggaaggcactgttaggatcaccaggatggcctctcacgccgggggtgtttttttcaacggagaagttgtcctgtagtttggatattggggggaggcaggggtaaagcgggagtcgggaagaccagaaaaaatgcctttaagtggagacgcctcgggcctcgctgaggaagttcagagccccactcggtcgccacacgctcaccctcccattcccaccgccctccttcccgcggcgccagacgtcggtgcccgagcgagagccggaatctccgccactgccggggaaggggccgcggcccggccggggcagcaccggccgcacacgcacgcctcctccgcacgcgccgcgcccggcctccccgccgcgcggcccggcccctcgcacccgcgccgggccggctccgccgggcaggcctaggccgcgccggccgtacccgggcacctcgctccccggcggaggcggagcaggcccgacataaacttcccggcgcgctagcagaggcgtcacagacgggccggcccctagcgccattccccgaggcctggaggcggctcccgcccctaatccccacactcggggtcccggcggagaccggccccaggcccacagcccccacccctccggcgtcgtccccgagtttacctccaagtcgcggcctttgttcttgaaattcttgagccgttggttgtccagtttctcgttgtccgccatggccgggccggtgactccttcccccgcccgggccccgcgggatccgccccaaccaacgcgccgcaccgacactcccaggaaccgggccgccgcctgagctgctgtgcccgccgcgccgccgcttccttcctcctctcacctgcctccgccgcggccttctcctctccccgcccgcccccccgccctaaccccagcgcgactgcagctccggcaaagacaactgtggggccgggcggcggcaaggcgacggaatgtgctgccggctgagagggggaggcagcctcgatctgagggccccggcgctgcggccacgcccatcgcctccagcccggctcgcccattggctaaccaggctccggtgcgttcgaccaatcagaaggggcgatggagagccggggcggaaagagcgaacggaaaggggaagcgaacgacgctgggaggagccggctccgggcccggaggggtgcggcgggggcaggcggggaaggaccacgtgccttcggagagaggggttggaagcaatagagaagtagacttaaggggaaaccagcaaggggaaggagaggcccgggaacgcagcagggcgagttgttttgctccactcgtccaggaagccctagatgccgggggttcagggtcgaggctgcgttaaagtaacgttcttttctccccgggcgcgccctgtcttcctgggcattccttgcgctctccgttcgctttgcagagagatctgagcttcgctgtctcccggtcggacgctcgcagctgcgttcccgggctggggctccgtgccgtccagggccgggtctgggggccaggacctgctgggatgacgtgagttgaggaggctcagcggaaagcgacaggaaaggtgggtggaaaaggaaagggcccattagacgaatctgattcatcttctgtgactaagcacccgcaacagttaggaatttaggcagagctggtgatcctgggacaatagcacttcctaggtaattcgtcttaaaaagttaaagaagctgcttgaccacaaagtatgaacttctggagggcggggcccgtggcagctgacagggaatattgtgtgttgagaaaggaaatgagttccaaggataccaaggacaacgttaccagaggcagaaatgacacgagatacaaaagaacgtattcaaaaatttaacaaaacagaaatggaaaattattttaaaatatattgaaatatcaacgaataacacctcaaatgtacagggatatgtaaagcagcaactcgggtcggaagcaaggaatcgaggcgttgggtgtgtttaaacttgacgaggtagggagaagagaccctgatacaaactccttcagaatcgttgactctcggtcctttctagtatatttttttagtagaacaacgtgcagataagtgtttaaaatgcagatcttcctaaggaaacacttttaaaggcaacagaggggaatttttttttaagttaaaatggaagaagttagtgggtttaacagatatgaacaactgagtttcctttgggggagaggcaatgaaaagagccggagtactttagggatcactttggagaggatattgtagtgggggaaaggaaggtaaaaacttaggaagcagagtagtacctttaaagtcgtcagtactttatataccatcaactgggctatggacaacagaagctgtgcctggaaataactcacactgaaggttaacttgaatataaatttagaacagatcttaaatacaaatgatgatgttcattataaactgttattcttcaaagactcatttaactgaagtaacattgtatttgcataccagagcactggtgtttttcaaaatgagtttaggataagaaaattcacttgaaaagctggagtatgta

SEQ ID NO: 41458 - DNA, 439 bp, Homo sapiens
tatcacagtttctgtggctaaggttgataaggaggtgacgaattaatcctttttgcaactcaatcttagtctttaaagattagacaaaacaaaataaaacaaattgggctataaacgtctgcactgttggaaagggtcacatagcattggtttcctaagactcttcactgatgttgcatgtaaaatggataggatccaaggtttagaaatgattgcacaataaaaattagaattctctgttgtggatcattgaataggtaccactcaggttacaatttaaccaaactaaagaaaccaaactatggaaacaaatggtaataagtataacaatcattagagatttgaaacaatttgagtttactttatagtttatggaatattccttttccctcaatgtcatataatttgaatgactgtttaaagtaatcgtctttggtta

SEQ ID NO: 41459 - DNA, 2092 bp, Homo sapiens
tgatttctgcctatgttagtaggcaaatttattagattattttagcagagacagctagttctccaccaaaatttgtgctttcttccactgcagctgtaactagtctgtcaagccatgagccacattggccagcttgctttgcagctaaatgtttcatgtgactcagctcttgctaatggaatgtgaacagaaataatacatgcccttctaaactgtgctttcaggagactgggcattgtgctcctttcctcctcacggtccaggatggtaacaaagtgacctcggaagccacatattgagatggcataacccctgtctgattgtgtccctgaacaacttcatggagcacagcctttcccccctagtttgggacacctactctgaaccattttgttagagagaaataagcctctattccatttgagtgatcatttttttaaagtctgtttattaaaatgggtcagcctaccctaactgatggcagttatgttcttcaaattttagatacttgatttttttctccccagagtctagtcttggtgttatttattcatttgtttgtttgttaatttattaactgtttattctgtaaattttcaattatacaaaagtagagatatcatagtagaggaagcctgatgtacttatcacttggctttggcatttatgttatagggccattcccatatcctatgtatatatgccatatctacatacatacagccatccctgtttcactggtacccctttcctcctctgctccctcatggattattttaaagcaaatctcacaatctcaaacatcatatcatttttaggggaaagttttaaatgtcatgtaagaaacctcctccacctggaggaattccagcacctggaactcagtgctttttgtaaatggagtgttttttgtaaagttgcaaaaaaggccagttcccattgcttgacaacacatgatgaggacagtgagagctgtaaggttaagctcgcctgctggagggaaaggcacagcttattcccacaatctaccttcatcccattcaagctggattttgagcttataaagggacctgacagtgccgggcaggctgaaagtatgaagtgaccagcatgaaagccagggggagtggcaggtagtgtcaagaactgaggctagataacctgggttatctagttgtatgctctttaaccatttactgaattactcagttcttcacttctcatttgtaaaatggaaataatatctattctgtctcactggcttgatataattaaatcagctaatgtatttttaaattaaggctttatataattattggtttctaatgtggaagtaaatgtgagcgatgtttttaatttttatttaatgtttgcctttagagtagaatttgtagtcacttaagccacagggatctattaaaatcagtgttaactgtaggaataattatttttcccaggtaggttttggatatgaatcagtaccaccatccgtgaggggaaaattatgctgcaaattgtatatttctaactatctttcatctgagaaaattggacagcaccatggtgagcccctggaggaggaaagggcaaacaatcttgccagaacttttccctgagtggcttagcttctccccactcaccaatggctagattttgacccgggcagttctggataatctgggatatggagaggaagcagacaccacatttccagattttaatgacttctctgctacataaaaatgtctctttctggatcactgagctcatgccaactgggttacagtgttgggcaaggttggtgttgacagagaaggaggctgaggaggttgtttgctcagccccaccgtgtgctccctgagcttgctatgcctgctcggcagccctgaaccctcatgctggcgtcttcagccttcaccctaatctctggctgtgccttttatcctcttttacctctctatcttctttactcatttacaatatttaagtaatgccatcatagaactattcttaaaaaggaagtttacaataattaaagtgaaaaataagcaatacatattttcttctctcctactgaagctgttgaaacatt

SEQ ID NO: 41460 - DNA, 861 bp, Homo sapiens
taaatgagataatatatatggaaaagcacagcacacccaggtgtcctaaataccttcattttaaaaattccaagcctactaaagaaagctgtaagccagacacatagcaagtttaaaaagatgtttgttttaccttcctagggcaggggatggtgtgagttcccagacagaacatgacagcagagcccaggttgagcaagagagggtgggaaacagaaatgtttccagcaatttttctttctttcttttttttttttttttttaatcatgaagattcagtgtgtcctacaagtgaatgtttgagtcattctgaattaaactgggagaatatgatgattatctctagtttggtgtgcctaatctatcttttcttttggggaactcctactgcattcccttggctcttgacggttgtcagttacagcactccatttcactcctctctttcccctcagagaacagagatgaccacatgaccaggaatgttagtaaacattttctcctctacgtggatgaaaacctgccttcagtagaagagattgagacaggcagctgtgagagagagcatgaggacattgcctgagttcctggattcatctgtccctgaagctggactatgccccagacttccaagctgaaaaaaccagtatagtcctgagctttcattgcttatacttattcaagttgggtttctgtagctcaaagtgtcctggctaatataggaacttctgcaaaatgcacaaacttggcctccaagtctggagtttctgatgtggtaggtatgaaatgtagctgaagcatgtgcattctttttaagcttctctaagctctatatcctggctcaaattgagaaccattgct

SEQ ID NO: 41461 - DNA, 1201 bp, Homo sapiens
gacttgttgctcagccatccttaagacatggctgtctctacctacaagggagagctagagagatagggttttcttaaaaagataaaaataaaaaaggacatattaccattaccggaaaatgtttgtataattgtgtatgtatgtgtgtgtatacgcttgtttctgcacttcctactctgctgtattttcttattgcttatttttcatgatcgtttttaggtttttttttccattttgtttttgtgtcaaatttcaaacagcttgtcaagttttattagagaactaactttatggcttttctccttgaagtcctcttctccctcctctcagcaaatggcaccaccatcctcccagttctttagtcaaaaaaccctgtgagttatcttaagctctatctctcaccttcatctaatccgttagcaagtcctacggctgctgcctccaaattatatcttgaatctgatcaattctgacttcctccttctctgctactctagttcaagctgctgtcatcccaacattactactgagagagtcttctaaccagtccccctgcctccacatttcctaccctctctcccaccagcccatttgccgcacagcagcctaaatggtcctcagatgatgtcacttccctgcttacaactgcccaagggcttcacaattaaatctagaatcaaatgcttccccatggcctagaatctctacacatttagccctgctaatttactttatcacatttagccctgctaatttatcttccccaatgctctctctttcaactaggtttcaaccatagtccctttattctgtctctttagctggctatgatcatggttgattcagggctcttgctcttcctgttgcttggaaggctggggcttcccagatatttgcatgattgaccaatttgcgtaattgaggtttgaccttacatgtcacctcttctgggaggctttctctgattcactctagttaaaatagagtcccatcccctcccccactgcagtgcttttgtcagtctccatcaattatctattctccataacacatgatcatctgaaattatcttgtttatttgtttatatacttatcttctctctcctcccttgcattagaatctggagagcagggactctgtgctattcaccattatatctccaatgcttagcaactgactcataattaaatgttatataaa

SEQ ID NO: 41462 - DNA, 880 bp, Homo sapiens
gtccctcctcttttcttaggggaaattatgtattctttcagtaggctatgtcagatatcaggctattatgaacctgtaatgataggattctggagactacttgcaagtaggtggggttaaaattatcagtaaacatctggggaaatgcaaggagctaatactttaagctggggagaagcttagataggtcatcaaattggctgatgttggccaggtagctcctgcacatgatctaaggaatgaaggaactcctccaaacagagatgggaactctgtagttgaaacagagtaggtatcaagactcttcagggtcctttctgcccaaactcctagggaagaagcacatcaaggaggaatattctgcaggaaaagaaagcttcagtctaagtgaagggctcccataatctggactctttgaaaaagttccagtcttcctggaggataatgtgtcaccctttgcccccaatcagggtgactcaccaaatggtccaaatctttctggaggataaggtgtgtcagcccttgcccccaatcaacatgactcaccaggcccagaatcagcaccaataaaacctccctagaaaggctctcttgacctgagactgagtcagattcttccactggactttcttagtagcctactaccctcccagtgcctactaccctcctggtacctggcacagggcttggctcattgcaattaataaatatttgcctagctgatggcataaaggtattttctgagtggataaatttgatttctgtcaacccatggaattaaaaggtagaatttttcaatactggattcaagagaaagttgcatgatatggtcctgttaactttagtcctttcttgcttctaggtatttatacttcatact

SEQ ID NO: 41463 - DNA, 2224 bp, Homo sapiens
tgtaaaaaataaagacctatgagaaccatttggatcattatttcacggaagtgaaaaaggaaccaattaggtcaatggtggtcaggttgcacagctgagttcttttgggccctgttgctgctgactaggtagacacccaggatactgacagcttcgcaggtagctggggccaaagatatctgagtcatctgtccctaaataaatcccccatcttcaccaaggcaaaggggtgcaactattgctcccaagttccagatatagccctcaggctgcccctctggtgtgttgtctctctgttcatctttatcttattgggggtgggctggataaaaatgctggggtgttggggaaggggtcccacacatggtgacttgttctcccaatggaatacttttatgggaattatcaaattgttcctcatctggaaaaggttaagaatcacaggtatttaaaaatgttagctaagacacaaaaactgtgagaggagagggagaaaacttgtatcaaccaggggccaggctctgtgataatgtttttttcacatttattttatataattatgacaactatttaatatttagtgagtgccagaggccagatttgaactcacatccaatgatctaccaatgtgaaagtaaaaaaaacctttggtgatgtgggtgaaagtgttggttcagtttgatggaaatggctctgggaaaatctttgtagattaggatatatcattctttgcagcttcaaagaatctcaactaggataaagagtgactattgttcaggaacagagcgtatttctcattactgggtatagaaatacatgaggtcttgaatttttacttgcaaaaaataaaaaaaggaaagttaaaaattaatcctggccttagtggaggttacatgagtgttttcaatttttggtaactctttgagctgtatattgatgatttttgcatttttctatatatgtgttatacttcaattttccaaacatttatttttaaaaagaccaaaaaagttattgtagggaaagtaggggatgttccaagtctctgtaagctaagcaatttatacaaccacatcctgattcttccttcttatctgtgaaaaataaagataatggaataagttgcaccttcttccaagagataagtgtctgtatttttgcttggtccatacatggttgagcttaggactttttgcctcacacctccatggtaagaaattaaagaaaatgtttctttcattcccatattttaaaacaaatttcctgtgacaccacagttagcctgccagtaactctctcacaagtctacctttatttgcgtaatcttagaatgatttacagaaaacaaataccttgccttccctcaagtttggctgggacacatgaatccataaatgttttgggacagtaagaaaggatattgaaacatttgtagattctttcatgacaattagcattgacaaagaaattatcttatttcttttcacagaagagaatcatattcttatgtggatataatattcatgcagaatttaagccctcatttgtttggctatcccgaaaacaaggtataattggtcagatgggagacaatgaaggcatatatgtatgatcatgctcattacagcaaaaatatattaaaggatgtccccaataccaacggtagacctcataaagcactcaaatcattgagtttattataaaataaatgtttaacttctttcaaaaattttaattgttgaaatatggaggtgagaaagagcttaagcagtagtgcagtcaaagtccctaaattcacctttggaagtacggacttacccctaagtaagctgaattattttctgtattactatggactacagtctaattttattagcttatttcaattatattctttttttaacatgttattttgaaaaatttcaaatctagaggaaagttaaaaaatagtaaaatgaacattcaatacctctgacctagagccaccaactatcgccatatttacacacacttcctccctcccatatacatacatatctttgtgtgcatgtgtttgctgagccagttgaaattaacttgctgatatcacccctaagtactttagcctgtatctccttgaaacaaaatcatcttcctacataacaattgaattattgccttcaagaaatttatcattgataaataataccatctaatatacagttcataatcaagtttccccaat

SEQ ID NO: 41464 - DNA, 2857 bp, Homo sapiens
ctcggctcactgcaacctccgactccctggttcaagcgattctcctgtctcagcctcccaagtagctgagattataggcacgggccaccacgcccagctaatttttttgtatttttagtagagatggggttttaccatgttgaccaggctggtcttgatctcctggcctcatgatccacccacctcggcctcccaaagtgttgggattacaggcgtgagccaccatgcctggcctatatgttcttttaatgcctttaccattattctgtggagtcttgggaaggagaggaaataaatgcatgtttttatttgccatctttaattggactgcttaatgtaaaactgttcgtgttataaattccccctcatatatttggttttgtgactgcagtagtgtaaattctctgcctagaattttaaagaaagtgattctgtatgtgattagggagtaaggttcagataaccttgagtggtttaaagtttcctactgagtaatctgaacaaggcggatttaagatactgcagacagagtgtgagaataactctctcttcacaacttaagaagcctggttccttatttacaactgggataagataaatggttgaatacctagagaagttccacaaaaagttacacaaaaagtttagttaaatttaagttaaaagttagttaaaatgaaaagttaagtttttattctgctactaaaccatgctcctctgcgtgtctgaaccttcaggttcctctagatttctagcacctgaaagaaaacaaaactgcagcatcagccaggtaggcctctcctaatcttactcattcacagagaatttcccctttgagtcaccatggcattggctggttactcataccacagatccctcaggattggctgggactgcaaataaaatactgtttgcccataatcaagttgataagctacaacataaacacatctaggttcttgttcttagaatacagcatgaagaatttgctttcttctttcttcctaacattttcatgtgagatccagaaaggacacattgtctctggccattcgaagaaagaaagaaagaaaaaaaaaaaaggtatttagagacagagagagaaaaaggctgaaatgggttcgctgggttctaaaaatccgcaaaccaaacaagcccaagttcttcttttgggacttgactcagctgggaagtctactctcctttataaattaaagcttgctaaggatattaccaccatccctacaataggtttcaatgtggaaatgatcgagttggaaaggaatctttcactcacagtctgggatgttggaggacaggaaaaaatgagaactgtttggggctgttactgtgagaacaccgatgggctggtgtatgttgtggacagtacagacaaacagcgactggaagagtctcagagacagtttgagcacattttgaagaatgaacacattaaaaatgtgcctgttgttctattagccaacaaacaagacatgcctggagctctgactgctgaggacatcaccagaatgttcaaagtgaagaagctttgcagtgaccggaactggtatgtgcaaccctgctgtgccctcacaggggaggggctggcccaggggttcaggaaattaactggatttgtgaagagccacatgaaatcaagaggagacactttggcgttcttcaagcagaactgaggctgcgaaaaatccaagtctctacagagacactgatgaagttgaaagggtaattgtttttccatgccaaatgaggaaatcaaattaatgagttgacaaacttttcctgagatgttatttcatctacatttagttaaacaacttagaatgatatctagaaaatatttattttcagccaggaactttagcaaactgtggcaatgatcactgggaatgaaaacgtataatgttctacaatttttgttatcacattggatgactttgaatatagtagtgacacttgggaccaaataaattattttatatgactactagaacaaagttttagtaagctgtctgctaatagagtcagaattcttccagattgtttccagctgtaacaggtattgaatttccaccgtgctcctatgtaacagctgggtggtgtaaaaaatgaacttcaaattatggagtggaaaaagcgtaatgttaatatcttgtaaattcgtattccctattaaataaagctttcttattccctaaataaagctgttcttctggattcctgccagctttttgaaatctattgctgggaacttcctccaatgaatcttaaacaatgaacttcaggctgctaattgctcagagcctgtgttctgccatagggagcagaagtgtataaacttaaaggtctggtgatcggggtagcaccttggagtttagggcaagatctgggctcagggcttagctctaggctacagccccgagtcttgcttccttggaattcagcttaacagccattgcttggaaacatatgtgcagctcattgtactgatcaaacaggaaccagacctagactttgctctcagagacctacaattcacagcaggaaacaacataaagctagtagctagagtagggcaataagtgctaagtgcgattgcaggagatactctttttaaccagggaaacaagaaatgtttcatgcaggagatggtattttagagggtccctcactcccagtgaccctacaaaggtacaggttagtcactggaagttaccatcactaggaaactttccagaggcattggacaggagggcaggtgagtgggcaaagaagctggagattgggatggaattcccctgagaagctcagaactcccagggaagccctggtacaaaca

SEQ ID NO: 41465 - DNA, 579 bp, Homo sapiens
aaagctgaggagttagggccttactcagcatgggaagccaacagattttagactgagtgccatgttcctgtgttgtttgtgttgttgtaatggataagattgtgcaacattagctaagtaatggacaaaaatagaccccacatacttaatcaaaatcaataggggccaggtactagtgattatggaaaaaaggagtttccagtagaccttggaattacacattagagctaaaggacatataaaaaagatttattcatttatctttcagttgttatttatagggcaccaaccatgagtcaggcactcagggagacctccaagctattttcagtatgttgaaagacctaaaagaaaattgtctatttcctctcaacaggctgagtagggtgattaaaatttcttgtttatttgctttgggttggaatttatgggaattcactatgggaacactgataatctcaggctgaccagaagctctgataagatgataattggtatttgtttttttttaaagagagaatgaattgaaatttaatgtcctttgctaggtaaaattattcagaatgtggaaaagccgtt

SEQ ID NO: 41466 - DNA, 2339 bp, Homo sapiens
acattttagtgtatttccttccaggacttcttattattttgtatttttagaaaaggaatggggatcacaccaaggcagaagtgcttgctgggggacagacactggcttggctgggatcaagtagcctctttctgctctccagcccagcggactggaagcagcagatcagcactcttcttcctggacaggggtaatgagaatgagtattttcctttaaagctcacttgtttccgtattctaagcggacgcgaacattgttcttttctcgtgctttcccactttcaagacccaccaacacctgcctgcccacatttcgagttatcttcgtcggctcctgcaagcccgcactcttctccgcggtggctactctccgctcatccagactcccgccctcactgcgccttcttcctgcgatgaccgaggaggtggtgggagaccaccacttgcgagcttccaaaggactttcaaacctgaaccgcagagtcagagccctcgcgccgtagaaaagtcaggagcgccccggggcccccatcggaagcttcgtgccttcccgtggaaaggtcgcgagcagggaaggccttcgtggccactgagtcccctactccaggggcggcggccgctctccgaaagagcggcccttctcgtccctcccgaggttatcgtcagagtgcacttccttggggaaacagaggtcattctgtcgagtcccccctttctgctgttctcgggagggagaaggctgctggacccaggctcgctccccgcctctcgggagatccgggaaggcctctattgctgaacgccgagacagcggccagcggcccgatcgtctccctaccgctttgcaagccgggagaagtgcgtcccttctcgcttgccttatggctggcgaagcggggaccgcactatagtgcagccgccgaaggggggaacgctcacgtatggctctcggcttcccagtgagcagcaatagttcctggaaaaccaacgctaagactaccggggtcagtattagcttgtcttaggagccggcacagggggaaggaacaacgattcgcaagagctaggcagcggacctccctcttttctcccccttggctgtcctggaccgcatggggctgcgagcccgcaccggcggccgcggaacttgctcagcctctgacagctgggtgggaacacctcggggtgtcgagtcccgactcaaggggcgggacggggcggggcgagcgcgcggggggcggagcgcgcgcgagccgggacgcgaggagggagcgcgcgagtgaagccgagctgagccgagccgatccgagccgggaggtgcctgggagaggcaggcagagcccagccggccgcctgcggctcagtaccgaccgtgccgcgtcgccgggctctgcgtacccctgtctctgcccaggctcccgcaaaacttttattctctggggcccccggggtgtgtgaaggaattggaaccttccgccatctccgcgctccccttcggcggcgaccgaggggacctgcgtccctcgtccgccgggctctggagccctgcgcctcacctgctgatcgctctccggagtctcgagggggcacccccggagggaccgcgcgggcgccggcgcccctgaactctcccgctcaccgcggcagacccgcccagcgcaactttaacttgattcttcttgcccaaccggggcaccagcggctgctgctgcggcggctgctgctaccgccgccgccgcggtctcacaaaggggctcagggaagggaggcggcgcgggcggcagggacgggcctccgggccgccgaggcggggagacaaaagggaagctgcctctgctcgcgctgcctgctcggagccgcttgctcggctgcctctggctgggctccgcgatcctctcccccaccctcgggcactgctccgcctccctcccggcgggctgtccccgcagtgctcccggacccggcgagccttcggggcgcgcgtcgctggtggtggttgaggctctagcgataataaatgatagaggatacaatgactttgctgtctctgctgggtcgcatcatgcgctacttcttgctgagacccgagacgcttttcctgctgtgcatcagcttggctctatggagttacttcttccacaccgacgaggtgaagaccatcgtgaagtccagccgggacgccgtgaagatggtgaagggcaaggtagccgagatcatgcagaacgatcgactcggggggcttgatgtgctcgaggccgagttttccaagacctgggagttcaagaaccacaacgtggcggtgtactccatccagggccggagagaccacatggaggacc

SEQ ID NO: 41467 - DNA, 1941 bp, Homo sapiens
agtgctcagtgctactgatttcaactagttattttcccagagaaagccctaataaggttgatcttagggaaatcccttaactgatttcccctaaatctgaatcatggaaccaaccagcaaccagagagttcctgatctcaacttccttctcctgattcaaacctgggagcctaggaaaaccctggtctgggaatgcttaaaataataaatctctactcttttctttgaacattttatgtacgtatatgatgtctggtcaaatgccctcatgtaaaattggagtaaagcaaaggaaagcatgcgagcatgtcttgcctccatcatcacctccttttggatttgcatatttatagctctcttttttgggaggttgcttctgcagagggctggaggttaggtggggtctggggcagggtagaatgagctgcctagtctctgtgacaggtatttctgtgctgcatctctgctaccttttttcctgccctaaccattacccttaatttttgaaagtatctcttacatcagatagcacattaaatgtcttcctttgggtgatctgaaaagaaataagaatccctgagaagaatgtacacatagaagaatcataaggatgtcagtggtgcaacttcactttgctctttgtgggaccttaattagtttgagtattctgcctgttatctttggctatctcagctgttatctttggctatctctgggaagcagaggagcatgacgaagggcttgaactttggagtaagaaggatctgcatttaaatttgattctcccctttactagctttctcctggcttctctgagtctcatctgtgaaacagatgtataaattggtgtgaaacgcctaatttatagggtaagagtatggaataaaagagataatgtgctttatcaggcacttagtaggaattcaaggaaatgtagctcctgttctttcactctcccttcctgcctgtctttccctcactgaagccagttatttccaaataccctggataatctagggtaaacacaatgacctcatgtcacaccactctcccatgctcactctgtcacttttactaatcctcagcactccaagtacaggtacaccttgttttattgcacttgattgcatttcacagatgctgcagggtttttgttttgttttgttttgtttttaaacaaattgaaggttcgtggcaaccccatgttgagcaagattattggcaccatttttccaacagcttgtgcttacttcttgtctctgtcatattttggtaatttttgcaatatatcagactttttcattattattattatatctgtcctggtgttttctggtcagtgatacttgatgttactattgttattgttttggggcaccatgaatcacacccatagaagacaatgaacttagtaaatgctgtgtgtgttctgactactccattgacccaccattcttcagtctctctccctctcctaggcctccctattccctgagacacaacaatattgaaattaggccaattagtaactcttcagtagcctctaagtgttcaagtgaaaggaagaatcccacgtctctcactttaaatcaaaagctagaaatgattaagcttagtgaggaaggcatgttgaaagctgagacaggtcagaagctaaggctcttgcaacagacagccaagttgtgaatgcaaaagaaaagttcttgaaggaaatcaaaagtgctactccagtgaacacaagaaagacaagaaagtaagacagccttcttgccaatacgggaaaagttttagtggcctgcatagaagattaaaccagccacaacgttctcttcagctaaagcctaatccagagcaaggccctaactctcttgaattgtatgaaacctgagagaggtgaggaagctgcagaaaaaagttgaaagttagcagagattggttcat

SEQ ID NO: 41468 - DNA, 1406 bp, Homo sapiens
ctggcatccttataattctgtacttttcatgtattttctgtattgttttaggtagaaaacaatgattaacaatttaggcaacatttaaacacccttggatgagacagatttttgaaatacaagccagttcacatgttctgtggtttttaaaaataagactgcataaagtttttattttttatatattactgcatatgaagcctgttcagtgagtgttatgctttgccataggtaagcttacagaatttatttgagaaaacgtagatatataaataggtctatttttcaacaggggaatggtaaggtttactaaatgtttagtgatacacacacacacacacacacacacacacacacacacacgggaattttttgccctttaatattgatgaaggaaaaagcaaagatatttttcatgttttttgctgtatttacctagactattccaaacattggtgatttttatctaggaggtttatccatttaagggccagagtcagcctttcctgaatacgaacataaaacctttgctttgaaggacattttgcacttggggcaaagcgaaatttgttaagtaaatggattttatgtgttggaggactagagaagtagtaacctgggacagagaaactgtccaatttaagactaccagtccatggccagtcacaggacgaagaacatttagagctgaatcatctatattttctaagttttgcgcacaccagcaaatgattcagactatgtttgttcccatgtgccagggagctcttgtgctgatgtgatgaaacttggcatagcacagtcctccagcagagcagtgcctgcctgtttatgctgagataacttgcactctcttgattttactcaggggacttctgcagttttttgttttgttttgtttttaaaactgtgtccctgcctctagtgcatttcccttttagtatttttcctctcccacagtgtctcagcctgaggtaatttgactgtcatatatgggaggtttggggtttatattatctacagattatatatgttgtataggttcccatggcttcgtttcatacatagtttgaacttatatagtcatttccagcattccttcctgtttcttcttacttttagccaccgcctaatctgccgcagagctatttgtgtcgattgccttggttgtgaaagcaacagctccccacacccaagcccttagcttcagaagtgctttccttatgactttacagagtcatcttggtggctacgtcgggttctgcccaacatcctctacttagacatcttgtcctaggaattaactctataatactcctcctttctcaactgcctccttgcatgggaaaggctcatcttagtctttttggtttcacagtgtttcagaaagctgtagttttctttca

SEQ ID NO: 41469 - DNA, 1395 bp, Homo sapiens
ttttgtttataaagactatgagatgataatatcaatcatgtgatctgttttctgggagagtgttatgacgaggattgactactgtctgatcagaaaacttctttggatttatttttaactcttctattggaaaatctcttttagttaatcttttgtatctgaaacaattgatctttttcacattgcctgtttatcttactgagaaagctgatttatctacactgaattggcagcagtgccttgttggtgtagtaatttagattttctaagattttctgcttaatcaactctgttttcccctttgagctaactgaggctaagagggaagaatctggttgttccaactgccctttgccaggattttcctctgtgtgtgtgtgtgtgtgtgtgtgtgtgtgtgcgtgcatgtgtggtgggtgagggaagctgggcttcataagagctgcagtgccaggattttcctgtgtgtgtgtgtgtgtgtgtgtgtgtgtgtgtgtgtgtggtgggtgagggaagctgggcttcataagagctgcagtgcaggtaacatggtagagtcctgatagtggcagcctgaggagccctggcctatagctggggggcctccctttccaaccctgctctttgaccccagctggctcattttcagactgggagcagtggcatcacttgacctgggaggagaagcagccagccccaaagagccagactcaaagctctgcccagcctggctgtcaccttcaggcacctgaggacactcagcatgtaattatgtgcctcgagacagtggcttccctcacagagcagagaagggaactgattaatcagttagtctagtgcactcagctggatctctcttcacagcctagtgaatcaggggttgaattatgtgatctcttccctcctcccatctttgtagagcagcccctttctgaagaggagaggagggtcactgtggggcattctaccttcctggtcacctgtccctctcctcattgctctgatgccagctttcttcccctacccccatatgatctgggaactgattagatgacttgagtagagaagtgctggcagttgccacagaagggtgcgtgcactgccaggcagggaagggctgccaggtgctaatgtcactgtgcctggcaccagcaagcgtcccagaatctgctcccgaggtccagctctgccagcatgaggctgctgtttggaaatgtaaagttctgatctaattctggcaaaatatatttttttttcttgaattgcttagattattatcctgatttcctcttcctttgattggcctgaagtgaaggccattaacagtgccatgatggcaattttatagatgaagaaatgccaaggaaattgattatatttggcatggctctgaag

SEQ ID NO: 41470 - DNA, 923 bp, Homo sapiens
catttccttgcttgactgcacctctataattggcttttgcagttggtcacttttctcccagtctctgcttaatgtgtgttagtaggtcttgggccaggtcttcatcctgactgtcctgtccctcaagaggtgattatacaaatccaagaagggagctgcttttattgctctcactcctgtttcaatttgctagctgttcctgtgattaaaatcagcctgtatgtatttgcccctaagatgggcaatgtggttccacatgtagccttatgaaataagttaccatcctttggaatctggagtcttctggtttccaactggtttagctcagcaatgggaataacatttgttgatattaaattggtccctggtggccaccttctttttccactctgtagttaccaagcagctgggcatgaatcagcagagttgaaaatattttaaccagaaacatttggacttggcaccaaagttgtattgcccagaccaaggcaatacagaggtcagccagccaactgacagggcacatagctactagcatttgcttacggatgacctgccagcaaatcctggatgagagttcagtatctaaaaagaaaattaaggaggtcataaattgtatattattttgccttgcatagcaaaatctgaatgtcgtttaaaatgctcctcattatgctctctcatgttgatgacctggatccagtttgcaacatctgttaggttgacttgatggtggttgcagatttcagggatattcaaaagcctgttttacaagtgtcataaaatgaacggaaaatattttctgtaatttcaaataatagagccccagaggcctttgatcatactgaaagagcccatggtcagcttaaatctccctcagtttctattcattatgttatggccctgtgaagcagtcaattcta

SEQ ID NO: 41471 - DNA, 551 bp, Homo sapiens
ctccaccctaacttaatcttctttaaagaatggtataatttacaacagtcagggtaacctttctggaggtaaggaggctaggagagtgactgggtgcgtacatctgtatgtgtatataaatgcccccttcttgtttggtttagcatagttaaaaaagtagtgatccatcagatagagtttgctgggccagaaatactgcagtgcagcagagaccttggaaaaagtgagatagcatatgcttaagcaatactgcactagtgttgcataaatggtggaggctgcggctcccctgtttgtttttcccagcagacttgtcctgaggcgaagctgtgctacctgaaaggagaagcttcagtgatggagtcctaattgtaccaaatcaaagttcattgagtcagctaggtcattaactcgttgatatttaattactagctgcttcactgctggaaaatgtcattaagccgttgtactaaatctgctttaaagaatgcattttcctttttgaatggttcatgttttgtagtcttgtagaaaaatcagaaaaacatctg

SEQ ID NO: 41472 - DNA, 802 bp, Homo sapiens
catttatctctagcacctagcacagtgtccagcacatagtcgacatccaataaatattaattaaaaggatatacttctagcttatgactgtgactgcccgtccagctattttcttatggagttgaagtcagacttgggaaaaagatatatttttctctgtaaggttcatgaactgtatgcccatccaaattttaaaatatgtcattttctatttacacaagcaggtgcagtcactgctgaaactatagcttttccacacaattaggtatctcattttcctcttgctaaaataagataccctttcaaaccttgtttgcatagttatgcaacactgccggtgatgctgagttcctttcccttctgctatattttgctgcagctttccaggattcaaagtcccacttgcagtcctcggcaggaggggtcaggtcagtgttcttaccatgcctgggatggtcaagaggaaatcattgtgttttcacagtgctttgccacaggtcattttgtggcctgttttacgcagcttgctgagatttgcctgattgcccacaagctgttgggaaaggattccaggtgctcccttgcattagaagtacacaaggtcagttagtttgcttcaggaaagggctcagccttcttgaggctgagcagactagcaattttgtatgatttaaaaaagctgtggcactgagggttgaaaggccatgtaggaacgtcattgcatatagtcaaggttttcccaggaattaaaaatgtttacttgccaaactctgtcttgggggactcttcttgtggagggtct

SEQ ID NO: 41473 - DNA, 739 bp, Homo sapiens
cagtcaaaactcagctcaaatagttgctccttgtatcacggcaggctggtttctgtggttggttctgtcaacttcaactgtaatagaaatgttgtttttctattcttccttctttggcctcccattaagctgtcacttctttacctagggaatgcatcttttgtttctgagttcacaacactaccagaatgcctggcatggcagaaagtgcttgttaaatgcctgctgaatgaatgaataacttcagccaccagcctagcaagcagatgagttcagaggttatataaacaacattcataagctcagccagaatcttgtttgagccagagcagcagaagcccagaaagtcagggacaatgccaccctggggcttataagtccttcaggggctacacaaggccagaccaactcaggaaaccacctgcgaaggtgccctccctccccagttccatgccacctggcagttttgtgctgtctatgggcctagaccaactcaaagtgaagaagttctctgaaaaccttttacttattaaagaactccaataagcaaaataggtagacatattttccctggtggagccctaagcaaaattcaattatgtgaatcgtacttaatatttaaaaacattgtgggtttttttggccaggcaccgtggctcacgcctgtaatcccagcactttgggaggctgaggcgggtgaatcacgaggtcaggagttcgagacaagcctggccatcat

SEQ ID NO: 41474 - DNA, 1034 bp, Homo sapiens
gcatcattccttactgcttggaaaagtgagactccgttgcacctctaggaatctttttaaaacgccctgtatgttccttaacactgcctgtaggaatcctgtagccctagccccgtgggatttccttctctctccgcccgttctccacattccccacttagtttcacattccttcccaatccctccgacatccctgcgccggggcccttccctagcgctccgggaaagcgttcgccgcaggcctgttaggggcccaccaataccgtaacaccgttcccgtcctcttcctcggcaccgctgcaaacgccccgggtcgctacccggatttgacggtggctggagcggcacgggcgacgcaaggcaggtattgcaccctggggcaaggcaaggtggacaaccagcggatgcggcgcggccgcggcctgggcctgggccctccgcgtcgcccactgccccactgggccccttctcccgcgctcaccggaggcgggcagctgctcgtcaccgagacccgagacccacggtgcggcggctcaacctgggccacgctccgctctagaggagtgggcggtgcctcccggcctagctgccggggtctaggcgtttccgaggacggcgcgttccgggaaaggcgggtccggtggctataccctccacccagtggcaggactcaaccgcctcggagaccctgcagggccgcccttctcactcacctcctgtgctcggcgcgcacccagctcggaagcgggaaggtggccggcgttctctccctgcgcacacacgcagcctccccgcatccgcacgcacggccgggcgcgcgcagaccacgcgccagggccgcggccggaagcccctggctgcacgcgcgggcccaggcggcccccagccctgtgagctcgcatggcgcgccctctgggtcctcgcggtcaccttgcattccgagcacggccgtgttatgtatgcctttagttgatgctggccaaaattagacaacttagtggcagacgtcgagctagaatttttgtttgagatcc

SEQ ID NO: 41475 - DNA, 491 bp, Homo sapiens
ctttgtaataagatccaaacaaatagtggcttaagtaaaacagaagtttagctatcccataatagcctaatcataagctgtctggggttgatatggtgttggggatccaagttcattctatcttattgctctgtcattcctagaatattgcctgcatgcttgtggtagaaaagactcaccactatagtaacatgccaggctactgaagaagggagagagtgaaggcaaattcctttctgtttagaagcacaacccagacgttgacccagcatgactcatcacttcctcctactttctatccacaaaccttagttcacagctctaatagctgcaagagaagctggaaagtgtaaatctcattcccatgaccaggtgtccaactaagatttgagagttttattatcaaagaaagaagaaaaatgaatatttatgagtaacaagtagtctttctctggtcaagaaatgaatatttacaagcttggagatcattc

SEQ ID NO: 41476 - DNA, 597 bp, Homo sapiens
tgttacaaacaccaaggggcctaccatgccactgaaggagaaggagctaacattttttgaggatctcctatattcaaggtacattactagagaccatgcaaatgttatttgatttaattttttttaacatctacaactttttaagcttggtcacaattagtaggactttttctctgtccaagcacagtattggccacttccttactttgtgactcttgaataaattgtttttccccagacacacaaagggggcaactactttcctccagaggtcaatagttgagatgagggacttgctctgttggcaaatctgaaatctcacccagccaagcttctgactcatctttcctgtcctcagtgcctcctgatctgtgagctcttggttctggcccatccccaggccagtgagctcactctaaactgttgctgctgcttctcctcagatagctacgtccttctaaccggagcctacaatctatttggggagctttggcttctaaaacttccccttccaatgcatgggaagcacttttcatcacaaaagacaataattttgaaaaaactaataaataaataaataaataaatcctctgaaac

SEQ ID NO: 41477 - DNA, 730 bp, Homo sapiens
ttatagtattttgcagtttactaaacacttctatgtaccttatctcagtcaattctcataacaattttctgaggtagggattattacatagttttagaaaggaggaaaggagcttttagaaaggctcagagtggtaaagcaaatccttagggtcacagaatctatcagtcacaaatctcagacttgaaacaaggactttagagtccatgtcttccaccgactctcctaggcatactgctttctacatggcgcatgctgtggctgtgaggtactgcccagatccccctcaaggaatgaagtacttatcccacaacagcagggagtgctgctggcagaaagccctcagtttcatctacttctgggactgccttggctgaagagagaaatatcacccaatgctatgtccttttcctgggacagtcacatccaatgactcatcgatgagcaaagtccccctcgggaaaactcagaatggtcatttcagcttcagagcttcccacagggttagctgaggcttccactagactgcacggcagcacagctcccttctgcccaatggtgcttctgcccttctattccacaggtgttgattctaagaggataccctaatacacctcccctgcactaatctccaatattatcttgatatccccaaatgtgctatcacatttgatagtgtgaaaaatatcacagtatgcatttgaaagttctgtgtagaatttcattattt

SEQ ID NO: 41478 - DNA, 2145 bp, Homo sapiens
gaaggtaatcagaggccactgaaggattaaaagcaggggagtgtgacaaaatcagaactgcatttcagaaggatgaattgaagtctacaagtagagacaacagacgagaggctacttaagtattctgggcaagaaatgatgagaggctgtctctgatcaccctctacaaaacgcctttgcttattccttgaaatttgggatgagaggatttagaaaaaaaaatggttgtactcttcaaatatttgaaaggctgtcatgagacagattagacacggtctgtgctgctccaagtttgagggataaatcagtcataagaagatattaaatgcactatccggaagcacataattaataatttgtctaaaaatcgcatagacttcttcacagataattatgctttacatttcattctttcaacaaataatcatttgagcagttagcatgtggcaggcatcaggcctgtatatgacggtgaaccaaacagacaaaaggcactgccctggatggagtttctttgcataaggtaccgtttacagataacttttatataaaataatcatttaatcaagaagcaagctcacagtcgggatagctgaaaagagactaatatacgggcgaggttggtttggagtaaaccctggcctgggaaaatcgagacgataactgaaaagcagtcactgacggcaaatgagcccctgggacttctctccgcgagctttcccagccaccaggccgctcccatcacccttccgcccgtcggtgccgcccctttcctcgtccccaccccgtcccttttaatacgtcactcgggccgcgggatttcgagcatttcgctcgcgagatcttctctgtggcggagacagccaggttggcagctgacgggacagccggggtctattttgttgcgggttttcagcaaatccagggctggtctggaggcgcgaagtaggttccggagtccgagacctgggctgtcggccgcgggcccctgagtagcggatggggcgggctccccggcctcggggccgtgctcagtctgcgtgagcgccgcgtgcccggaacccgtgtgcggtcgcgccccggggttgggggtcggcgtgggtggccctcgggcgccgggacgccgtccggagactcctgtggcgtgggtctgaggcgcggtggtccggtgcggtccctgggctggtggagagcgggagggcccgggcgtccacaatcccgagctgacctcgcccttggtcgtccagggttggagcccaggtgagatggaggtcagcggcagagctgggtggcccgagggtcttgcagctgggaagctcaggaaatcccatggtcctcatcttaaagttctttttaacgaacttacccagtggagttgggtttccttctttcctgctttttcgaagttctgtgaatatattaattattcagagagactggaggaagacgtaaaaagaggagactaggtaaagtgatttaaatcccaacattctcttttttttttttttttttttttttttttttaaaagaacttaaggcatacagaacgatggagtatatggcagaatccaccgaccgcagccctggacacatgtgagtgcgacacttcttccttcccccttaaatgtgaaaatcttcagtgagcccgggaaactcactatggagaacgcttgagggtgggtgggaaagagcgtatattgtcataaatgggaaaaaatagaagtcttatttctgtagaaaatcgaattagtttctggttataaagcttgttctagtaaatataagctctaagagggttaaaatatttaccatacatccttttagatcggcactgtccaatatgtagccattagctacgtgtggctatttaaatttactttttacttactttttttttttgagacggaatctcgctctgttgcccaggctggagtgcagtagtgtgatctcggctcactgcaacctccacctcccgggttcaagcaattccctgcctcagcctcccgagtagctcggatgacttcctgatttttattggagattataatgtagtaatttttaaattttgaacatcttaaatcttagttatcaatttttaatttcttgcatttaagttcaaattaacttttttttttttgctgttaa

SEQ ID NO: 41479 - DNA, 646 bp, Homo sapiens
accatgcctggctaatttttgtatttttagtagagatggggtttcaccatgttggcgaggctggtcttgaactccttatctcaggtgatctacccgcctcagcctcccaaagtgctggaattacaggtgtgagccactggctggcccaggttgctttgtttctgttatttttttgaaaagggcaaagatgctgtggcctaacttgaaggcttttgtttgtttggcatctaaaaaaaaatttagtgtattttaaaaatctaatgtgaaaaatttatcctttatttattaaagcttgtgctgtgagtgtggtgttccgataagtccaaatcctgccaatatttgtgtggcctgtttgcgaagtaaagtggacatcagccaaggtattccgaaacaagtctcgatttcgttctgcaaacaatgtcaaaggtacagtgcggtacaattttgctctttttaaagttggaatttacatttagagaaccaccgagatatgctgagattacacgaaggtatatggagtaaagtgcatgcaattaaggtttaaattttctgttggtgtcgccaaagattttagaatttgcaattttatagtgtacttttctagtgtgtccttctaatctggtaaagatagtgtaaatgtatttga

SEQ ID NO: 41480 - DNA, 1257 bp, Homo sapiens
gtccattttacagagcgttgattggtgcattttacaaacctcttgctagctacagagcactgactggtgcgttttacaatcctagctacagagcgctgattggtgcgttttacaatcctcttgtaagacagaaaagttctccaagtccccactggacccaggaagtccagctggcttcacctctcagtgctaattagtcaaccacagaagtctgatattgtagtattagcacagactgttcagttttaacacacagtaaattattttcttcctccagagaattttattgtgtataatgtcacatatgttatttataaataatcctgtggacagacaactacaaatgacctatacagagaagaaaaactattgggagatattcaagaactagaaaatatgtctggtagttttcctgtgtttatggatttggaccagaataatgctaatgggctgactactcaacaaaggacaagataaatcagtgtacatgtggattcaagagtgttctatactaagagagtgctgtagaagtccccatggaatgttactagattcctgggatgatgatactgaatagtctggaatgtggcattctttgtctcaaagagagtctttaaaaaaatctgtgttctgatggtagagttccaattttggcattttgccttctgtgataatagatagactttgactctaggtaaatttgtggtggagcaaaagttcgtttggggttgttccacttaccccttactctttgccctccctagtcatgtttgtcctcttttctttctttataggcaatggcctgatactcatagtcaggaataaataaatagttatggtttaaaatattattcttgagagtattttcatctttgtctgggaacaaacatgcttatttgtacttgagttcttgtccttctaccatcatcactggaaaaacatctctgggtagtcactgcctccccaaactggactcaggatggaacttttgaagcagtgttacctaccccaaacaactcaaacccataagtatgagaataaatgattattttaagccactgagttttgggggtggtttcttatgcagcattattggcaatagctgactgatactctctacatctttaaaattcatttcactgtgcaacttctgatgggtaatgcttgctctgattatagaagtagggcaaccctctttccccaaacacctactagggttaaagttcagatgatagtagatgtacccctatcgattct

SEQ ID NO: 41481 - DNA, 732 bp, Homo sapiens
tggagcctaacaaaagaaggctgtggttgatgccaccacttcctcacttcctgtagccacacaccaaagtgccttgtgagaggggctgttaactccagagccacaacctgggtctaggaaagctctgatttcaaacatgctgttgattcttccccaaatagcataaatttttatcataatctatgtctttatttttgctgcctaaaacatggcccttttctatcacaccatcattgtcatggaatgttctttaaatacaaatagaacctttgcttcctaagaactttcttttgcactttgccagagttcacttttgcactttttgatttctgaatgaaatcaaaagtgcaacttagtggaggagtgtgggatccagaagcataagaattctgttgttcccagctgtggggttctcagcacaatagtaagaacccttaaaatgataataattctaatttctcttgaaaaattttcatttacagtggaataaatgtcaggagatgttaagtatttgctacttagaatagactctttcccagctccaaaaattcttttcaaagcaaatatgtacatttgatacctgcaagttttgaatgtgcaaatattggctcagcagatggatgaaccaagtctaacatattgtttttttttttttctcaagggttgggactattatgactctgactaagggttacatattttttcctacccttactgataactgatgaattt

SEQ ID NO: 41482 - DNA, 2365 bp, Homo sapiens
agtctgtatgccatgcaatgtactgtagcattttagtttcatgtttctctaaaaaaaataagttaaaattttaaattattaaaacaaacttcagttcaacttgctaaacatttacttagcacctattgtttacaaaatgctggaataaaaattgtggaagattaaaaaagattaagatataattttgccctggttcataatctggggtgtgtgtgtgtgtgtgtgtgtgtgtgtctgtgtgtgtgtgtttgtgtgtgtgtgtatggtgggatggatataatatgcagggtctattcatgttaagtatattaacacacataccaaaaaagagctataggagtttacagaagaatattcatacttagtgtttctttgttattaaaaaaatagattttgaagtaaaaagaaaatgactgaagaggttccagttcctaaaaagctgtggttttctcagtgacattttacaacctggttaacaattacattaagtttcagggaagtttaagtaaggagcatagataggcctgatattctcagtaaattaccactgctatttatgcctattttccccagaatttctttatacttatattttaaaacacatcttatcacatcttcataactttttcttttttctcatttaaaactacggtggtaccaaagcagggagatttattctttttgattgtggattaaagtcatacatgtaagacaacaaaactgttacgtaagtattgaaaagaacttgctaaaaaccatatgtaatgggtattgttatcaatataactgaataaaatttatcttgcttagaaatgacttttaaatataatgcctaaaatgttattatgcaaatttattcacctggcatctattagagactttaataataacactgtaaaaatgaactgcaacttttccctaggatctaatcagtatgcaaaaggacatatgctatctggaaatgacaagtaatgggaaagttagtccttttgctcataccctgtgaccttagaaatgactgtgccaaaaattacatcagtatttggatgaattcctaaataaattcaaattaaattgagtcatactaaagctttattcaattaggcaatagcattgaaagattcattttaaaaaaagctagatagaactggttttgtgtgataaattttatagggcagggctcaccttttgaaattggagggtgtcttcactatgtgatattgaagatcattaaggtaattatgaatgtgtgttcactgctgtataaaacaagtctacttcactaataattctgacctcaaattttctaaacatacttttattttccccaagttctaggagtaatgtactctggattcaatcctgtgctcacttcctcccccgaggcttttctacagcctctggtcacttactgctggcttgttttggctccacatcaacacttagagaaactagtttacatgggtttttcttggtgtgtttgctttttaaatgaggtaatgaaaaggcctggttggaatgctgaagttgtcctggcaactaagggagtaaaagctggtaaagaaattcttgaaaggagttcaaaacttctgcttctgagaaaataaatgtaagggaattacaatttagaaaatactgaacagacacattttgttttgctctagaatagtttttatttttttcctctagtctttcaccttcgagcataaaccatgaagtcaaaatcttcagggaaagggaagatgagtcccatcggggcacagaggtcagttgtagcctacctgactgaggatatcaccagtatttctccaggcaagtcctggacaggaaggaagataaagaggagagctgttcttgtggtaggaaggaggtaacagaggcagcaggagcagatggtaagaaagcctgtctgcgggaccctctctgggccacagtgctgaatatagagcaattttaggtaggataaggacagagggaaaagaagagtgttttctgctctatttccttctggaaaaaaggagaatcttacagagagattcttctcataaccacatgggcaactgcagggtcaggcaggcctgattccccacaatactccatttccggaagcttccataatgctagagagaactatctagatagctggtggtactggtggatgaacttaatggaaggggtatcgggggaacctgcccccgatttcacataggttcttttctattttccctaagtgtcagctggtttgagaaataaagggacagagtacaaaacagagaaattttaaagctgggcatccgggggagacatcacatgtcagtaggttccatgatgccccttgagccataaaaccagcaagtttttatta

SEQ ID NO: 41483 - DNA, 1015 bp, Homo sapiens
tttgcatccttgtagattagctcccacttataagtgagaactcatatatagagttgccaaatgaaattcaggatgcccagttaaatttgaatttcagataaacaacattttttttttggtataagtatattcctaatattatgtgcttggttcctgtcagcttcaacactcctttctccctcttctgttagaatcaattcacatcagttcatttgcttaacaaatatttattgaaagctgctctgcgtgctgtgttcagggtgctgggaagaagagtaaacaaaactagcagtttcctgccctcctggcggaggcgagtaaaacaagcaaatacacgctccatggaatttcaggaatggaaagagcatcaaagaaaatgcaaacacagaaacaagaatgacaggatggtggaaacgaagtgaggaacgcataattcatttgcggagatgtctgtgagacggtgacatttcagcagaaaccagaaccatgtaaagtgtaaatcacatggagctctgggcaagtgtgtccatctggtcagagggaatagcaagtaagtcctaaatctaataaaattcgaaatatttaaaagacattgccagtttttagaagtggtctcttttggcccccacctggcagtcattttttcattgtccattttctgcaacaaatcagcagggaacacaagggaactgggtagcaggccttttctgctgcagcaggagatatttggggcaaagccctgcttgttctcatgggagaatttttttgtgaaagcccccactggatgataagagccaatattctctgaagcaggttttatcacccagtgggctcccccatgcaaaactcaggtcaggcagctgtgggatgtgctaccctttaaacaatggagagtctagcagtcaggctgctacacagttcaactcaattagttagatatgatattagctttaacatacacagcttctatgaggcatgtttccccataaaatacagaataaagaggcatagagta

SEQ ID NO: 41484 - DNA, 799 bp, Homo sapiens
cattggaaagtgtgaatctttttcttgaaacaaagacttgatttgaaacagccaggattttatacacactcatatttgaccctaaataaaagccttgacttgatgcctgttagaatgctaattgggcaccaggaaagaaagaaactactcacatcgagagatcttgatgaaaccgtgtgccctgggaatagtcaagctaggagtagcatggggcagggaagataattgaagtagtgtctttcctaaattacacaattctctatgtagctgttgacatttctcctaatgtttcatgactgatcataaagtcaacactagtttcttccacagtgtttttcagtgtagccagctcctattgattgtctattgtgtgcattctgatgctatccaagaagtcccattttgtgaacctcttttggaaactgtaaaggttgtcaacagtttcaaaatgatgcagtgtttcttagccaagcaaaatttgcctgaaagaaaaatctcaatttcttgtgtgcagacaggacccctgtaatgcttggcaccaccctgcgctttactgcttggtaacatgtcagggtgattcactgttgttgacatgggcatgcattggcatcaaaagccttttcaaaatttttgaaggaagctttgcttactgctatgaaaagtgttaaatttataacggcatcatttcaagatgttttgtcaagagatgggagcaagatacaaagttcttctctattccaccatttactggctttcccaagagcaaatctggtaataagtgattgaatgtcacatggaa

SEQ ID NO: 41485 - DNA, 848 bp, Homo sapiens
agagctgaaaacaaatgaatatttttgcaataagattttcaataagagagaggatgaaacaaaaacttcacagcaattaaaatcttataaagaataaaattaatttcaaactgcttggaactttcagagctccatgttaccaatgtaactttaatttttaaataggtaagtttaaggaaaaaattatattcttaaaaacaaaaggctctgaaagagcaagattttctgttttaagggaagctttgtcctttaattcctttatttattgtgtttgatcaaagtagtcagggtcaagtgtgcagacctgttacatgagatacacatctggggagtaaaggtcagtgagagataaagtgagttaagcagaggctttctggactgaagcccaacaggactgatttacttggaaagaatgtaagctgacaagctccttcaattcagggtcaggaacatgatctagttggtgatgcagctgttttatgaaaggagctttattctgggccttcattgttatcctcctgataaattattttgagtataaatgctttcttgaagagcacaaaacattttatgaagtaattttggaggatatgtatattatacatatgtatatatatatatatatgaatgatattctagtactaataatttgaatgtaaccttgacacacttcattttctcaattttaatacatgaaatgacttctttatagatcaatgtgatggccattgaagaaaaggtagtatttagaggctgcattagtgcaagaatactgattttcaggttaagatgcccagctatatggatagtgcagtttagtgcaaaataaatcagaagtcagaggcaca

SEQ ID NO: 41486 - DNA, 562 bp, Homo sapiens
ttccaataaatccaataaatgtgtcagaaaaataaagttatttttctaagaaagttattaagaaaataagaataatgctgaggtcctcagattctttagaggatcacatagatattagagaagaatcatattctaatgtcataagatcaacagactcagctttatcctcaccttctgttggtggattggtttgtttgattactgtttagtcagagaacttgagtataaaatctgaaaggaatgttagcaaacatatatttacttttggtacagttacgaaaactgaggttcaataaattacaaattgcctaagagttcattgcaagttagtgactaaatttttatctcctaaaaaccagcagtggatcttttcttctattaacacatttgtcaacttgaataccataaataagtgcccccagagtacttatttattgccaaagaaaaaggaacaatgaaagcggtatcctctagggaactaataaaaagttgagaataatggtgatcttaaaacaaaatagtctcagtatgcaaagttgacctctaaatttcaattggctgc

SEQ ID NO: 41487 - DNA, 910 bp, Homo sapiens
ctttaaaatgaataaaacagtagggagttatttcttaatattgaaaacaaatatttactctacgtgttcaagtattaacagctaagtgcctaacgaggtttaattcctaaatacaattgctaaatttgcttagaggtaatgtctacaagagcataaattatatttttttggtccaccaagaatgaagtatagagctttgatcctaatatattttagcaaatgctgttttaattccttgaaattgccattggcccagcaagcattctttttcttcaaatatttgccgagtggcacaggattttaaaaatttgcccagcctgatctatagtgataatctaaccctggtgtttgcatatgggaaataagatgggcttcaaatgtttgtttattaatattgcatttattttttgtgtatcttggcaggtctctgattacagtgttcatatactctaactgtcatgaatatgaaaggcaatgtcaattgacatgcattctgacaagctatttgcagccctccaatcttgaactcagttgcgtaattactttaaagatatgtctgtttttaaaatgatctagtcagtcaatcaataaactgaaaactacctttaattttcatacagtgcaaaaggagaagcttaataaatgactaatgcatactcacaggaaggaacacagagtatgtctacttcagaacatttgacctctttttcagataggtagcaggaacatctgtttgtcatggcagaacgccattggcaagtgatctttccaggttaattattggatgatgtgcagcctttcagtaatttgacagtgcttcattatgagagcttcaagtaggcagatgtttccctgaaggaatcaggaaagtgcagtgacaacttcattgtagactgacaagaattcagat

SEQ ID NO: 41488 - DNA, 496 bp, Homo sapiens
ttgctttggcttctctctcatttttctcttgcttccatcatgtaataagtgcctttcacttcccaccatgtttctgagtcttcttcagccatgtgaaactgtaagtccaattaaacgtcttttctcccccagtctctggtatgtctttatcagcagcatgaaaatggactaacgtaacttggctcttggatggcatttctggactttgcctgttccagaatggaatccactgccctgaagagaaagtccaggccacgaagcattcatcacaagctgactgaagagccctaggtgccttgaatgaacatagacagtagtcaggcagtactcatcatgggcttggggtggtggtggctaccagaagagactcctttgcctgtggacaacaggggacagagtggaaaggactttgtcatgtgacttgggtgtcagctcagctgcagtagaaaagatcaccaggtagattcctaaaatttccaactccaagctctggctt

SEQ ID NO: 41489 - DNA, 534 bp, Homo sapiens
ctgttgtcagcttccatttaaaagatggaaatagaactttatttaggataccagaacaactagacacaatttaaatttagagagatattcaaataggtcatagagacattctcgtgactgctatgaagcagacaagcttgataaatgggcaaggtttgtaaataagtatcattttatttattttattttatttcacattttctgttagggaaaaagcagtagcagtagagaagctaagttttgaaatttcagactttccctcgaggttttacaaatatgttgcccatctttgttctgaattgcactgagttgagtaaattaaataataaaacaaaataaactcacatactgccaaattctgtggaatttctttccagctgttgtgtctttattgagtaatacattatcagtgtgatggtgtatttgtggtgataaatcacactgtttcataattagaccatgtatcctggtaaaatattaactcaaaaactcagtagtatgctgaagaaaaacattttagaatttctgattcta

SEQ ID NO: 41490 - DNA, 527 bp, Homo sapiens
aatgtgagactatcataacagaaatttaatttaggctaaaacattcatctgttttcccataagatagactcaataaatatgttatgtttttaatttgtttgtggtaatcaacaactaagtttgagtaataacaacagaaatcagttttttttaaagactaatgttttcagtctcagcaatagcatggatatgtgaaggtgatttatgtaacagcactgcttaggtaatgtacaaccaggagttacaaagtaaacatgtttctctggccacagaaaaaaaaaacacaatccatattcacctatgttctacttaggagaggtctttcctgttttctgcctggatttctctcagttctatgctctgggatggtagatggttcttccagtttcagaaatagatttccccattaagttaaagtttgttatatcttttgtttttatttatgctgtatgatatcattaattacagatcataaattatattgttagttttcctcattgatgcatgtatgtgtgtgtgtgtgtgtg

SEQ ID NO: 41491 - DNA, 1168 bp, Homo sapiens
gctattacgaagatatgggtagctttgttgtttttaataagaggaagaaagatctcacatatgatcttggtcaaggacacaaatataactatttcattaagataagtagaaaaattaacattttactaagctataactttattaatcaagaatggttaaaatttacttaatgttaacaagttttaggagaagttcattttgatttacctttaattatttcaagataatttgttaccacattataatatatcacaaaatttgaacatgtttgtttaaaagaaagacatcatttcagattggatgcccatcaactagattgttgtgtttgctgtgagagaaaacctctttggagattctgatctaacaaatccagagaataagcatttgctatatatggttttcgctgttaactcaggaaatttcaagggactatttaaaaatatttatactaaattataccaaatatactgatattgtgaaacataacaaaataagtagatccaattggcaaaaaacaattttttatacttgcatgaggagatcatagagaaatatttggattatgctcaggtactttccagtgattacaaaaagtctgccatgaaacttgaatagggtaaagtccacaccaaatgttgtcatcgatgctgtagttggataggaggagctggagaaaattctaagagaagctttgtctgcctaactgatgaaatgaattaacttaatttgttaattatgagattcaaagatcccaagttgcatacttaaactttacacccctgggaaattgtaggcaaatttcctgctggacacaaagggaaaggctgaaaacttcatagaccctcagtcattgcggtgatgaaggtcagagctctaaaagcaaaggactaacttgtgttgatatcttcactttctaagtcacaaaatgttaaaaagagggatttatttttcccaaaagtcttgctgtctagcatataattcttatatcaactttattacacttatttactaatggattatttcttatggttgcagaatattaactatgatttacctttaagataaaagatgcatgtctttgctattaatgaaaaaactattatcttcggataagttatttaaattgcagagaactgtcaacttcacacagatatcaatttttttgatt

SEQ ID NO: 41492 - DNA, 868 bp, Homo sapiens
cacaatatgtatatatatcaacacacacacaatacataggtatttatatccacacacacaaacgcacacatacagtcattgtctccagggccttctccttctcactactgctgaacttcatgaggcattcactttggtaggctgcttagtgcaaaagaactaaaatcagaatgagctctgtacacaagtctcacttttgacattcattgatcatataatcttgagcaagttcttactccagtatttcttggctttgtatccctaacaagttgcttaattcatctatgcttcagttttgaaatttataacatgaggataatactagtgcctatcccctagcagtgccaatgaaaacactgaggctcagaaagattaaacttttgtttcaagacatacactctgttatagacagaaaagactagatctgttatttgattttataacctattcacattacagagtacattctcaaacagaatttccttgatagcattgtcaagggacaaatacacacaaacatttacttaaattgtctgaacatgaactttgtagtcattacataacttaagagttttaaatacattggggaattttcactatgttgactttagagtttcttattaacctttcattgtcttacagctgtaaaagctgaaatatcttattgctcattttcataatacacctttcctgtctctctttttaaagagtagtattgagcaaaataatttaaacattaaaataatgaggatttaatttttgtctttgattcttgagagggagggtaggagttaagcttcagaatgaataaaggtaaatggcaaaacacagattagaaataatttcaacatgtatgttagttttggtt

SEQ ID NO: 41493 - DNA, 832 bp, Homo sapiens
tgtgtacatattgataagtagtatctgttgcatgacggctttatgactatgtataggctgtatgggcttggatatcaataaaggcggtatttgactcagtgccacgtgtgagctgaaagtgactaagctctcagtcctactgtcctcatctactatctgtgacaattgtatacctgcctcttaaaagtagttatagtcctggataacaaacctgcaaatgtacccttgaactttaaataaaagtttttaaaaataataaataattttttaaaaagtagttgttaaggttaaataatgttttttgtagtagtgctatgaagatttatttatgggatttctgaatgttaactgagttaatcttcaaaaagacaaacatcaggttggtactattagcacgatgctttatgtaagaaatagaggcatggaaaggttagcttccttgcccaaggtcacagagagaagaacaacaaaaatagaaggccttgtagagtgaccaggccagagtagatatttgctaaatgctggacttgggactattgcaattttatttagggaaggctgattcctgtgtaaatgagaaattacaccaaacagttaagaacagtttgttctctggtttcagagccttctgttgcagatattttctttgtagaattcccatggaagcccaatatggttacagaaaaacttctaatgtgtgcagtcagagagaacctttatctttattgagcgttatatggtgtggggcatgttagaatctaaagaaatctttgtaagaaatatgttcttgttataggtctcaagataaaaaaaagaagtaaataatatcatg

SEQ ID NO: 41494 - DNA, 409 bp, Homo sapiens
aaatagtgcagtgaaaaaaaaaaaggtgcattgttttagtacaagaaacttggcacattctacctcaaccaaatgatgaaagttaacatcacagattccatgtggacattactacctccctggtatgatgtgatgagaaaggcatttccctctgtggtattatttcaaatgactgataattctggtctaatcaggagaaaaacaacacagatccattggagactttcaacaggacacctgcccagtatgcctcaagactttcaaggtcatgaaaaccagaaaggagagataaacaatcacagattaagacattgtggaaattgaacaatcagaagcaatgatgtagcctagattaaatcctaaatctgtaagaggacattgatggaaaaactggtgacatccaaagaag

SEQ ID NO: 41495 - DNA, 1227 bp, Homo sapiens
tacttctacgagaacaaagacaagacattatggtcaatatgaatagtatgactcatcaggagaagaatattggagagaagagtgagtaatattggagacaatcatgtctgggtccaaaaaagtaaaactatcatgagacatagcactggagaactctacagggaagtgtagagaagggtacttgaagcaggaaaacctcacagaagggcccaagaggctatgtgttagtaaccggaatctagctcaaggcagaacagttgcctgaaaagaatgaaatggaatgaaaggtcaggggcatagactgtggtttacaaaaaatattgggaacacaaccaggagctgagcatcctgaggggcaaacccttctgttggagcaatggtagtcctgagaaatactgtgggggtgatataattgcgggtatgtcagggcaatgtcaaaggtactgttattgcaggagtatatgcagctaatttaaatcgaccaggaacacatgaaagacttctaaatactctcagagacactggaagggtgaaccttaaatgacagtctgggagtctacaattacacagatgtaactatggagttaccaaagttcagattaatcattaatgggatctaatttgtgcccagagactgtgaaagtctaccacattcagactacagagagctgaaaataaagataagtttaagtttcaatttaaactttcattctggacatgtgcagtagcttatgcctataatcccagcaccttaggaggccaaagcaagaggactgcttgagcccaagagttcaagaccagcctgggcaatacagtgacactgcctctacaatattaaaacaaacaaacaaaaaacaaaaaaacatggtggtgcatgcctgtggtcccagctacgtgggaggttgaagtgggagaattcctcaagcccaggtagttgaggcatcagtgagctgtgatcacaccactgcactccagcctggatgagagaacaagaccctgtctcaaaaataaataaataaatacaaataaaaaaataaatttattcatgttaaaggagaaatgtaaaccaattgtataaatccagattatgcaaaatgcaataattatagggaagtagcgggcctctaaataattattttaatcaatgaatatggatgttcatagttttgccacctttgatatgacacaatttggaagcaaaacaaatgtaagcttatgtgtgcatat

SEQ ID NO: 41496 - DNA, 794 bp, Homo sapiens
tatatttatataaaatattttatatttataaaattaacactatcttgtgtgataacataacacctttattactgaagactaagctctgagttttttctcttgcccaaattcctgtctaaagagtctggggagtcataccctacaaaccataaattctcatcagatgggttttatttaaccctatatattgtgacttactttccaatccgacttattttggtttacattcagaaaggcagttctcactttttgttatgttacattttatcagatttcttatgcaatccttttccttctctcatatattattataattcagggttgttgcacatcctcttatgatgcaatttttatcatttctaatgatttcttcatctagataaccgaacaacatttatttaatgagctcctgactcacatgtccgactgaataccaaacattaccgttagctcaggaacagcacggtttaacactgacatcattttctcccttgcttttctttctgaatgtcagttttagtcattgtcgatatcatctacacagctgtcaaagtcaaaagtctggtgttgtccttgcatccacatttgtctttcccttactttgcacagtcaattggtctccaatttctgttgattctactgcctacatttgtaaaactttcagttttctcaactttctgtatcatatttttaaatttacataacattatttaccttccttgacttaaaaaatatctaaactaatatttttccatatctctaagcctattctttcactaagttgacttaatttt

SEQ ID NO: 41497 - DNA, 1845 bp, Homo sapiens
ttaaaaaaaaaaccctccttcaacctctgctttctcatattttgtctttcttctgcttttatcccccctcttcttcccttcttgcctctgctccttcttggaagcagctagttgtcaaataattttttctaagaacgcttctattatttctattcaactgtccattttgttgtagttgtcattactgccattcactaattattgtgacttctccctccttctgctaatatggtactagcttgcctcattaaacctaagtatattgtgcccagccatagaaacacatatcagagctgtcagtgtacccaccgcctcaccccgtgatccatttgctattttagcgtacaaaggctcacatgtttttctctgccaaaatatagactgtgtctcttactgggccaccaaaattttaaaagctgagcattttacatcaccacataaaaaatcttaaaaattaactgacaaatgatggggtagaataatgcaggttctgtgccttctgtgccctgtggtcaggacaactttcaggtttgacttccccagtctcctgagtggccctgatgacctgatgatggagccggaagtactcttcagggaactctgcttgatagtgcaaccctacttggctttctttctttttagttccatttctccaatttcgtacatgttttagctgcataacacttactactgatatcactttcacataaactgtcagctggggaacccaaactaaaacaaaacaaaacaaaaaaatgtgtggaattaatatgtgtcataccaggcttaaggagctcagcttatgtatgattcatcacttactattttcctctaccctggcaactggcaatattccaaacagtgactgctcctttggccagaggcctagagtgagaaaagtatgaagcaaagcccacagttaagttataatggacacgtgcatgaggataaaaatgacgctttccttttaaaagatgctaaattatcagatggtttgttactacagcataatctagcccatccttctactaatggacatgaatttacacttcatttgtatcaatttatatgttatcagaccaggctaggttatgctgtggtgataaattccaaaatctcaatggcttgcaatgagaaaggttcattttttgcttctgccagtctcctcactcctggactcattctggcgaaggagcacaccataaaatgtgcttgtggctctggcagagggagaaagcgctagagttacaagaaaatattcagcacatgtaatttactctcataactcattagctaaaagcagtcatatgacctcatctgaccacagtggaaccaggaagtataattctacattatatcctacattatatttcctggccccactgtggtcagatgagtagtacagaataatctcagtctctcaagattgagaggtgaaaatattcagagaattgtcctagtgagattggtatagttttcaactcatggatgtctggtttccatacaaactactccctaaacctgttatcaccaaggtcacaaaatacagtgtttcttgagctttcctttacactttaaattgttgaataccatattctttattaaattatttgctttttttctattatttaattaagtatgctttagattttatgtaattgaaaaatcacaggctggtttaaaagttaacatgggttgtctctggttcaggcaaaaagataaaggtaaatctgaaaattctcctgccaacacattcctagaaatgctaatgcaaacagaagtggatattatccaagtggataatttattaagaagaggaaagtaaaagaatattttagtacattt

SEQ ID NO: 41498 - DNA, 970 bp, Homo sapiens
ttccttcatccataaactaagagtatttgatggccctgtgtgaaataataatatatatacatacatattggtctctgcccccagtccttggcacagagctcctaaaactaaaaattttctgaatgatagacgtgctaagcaggatcattttatctaatgtttggtctttaaccccccaaattcctgcacagagcttctgagtcccttggaatttcctggataataagagcatatcttcttcaaatgaagcaaatcttggtgggctcttggatgggggtttgttaccagaaagaccaagccatgatgagaagcttggagctccccattctctggagaggggagaatgactagaaaagtagttaataatcaatcatgcctatgtgatgaagcctcaaaaaaatctttgaaacatggtgttcagagagtttctaggttgacaaagacatctgcatgacagaagagtgactcaccccaatcacatgggaacagaagctcctgtgtttgggaccctttcatactgtaccctatgtatttcttcatctgactattcatctgtagcctttattatatccttctttattaaactagtaaacatttcactgagttctgggagccatcatgccaaatcagtcaaactcaagaagatagttttgagaactccaatttatagctgataggtcaaaagtataggtgacaaatatctccatgtcagaactgaattataggacacatagctggtgtctgctggagactctgctgtcagaagcattgtgctgagtggtgtgtgataacaagaaaagtactttgctctttatctctataacccctagttatgactttacaggattctttagcagaaaaaaaaattatgcatgtttactgaatacttgtaattttttggtgctaatcatatgaacttcacttcaatatttagaaaatgtctttctttatggttcttgttgggacgcta

SEQ ID NO: 41499 - DNA, 1393 bp, Homo sapiens
agaaactttgcttcttaacatacaaatttatcatttttcatctgaactttattgtgacaaatatttgtttttatccttcatatttctcattgacctattccatgggtattttgtgttctattgattttctcagctggtagaatattgcacatgcagtttataatatagtattattggattgtactgtctccatagcctagagattgaaatgtttattaagtactattggataagtaccactatgaatagtgccagaaaaaaaacataaagagaaagaaaacttactttaaaacatgttaaataggtcattttgttggacagctgagataggtcacttctctgagccccagttttctaactttaacagctttaagaggcttaaaataaaatacttgtagcacctcatctggcacgtgctcagcaaatctaagtggcagttgctgttgtatattatttttaatttatacattgttaggatattggcagacaaaaatgtacaagaaaagcctttaaaataagttttaacattttctcataaatatttttacatttatatttttattaagtggcttttcattgataatgtaatattggtattttcagctcagacaagttctgactcaaaaagaatttttgttgagtctcggttaataaaaattttgttacttaatctaaattaataaaactcacctaatgttttggattgtttggtaagacatcattcttttacctctttactgggctagtgattctggtaatccaattgtgtgtaacaagtcattaatgaaagcaaaggctatgttcctcaaattatagaatttttttttagtttcttttcaaactaaaagttttccttttgtcacataacagccattactaatctattctgatatttgtaaaatcctcactttctatcagtttttttcaatcacaaagaacaaattatatattaattttgctgtccttcttatctaatggaatttcccttccaattcactttatgtgagtcatctgacatgtggcaagtaccagtctcacagatggatcagtagtggcaatcaaacaattgctgagttttgcaacacaggtgcttggattggctttgcttgcctgccagcaatatacagatttttggcagactcctatagttgtaaaaagaatcagagggagagcacatactcatttagttggcactcatccttctctgaaataggtcccacagttgagccaaatccactgctatcattgcctcttagtttttgaattactattagattcttgacccatatctgcaagttgagaaaaaacagtgtggtttaattacaaatatataaatttagaatggaaatagttgtgttcttttatacaatatctactactagcaaagtagtgg

SEQ ID NO: 41500 - DNA, 893 bp, Homo sapiens
attaagaaacaacaacattcttcatgtatttgagtgttcactgaaaatctgtctccatcacattattatttttctgtttttgatcagttattaaacttatcatggaatgcatatttctttatgcaataaatctcaatcattaattgttctgtcgtaattttgagcatggggtaagaacatagagtgaactagtataaacttaggctaggctttgtgaagacttcatgtagtttaaagtggaacagttaatttaacttgattattaagttattcgaagccacttgtttatttgttttgttttgcttttaatgaggaattgataattcaggcatattaagacaataaactagtttcaacattttctccaaatcacctttgcactccctcatccttgactgccagtcttgctaactgattagcaaatagtagtaaatgattttcaaagtaaccagttcaaagggtattttggcccttaaatttacacgtgctttttagtgttggcaagcatgatttattcaaaggtcaatggaggaattattggatctaactttttttcttcattaggataatatgaaggacttctgttctttaaataaatttactcttccacttttagtgaaaaaatattattatccttgacagtgggtcatttttctacttctttttcttttttcaaatagttatgatattgtaatattgaatagttgtatccttgtggaaatctgaatttgataacatttgaaataaatattgtgaattttatttcttgcaggtgcatgcaataacagcatagccatgtgctgaagtatggtctgaaagttaagtgttagaatttgtgtgtttaaacaagtttcaagaatcattttatttgagaacatttattgctcaaacgt

SEQ ID NO: 41501 - DNA, 1636 bp, Homo sapiens
tgaaaaaaataacgagctcttagtagacatatatacatatatatggctctatggtacacgaatagcagaataaaaaagccatcacttgagaagggtgaagatgaagtagaatcttcacgatcagtcaggcatcagtgtaaaagaagtgttcataagttgaaactgcagttagttttgctgccagattgcaaatcacaaaagaagagttgagggctttagaagcttagaaaatgtgttagtttgactagtgtagatttcagtataggttactaaaggttactgctaggttacacaaacctgtttctgaaggactttaaaacatgtttcttagtggcatacaatgttttgttacatattttaattctttagcatatttgcacactcatatgcacgtaggcagatggaaagacatgtctcttcatatgattctgtaagatctgagatacagcacagatggatgatagcaataacctaaatcattaaacataaagatcatatttttaatctttaccaatcttttacttttatttttgttaaacttactttctttgcctttagaaatgacacatttctttttctaatttttaaaacacttcttcttactttaattttcagtccgacatacgttcttaactcatgaaatggccctggatattgctaagtaagaaaactgaataacattcattgattttcctttcttctcacacactctccatatctacctgattaccagagctcatagataatattctctggacatctgaaatccatcctctggcttgtcttttcattcccaaagttactccccagtgtagaccatttgtattgctgccctggaacacgaccatgtgtctcctctcattctccctgtcagctttcttactctcttctatgccattctctcttctgcacacaaaatgatttttctaaaattcaaatttgatagcattctcccctcacattaaaaaaaaaagttttcacatggtgctcttggcacgtaatctaaaacaagcttggtttacaaatgtacagtctggtttcttcataactccccagattcatgtctcctcacacctgcctttttactttctctttctctatcacctctcggtctttgcctgtactgtttcatcttaccccaaaactttttatttctttaagaaaggtttctataagcttctaagactggactgagtttctcctatgttgtatttcccaagcctgtagttaatcatagtatagttctcattatgtggtttggtaaattgcttatttgctgttatctgccagcggtaagtggtaacctcagtgatggtaggcctgcattttactctacgatatattcatactgactccatagcacctagcccagtgcctggctcacagttggtgctcaataaatatttgtgaagtgattatagtaaatcatacagatgtgaggtaacatttaatataaaatatcagatattttatgatcatcatttacattcataatgttggataaaaccaaaagggattagaatcagatacacaaataatggtgtaaacacatctttataataataattatatagttttttaaatctgcctaaataatagccaaatcataaatgaagtattattctaattgtttaat

SEQ ID NO: 41502 - DNA, 1420 bp, Homo sapiens
tcacactttaaaagctcacgcttatccttaaacaaagtaactacttatataagtaaactgtcattgtatttattgtaactatgagatagtttatattaaggaaggcattacacagactagtgacaggagctcctaattgagtttattatcatgaaatatattcataaaaatgtagaagacatactcataaaataaaaatatataataaatagaaatcataaacaatgaaatcacatttcagtttacttttagtcattcatagattttataatccttaatatttaattccctggttaaagtggaactgatgttatcaaaataatagttttacaagattataggatgagcagaaagtacatttgcttactatttctataatagtaaaataatagcaaatgtaaaatattttgctacaatttaaacaaacatataaaaagtgaacacaaagggcaaaggggacacgctcataaatcactgtaaatcaaattagaaaacaggttttgtttttatttacataaaataaacagacctctcatttgccagttgttactgttaaagttttaggtgacaaaatgttgattgagaaaagtattttgttcaggaaaaagtaagttaactactaactttatcccatttaaaaagaaaaaaaaaggaagactaatcaaagattacttttacagagagattcaataaacaatgcatttaagggtaagccagtatgaaatgttttttcttaggaaactcactaagaatatatatcacagtgattccacacgtgctatggtcctttatacagagttgaataaattcattattttctcagcagttaaataaacaaagtctgcgttccctgaataataggaagatttgatgcatgtgcctgctggctcacttcctctgtcccatttgcaagcttcagtaactgttccccacagagcaccaaagggacacaacaaacacatgaagagatcactctcatcccacagaatgagctttacagtaacttggatctctacacgaaggtgtaaattcagagcaacttacccgattctctgcaacaaagatggcaaagtttgcaaggagtgaaaatcatgtaatacttcggggaaatgcaggatgcagctgctgctccagcctgtaaattggactgcactgacattcagtgttactgaatgtaacaatcaactgttactgacaaagctcgcgagagttggcagcagcaacttgaaatctgttcagaggctaatggtataaatgcaatagtgattcatttacagaagtattacaggattcatgctttacaattgcaggtagtcttctaagaatgaagaaaaaaagcatagaagattctttaactaaaataatctgaaatgtaacagaaaatgcatgtttcttttaactctaaactttaaaaaaattt

SEQ ID NO: 41503 - DNA, 888 bp, Homo sapiens
gggatgcaatggcttggcttgggctcagaggcctgacatatttggagaacaaaaataactgaatatcatcaggagatgaaatgtaatttgcattgaaattaaggaacaaggacagaatacaaggaaatcaagctattatattttattatacctttgtttttatttttattgatattaaatagcatttgaaataaaatagaaatgattctgacatatcatgaatttggtgtctctgctgattataaaacagacttcacagaatataaaatgaaacactaacaatttatttgactactctgtatttctgtgttgacacagtaatatttcattaaacagaactattatctaccgctgccctttccttgaccctcaagtttatcttaatttgttttagatttcgaaatgagaggaatgcaaataaaaaatgttgaaacatggggttgagtgtagcgcattcctgtttgctttcaatccctcctctatagagctttccttgtccagctcaggctggaaatttgtcacttctctgagccccaaggcacctgatgtctttgtgtgttattcactcagtgatttggtattgtcttataatgttttaataataagcacattagttcatacaattgttttcatgtgaattttcctgggccttaacaatagtcccagggagtttggagaaggcaggtattattatccacactttgaggtaggggaatggaagttcacatgtttgcttaaggccaactggctttttaaatggtggtagcagatatacaatctagaattattttccattgtattattaaacattgtaatattatttaattcaaaaatttatgttgaacttttaaatatccaatgggaattttaaaaatctaccatattttt

SEQ ID NO: 41504 - DNA, 698 bp, Homo sapiens
agtcataatgcgaatttgtttttatttatattgttcaggaattgtactttgttatttcacaatctgtcatattactaactcttcatatgtctttgctgcaatacaagcaattttttaaacttatcttccagggtaatatttctctccttatttgtatttaatatgctgtttatatccattttattataatttgaataaatatatttcgaatgttagaaatttttattggccttcataaatggagcagtccatactgtcttattcttaagttctttttatttcttcctttctatttttaaacattttaaatatagtctcacaggatagagattgagtctctctctctagagcaaagagcaggtttgtttactgtctagtgtaatgaagatagtcttcctctaggacaaaggtctggcaggcttactgcccagtgtaaaagatcgggtttcttaaggtcaggattcctcacttattacacagctcactgtttatatagatgtcacctggtactcttcatgttgccctgtggaaatctggaaattgaagttcttgttttctctgctgaaatgcatgctatgatcaatcgttttcttcactgggggaacgagaagataagcccatctgaagtggagctttattttgtggaatctattgtgggataaggtgtaagcatgtccttttataaagtattagtactt

SEQ ID NO: 41505 - DNA, 701 bp, Homo sapiens
agcattttgggctgggaagtctttggtgtataccaaaggctttcaactcctgaggccagggccccgtcctgctgcctgcaggcctggcactatgtcagcctatggcaggggctcagcaaacacttgctgggccggtgcctccagctccacccgagctgagtctgcttcccagccgcgctgcccgctctgctccccgcaccaactagcccgggcttgctgcccgctaggcggactcagagaccatcctcccctctcatccacccgcagacagacaacccacctggagaccccagcctctcgcgtcaccaccgccggatggccgcggatagctgccgggagtttccgtcttggtctccttggttaccgcgttacctcggtacccatagcaaccagaaagctgggttctgccactgtccgccggcagagggcgaaaaggagcctgcgaaatgagagagaatggtgatcacaggaaggaaaagggcggaaaaactcaacaggctctggaagctttccgccagagaggatcttggagattatgtatgtgctaaacctgagcatgtgtcatattccaagcacaagtgagagacttatatgtcatatttgattcttcctcatagcaagccagcttaaatctaaaaaaattaaggcacaaaaaatttgactatcttaatccaaaattacaaagctagcaaatggcagac

SEQ ID NO: 41506 - DNA, 683 bp, Homo sapiens
ttttcaaaacataatatatattgcttgagaaaacaattcctctaaatggtcttaggaaaagaaaacacaagccttattttttcctggaatcaagaactgaatcaccattctctcctccccgatatacaaagaatcactacaaagtaatagttatgtgagaacctgatatgacatgaaattaggtttccagaaatccattattccataatgcaatcaggggacctatttcacagtacatttacaacacatgcaataaacttggactctgaactccacagcagctgattaaacaagaagcctacttcttctcagctgtcctggcatagctttattaagtctagcaaacatcgaacttccagaatgccataaataactttggcttgcaagctgtagtaacagtactaaaatttcctcaggtgtaaacatgtcctactagctagaaatcctttaaaagatgattactagactaccattgtagctatcatggatctaacgttaaggtgagaaggaataatcattttaactcttacaatacactgtagacaagatttagtgaatcatttagcttcagagtaaaacggtcatccttactatggtacaattttgcagattaatttgacaaccactttcacctttaaatctgcacagcacagaaaaagccaaactaaaatataatttcccta

SEQ ID NO: 41507 - DNA, 2059 bp, Homo sapiens
atctttcctttattgaggaatttcactccggttcaagaaacaactttttatctcacaatggcttcttagatatactatataaaatacatttactttgtaacttcctccacccttttcaaaaagcacaaccaacgtccctactctaaagctggactcgaaccgaactagattcagaaagtctgtccctacgtgtgtgaccttgggcacgtcatataatccctcggtttcctcatcagcatcccaaaatgaaagcgctctgaaagcagtaaaggagtaaaaacataccttaggtatgacacctaagagggtcaagtctttctgtttaaggcaaaattatctccttagagggccacatcattaaactggaactgaatccgtagaccccaacatttgtctcttccttcttccagtgctcctcttccctcaaagggcataacccgagtcacccccaagagccgactcccaagcaccctttccttcctcctcccttttctcttacttacaaagcagggggaaaacagcagcctcacctctcggtccgaagccacaccttcaaaggaccccaccccaggcacatccgccctgtcccctctcccggggcaccaggggccaacctcgcccttcccctcccgcccccacctagaggagacttcctggaggcgttcgggcccaagccggcaggcggcatttacaaacccgctttacgccactcgcgtagggtaacctcgcttacgcccgtagggccccgctctcagccccgtccgctccgcctgccagaaccaagcccaagtgcctcagccatggcccctgcgtgaccctagacctcttctgctcggtgcagagctacggggactgggacagaacagctacaccttaccagcaactgaggcactgacttcacttcccaccttgcagccctcttcaactcccggatcaattcactccggcgacgccggaaggacccaagaggaaccaggcgttgtccggaatcctgcccagccggagtcgtgcagaggcttatggggactcgtagtcccgctcgccggcgttgtccgcaattcctgcaatcggaagactacacttcccggcaggccatgcgggggatcctgaggcgatgggtggtgacacttctagccaatagtaggagaattccctgcctttgcgggaggaggtgagatgaagagagatggtgcacggaaaggagaggaagggcggggcaagccctcacctgcgccaatcagggtgcggagtaggccccgcaggcgcctcacccattgagggggcgggctgacagagcagaggaaggaagggggtgaggggcctgtggtggggatcctggggctgtcgggctgagtatgccgtgtgggtggagaggaagcctcggggaaatcgcccaggtgaagggagggcttggtgtggggacttgcactgggcagaggggcagcttccctgagagcagctaagccccaggcacaccgggcatccggacacacaggtcggggaaggataggctgagccggggctcccagcagagacgcctgggtggggcaggaggccgctccaggtgtgagccacagaggaggggagagggacccccacgggagtggaagtggcagagcagctgcagaagtgcagggagcggaaaggtaccagggcagctgctttccgctgcctccggtccgggcagctgcagaaacagcagggggaggagcaacagctgccaaattcgccaactagaggagggagaggcggagcttgggtccctgtagaagccagaggcgcagtctggactgtagtttcccgggagagacgaaagcaggaacgagagcggagcggagcacagtccgccgagcacaagctccagcatcccgtcaggggttgcaggtgtgtgggaggtaagcgtgggtccttcttcggggcgtctgcactgccctggagaaaacgtcttccaataggaattacatcaagacacagctaaaagagtccgcgttgggttaggaaaccggtgcaaaacctctcgggtgaaagatttacatttttcgactttaagggcaaaaaa

SEQ ID NO: 41508 - DNA, 742 bp, Homo sapiens
acagccagaagaaaccagcggcaaaccgatgttcggttctgtaagacctttctgccctttatcctccctccccacccagtctactctgaagaatccagagtcgcctggtgagcaggggaggaagagcagacatgtctggcagacaacaagggagaagaggcataccacaacactccttcccactgcaggctccacacctacagcaagcagaagctggacaggagggagaagccttacctttgaattaactgtcctggactagaccagacataacaattaatgaaccaagactgtgtgtttatgaatacaagttttgaactattttttgcttttaatctgagagaagttagtgaagcaaacaagtttgtctaagatttcatccaggaacagaaaactcagctccacaaaatggtttgaataggcaccgagggagagaacagagtaaattaaaattctgatctaccctttgaatcctgtttgttcagcattatggtcaaatatgatctcattcttggcaggctaagccaaacgtgttactccattctttggccagtcacaagctccccgtgactacatacaatttaagcatcaatcactggttgaccatatacaattcacagaacagccccaacactactggctgctgccaaagtcatcagggtcccagaaaactccctttccccatccctgcagcaatcccttgctgcttaagggattccctgcctctcttcttgccctttct

SEQ ID NO: 41509 - DNA, 2554 bp, Homo sapiens
tgtttttaaagaaataaactactgcaggatggtgaatggtatgtagtgtggacttttcccacacatccagcatctctaaagacatcctattaaattaaaagaataagaaataagaaactagcaggtccagatctaggttccttccattcgactgggccatgactttaattaagctgctgggtcatggcttaattttcccttgaaaaacagcacagtttgagaaatctctgccaaactcttcattttttaagcaactgacaaagtcaacaagaaagcaaatacctagaatccacggaacaatgctcctcagagcagggctggcagaagcggcggagggctaccagtttccctgccccgattgcagctgggcctttgacaagagctcgggtaaaggactatctgtgcacccgcccaccaaacgcccagcgggacgatgggctggtgctacgaagttctaaacctaaccgctgggaggaagaagcgggaggatgagaatgtcatctcccctgacactctggtgccggcagtcctgaaacgctcacctctgacgtccctgaaggtcagaggtggcaaccacagtgccaatagctcaccaaagccacttttcctgcccgggtggaggcgcggggcaaagttggccaccggctgcgcgcgtcccgttagccgtaccttgtaactgggcggagagggactcctggtgctgctggtacttgagcgccaccgcctcggctttccgcagctgcgtctgcagctcgtagtagagcatcgcgccgtagagaaagccgaacacgacggtcagcagcagcagcgtctggaaaatccgcttctgctttcgggagcacatcccgtttcccatagtcccgcctggacccaaagccgcggccgcccccgccgtctcctccccttggtccgagcgagcgtctcagcagcggccgccgcagtaggtggccagacgcagcatgaggaggagatgccagacacaaaagccggcccggaggggaagtggcgcccgctcagcccccgcgcggcgcggggcgcgcagccatcgacgccgcccgggcagctgcagccaaacttctgcgaggctcgttctccgcgaatgcccggggccgggaggaggccctccgcatacttcagagccggctgccctcgcgcctgtccccagatgcctcctgccttttttccttcttcccactttttggccccgctgcccccgggcagttcttggagtcccgccctggccactccccgccctatcgcggcggctcccactgcacgactttgttgccacctaagggagggggtgcgcgcccaacaaagggaccaggactccgggccgcgcccccgtgcggcctgcccaatgggtggaagggtgggggccagctgtctcggctggttttggggacggcacagcggtgtcactgacgggtcggctggtgcctctgccgccccgccacctcctgcccaacttacgtgtcacccacggcccggctattctggccaacgggattccgggaggaagtcccactcggcctccttgctcattgggcccgtccgagcagacgctccctcccttcggggaggcagtgccgggctcgattggatgccggctttgtccgtccgaccccagggccgcaccttccctcccagtgccggggccggctaggggctctgtgggcagcgcggccgcctggcgccggggtgcgcccacgtggagtcggagagggtgggaagaggcaggcggaagggcgaagggcggggagctttgggtgggcgggggacttgtccgggcctgagtctgggtgaggttcggtgaacacgtgtgtgtgtgtgtgtgtgtgtgtgtgtgtgttccagttctcgttcggaacgcacgtggagagcggagtaaaatgtgtgtatgaacgaaagaatggatggcagtaactgtgtgcactctgctgagtacactttctttccctgtccaataaactgatgcggcagacacatgggatagctacatagcacaatcccggtagtcaaaccagagatgccatgtcgactgccttaccccatccagtgtactagcctagatgtgtgtgtgcccacagatggcccggcaggagtcgggagactggaagcacgctagacttaatgttcaattgtccacgtgggctggggaaatcggcttgccattggcagagaggaaagaaatggtctcacatttctcctctagctgcaaatagaataatttaaaaacaaatcgtacagactgaaatgagtatccattcattttgtcatatgtatttgttttattggtggcaaaacacatcagttacatttctaaattacattttaaagggcaacaaaggttccctatgtaaaaactagtacagcacaggaaaggtagtaaccacaaacctcttcgaagaaatgtatactgcatttattttttctgtgtacttgaggggaataattaaggttatgcacaaatgataatttttgtttctgctgttgacctgaattctaagaaaagtaaattttatctgtctgtatagtgtggtgtaatttatga

SEQ ID NO: 41510 - DNA, 781 bp, Homo sapiens
tcaaatgaacctccgttcattaaattaaacaaacctcagttcttttcatgtacattttaaagtacatttcttcttggacaatgcagaattttaagtgtacaagaaggaaatactaatgaaagggaatgaaatacctctggattctcatcaagcaatcaaatactgtaaacaaagggaacacatctttgcaaatgttggatgtacatagataagtaaaggttttctagggtttcctgttagttggccatctgctttctagtaaacaaacaaatgtggaccctttggactgtcattaagagcatatgggtagagaacctaagggctggtgatatacaagctgacaagtacctggcctacaggaagaagacaggaaatggggaaggactttctccagaaacataagcttacccacgtcaaggctctcttcctattcatggactcttcaggatctagcctgcctaagtccaaccaactctgcacacttggtggccttgaatgagtaatctcgcctttcctgtccttgtttactcacttgtgaaatgagaaaaatgaattagatcatctcttgtgtttttttcaacactaacattttataattgaagttaagggtttgaaatgaaaaattagtttgtgatatttgtatctcttttttatgttttagatttttttaactttttaaactttttttaactttcttttaaccattttttaacttttattttaggttttggcgtacctgtgaaggtttgttacataggtaaacatgtttcatgggggtttg

SEQ ID NO: 41511 - DNA, 1598 bp, Homo sapiens
ggggaggatccgctcagtgagtatgggattttattttgcagtggtggaaatgttttgaaactaggtgctagtggtggttgcacaacgctgtgaatgtactaaatgctgctgatttttcacttcaaaatgattaattttatgctatgtgaatctcacctgaataagtgaatgaataaatagagtgattcagattttctaccttttttgggaaaccgctttctcattctcactatgtaaccatcagctagggctaagtagccactgctcctttagatgaggcgatatactttaaagtaccaccatcactagcactctgtattgtttacttggctctgagactaagagtcagtgccaagtttcaacatgcacacactgttgactttactgtggcagagagctatttctctgcatgttctaccaaaaatgggaaaatgaaagaattgccgagaggtccatacatttcaggagagaagtggggagtcaggggagaaggaaaggaacatacttcctttctggaaaagaaagatactcttttatcttaatatgcaaataaggtatgtcaatgttcaatcagtgtcaaagagaagcttccctcctttatatacctccatgggcatttgtagaggttgattcctaacttgcagtgatgttttagtaaccaaatctaacagcagtggattggggaaggcagagcaggagagaaagggaatcaagtgaaatagagaactatagtgagaaacaacaaaaacataaaatgaatagtatctattctcccttaacacctctgatactctgaatggtgtcaagaagacaatgactggttccctcctcttaaaaatcgtggaataatgtctgaaatcaatggaaaatactcagtatggatgattttactcctctaatggtttcttcacttgaaaacctgtgtagtaaagaatttaaccttgcccgaaaggaaatctgacctttgacctcggcttctgggaagtaatctctaatatcaggcctgataggaaattcttttgcctggaatttcacccagcagatagtctaatagcctgatgtagagtgggggctggccacaccagaaaacctagcaatgtgtatattcagagtaggggtcttgtgtcatgatatgtaacacaatctggaagctgagatcaatcacatgggcaatgaatctatcaatcgtgcctacgtaacaggactccgatcaaaactgaatagtgagacatgggtgaatttccctggttggcaatgcttcacatttatgtcacacatcaatgctgggaaagtaatgcctcctgaatccatggggagatgacaattgagaccctatgtttggtacttccttggactttgtcctataagttttgtcccttgggtgactttaaactacatattttcctagtaataaaccataaccatgagtataatagctttcagtgagttcttccagagaattattgaaactgagagtggttttggtatccttacagagttggtgtcaaaagtgagggaagtcttgtgtgtactgtgtaccctctaattttgcggttggctatgctttcagagccctactcctgactttttaaaaaaca

SEQ ID NO: 41512 - DNA, 951 bp, Homo sapiens
gcgggatttgagtgtgtatgctgggaggggggcgggtaggaagaggtgggagcagagttaggctgagtactgagcgaagccccttattttgcgtcccagctgcccttccagcccccagcgcccagcccccgccgcggctgggtgaagaggaggggtcgaggagggcgcagggcgtgggggacgcccagcagcgcctcaagcccgtggtggcggcggggctgtctctttaagcgctccggaggggctggggcgggagggcggcgagcgcgtttccatggcaccggggctgcgggggctgctgggccactgggctcactcggtttcagttgctcccggcggagcaggggcatgcagctcagcggccaccgagcctctggggctcgcccggccgctcctcgcgctcccagacgcctgtgacgcctgttggggccaagctgctgccgttccctccgcagacagacgcgccgcgccagcctcacgagccctgcaccaacttctgcccgacaagcccaacttctgcgccgggttcggacttgcggagccggaacggcgcaccgcgcgcagcccgggcggcggccagggcggatcagcctcgccgagatgtcctcgcgactgtggctctggtgcttctgcctgggcggttgccggctggccgccaggaagcgccctacagctccggctgggcatgtaagtggcgcccgcgcgctccggaacgcttggagagagcagacaacagtatgccccgccccacctcggacctggtgcggacaccgcggcccgagcccgggaagggatggggggcaggaggtggggacagacacctgcgggggctgcgggctgtcccgggcggagcgcggcggaacgcagtccccagctagtccttggggagcgccagcccgggagcggagaccgcgaccggggcgggtgtgctctccacccggtacttcctca

SEQ ID NO: 41513 - DNA, 1477 bp, Homo sapiens
agcttaaagctgctgcatcttcacactgcaatttattgttcactgctgatgataaactggttattcctgtcacaagagtgtgctaggctgagactctgggaattgtatttatctagacaatgataatataacatagtaagtagaaatgaaattttcccatctagcatgttttctgattacatcttaaagaaaatcattttggtaaatatatctgaaatgaaggtggggatattttacagctgtaaactatacctacatagcagggatgtagtccattaattctcaatgctcgaggtgaggctgacaattcataagtggtaaatccagagagttatgaagatattaaatctcacatctggtgagaaaatgtgttatttcactgggttgattgacggacactttcccattacagtgcaatttgggaaatcgcactgttaattgctagggttttagcaaagctctgtagttcaattccaattactttagttttgaaaaacagaacagctggatggtaaaattgcccggagctgtcaccaagggagggcacaagccagcaacccaacctctaccattcctgatttggattttctacagagctattagtgagtgaaattgaaggcttctggcaccggaggtctccctgccatgtgccttcttctggctggaagcacgtttgtttgcttaccgctcaggtgattgccaccgtaatcatcaggcacgctcccattattactcatttgcttccctcttcacaggggagagatgagaaaagcaagtctcatcacatcttgatctcctcaccacagggggatcgcttccttgctttagagccaagtggagtttacactttctcctcagagatttcttttgctgtcaaattgacctttgagtccttcgttatctatgggggcgaattacatgtttccacacacacagtctctttgtctctggctaaatctagaaagaacaactccagttgtggtttggaaattacctagcatcagcagctaaatgtaatcaaactggatgattcagtacatcccaccactaactcccacatcgacctcagttcactgtgtttgaatcaggtgagtgtcaaatgttttctttggttaaggtaacgtggaccatatccagagcctcctggctccgccttgcttggtatagctgtgaatatgtaaggggctttcttcagtagcttcaggatttaagagcataatgaaatgggggtgtcacacttctgataaaatctcagtgagcacacagttgaagaaggatttcaagaagaaatatttgtgagaagaaaaaaagcttagttatgcacatgggaaatttaaagaaaacaatatcttgcctttctagaatttctttttaatattcattatttattttttatattgtaaattcagactaataatttttggtgtccctcaaagtcaatactcttgaaatatgtggtcaacacattttgacaggg

SEQ ID NO: 41514 - DNA, 1016 bp, Homo sapiens
aaagccttatttccctcccccctcccttttttttggtgccataattagattgagtggtagatgtttctagtgaatcattctaccaattaggctaaaatattaaagacaagtaacttgagaaggaaactcacatatctatagcactttgcagcagatgtatcctatttacttctttattttattgcttaatgactggatctgaagtaattgcaccatttgacagatatttatttgtaaaatgtgattcattcagtcagacacttttcaaatgattttcatgccaagtgttaaaattgcgtaggcttgagtagctgtttcaaaagatgcaaacacacatgttaattccatgcatcaagcacatctactttcggctctttttattatagaaatatttcagttgacaaagagtgctagtgaacagacggcagggacttctggactttaatcaaccgcaatcactggcagagttcagaattaatttcctaaccatgaatcacctgcagacaatgaatcacgttctagagaattttgccaaacaaaacaagccatcatgccctatacaacttttgaggacagggctatggaaactcatttgactagcacagttgaaacagtgaaagggaaagaatactagcgaatactggaacaagctatcaaagagtgcctggtgactttcaacttaaaaaagacaaaggaaagcaagagttcagcaagaaaacactcctttctgaaacaacctatccattggttggcttctatccctaaattctagctattgacaatcaagataaaggattttttgactaggataggttctatccattatagcacagacgtcaaaacattttcacctattctttaatcaaagaatcagaaacttcttatttagtttctgtttcagacactgtatctccttggacagaaataaatgagggcaattagacaaatattcagatcattcagctaaaaaatgtttttgaatgaaataaccaagttatttttatacttaaatttgt

SEQ ID NO: 41515 - DNA, 899 bp, Homo sapiens
cagtttcttcatctgctagagtcactcaaatcggtggcagtaagaagtcacttttgcaataattattatgtacagaaagttttcacataaattatctcactggatgacctgtatggtcatccaggatgactggccgtctttactctagaattatataacttaatcattttaccaaaaagaaacaatatatttaatgtttataatactaagaattgtcctttggactgtttgtaatagacatgtcagagggacgacttcaaatatgagctagaaaacaactatggacttatttttaaattgaatgtattaaatcactgttttctttttaaaaatgaaagaaaaacattcccagtctgtggccattcttgcttcacggccctgcaccaccacaaatgttgtaaatgtggagaagcaaaagtaccactagatggagtaagaacaaaagacatgcacttgtctgtagttcaaggagtccccgcccttgcaaaagggatcttagtccccgcacggtggctcacgcctgtaatcccagcactttgggaggcagaagcgggcggatcacctgaggtcaggagttcgaggccagcctgcccaactttactgaaaatacaaaaaaatcagccgggtatggtggtgtgtgcctgtaaacccagctacttgggaggctgagagaaaatcgctagaaaccgaggaggcagaggttgcagtgagccaagatggggacactgcactccagctctgggtgacagagtgggactccgtctcaaaagaaagagaagaaaaagcgatcttagatcaccttgagtaaactgaggcttactgaagctgagctacttcctcaagactctagacaagttcttggcaaaatcattccttacttttccacaaaaccatgctga

SEQ ID NO: 41516 - DNA, 1859 bp, Homo sapiens
gagactgccggctgggagggttgggggtggggggtgtggaataaatttcttttccgtctttcattatgcctagtgttccgttattggaacgctaagcttgtgggggttatatcctactgctcaaggtcatcgccaaggtctaatttttcaaaaaagaaacttctaacctctggcataaaccgatgaccattaaaggaacacaatttccaatgttcatttagatcttctaattaaatattcattaaatgttaaatgatctctcaaaaaaaaatgactgttctcccacaccccgttgaggggactggtcgagatctaccttgggagaagcaaaaacctcaacaaaatctgcagagcaggaactaagttgtaatacaaccataaaaggcaacaaaaagcggaagacgggagaacccacgcaggaacggctccaggcaaccccggctcactgcccattcattttggccgactttggaggtgccttcacgtctcctgccaatttgcagcacactggcccagtcagtcaggtttgggggttcacaagcccccattgccggcgaggggtgacggatgcgcacgatcggcgttccccccaccaacaggaaagcgaactgcatgtgtgagccgagtcctgggtgcacgtcccacagctcagggaatcgcgccgcgcgcggggactcgctccgttcctcttcctgcggcctgaaaggcctgaacctcgccctcgcccccgagagacccgcggctgacagagcccaactcttcgcggtggcagtgggtgcctccggagaagccccgggccgaccgcggcctccaggcggggttcgggggctgggcaggcgacccgccgcaggtccccgggaggggcgaacgggccagcagctgacattttttgtttgctctagaatgaacggtggaaggcggcaggccgaggcttttccgcccgctgaaagtcagcgagaaaaacagcgcgcggggagcaaaagcacggcgcctacgcccttctcagttagggttagacaaaaaatggccaccacccctcccaggcccaccctccgcaacccggtgcgctgccgggcgagtcggcttataaagggagcggccgccgaccgcacggattggccaagctgactctcgcggctctcgtgagagtcactctctcgggcgggctggttggggggaacgggaaattaaagttccatttccggccatgaggaaggacgttgcccttccgcacgtccgggaaaggctttgcgtctttacttccgaccttctttaaaggtgaaactaacttgaggtatcagagggccttttttctatcctctgcagaccagacgcggttcacctcgactaccttaaaaatggaattcacaggaagattttagggcctaagacacagaacactaattcctagttttgatcatcacattttttggagaactttgtgaaaatagattcccaggcagcactgactacagcagaatcttgtctcggctcagtgggatgcgtccgagttcctaccctgcccccttctccttagaatgccttctccagcctctccttgagcagaggatggctttaatcaagtgtaactactacattattaatcttaaggactgaatctcccttttattaggaaagaaaggcgtttcaatcattgactttgctttaaagtagtgctgtgtcttgatgaggtaaaaagaggggagtaatccaccataaattgtaacgatttttttttttgagacggagtcttgctctttcgcccaggctggatggagtctagtggcgtgatctcggctcactgcaacctctgcctcccgggttcaagcgattctcgtgtctcagcctcctgagtagct

SEQ ID NO: 41517 - DNA, 1206 bp, Homo sapiens
gcgcacctcctttggggtcctttcctgccccccgacaacacccccagtccccccacccccagccaccccagccccaccccccaacctccccagccccaccctaccccacccccaccccacccaccctccccagccccagcagcctgctgggagaaggaggtacctgatgaacagcgagctcctccagtcctgagcttggtcgcccacgcagagttctagcccgccctgggccgcgcggctctggcccttggcgcggccgataatgttcgggtagataaactggggctcccggcacccagccacgcccgccttgatcattcccgagccgttgtcgatcaccaccggtagctggcagtggttcatgccgccgctgctgccgccgcctcctgtctctgagccgctctagctacgggctcggccggggccgagtgcctggaacgccgcgtcacagaggccccggcacggccgggtgaggccagagtcctgggggcgcaggcagggggtcggcagggccccaggcggaaggactcgctggacgcaccgtgctcctcatgttaccgcccgctattgcttctcgcaggaattgggccaccccaacacctggaatcccggaatcccagtatcaggaaaacccgactttcgcatcaaaagattcaactctaacccttcacaagtgcatttctcaaatacccagaagagctataacagcagttttattttccaaagccacggaattctggttaactggtggcggttccggggagttctagaattcgcccttgaaactggggaaaaatgagacttaagaggagaaagttgttgcaggaagggaggcagtgtctgcttctgaaatgttaaacttctaaaataaggagaaaaatgctggaatttaaatgagttttaagtacgtttattattgtttctgtaccttgggcaatgctttgttgtgtttcttcctgtgatttccaagcaaaatgtacgcaattaaaacaaaatagtagttcctagcttaaatatgtaaataaatataaatttatatatatttatataaatatatataaatttaaatataaaatattaaaaaatatataaatttatataatttatataaatatatgttatattatataaatatatttatatatttataaaatatatatttatatatttaagcaaggatataaatcgaaatatatatatttatat

SEQ ID NO: 41518 - DNA, 2797 bp, Homo sapiens
aaatataaatatatatatttcgatttctatccttctggtgtaatctgcaagcctcattcgctactcttgatttttaggctgaaggacgtgcctgtctttttgcaggaaaagtgaagtttatcaggtcatatgaaattcaagtttggaaaaatttgaaagtacattgcatgtcaataaacgcatcttggtgtctgattctgcatacatctgtagagaatttgaaaacaagcagtcaatttagaacttctgcttggtcttcggaagcaaaaagaggaaattcaaaagtaattttacacgtccttccaccagaagctgaaaggatggctttttcgcggctgaataacgaaagccccctgcttcgccccggactctgagcagctcaacctgcggaaaggatgtgtaataaaacgcctttccagggagacaaaaaaaaaaaaggccacccaaaggaagggcaactcgggagtgcctggtttctactgcggtacccgggcactttggaagaaagtgcgtgcagattcaagcttttgaaatggtttcagctctgttcaattgggcataggctatttttccttttctgtttttttctttaaatacattatattcattcctctcaatttgataataatcacttgagaattgcgaattgacacttacatatcaaggactttacaaaaccctctccaaagtggggtttccgtagtgtagtggttatcacgttcgcctaacacgcgaaaggtccccggttcgaaaccgggcggaaacacactaaaaaatccctttttttttttttttttttttccttcgcttggaagaaagcgtgagatcacgctttgttttcttttgttgtttgttttgtttttttttctgagggaagccttagcttaatgtatgccggtccttcaaaagacatgatagcaatttgagagtctgaactgtaagtttttgttactttattcgttcaccaaatgtttttatggaagccttgccacgtggaacatgtgtcccgggttttaaaaaatgaatttgactcaccagctaacactgaaaaaataatgtacagcctagaaggaaagatcaaagtgtaaaagtggttagtcctgtcgcctcctgagcatttttgtattatatcacttggtttttcgtctgaagtggctgtaaataatcgtattaaaaatcttctggtccagacgcaggaaaaccttttccggtataaagcccaccttcctctaatgttgcgcatgcccactgtgcccagctgctccgctttcgtgcatcccagacttctgtcaccaggtaagggcatcttggaagctgagctacagttggctggggcacaaaaaaaccagggggtgccaagagttttcaggtacgtaagcgggaaaggggtgccaagtctcagctaaaaaatcccctatggcagagatccgagtacacatgcagcagtttccaccggtggggccccgaggaaggggaggatgatgggagaagacaagcaactacaagcccccgcacgcagtgcgcagctggcttcaggagagaggcccgcggtgctgtgctgccgggcctcggcgcagagccccggcagagcgccagacgctgactgccggcaccagaatgctcgcgatgaggaagacaggcggagcgctgcgagctagcgagccctcagctctcgtatccatgacgcctgctgcttcgggggacccctggcatgctggggagtgggtctctgtggtacatcctgtaccgccctggccggcgccggacccccatggccccagaacctcccgcactgccacgggaagacagagccggacgtgacgccaccgtggaaggaagggaggggcggagcgtggctcggtgacgtcctcccaagatggcggagacagagtgaagaaactgtgttccccccttgggttgctatcggtgagttcctacttcacccccagcccgccatcccggtctctctagagcctgggccatcagagggcaggctccttggagttccagcacgggtcggggcgcaggtggaaggcttgggctaggcagccccggggtggcctgggccacaacctctgctgtggaaattcgcgggagtgggagctgggcagagggcagggcggcagaagccgaggagggactggctttggttgtcactctcggatgccgcctcgcgtagagagtgggaagggagaaggtgtggcctccttagcgcgagtgatagaacctttgacagcaagccatggccgggcgcattcccggctttctgggcagccacctctcgttttggagaaactgcactggggaaactaacaggttttggtgacttgagagcagtttttaaaaactcgtactgttctgcccctatctgtcccaagagatcatgtcttagtggtttaaaaaatttttttgtaacataagtatgtctactgagcttgaaaatctgagggttcaacagatgtgaaagcgtcaggttttgctgtgctttttgcaggtggtagaagtgttgccattcaccgtcacttattgatgtgtccaaaggattgtgttagttgatcaaggtaaccaaagatagaaaggcactcatcccttcattcttaaccatgtatgtttgataaggattttcaagggggctaaaattgtttaagttatgtcctctgtcccttccctcactgaacgttgatgagaacttacggttactgatttactgtttctttttgtcttttagatcaagggtaaaattccattctgatatcaaaatgcagtattcgcaccactgtgagcaccttttagagag

SEQ ID NO: 41519 - DNA, 904 bp, Homo sapiens
acaaaaattaaaaataaaaatattttaaatgtggaagtaaaaacaaaacaaatacaacagcaaaaacaccagcagccagcagcttaccagtctctgaggtggctgtcttctgtatccagtcgctgggttgggaatcacttgttttaaggtcattgtcctcttttctgctttcagcattggagcccctgagaaatttgttgacagttgaagtctggggcttagtttctccttctgaggaagttttcttccttgtttgactcatggtgaagttgatgggggtagttcccaataagacatcttcctgttgctttctgttttctaggatttctaagaagaaaagaagattctgtcaagcctgtgttcaatcaaaatatcctcccctacatgactgccccccactccctgccgcaccacctttctttttctgtttttttattgctgttaatgtttaacatgaaaataagaatgatgtaacccaggatccagaagccaatacaaactcaaagcaatttgagtttttaactttgccctatttcattgtgtgagatacaagtcattaagcatgactttggcaagcacatcaagtgtgtcaacacatcttaaattacagctgtcaattagttacctgaagacttaatatgcctttaaaagggactggccatttgcaaagctgtccccagaggagtttgccttcagcgacctctgccttctggtgacccccacctccttcctttgcacataagctcctttttctctttgcatattcatattttctctacccccaaccctgcaccaccaccccactgaaacatgttggcagtaaagaattcattcattccataaatagttttaaagaatctactgtgggccagttaatgttctaaatgcaaaagattcaatgacg

SEQ ID NO: 41520 - DNA, 643 bp, Homo sapiens
agctgtgcatgtgtgtgttgggggaggatatgaaaactctctgtagtgtccactccatttttctgtgtactgaaaacttctctgaaaaataaaagttaaaactatgtaatttgaggtatgtgcatgaaaacaggcacaaaagaaactaggcaatccttttctttaaggaaaatttgggcatcagtcgatatgatagtgataagtaaataagtactagttcataagtgcaaggattaaaacaaatgagggaagccaagtggagcccagaactgtaacacacaggagctgcagatgccaatgactcatcgtcctgcccagggacttccatgacatgtggacatttctgcaggcacttggaatagcttgcattttagattaaaatttggtggactgattaaaaaacaatgaaccactcccctggcatttcaaaaagaaagcaagccagacccaagaaccatggaatcaagaacagatgtggtaccaaggatagctttaattgtacattagataagacttatcctttcccattggccaaatagcactgagttctcccacttatttcacataacttgtgactaatggcaaaaaaaaaaatcctgctgttttgttgcagacaatggaacctacagagcctcatatagat

SEQ ID NO: 41521 - DNA, 2047 bp, Homo sapiens
caccagacttgaaatagactgcagccttcttccttcccaccttcttagaatctttgtcctattcatcttccttacgcttccccgggttctcttacttctggattctaacagtgagttgtgagaagcaacgcggaaaacggaatggagactccagcttgttttaaacgagctgtattaccccgcacagtgcaggagaaaagataattggctcaggtctcggctctgccatctaccacctgtggagccttagataagtcagttcttatctctgtcactcaacggtctcggtcttgtcatcttttacatggaatgtcatgaaatatacagtacattgcaggaactgcctcaggtaaagacttctagggttcagtaggtctcagtcgatccctctgagaaaggccgcaccctaaatgcacagactctgactctaaggggatggggtcggggaatctgcattttagtagcttctcaggtgattcagatgctcagtcaggattgagaaaccaggactcttcccagccctcctgttctctgatccacttctctgcttcctccacgtcctaacgattctccagttcccgcacagcaggagcggagggaagaggggagagaaggcaccgctaaggaccgctggccccgccaggcggccgacctccccattccaggggcgccagccggcggattacataacgggcctcggggcgcgttctcgcgaggtttccaccgccccctcctcgctccacgtcagagggaaccgggcggagcggccaacatggcggaacgcaggagacacaagaagcggatccaggtagcaaagccgagctctgggcagggggcttcggcgcgctggatagtggaaggggcggggaaagccccctaaaagggcgagcgaaagcaagggcgaggtggggtggggtggggtggggttccgccgcgaggcagctggctgcaggctgcgcgttgtgaggggcctgagggggggcggtgttggcgacggcggagacagagacggaggtggtggtggagcagcaggggaaggaaggaggcgccgcgctcagaatccggctgcggaggcgcggctgtgggcctggagttcctgtggtcgcgctgtcccgggcctgagctggaaggtcagcctcccctggggcgcagacgctgacccttcccggggctcctcccctcccttcaccccatcctctggccttagctggcctgaaattaaggccacggtaataggggtagcaggaggcggcggactgacctaaagcagctggttctttgtgcgcatagaccgtaagggggaatgatctggacttggtcagctgcctcggggcctaggcagggatctgctcatccagatgttcagttgcgttgcccttctttcccttcaatattattaacttaatagtccacttgaagcttgccggcttttttccgggcgacgtggtgtaaacaaccacaacctcgttggtgctgcaacgagctggtggagcccagaaacctttcacatgccagtgtgtcatcctcgtagtaacgtacataacatctccccctaattccacatgcgtgtcatttgtgcatttcttccttgcgattttccctggttcttgttctttgccaagaggattaattatgtagaacatcttggactcaggatatttattagtcgtctcatcagctgatgtgctgagaaaccttcataagccctcaaattgatcacatgtagtaaattgttactataatcataaattgttacattcatcattgcctttctgttccttactatttcattgcttagaatgattttttctttcttccattttatcccttctttttttttttaagtttatcgatttattggcgtacaatacagatgttttgagctatgcaagttaaaattcttctgtaaactttttaagtgctgtgaaaaagacacacatgatcagtaaatttggaattttggaatttggcagaaataaagtagttccgaacagggtgcagaagggaattagaaagaggcagatttcgagttcagacagataagact

SEQ ID NO: 41522 - DNA, 1238 bp, Homo sapiens
tctgaggcagctaagtggcatgagggagtctgaggaaaaacaaaataggaaaatgtaggatgataaaacaatcttttctaatgtgatctatacctttttatggcctatatcatgaatgaactcatacatactaggttaagtctccacaagactttgtatcactgacccccaatccagttatgtcgtcctcagtcttgtgcacatgccacactcattttttcttctagtctttttcctatcataacttgccactttccctaaacggttctgtttcctctgtcccacctgcctctcaaaatcacaaacaaatccctcaagtccttcctctaccgaatgtactcttccccaggccctccagccttcatcagcctttgtatctaaagttctactgagtttatcaagttagtacctcccagtttggcccttaactattttagaattgctacatatgtgtgagtttttttaaaatctcctgccagctaaatctgaaaacaattgtaagactgttttatactttattgtaactccatagcaattaccacagtgtgagcacttcataaaaactcacctttgccacattggtggaagtccccaacatgtctggcatttaataaatgtttgttaaatctgaaaaaaaaatggaagtgaaggaaaaaaatacagaagtaattttttaaatgttttagaagctgttttaaaaccacttactcaacaaatagtctaggctccaggaatacaataataactatgacttggtccctacatcaaaacatattctgatctgttagggaagatttataactaatcacaatgcagtgtgttgaataaggaagagagagatggtgaaactatgaagaatgacatcacacagaaaatgttttaagtaaattttgaaacataaataggtgattacccaacaaacaagagaagaaaggaaattcattccaagcaaagggcatagaacacaccgagataggaaagtatgagtagttgtgtaaaaatgtcagagagttttatgttagtaatgtgttctatgtcatgggtttaaagccaaacaaacggaggctctgatactatacaaatgttaaataatgtcagtctcatctttcaacctaattgtgaaattattttcaacacaatttgattgaaagttaataatctacttttctttcgtgggggtgggcagctgtgcaggaaaattgacagaagcagatgatcctgctggttctattgccttc

SEQ ID NO: 41523 - DNA, 1007 bp, Homo sapiens
atgtgacctgccatgtccagcctgaagcatcttttaaatgggagaagcaaaacaggatcttaccaacactaagattatctttcagtcattcagcaaacatttgtggagtgattactatgtgctaagcattgtgcaatcacaaaactcaaaaagctagtttagtaagagagacaagtattcatgcaaacagtggcaatggtgttgtgtaatgtcaaaagtatctgtgacgtgcttatgagatcacataagtgaatacccagcccagattaggaaggtcaggaaaggcatcccatagaagtatcatgagctagatcttgaagaatgagtgggtattagccaagtaaagactaggggaattttgggccactgcagcaagatgtgcaaaaataagacagcagagtgagcatggcatcccctgaaactgaaactagttaaggtgcagctggaaaagagaaacgtttagagagggatacaggtggcaagtcattgtttgaccagaatcccttcctttagaaaatattcctttcccttctgtggtgctcctcattccattccacggtgactggcctcaaggatgagcactcagttcacaccaggccaattgaagtcttctcatttactcaggggtcttgaattccaaggaccatgtggacctgaagaaaccaatggctatgctgccttcacatgaatggagcctgtctagaaatagaaccaacatgaaaaaaacagaaccaagggtggatcaggaagacaaggccttaatgccatctttgaactcccagatctagcctggcctaaagccatccctgggcttttcagttgcatgagccaacagattcatcattttttctcagttattttgaatgagatttctgtcactgggaactgaaagatgactgagttgcacacagtaagtatgaacagtgacactaaaatacctttggagcagattgactcaaagcaggagagtgacacattcagatttgcatcttagactacactaatca

SEQ ID NO: 41524 - DNA, 920 bp, Homo sapiens
gctggtctcaaactcctgacctcaagtgatccgcccaccttgacctcccaaagtgctaggattacaggcatgagccaccgcctggccaccctgtgtaaactcttatctggagacaactgccaagtttacatttgcagaggtaagggaaggagaggccctgacccagtggcccccgctcgcccgcctgctggggagatggggagctcctaggacaggggccgggtcctcaagatgtggcatgaggaagggggtctcactgagcccccaagcggctcccgcactgcgcacccctggctgcgtccctctgccagcctcaactcagccctctcctagccggcggggggtgacagtctctgtgatatctttccgtcccgccggcaggcggcgccctccggcccttgtttcgttgggcccggacgggacgtgcgcgctcaaaggttgcccgtctctgacgcccgcatttcctggtctggagccggctgagccacagcagggtcgccgcggggtcccggggccgtgctcccctgcccctcccgggagcgcgcggggcggggcggggcggggcgggaccaggcgggcgagctgggccctcgcccctccctcgggcggtcacctgggcacgggcgctgcaggtgtcggggcctcaaccttgcggagccgacagccatcgatcctcgggtgagtgcgggcgcaggtggagggcgcccggcgctctcgccaccggcgtcccagcctcggggcggcgaacggtccccgcgccgctcccagcctccctggccgggcgttcagcgcgcctgggaggggaaggaatttcctttgcaggaactcaggggctgggggttctctgctacttaagagatccaggagtggagcccggacgcccgagccttcctgcttcgggatggggattaccgcggagc

SEQ ID NO: 41525 - DNA, 1911 bp, Homo sapiens
agcccaagagggccaggctgcagtgagctatgatcgtgccactgcactccagcctgggagataagagtgagagacgctgtcacaaagaaagaaaaagaaaataagaggaaaagtgaaaggaaaaccgtcaggaagaaagctgactcctcacttactttttggattagtaaataattcatacatttttatgcttctgttttttttttttttttccaaactgccttccaatcaaatcacagcatcatatggtaactgttcaacattatacagtattagtggtaggtaaggtaaactttttaccgaactgctgcctgtcatactactaccgtatcgtgtaccagtgacatgcaaaaggccagcttaagttctggttttttaaaagtgttaatctgctcaactatgccctccaatccaaacagtatggtaaacagttctaactcctaaccaaaaatggtcacagagaatccaaattctcggcataagtctaaacatcggttgagcggaactggccaaaccatcgcactgcatttcgaggcctggcacaaaagaacaactttggtaactccaccgtctaggcatactaatacctgcaaaatacagccagcagttctggtgcacaagaggcctacccaggaaacagtaagttctggagtcgttaactaaacataccgtcacaccgacacacaagaatgtggcccgcgtgtgaggcagcaacgctgcacccagagaatcgagggaaagacctttctttcagggtgttttcagcctcaccagacctgcaagcagcccccgccgctctcaggcccacgccgggatgcctccggcacgagggaagcgggcagccccgcgtgtcggattctcccgctgaggaggagtggggtggcgccggggcgggaaggagaagaaggcgaaggaggcctggcagtgcccgccctgccctacccagcctccgcgggcccctgcgcaggcagccgtaacaaggctgcccgcggggcccacttgcaggaatgacagcgcctgaggagcccacccgggctcgttccccggaaaaccccagctcccggagtcccaagggtgaccctgcgcgcagggccgcgcagatccgggacctgatggcggaaggggcgctcctgcctggagggtaactggaccctagagttcgtcttcgccccgcgacacgggcctagccggctcctccacgataggacgggtctcgagtctctctttccccacactgcccgcaaaagagccctgagctttcccctgggggaacgtgtcgctgccccaactcgccccccctagttacgacatcagtcaccatctagtcactcactccgcttccgccatcttctctcctccatcactaacatgggctgcgcatgcgccccccggcggcgggcggagaggcggggtcggctcagcccccggagccagaggtcacgtggcgtcctcagcttccaatcgcccccgcccaccataggaattgctctttctggaaagtgaccagatttcccccactaagataaccagtgtctcctctccaaacccctctctttctctcctccaggatcttcctcttggggagatatctgtaataaagatataaaaagttatcttagattgttaaatttaaaatttaaagaatatgggcgcggtggctcacctgtaatcccagcactctgggaggttgaggaggatctcttgaagcgaggagttcaggaccagccttgacaataaagtgagaccctgactctaccaaaaaaaagcccaacaataataataataataataataattttgaagaatatctaaaatataccaaagcctatgcaaactgcagagtggtttcaaagaaaatacccacgaggattagaggctgaggtctcagggagaaaggaaattcagggctgg

SEQ ID NO: 41526 - DNA, 1731 bp, Homo sapiens
tgactgacttgattgggtaagtattcattgggctcttgttccatgcaagggcagtctacaagggcctagatatgggggcccccaaagaagaaaaatcggtttttcatcatattttctggttgagtttcttcctttattatatttgttacatatgttattaaattatttccataaaagaggttatgctgagcaggtaaccaaattcttgttcccccaaaagacatgtataattcagacgatttatgcaattagaagaagggagacttcatcagttaataaagtctagaacgtgaggaagcccagtcatttccaggaccttcagatgcccaagctggatccaggttttccaccccgacagctccagggagcacgctggagagacagacttcaccagcgggaaggcgcggcaccctacgcgcaaggaacctcaagtcccagaatcctatgaggactccaaatcccagaaacctgcacgcaaatctatcccgggtgccaagtcggccgaccgcagacgtgaccaagttgcgaggctagggtgaggtgtcgtagaatttgtccctaccattgtccctgcagggaagagactttagtgatctagagctggtcattgtctctttcacagctcgcgtgaaagcacccctctcggcgtgtttgatgccatgatcagcgtctcccattccctctgtcccctttctctgcccccgtaaggatggttcagcccggtattgaggctccttgagctggctggatggttgcgcccgccctaccccggaatgtgggcctttggagcgagcgaagtgggagggaccgacgcaggaggtgtcttgggcccgggcggctgtagaggcggcggcgcctacgggcagtgggaggagccgcgcggttccggctgctccggcgaggcgacccttgggtcggcgctgcgggcgaggtgggcaggtaggtgggcggacggccgcggttctccggcaagcgcaggcggcggagtcccccacggcgcccgaagcgcccccccgcacccccggcctccagcgttgaggcgggggagtgaggagatgccgacccagagggacagcagcaccatgtcccacacggtcgcaggcggcggcagcggggaccattcccaccaggtccgggtgaaagcctactaccgcgggtgagtgtcctgggacagggcggtgggcgggaggggacaggccggctccactcggcctggaggaggggagggtgaggggctggaggtgttgtgggcggattgggctgggcgggcgggcggctccggtgactcagggtgagtgacgaagtgataggggtgggggcgaagcaaggggatgcagtactgggggcgcccccaggtatggcggtgcggggagccgaggggccagagtagggtccgagaaggaagctagggttagagtaggtgcacctggtgtggacgagagactcgcctcctgagagctttgtaggggccttgcatccttaagtctgggtgtatttggggttgcgagttgaggattccaagtgatgccttagttaactcagtttgctgtggggatagaaaacgggacttcttcagttagctgtccgttttgattaccagcaggcctaacgcctctggttctctgagatatacctccatccccgttgtgttcacgtagtgtatctgcactgccagtatattagacataggggttgtatttaagaatcaagtcgatgcgttttcagggacgt

SEQ ID NO: 41527 - DNA, 1222 bp, Homo sapiens
agaccaagctgtatgctggtgattgaggtttggatagggttggtggcatctagtgtgtagtaactatgggaattagcaaatcaatggcagagtgaaggactcactttcactcgctcaggtccaaactaggctttaaatgacttcttttttttttgagacagtcttgctttgttgcccagggtggagttcagtagcacaatcttgactcactacaccctctgcttcctaggttcaagcgattcttctgccttagcctcccgagtagctgggactgcaggcacacaccactgtgcctggctaatttttgtatttttagtggagatgggctttcatcatgttggccaggctggtctcgaactcctgacctcaacccgcctgcctcggcctcgcaaactgttgggattacaggccaccacacctggcctgaatgactttttcactgaggaatgccatagtccaggcagatgtgccacctcattgatcgccagggatgactcagttgtctggctagttgggtaagggaggtgttttttccatcacttctgtgtgtctgttactaaaactgttcatttatatttcacagcagctcaagtgcaactgttcttcagtacttttgtagcttttcatttctgtgactcctttgaggaggctctgtcatgtgaaaggaaaaatttgataaaatgattacatggagacttctaactaatcgtattgtggcaatggaactactttcacttcctcttttaaagaaacaggtaacagaaagcctcctctttagactttcccattagacacatagcagtgacaatttaaactgtggtcagtagccaggcatggtggtgcacttctgtagtcccagctatttggaaggctgaggcaggagaatcgcttgaacccaggaggcggaggttgcagtgggccaagataacaccattgcactccagcctgggcaacaagagccaaactccatctcaaaaaaaaagaaaaaaaatgtggtcaggaatagattctgtttgctgtatttgggatatatacaatgttaagaacaaaatggccaggtgtggtggctcatgcccataattccagcactttgggaggcccaggcgggaggattgcttgagcccaggaggtcgaggctgtagtgagccgtgatcatgtcactgcattcagccttgagtgacagagtgagaccctgtctcaccaaaaaagaaaaccaaagaac

SEQ ID NO: 41528 - DNA, 1029 bp, Homo sapiens
ggatttgggaaaatgttaaataattttttgtgacagacggaataaatgcatttcagaaaagttggcttaaagtttaaaaaaaaggcctgtgtgtatgttattcctttacttagaagatatttcccatgatcaaaataaaaatgaatgttctcccccaatagtggggagtacgtggtaaggcagcggggtaggcctggtggactgcagtgtgcctggttggcagaatactgattctatctgcttcaccaccaccaggggccagtctcttgctataatgaaggtcagagttaccagcaccatagccctctggaggagccagtgtattcactacaggccggttacctagaggttccaggattttatcagtgctgatcatgtgtattttaattttacggaactattaaaagtcaatataccggccgggcgcggtggctcacgcctgtaatcccagccctttgggaggccgaggctggcggattccttgaggtcaggggtttgagaccagcctggctaacgtggttaaacctcgtctctacaaaaatacaaaaactatccgggtgtggtggtgcatgccttttatcccagctgcttgggaggccgaggcaggagaatcgcttgaactggggagatagaggttgcaataagctgagattgcaccactgcactccaaactgggcgagagggcgaaactccgtctcaaaaaaaaaaaaaaaaaaagaagtcaatataccctttgaactgttattcagaacgctctaatatgttatcagggaacctggaaggttttgtactagaattgctctgcccactttaaccattctggatgttagaacttccatataaattaaacacaaatagggcctgttaagtgccaggcactggagattcatcaagcaagagtctaattgtgtcatgtttcatctgtgaagaatactttcagttgaaaataaaaccagggctgcttttggtcattaagacacaaaggaattcaattaaaacaaaatccaggaaattatccacattcttcag

SEQ ID NO: 41529 - DNA, 1793 bp, Homo sapiens
gcagtgagccaagatcgcgccactgcactctagcctgccaacagagcaaaactgtctcaaacaaaaccaaacaaacaaacaaatatatacatatatagttaattgtttaaggtacgatactggtattgtgattgtgggttttattttttattgtgttttaaagacttcttgctgtttggcaatacataccaaagtaaagagaggcttatgtggctggccttccttgtcccacaaactgttatcccacagggttgggtctctttacaacagtcagaaaactggcatagacaccgaggaacccaggccccctctgactcatcacaaaatttgcctatgtgagtcaccggcgtcagcagagccaaggtagatccagggtagctggtcactgggaatagtagtacttgctgagtgtgaaaatgtttccctggtccagtgataggacgtgctggggccatggtaaactgaagagtatgctctagctgaaggccttcaaattcaatgaaagaagaaggtgggccgggcacagtggctcacccctgtaaccccagcactttgggaggccaaggctggtggatcacgaggtcaggagttcaagaccagcctggccaagatggtgaaaccctgcctctactaaaaatacaaaaattaactaggcatggtgccaggcacctgtaatcccagttactcaggaggctaaggcagagaattgcttgaacctgggaggcagaggttgcagtgagccgatatcacaccactgcactccagcctgggcgacagagaaagactctgtctcaaaaaaaaaaaaaaaagaaggtggggagagaaagagagaaacactgaagaccaaagaagttacattctctggccaaattcatgatccctaaagtagacctaaacctatactttggccatactcatctccttaacagtcaatacaaaactctagcacttcatcagagtgaattaaaaatattatgcttctcactgacaaagcaagaatgaatgggtaggaagtgctctatcaggaaaaaggcaatcccttgaggagcctgactgtgttgatttaatgataagattttgtacacgtaagtgtgtcagccagcacaggaaacccgtgcaggtggagggttagaagtccccattcaggactgatagcccgcagccacagtgaaagggtccaaagggcaggcacccttttgcacacagacaaagggcatatttagactgcccagtcatgggagacttccctgcgcactgaaagagagtaaaggcagggagtaagggccttagaaagaggcaaaaacctacttctgcttttctgtctgtaattggttgattttttattcaatttaaaaatatggccgggcctggtggctcacacccataatcccaacactttgggaggccaaggcagatggatcacctaaggtcaggagttcaagaccagcctggccaacatggtgaaaccccgtctctactaaaaatacagaaatcagccaggtgtggtggtgggtgcctgtaatcccagctactcaggaggctgagacaggagaatcgcttgaacccaggaaacggaggttacagtgagccaagactgtgccattgtactgcagcccaggcgacagagcaagactccgtctcaaaaaaaaaaaaagccgagtttttaaaaaattatttatttatttattatactttaagtcctagggtacatgtgcacaacgtgcaggtttgttacgtaagtatacatgtgccatgttggtttgctgcacccattaactcttcatttacattag

SEQ ID NO: 41530 - DNA, 4140 bp, Homo sapiens
ggaggcggattaatgtgtttgatttctcaaaagtctatttactgtccaatttatcttcgtccttggacatgctagcaagtaattattcttatggctggtaaaatgactgctaaacatttattaataattgcagttttggaattacttttttattaaccagtcatgttggtttctaaaaattgttacttctggctagacacaggagccaggtgctgagagttgacctggtgccaagtttcaggactgtccagtcttcacatcagatcttcagctaggccttctgaatattctcacagttagaaaatctatccccctagactcgcagatgctgtttttcccccactggctctgcacagaacatcattatctttgccacgcttctgtctctatggcaataacagatggaaagtgctgtggaattattcatgttcaggaaaggaggcagtcaagaaggaagaaaaggtgggggggcggggtggagagggggcacgacctgggagctcggcggtggaggcctaaggaagggaacttgggtgggggtgcggggagtggtggggattgagaggcttgtgagcctttcggaggcctgttgtgaggaaaaaaaaaataaaaagtacgagcacaagagtatttccagccggccgactgcaaatgtgggcccccacaggaacaacccgaagcagtaaaactagaagaaattggacgaaaatgggggggaaaaaagggacaaagctcgagtctcctgaattttgtgcactgctactcggtggactatttcagttcctgatcttgtggtggggtggagaaaaggggatttcttggtgtttcgaaatgtgacggagcagctctgcagagttcaatatgctaatcggctaccctgggaaccaggaagaccaccctacacgcctcagagggtcacagccggaaagctcttgagtcctatcttccctacctcgtctcgtccctctccaaaaaaacacacacacaaaaaaacaccctcagtaaacactgtaaaaacctttaatttatagctcccttctggaaccgagagagcagcctggtggggtggaggcaggaggctggggagtagggacagaaatgtttgctctcggttttgccggaactttggccacccctcccgcccggcccgatggcggatggaggtcagccaggggaaggcgtctgggtggaggccgcccgggcgaggccggggccgccggggcggggcggagcgccggcagctggctgggcggccctcgggcaggaggccccgcgggggcgaggggcagcccaggagggaggtcccgcgggggcggggagcagagccggccccgggggccctgcagggcggccgccgcccggctgcctccggggcggggcggcccagctgcggccccgcagggggagggtcgcccgtgcctgacctcgggcggcggcactctgccgggcgggcactgcctccgccctgccggctgctggggtcgcgcacagtgcaccgcgcggctgccctgccccctcttccccgctgcgcggcgtccgagcggccagggcgcccccgcgtctggcccatcaccacagagcggcgggtggggcgggggcggggcggtggccccagacagccggctgggcgactagaggaaggaaggagggagggcggcggtgagggtggggtggggagggaacatcctgtctgcgccgggtgcaccgcagacagcgccgcgcgccagcttcccagacggcgcgcggggccagaagcgccgggcgcgcgcctggggggaggggcacgcgcgcgagacgacggggccaggggggcgctctgaggagccacaataggccagacggcacgcgcgtccacgagggggccgggagccgcgaagtggcggcggcggcgacgacgccggcgggcccgcgcgcgcggcgccgccgctggctccgttcccttcccctccccctccccgccgccctcgctctcccccgggcggccggagacggcggcggcgtctgcgggaagctgtgtgtctccgcagtgacgtgggcgggccgaggactcggtgacgtcagagggctgtgtgtagcgatgtgtgtggggttcggagccgcgccggcacagccgaagggagcgggcgagcggcgacggcggcggcggcgggcacaggtgcggctccggcttacggcggcgacgcggcggaggcggcgggaggccagaggcgctcaccctcctaggagcccgacggcggcgacaggggcggtggggaattcacaaagctcgtcgagcttacccgggcaccgaggcccgagtagggggtttggatgcgcgggtcccgggtggggtcggggccagagggggtcgctaggcgggtgttccacggctgatcacgcttcgttggccccaggcggtgggcgccggcagggcagggcgctgtagttgacgggagccgcggggaccccggagacccggacgcccgtcaccgcccccctcccccagtccagcagcgctccgcggggatgccctggtctcgacccggtccgtcagcccccggcggcgcagggatccgcgcccggcgcctaaactgccctggtgtcctcttcgttctggcccggggctggcgcggggaggtgcagcattaggggcgctgaggtgacacccgagaacttcccagggagagggtgcgcgggggggtggatttccacagtccttcccgcggcccccgcgggggggcggtgttgggagggcacttggggttatcccaggctcgccggtgggggtggggggactcctccctttacttccctccacccccttgcacacccacccccaggcttcccgtgtcccttgttctccctctctccgggttagagataggtgggtggctttgagtgggcggaggacttcagggttttaggggctcccccattctaggtcatgcctcttgctctcttccttggcctgtgttgagtaaggtgtgttcctgtggtggacgaaagtctgtacgatggttggtggcattggtccttaatcctttgggtctgttttaaggtaaagtgctgagagtttgggaagcaaaaatttctatttattggatttcttttggcttttctctcaagaaggaagtggaaaaagagtcttttctttttccctcttcctccatttgcattctttgtgaggtttgtctgccttgtgctttttgtcccggattagtcttgttgaaggatggagattcccaggcgtggagtctatagcttttggcttccattaagtaaaatcgctaacctttttttaagagaaagttaatttttgcctgcagtcattccagaaaaatagtgtacacggactagctgaattaatccacttaaaattgtaacttagttacatatggtagatatgttaactcctatctgatttttttggatgaaactgttgttttgtttttaaataggagatgaagtaatggatttttttccctcccttaaaatggcatagctgagaaagccccggtactactaattgagatgatctgcttaagagtcttcatattctgaactcgaaaggccttttatgttatattattgctcgctttacgcaactccaaattgctttcctatttaaatgaatgttcttctagtaaactggtgttagatttaaagaaatcactcaagcttcaccttggtaaactgaactcagtttaagattaagaaactgatttcggccgggtgcggtggctcacgcctgtaattccagcactttgggaggcccgggcgggcggatcacctgaggtcaggagttcaagaccagcctgactaatatggtgaaaccccgtttctactaaaaatacaaaaaaattagccgggtgtcgtggcttgtgcctgtagtcccagctactccggagtctgagacaggaaaattgcttgaacccgggaggcggaggttgcagtatgccgagatcgctgcacttcagcctgggcgacagagcgagactccgtaaaaaaaagaaaaaaaaaaaaataaaagaaactggtttcaaattggccctttggcctctggagcaaattcaaatgtaactcttccccaaccccccttctcttcttccagattaattaaaagaagaatgaactataatccttgaagataactgggcaatt

SEQ ID NO: 41531 - DNA, 1404 bp, Homo sapiens
ctccagtgctgctcatccatggactgtagcccccaagggcaagtgccatgcttctattcattcctgtcacttagcattgggtctattctcaaccagtgttagttgaatgaaaaaatggacttttacctccttgccataatcctaaagcatgccaagatggcatgagcctcagcctttcagaaagaacagacttgagtgctagcgaatatgttctggaaaacgtttggcatactgatacatccaggagagaaaggacaaggaatttcttcttttgtccctctttcaggaaatcctcacagagattttattaatagcttgattaattttaatagcttggttaattctatgatagcttgattcaaattgtgccttcacatacatttgtacgtatctcagtgcagccacaggaattcttgtaacccaagagtagaatttatattgtagcccatgtgtgtttttttcctttgcaaattctctcatctattctatttctgagaaaattcttttaatagccccttttatggcccaaatttacatcttaccaggtagatatttctctgggcttcagtgaaactactctgggaaataacaggaaaaaaaaatacacctctgaaagtgagctagccccaaggaataaggttcagaagtgaaatgtgatctcatggaatgcaactacctaagtcgctatacttcagcctattttgttttcagagtagcacacaccaatcaagtggttgcctatctcaaaaactttagaatttataattttagaaatatgaaagagaatttgcaatgtgatctcagtggctggctcacttctccttgtaaaaatttttatctgattataaaacaaacaacctactttttcaaggcatatcagtgccatgaaatcatgctccacctttgcccgctttcatcatatcaccaggagctgcagtctgatataagagaggccatgacagagagttaatttctgccaatgcccttctggcttttaccgcaagatatggttatttaattttcttctgggcatttacatagagctttgatggtgcttcttaccatatcactgggtctgcctgactgctttatggtgaatctgaaaccattgggaaaatggtccagagtccctgaactttgctggatcctaaaattatagtttggaagctgtgagaatgttggtgaataaaaagaagcatgtgtcttttccatgaattaattttgggtgagattgcaggataaaatgatgcttgctcaggaagtgccaatgcccatctacccaccctgacctcggggagcagcactcagcctgacatgccaagaacagagctttgtccccatgtctcaggtgactgaaattctgccttctgcccagagcccctgcttgggcttcaaccagcaaag

SEQ ID NO: 41532 - DNA, 1230 bp, Homo sapiens
ttgagaattgtgtggaaagtcatgtcatgctattcttataaatcatctcctatacaatggtttcctccattccatcctacctaaagcaattgaagaataaagtgggttggacctctgtactagtcccctagtcaggggtagaggtaagggttttgataaggagtgaagaagttcatgtatctgttgacgaggcaacacacttctgtagacgatttttaggtaacagagcgaggaatgtgtgtattaccttggtgtatgacatgctcatgaggcagtgtcagaccttaaaaaatagggtctaaattcaaaatgactttgctggactttggaaaagtgacctgaaaccaaagttgagaaataacaggtccaggcccattcactgggaaggaaatgtactacgtagaaatccaaggccaggcagagtgcagagaggatgaatcagcaacatcttcacactgggctgtcctttgttctcagatgatacttttaggcacattcactaggacatatatcatccccaagtttcctttagggataatggaattgcagcaaaacattcacaatcccagccaaacttttttcttggccaatgacaaatctactcaaggcagtaggcttggattggaatgaggacagtgaacagaagtgcaaaaaaagataaccagttcatggtcccaaacccaggtggcagtggggtaaataagtactttggcccatccaggactgggatcgaatttcagctctattacttaccatctagatctgtgtctttaacttttctaagcttgagctatttgcatgtaaaagtggagagctctgtacttattttgcagggctgttgtgaaaattaaattaaaagtgtacatgaaagagtttgtcacaaagaaaatgttcaatgttgggaaaagcgtccttcatttctttcttatgcctgacttctgatcttctcttaggaaagttagtgagaacccaggatgtataagtggggaaccccaaggctggcatggttagctccttccttgatgaggcaggctcctgattgaggaaggatgtggagcccctgagaaggaaagggagacccccaaagagaataaaggcctcagaacaaaacacaaggctaaaggcaacgctaaaatgtgcctccatcttcttcaggatgggtaaagaacatttacacagaggatattaactctttccagtctttaagtggggcctaaactagagtgtgtg

SEQ ID NO: 41533 - DNA, 1593 bp, Homo sapiens
actgtttcttgtggaccgaaagttgtttctggtacatcaaaatggaggggagagctgagtttggctggggcagaagaagtgatcctaggggcctttgagctctaagaataagcagagccaggaaagtggggagactcagttatgagcagacacagtgaagagcagtacttagaggaaaacctgaacagaatttaaaactaaagcctcaaacgctgcgagctcccccgcccacaacagcccttgtcagagagcccagaagggcatgaaaggaggaggagagagagggaggagggaagaaactgtatttcccttacctcacagtcttcccttctctggggacccacagaaagatgcactgactataaaataggggcttttaaaactattaggcaacatggaataaagtgtcagaggcagccaaaccaaaaccacttgaataagagcatcactaactgcgaggctggggcgtggcttcattttattccaagcctttggcacacaacacagaatctggcacgtggtaggaatctgacaaatacttggatgtttgtttgttttcttacctaagaggacatcccaaggataccaagcgtttctaggtgaatcctgtgactccatccctagcctgagagacctgcctccaggaaggaagagattattgcagttccctctattttaaaatcttttcaatgccgattttgtttttgatatattattattgcctgaggctttagtcaggagactgagatcacacaaagcacagatcttagaatttaatagcttttctcaagaatgaaatcagattctttctgaaaaatatctaaaagacatgccttattacataaggagagcatgcttcatgtgaagatgtggatatttttagagcatgtgttttgaattttatatttgtggtcctatttacctggatgagtcacatttaaaacgttcccaaatttcttgcctttaaaccctaagcttcttgtggctttgaggaacatttgctcagattactcacaacacaaatcttcctgtcattaaactactacactttgtactgagtggcatataatacatagaaattgtcagacaagctggattattcgtccccaaaggagcagttcttagtaaatgaattacaccaagaaattgctggggcctacaacattccttttttggtttgtttttgggtttttgtttttgtttgtatcctctctaaaaggtggcttcaggctatgttagcaggagagtggagagaaaccaagtgaggcctagaggtctttgggtacaggaatgcagtttcaaaatcctagtgaaagctgctaagaattcagagaaagtggcagagaggaaagacacatttaacatttgctacctaaggtacagctggaaataatatggaacagatggatcagaactgaaaacatggattgaggaagaggcatgctggataatttttgaatggatgctagacattggcagctttactttgttgagtgctgaatatttgtatattcctataaacatgcatgagatttgtcctaacaattaagttatctagacacactttgatctttctgggtcttgattttaagg

SEQ ID NO: 41534 - DNA, 2149 bp, Homo sapiens
tccacctggtgccacccttgacacatggggattattacagttcaggatgagatttgggtggggacacagagccaaaccatatcacttgacattgcctcatctttctgtttagttaataataagtagtcttcatgatcgccgcttattatcttttctgctcattgtaatatccttcctgaaaagactagtactaggcaatggtgtttaagtaataaaacaaagattaaagtgtctttagttagacaaacatggctttcattgctacctcttccactccctatgtgacttttgacaagtgttttaatctcaaagggactgtctctgtcaacaaaatggacaagggtgtaagatgtgttgagaaaaagacttttaatttatgctatccatgcatctgtattttgttacatgaaagatgtaattttaatttaaaataacaaagtattttaaatactttgttaaataaatggtagtgataatatctcatcaacagggccatcatgagtattaattgaaataatatgcatgcttaatgtgttataacttggcccatctttccactgttccaagtacagaacaatcatactctaaatggccagttgagtttcacagataataaaaatgtgttttctgtaaagggtccaatttgctttctttttcttctacacaaccctgggagcactcctaagagaccatgtgggttcaatgtgaatggcttggaattccttaagtgtgtatggatgttgctgtacagttttccactgagtgacctctgattggacaaaactcaaaaagtgctggcaaaggaagattttaagccatctttaaaatgaatggggatttgggttcatggtggtaactagttgaagagagataagagaagaaatatagcctgactggaaagaaaagaatatcaacttggtgattaatatttattgcatgcctgcaattcttcttgaactagtcactacctctcattctttgaattcctgagtcataccttactctgttttcttctacatgccaactcctgcactctttttgtctggcccttaaaatggcctcagaatccctctcaatactgcactgaggcagccagaatgttcaggctgagttggcataaaatctgaaacctatttatcatcctatgaacattcatccattaggcttatctgatcacctagcctttcagttcctagaccacttcttttaatgaccttgtttctacttcagccatccatttacaccctagaaactgtcactagttggaacagttatcttaatatcctcccagattgcaatattcaaaatttccagtgttctcatgactctatttcttttgcctttgttctttgactatcgaggttcattttatccagaaattcctcttttatcttttctttcaaattctgggccacatggtgagatcctaaaccaatttctgccagtatcttctaatttcttgccaccacttcttcaccctgtcccttgctatattcatctagcaaaacatggtatgggattagtactgcagttttatttttccttctccaagaagctgaggagaaaatcctacaactgaaacaagtccaattgtcccattcaactgatttcacttgacccatagaactgatactatggtttcttttgaataaacataaaaattgactcttccagtcttaaaacttaaggaagataaatttgtcttatctgagttctttcccaggaaaccaaacatcagtcctcccagatagcatcaaggaactggaacgtaccagttcactccatctggacaacattccagacccctcacccatcatgattgcctatctgaccacttgctttctgttgaccaactcctcttccctacccctccctaattcctgttttcctgcatgttacatttcttccctgctatataagttcctggttttagttggtcagggagatggatttgagactgacgtcccatcttcccagctgcagtacctaattaaagccttcttctctggaaatactcttgtctcagtgattggctttctgtgaggtgagcagcaggacctagactgaacctttggtgttttgggaacacagcctgcagattcatgcaacagcagactcatggctccaaacctcagcctggctctccgtg

SEQ ID NO: 41535 - DNA, 1910 bp, Homo sapiens
gctttgaaatgctgtaactttaatcctttaaacccatctttttcaacttacaaaacacacagaacttttaaaagaaactattgcagcattcacttgagttatttttatcatgctattattcaaataagaacaaacataaagcttatggttatagcatgtgatacctataaaatcaagacacacttataaattgtaaccaagcaaaattattctttattgtgtcaactgtttcgggctacaagatgccttgaacaagctaggaggagcttgatggagagtgatctggggtcagggagactattggttgggagcccccattcctgggaagtagagctttaggctagggtatatatcagagtctgcatctttgatgtgatgcaatgggtgagaaagagaagtggcagaggcagccaagcagaggaaatcctcaagaagagggattctagcagccacaaagaggcataaagaccaggatagaccccaggaagcataggaaaagagcatctcagaaaaatgcttttgggcaacatttagtttgagcttgtgctctctcttagactctctgctaaagacttcccattaatgccattatttaatcctcacagtaaaccacaagagaggcactatcattagtcatggatcaggaaatgagcattaaggaaattccataatttccatcaagtgcaaaactggcaagtgagagagcctgaatttgaatccagatttacctgaccctagagtctgagcctgtaaccagtatgcaggaccacctcttggctggctcctggcctcctggccccatgtatttgttttcttttatttctaaatggcagctggggaatgttaccaggaaagtaaactccctgagtcattcaggattgggcaccaacccaagcatgcctgtaccctccagggaaatgtggggaggaagagggaggaaagcagagatggaacgtgttttagagggggcctcaggcaagtcatgctcacagggaccgaatttcagaaggaccccctgagatttctcatagaacatttggtttcaactccaaatatcttttaagtttgcactgtgcacctatcactgtgtttagtgtttggttgattcaggatttttgaattaccccagaagtgattacagctcccacacacatgagcaggatatgctgagtgtgtgaaagagaagtctggggtttgacaggatggtgtttattagagccatttaggaagaaaagagagagctcccttctgagttgttgctgctgacaccaatctgtgcattcacactgaggacaagtttgatgacaaatcagtagcatgcattcatatgcctctcaagagcatgtttatagaacctactggtgtataatacaatatgcagattccaaagaaatagaagtcagagtccttactcctctctctagttgttgatgacacagctgagatttaagtttatagagcaaaataaacaactcaggctcaaaatggcactagccatccctagaagttacagtgcccacagataaggccaactgcagactatgtacaggaagtacagagaaatgtcagtttccactcccacccctctttggaatctttcccttgaacccacaaatccaaatcgggggatagaaatctgagtaaatatgcattagcttcagattctttaattctatgggacccagaatgggcttgctgggatgttaggggcctaatgcccgagtgttctaggggctcctggggattaagagataatcagtattgtccttgagggtagggacagtatgtttgggcccccatcacctagagcagtgtctgacacatagcagttgtgtaataaatgttggttaatgaatcaacaaatggtgttccagggacttcaaacttggtgaaagtggcatggtggtcaa

SEQ ID NO: 41536 - DNA, 1760 bp, Homo sapiens
tactcctcacaaccaccccattagccctgtcttcccatgtttaaaaatcagctttgttcaattatgaggtcaggtttcccctttgtgcaggtcttcctgaaaccagcgggcttcctgaggaatgtgaagagaaccaggtcacctgggatttcttccttcctcagaaggtctccccaagtcaacatcgcctctgaattttctatttccttttggcaaataaaagaaaaagtaagtaaaacatcttagtctatgcatgaccaaaggttaaacctttattgcttcattttgattgtatcagcttttcaggacaatgttttcaaggccagagcttattttaatagctgtaataataccagtattttctgataataatggcaaacactttttttggcaagcacttttagtgtttgttgtggttgtgtgccaggcatggttctcagcagttttcactaattcatttcatcttcacaacaaccctataaggtaaattttattatcgccctttctacagattggcaaatgaggcacaagtggtttggcttgcccctaaactacatagacagcaaaagactgagggagaatttggggaagacagtcttgctccagttcatgctcttattcacggcactgtgctgacctctcagtcaccacgctatttactttacatacattgtcttatttaatcttcacacagtgtatgttttattatttatctctattttacaggtgaggaatgaagctcagtggtgtttagcagtttggccagattccactctggcaagctcagtgagacagaaccaatttccctttctgtttcttttagtagataaagccattgacccagcgatgaggcaactcagaaaatgctcagaataccaatcataggatctccctaaaaatcaagtgatgtggtcaagaaacaaagcctaaatagagcttctctgccactctgctatgtgctgctgcatttctccatagaaatgtaactttcaccaccaccacacaaagctgaaccagttaccagggagctgggaagcaagacagatagcagggagacaggggaacactttagggttaggccattattttcagatcaggtagaagagtagagatggttagacacactcagagattctttgactctgacttcaggcaggaagtaaaatccagtctaatcagttaataaaaggcattcatcaaagagattcaacctcacactgttacttcaacaggcatcttgcccttgtggaaaaacaggcttaatttccaaatcattttaagcttgaatattggtgcaatggggagcttaatttgggaggtaatgagaccaccaaaggaaattagaatgattaactggggcacagtgaaagcatggagctgttggtaaaggaaaattgtatttgtagagctatgtggtggggggcaagaggcacagatgaagagaacaaagagggaggaacgactcctgagactggtagcaggagaacagaaggctcttaggaacagaggaaattttttaaaaatacaactttatgaaatgggattgcagagtattattcagttagcatcaggtagggtttcatgtggcaacaaccacagctggcaacacattctttcagaagcacagaccctctggtggttttattgcactctaaggggtgttgttgaaaataacaagttagatttcttcatgaggtcattggcactgcatatacctgggcatgcattatggttctatccatcctaactcggcaagcagt

SEQ ID NO: 41537 - DNA, 3011 bp, Homo sapiens
attaaagaattttatttatttgtgaaaagcttttcaagagcagcaggagcagtgcttgcctccttcttgtcctgtaacctatttttttttttgagacagagtctcactctgtcacccaggctggtgtgcattggcacgatctcagaccactacaacctccgcctcccaggttcaagcaattctcctgcctcagcctcctgatcccaagtagctggcattacaggcacctgccaccacgcccagctaatttttgtatttttttagtagagatgggtttcaccatgttggtcaggctggtcttgaactcctgacctcaggtgatccatcggcctcagcatcccaaagtgctgggattacatgcacgagtcaccacacctggactgtcctgtaacctattatacaaagtgagcatctttcccatgccttggtgaattgccagactcctttctaggtctggatctgcttccaaacattgtatcttttgtattttcaaggtcatgaaatagctctctgagaatgccttttatgtgaagtctgttttttacaaatatcaactttacttcttccgggacatcatcatctttttcatcacaactactttcctcattgatgtcaataagctcaccttttctaaattcctctggctgcagatctagagtctctcaaacagccagctatttcttttagaacatcatttacattcaattctaatttcatgtccagcattatcacttttcatttatttgctgttatttcatctctgttggccaattccctctttcgattagctcatttttgtaaaatgtcatatggattttatcactgggacacaagcagtcaacagagagatatgctttgttgtctgcaagtcacatggatatcaagtgtgctgtgaccaacagactttggtcagtcacagacgggatgtggccagtcactgatcatgtgtacatctgttatttacacaacaatttgcagactgaagagctagcagcagaatttgtactttatgcaattacagttaagagaactgtggcaactgaaatttggaactatgttgttgaggaactcatgtttttcaaccaaactatgataaactgaaatttgggcatatggaaaacatgcaaagcaaaaactgcctgtattgaacttttccaatgccccgaatagctccctgctgcctgtttacagttggtcccttgcctcacccccaggccctggcaaacactgatctgcattccattactatagttttgccttttctagaatcccttacacgtaaagtatgatgtcttttgagtctggcttctttcatttagcatgacactcttcagattcattcattttggacatacttgacggctatttttctttcttttcttttacatcactatacttatctctcatcttaaatacaaaatacaataaaacaacaaacaaacttcctttgattatacacagcctccctccagcccagccactcctgtctccccttcctaggcaaactttttaaaatagtcatcccttcactctctcctcccctctttcttcaacccactgcattttggtttcagtccccgccacacctctaaaactacccttaacaagatcacaaacaactcccttttggctgtattcaatgggcacttcaccttttccttttcttacccctttggccacacttgtcaccattaagcactcctcctttaagtctcctgactctcttcctccctctctggcatctccttctcagccccccttgcaaggttcctttcctttctcatgagtgctccttgaagggtagtctaggacttctgctgtgctcactctgcagctcttccccggacaacctcaactatcctcgtggttttctccagctctgatgtctttcctgaattccaggcaagtgtataatactatctaatagaatctgtatttgaatatgtcaaagatacctcagaatcatatagtcaaatcaaactcatcatttcaatatctgccacccagacaaaattacagtccctccacctgtgtttccaagtttagtgaatggtctcagtatcatctcgtttgtccaaactaaaaacctagatttctctctttcccttactcccaatcccccatagtcagtaaatcacctagactagtcaatgctccctccaaaatctcaggaatcgatatacttctccccatttccgttcacactacccccactctagccaccattatatctcccattgactactttgccataatctactttcaacaccgagtgatttgctaaggcacacatctgatctttcacttcctgtttaaaattatttagtacgtcctctcccaagctcctcagcaagaaaggccttccatgcctaggctcctatcacattccctggccccagcccaccacctcaaactttacagaaaatcaatatctttgtaagtcagccacttgggtgagatcatctgaccctctgtccactgggtcctaaacagcagaaactaggaatataatgaagagggaggttcttggccatgtcccacaggctagatcttggcaggtggctgacctcctgtttgctttctgcttcagaggaaaggataagtctcagcccagaaggcagaagagctgtgttcagatggtgacataactttcaaggaaagaaaaaggcaagacaatgggaagagaaagggaactcagaggccccatgctggaggtacaggcctcaagtgaatcaacagggccttcctcactctcttctttgtaccacctgacagccccataacctgaaggacctgatcaaagggctcctgatgaggacaagaatattactgatctgatattttctcataataatgcccagaatctttttaatcagccagctttggtttagagtagctatcagagagcccatgagacaaacaccactcccttcccagctatctgaatcaaaacaaggacttgagatctgaacctgagctgggaccatggggttcagtttatcattgagtgt

SEQ ID NO: 41538 - DNA, 1109 bp, Homo sapiens
ctcttttgtttttgtctatcttccagtgctaggctacagggagacttacagattttaaaaaatcaacctaagtgtatagtgaagtggcagttacagtttttgggtgaccaaaggttcacagagaagtcctttggaggccctctcattttactggtggtgatctgacaatttcctaggcaagtgacataagggcctactgtgttcacttgtatatccccagcgaccagtgaagcatttgacacacagtaggtgccaaatgaagagaagaaaaattgaaacaagtgacaaatttcagaaagctgtcaaatatcacaagcataggctataaactcaagaattctaataaattcaatttcatggagtttctatcataagaaaaaagcatatggcacttttataattgtacatattgtattatcaaatatattcctgatagaagagagcttctggtttgaccacatgttaatgaaaatagattcttttacttataactttatgcatctgatacttggaaaaagtaaatatgctctgatttattcagaggtgagcatgttacccaaagattgaggacagggtggtgctggggcagggggcatccaagtcttttttggggattagcatatggaaggtgggagagtccatttttccttctgctaaggttgctaagctggaatgatatgatgagccagcaatgtgagggcaaacaagtccacacaggggtaaacaactaagaagggaaagagaaagattacaacaccatttaagcccttgaactgagccatggttaaatgaagctgcctctctgccttctcctgttctgtgagtcaacaaactttcccttttttctgtcatttgaagccaatttcagtcatttgaagccaaaagtcctaacaactatacaaaatgatagctatttgcattgtcttactactctaagtcttagataacttcacattgctgagaaaaaaataatttaggctcatatggatacggatagctcatatggatagcttctttattggatgtctggaacttgaatatccgctatacctctgttatctcctttctttgcttattttaatcagagggcactgtactcacagtaataa

SEQ ID NO: 41539 - DNA, 1226 bp, Homo sapiens
tgcccatggtctaacttctgcttctgactgtcacctcctgcagatgagatgagggtggcaaatctggatgcaggacgctctgggagaacctggcaatcacactttcaatcttttgatccgataatcccaaatacaaagaagaaggccctcagcagttctctattaggtataaaagggaagaaagccagttacaatggctggaagaccttagaggaaaggaggccccgggaacatggggactaacagcaaatcctggtactggccacaagccacaaatttgtgtaggggtagggaagaggataggggatggctggagcctgagacctggtgtttcctatgatcagtgcacctagcttgatgactcatgttcttctagcttttggcagcctagactggtatgtcactgaaatttaaaagctccctgaaatataggcagcattttctctccagctgtattttgaaaagatgacacaatttggatgcaaccttgttttccaacctgaagcaatattcagacagtgtgttgatgtttttaagtcagtaggtgtgtctgtttagtatgtgtgtgcatgcgcgtaaaacgctctccctcgtgatgcaaaacatgccctttttctaatgcccacgaaagaaagttatcttaaagtgaacaattatttgtttgggatgtcacactccagaactctccaccagctagtctattgggcccgctagcttcacagaagtcaaggccaggttaatgcatactatattattagcgaaataactaggtctttaacacctctccctccaaaaaacaaacacacaaaacagctttaactttcatccctctccaataccacactgaatgccccaccctaagccatagccctataacctcctcctcccctctcctcttctgaatgagaaaccatgagtgccccctagtggttcaatggccgtaattgcactccccagctttttgtttgcctaattactaagttttaccagcagggttgcagccaagttcaagtgtcaagttcaagaacatttttgtactgccatgtggtgattctgttgcagctaataaagagcttaaaagtctttgggtctgtgaagcataatctcagctttttctgtttggcggatcttcttaggttctccttggttctgcacagctgataatgtgagaggggttgctgctctcctcttgccgcaacccccaccccaggccttctcactcccaa

SEQ ID NO: 41540 - DNA, 1515 bp, Homo sapiens
accttttataccaagaccatataatatggctacataagcaaaatgttactgtggccagcaaccatgtacattcactgcaatatgaacaaacaaatctgtatttatcagactataacctccaatttagattcacccaagtggctaccaagtattacacattagtttgctttctcaggtagcatggtaacatgtgccaaaagataattacccagttggcgcagaagttaatttgggagacacaaacaacttctgtctaatggaacagataaccctatagggtttatggccatgctgggcattacccagttttgtagctagcccagcaattttatcctaactttatttgtaaattgcgcatgtatatctagcttttcagatattcttaggaacattttaacatcttactggttcccttactaatgacttaagtaaaacatctgaagcacgtttatttcacattgctggaatctagacttatacttttctaaaaattacttcaccgagaaacttcttccccaactgaaagttctcaaaaacttgtgatgtcggccatcgcgggagctgagcgcctaggagctccctctggcctggcaaaggtcgtcagaccggcccgattacccaccattcccctacccagtgctgagtggcaaaagcattatcaggcgcgagatagtaaagaaatggctcagattgcagtaccaccggcccatttacagttgtgcctccctctttcccgcgtgtccaaaaccacccatcctaaaccaattccgggcccagctccaactccactagacctcatggcagctgccagggagtctcgaaaaacagttcaggatcctcgcgtcttggttgtgtttctgacccagacttcactactcccctccctttatcttgactgagacgtctccactcgacagatgcaaaaatcgttacagcggaaatcattaaattgccacacaacactcccaccaagacatcgctcactcaccggcgccatcttgcgagtcggccgcgagagcagagaggaagctacggccgcgcggtctgcatttatatcaaagcgtgctgcgtcacgcgctgagagcgtcagattgtcgcctcccggaaaagaaagcgggaggagcgctgaggccggtaacccaggaaaccagtgcgctgccggacgagagtaggccatcggctttccgcgggcacacgcgggtggctgtggttgaactgactctcgggtttccgctcctggctgttcaagccgattaattgcagtggcctctacagttacctagtggctgctcccggatacggacgcacgcgagggatgcaggagtcatctttcactaatcaccggaatcccctttccaatcagggcaaggcagtgtctcaggttgctttgggatctccttttattgcagttataatcctccagcgaaaaagttatttgtttgtgttttgtctgtgagcctcgttttctaaatgactgttgagggaaattggtgcttcggggaccaggtcctcggg

SEQ ID NO: 41541 - DNA, 5254 bp, Homo sapiens
atattctctaacttaaaaaaatacttttttggtaatatttgatgacatttctgatgagagcacataaaaataaaacaatacttaaagatgtggatataaaatgctcaaggaatcatcatttaaaaacagacggttcccttattgtttctgttcatgtcaaaaagcagggttttttttttacacagtctctgtagctcctaggaatttcatttctacagcagcttttggcctgtgggctgagccactcttcttttggaattctgcagcaatttcctcaaaagactttcctttggtttctggaactttaaaaaatgtgaacagggtaaaggccaggagcactccagcaaagaggaaaaacacataaggtccacagaagtcctggatagaaagcaaacacagactttgagttagcagttttttgaccctctcttctgttcagtaaatctgtggaatattaggctgcttaccgcaatgtactggaaacacagagctacaatgaaattgcaggtccaattgctgaatgcagctattgctaaagcagcaggacgtggtccttgactgaaaaactcagccaccatgaaccaggggatcgggcctggcccaatttcaaagaagctgacaaagaggaagatggctatcatgctcacataactcatccaagagaacttattctgaggaaaaaaacaaaaacaatagtgggactgagatcatttggctgctttttcctttagctaagtagcctctgagttcacaggcggcatacaactttttctaatgtattttgttcaagcaagtataagttattctattctgagagaaattattctagtctgaatcatgcataactctttagatttcttataaggaaatcctctggattaggattttcctgtaaaagaggcagggcaaggatccagtgacctttgcttctgctcatactaaggtttccagacaagatgtttagctccctgtgaagtagtggatgacaatgccaggagggcagaggttcaggtacatgcccaaggtcacacaggaagccatgtggcagagtcagcattaaaacccagttggcggtgaatccagagcctatgctctaaccatgggtacatggcctccctggatgacaaccagaatttacatgctgatattcagtcttaaacccaagaaactagttcatcttttctttatatatctcctttgattttatgctgttgctctggctttatttcgtaagtcagtctcaaatatttttgaatacaaagcactttaacctggaccacagaggtgccaggtaccatcatatgttaatgaaaaacctcagtgcaggcaccaaacttaccagcagcacaagtcccactgacatgaagatggcacaaacaaacatcccactcattccaattagaaagagagaacgtcgccctgccttctccacaaggaatacctaggacaattttaaagaaattatctcagttttgtgagtcacaaaatattgactgtttacttaaatcatttttactgccaaagaggtcattttaatttatataacagataagaggcaattccatccttccattttacaggagtgagatcaaggtggggagtgactctagccccaggtggcagagctagtttcagtggacagcgggtaatgatcaaatatctgcttaatttagtcacattggtttgaatagaccattatagagatagaaccataatgttaccactactccaggattatcactttgggtacaatattcacagactgtacagctggggtctcttccaatagatgtcctgtacatttaaaatttgaaggttccacatttaaacatgacattaacttattttctaatagttatcctaagttataattacaagggtctgtgcactattgacaccggaaacagtacaactgttcaggtgtcaactattctcatccaattttctcactgcttaataaagtcctattatgaccactcacctagcaacatgtggaatttgataattgaaccaaaataggcctgcatttttctggtatgcttaattgtatcttgtgctgggagtgaactattcgttttaaaagttagcactttaaagcaaagggttaaaatgctttcttatcttaactgaggagatacgtcattgattcctttagttttgtggacctttgcattaatggttaagttttacaattagccaagaccagagtttgttatactcttgcctgatccttggaatattaccaaggctggtgagtcactctccccctcaccccccacaaaacttcctgtcataatttctcactttggcacctggtgagcaagttggctggctcatcagcctatcagtaaatcaatagcaatccaatgtctttagtatagtgagctctggctctgaagacatcttagaaacatttcacctacagtgaaagcctgtttctcagaggcacactcatatcagagttttaaatcacttcagataagatgataagctaagagcacatatttaattattgagaaggaagttggaaaaaacagacttttctcaagttcattaaatttctctctatattttaactcttttattatgatgttcaaaactggcttggtgccaccacgtcaagctaccaagaaaatagaagcatttctttgtgaataagctcccttactataaactctaaaactgaacatcttgaaaattgagttggcctctgtccctgaggcctggtgtacactcaggatgagtgtgacaaggagtgagacatggtcagtggctggagatgtcttcccaattagaacgctcatctttgccccagggcctcacgcaaatcctgggctcttagttccaatttggtagtcaccgcttctttctcagtgtcatcctgcttcctagatccctccattttctttctgctttttttctctcaagattacaggccctcttctaccagcccattagtgtggaagaaaatataggatgtggaacacaattagtgtggagttgggaaagtctctcttcccaaaaacaaactgatgttcttccaatttggtgaaacattaatatattcagtgcatatttctatttgcatatttttatttgaaagtacacacacaatttggtaacattggttaattttggggagagaaactgggtgacggagggactatcctttttatactttttgaactttaaaacaatgtttcaaaaattaatataattaaaaattttaaatgtgatctgtagtcctggaggcttaattaatgatttggactggttttaaaagattatgtcacttccctgttcaaaaacttaaacagaatcaaaggatggactctaaaaaggtacattcaaaataattaggacactgtcttaaacaactcctcccacatcagtggggttgggagcagggtgcaaaaatgaaactttacagaagtttcctctttagattttttcagaatttaggctacccaatcttgacaatttgatgctttacatagaaaatcctattatacacaaaatgttttaataataatctatcataaaaaatatgttgaagaatttgtaaaaaatattccaggagacaaaagggtgaatagtcccttggattgcacttcagaaacaggtcttgattgatttagagtggccttttggtttaaacaggccttatctctaaaggtatgtctacagaaccattggtgtttcgttattatctgtttttcctgctctttccaaggtccagcactgtttaatgtggtctggacaaacctgccttttgatctgggtagccaggctgtaatttattgatcaccctaaggtaatagttaagagttcatgtgcagagaataaaaaacaagtgactaaattatattgagtatagtattgtgactaaaattgaaaagaataaactttttgctgtttttatcttgttgaacaaagataaaaataagctcaatgactctcattctacagtgaattacattagttggggagtttttgtctttattgttgtttgtttacttcttagattattatgttagatattcttgttgtcaggttcttatatatccttaatatataagaaccatcacttcttatatatccttaatatataagaaccatcacttcttatatatccttaatatataagaaccatcacttcttatataaagttatttggttttaagaagagtatatgacttttttttttgttggaagaaaacaataacatttctagttactatgtcacttccctcataatctcacacatactctcatgcatcaccggaagccacaaccttgtgaactacttggaagctctgctcaatggcttaataccatttgctgagtctgtttaactttgcttaaaggcttaaatgtctgttagagagggccttgtttatttatttttatatgtttcccccaaggcacatggtaaaaaaaagaatttgaactatgtaaaaagaggaatctaagtagaccatccaatatcaatagaaatgacaagctgtcagctactcccaaggggtttatgtacagagaaaagaaggaacctaggaatctgcacaaggaggaagttctctgtgtccccaagtgagttaaaaattcacaaatgagtgactaaatggcatcccagcagtgcagagaatcagcgattcacctcagttatgcctaatctcaatgcagtggttggcttattcaaacaggactcttctcatgactcacttgggtttacacacttagagcatgtgtacaataagtcattgattgcttttagagccgaagttccccacccctcctgcaatttctggactaaggaacaagcagagtatttatctagggcattgacttacagagacagcagtgaaaaccatgtttacagcgccaactccaatggttgcataaacaggtttgctgataccagccgtctgaaaaatgctggttgagtagtaaaaaatctgcaaagtaaaaacaggttagccttaatcttaagaagtctggcactgatatctttaaagcaagaaatattttagattgtttatttttagttgtttctatagcggcatgcaccctagaacttcgtacagattttctccttccaaggaagagaaccctcagtcttcctttagtgtttaaagcttctgattgcttaaacgtcctccttatatttagttgagaactctgctactgcattttctttatttttgtaaataaattgaaacgttttgttaaagtataatatacatagaaaagtaca

SEQ ID NO: 41542 - DNA, 979 bp, Homo sapiens
ttcatatattatttttatcatgagaaaaaaaggtaatgcacaaaaggtgggctcaaataggagaaaatctaaaaaataatcatttgatattctggttttatctcctctttatatagggtgggaaatcctaacagctgtagtccattgcatgaataagtaaaatttgagggtaaaggagttccactgatgtttttaatccaaaaaacctaacagaaactcaagtgataaatgggggtatctcttgcttcatctctggttggggctttgagatagcaagcagtaccagcagccagaaaccgcataacaaatacattgggcaattgggagttggggatgttgactgaacctttgaacttgactgatccgaatgccaaattctaatttaaaaagggaaaactggatgtttgagacatagtgtgatttggtgaagcaaacaatggactcccaggttaaaaactctaattagtctcttctgctgagttcctgagttaaccgtttgtgtagtggtctcctagtatattttataacttacaaagctagaggatcaaagcaattatctagaaatacacacaaaactcatgtttggtataaatgtctgaacaattaaccaaactgtcgcaacagcttttttcattgatttgatctaacactgatatgcctcatagggtcatgagttgaaaaaacaactctaaagctattccacaagaagaaagataatatttttctaaacaagtgttaggaaaatgaaaatatgaaagtttctgtttatgcttatttatgaaatttgcctaccttccaagtgtgtccccaagccacccaccaaagaatgatgcagtcattccaccaactgcaaagctggatacagacagggaccagagcatggtgattagttgagcagctgccacagtctcttcctcagcccaaggggttggttttgggttcattgagtatgagattgtgggcagttcatctgtactgt

SEQ ID NO: 41543 - DNA, 761 bp, Homo sapiens
ttttttcttttttttttctaaagtatccttcagcacatgatattctgcctggagttttctgtgagctcagcaaacagcagagtcagagattaagaattatttattgcctccttttttttcccccgtgattgttaattagggagtcaaggccaagttatcagctttggaacagtgcacatcgtacctgacaggccaggatggccttgtgtctcccacgtggacaccctttatctctgtgtatgaggaacatatgatatctatcactgacagaacttgccaaaaagagaacttctacatatttcacttgcctgttgaggtgcattgatcacaccaatgtcatatccaaactggaaggaacccagcacagcagtgatgacagtgaaaaccagggtcccagtgacctgcagggggcgagacacagggcagggaaacaccaggcaattttagtttcccatctttctgtcaggctgcagcttaaacttcttacaggctccacaggctggttctttcccctcaatatcgatttgcagtatgccctgtgctccaggctggcaggtgttgttcatacaagaatgtgagccattcatcatttcccctatgctgctaaaactcaaagaagtttgggacagcttcttccaggggaggaaacaaacattcttttccatatatgtgtatgagaatagcatacctctcctgactattcaccggataccagaatagggatgcataaaatatatgagaaaaatgattgaaattacttg

SEQ ID NO: 41544 - DNA, 8021 bp, Homo sapiens
aatctttataaattaaaaaagctaagagcatacatatccacagaatttaccacttgtgggtgtttagctgtttggcttcaaacacacagaaatctcaaccacattttcccaccacctaccacacaaatcccttttcccccacttaccagtagaaacttttggtgaggtctctggacaaaagtccaaaaaggcaaagcctactcaattgctcatcggtagctgagctgaagaggaacctcagggtcttcccaccaccaagcccaagaccacaatatactttcccagtctcatccctgcattttcttttcttctgtggcacttggtttattagtgactgtcacctcctgcttcatccctggatttctgttctctgggggttctctccctgtccctctaccatacaaacatataatttatttctccttattttaagagtccaatcagtagccatgctaatggtgagcaggggcgacacagaaattgaagttggggtgatagcgatagctgcagcacatgtactcccctgtcgtctccattagttcacccctgtcactttacatacacagcctaagtcacaaagtcccacattactttgacaaaaatgaaagctaatttttaaagatgctggatctcccatcctatttctttccaatcaaattgttctatagtatagaaattctggagctgcctctaagatcagtttctcattttattagaataacaaaaatagcaactatgaaggagataggagagtttttaaacatttagaaatcttagcgtgttattaaagtccttatcctctggccttcctggtttctttttgagggttgactgtggtcctgccaccccagggcctgcagttccttattttaactcctcaagatagaattttaccaggttggtcagataaggagcaatctcatccattttaagcaggtcatttgaatttctgagaatttccaacaaaagtgattatcccaaatatcaaaatctctgaaactgtttaatggcatttccttttgctttctttttctttatcttttattttcaggtttaattgccctctctgaactccatgttaaaatggctcccactccttcatcttttctttctccaatgttgtgaaatgaaaagaagtaatgtttatagtcagccttgtatgtggcttggctctagacttggtcaaaggaggttttgtttctaaggggaaatttctgaacacgaccaagtcttaataagccccgtcaaccttcattcatccactctaatgtccaagaagttgacacaagaagaagtacataagtgctactgaaaatagcaagaaattagagaggatcttaacctgtccaagttctgaggttctagatggtttgcctgttttctcaacaacccagtaggtaggaattattattatcatttcacatatgggggagctcacatggaaagagtaaacagcttgtccaaagtccacataacctagtaagtgcagaagatcttcaagccttttctcctaacttcctcataggctataaggtgttcagcttgcactttaaaaaatgctaccttcattaggagcttaataactttaagttagagaaactagatttcatatccaatttaaaatatgctgctggataaatgtggaagggtagaataagcaaatggctgaacttcaacataaaacaatgtagtgtttatattgtggctcataagtcatatagggtctattagaaaaaaacaaatagatgtgggagtcagaaaagctccaaaagagtcccagctaggctcctaacgtcactgagcctaagtttctttgcctataaaatgggtataaaactagttaatgcataggattactgtaaaaactaagataaataatgtggtcttcctataaacagtaaaagggctacagaacaaatgcatctttaatcatgtctttatcatctcattcatttcttttgtcaaacagccatgtgtcaacttttcatactttaccgatactctttgcaataccacaaagtacatgaaattattcctattttagaggtgaggaagccagggatcagagaggattaaggagcatacctaacactacacagctggtgacagatactctagtgtgggaaccgagagctgatggtcttaaacgccactgctaacctgaagagcagatttttccagcaattactgattgactaggtagggaggagaagcttatacccttttctttaaactacatgtctccaaaacctaaaccaaaggtgatcttgcatgcaactttggaaaaagccaggggcttatcaagtcacagaatttttaagttgaaagagaccttagagaacaatggattcttgtctaattcctccattcttcagttgtagaaactgaggtctcacaggccaagttgtttatgtcatttgtctgatttctgtgagcattttgggcatattcagtgtgacaactcaggtctcttgaccccagttccttgcttatcctacttctttcaaagtctggatagattcacaaagctgaaaaacattgcactacctcagttctcattctttctgggttccattgttaggcagttccttggttatcaagaaaagatctacaacgtaatttcaaaagcccctaagaaaattaatgatagttttgaatgaatcttgaacatctgcgatgtgccagacactatgttaagcacattaccttcctttttgcagtagctttcaaactttagttatttgattactaccttcatgaattttgccaaatctacataccatctatgtagttgttaacttaatgtttgtctttatattgaccttaaagttctaactactttagctttatcctgggctataatactcatgaaatcatgatgtgctaattattctttaaatacatactatataaatgctatataaatagcattttatatttaactttaaatatcaaacatataaatggtgcttatataatatgtatttaaagtgtttatacattataatataatttatcttttataatttataaatactatttaaatatgtatttaacactattaataattatataactattaacattaaaattgttgtctaagcctctctaatataatctcatttaattactccctaactctaaagtactagtataatccctgaatatcccatattatatcactgagcccaagtttctttgcctataaagggtatattgtatcctaatatgtttttgttttctcacaatagagaaaacccaaagctcagttaaataacttaacccaggcctcacagcagtttagtggcattgctagaacccagatccaagtctggctgactccaaagccagtgcagctaaccatgccatctaatgacatgaaggaatgttcagcagagtaagttgcaccagatgagaacttaaaggtgagaccctacagggcacagattgatcaacttatatgattgtgtgtacaggggtgggtgagtttagaaaccacgtataagggagcaaggacactatatcctttatatttttaagtttttttttaaagtatcatatctagagagaagttgaaacagtagtgaagtgatcattccataaccttcgcctttattcaccactggttaacattcaccaatttgttgatctctcgctctgtagtgtttgtgtgtgtgtgttgttttggctgaaccatttacaaataagctgtagatatttgtgtcatttcacccctaaatactttagcatgtacaaagaacaaagacatcctcctacataattagataccattattatatccaagagtgtgaaattgatacagtaatattatttaagatgcagcccatatttaaaatttcccaacgtctccatagttcccttattgctatttttttcttccttccacaatctaaatcatttgttgcatttggttgtcagtttgtcttaatcccttttaatctagagaacaacccttctacctcttttgtctctcctgcattgacgtttttgaagattcccgatgagttttcatgattaaatttaggtcaatctgcccccttttttttttttttttttttggttaggaggggacatatttctttagtaatatggttatgcacaattacttgaaaaaacttatgcagactagtcagttaacagagcaaaaatccttaaaaccccaattactgaataagaaacagttcttcaattggcaaagtaaagagaattaattttgatctgtggtagctacacccaacctcccccaaatcctctgtatgacttgactgtattcccctaactatctcctgaaaaccagacttgaaatgaatataatgctgctttaccttatcttctgtcattgtactagttgggagtcctgtcaattccaggtcttgtgtgagtgtggcacatgcacctgactagctcctgcctgtttattcgcagctctgcctaggcctagttatgcattgcaggaggaggagcaaggagagggaggagttgggctacccagacctgagagtccaagtctaatcttctcagcggcagctgaatattgatgggaatctaatcaataagtgctttgcctcagcaacctgtggcttcaatacctttgttccactaggaaagaaaatgggagcaggtcccttaggcataagttacaaaccagaggcaatcacatttcaaggcatgtgttatgtggcagtaattgggagctggtgaaaagagaaatctttggagtcttttgtagaagatgagatatgctgagctgccgtgctgtgctgtggagcatgggaggcacactgcactctgctccacagataattagtgctgtggtgtttctgtttagagctgagctgtgtggccggagaccattgttgacttgaatggttacctggatgagctttggattgttagggacttgggtttgaatctcaacattttactggggagtataaccttaagcaagtggctcactgtgacttttctctgattagttttttatttttgcctgataaaatagaaataacacacattttgttttgttgagtggattaaatgagataatatgtgaaagtgtttggcatatctcaacatataataagtacttagcaaatagcggttgttattattattgcttcatatatgtcaagaagcacttgctggaggctttaacgtagagttctcaaataaacctgctcatatggcttgatcttgggcctaagtatcccttatgatatccaaaccctgtgggggttcaggagatatcaaatttattgagctttaagtgtgtgtggcaactggggccacagattgcactgaggctcaaatggaaccagttcccagcggaacaaaaatgtaacaagcagcaacacaatgaggggtgttatgaagaaacagggtgagaaaatgaaggattagaggagattcagatttcacctttttattttgccaccctgttttcatttctgtcacctctgcaaggtgacacacctgaaatgtttggtttgagaaggtaattcaatcaaactacaaacttttactgagtccagcacagttccatgctccgagatgactgagataaataagtcacagcctcctctttctaggtgtttataacatataagatgagacatatgtaatgcagacacaatacaataatttcatagtggaaaagcgtgagcaaatattaatagtaatgatggttaatctttactgaggtcttgccgggtgccaggtgctgctctcagcacttgacatggattaactcgtttagtcataacatgaggtgctctgtgtcatagtgccaagctttggggagcagctttgaagtcagactttaaagcgcccagttagccacgctgactttccgcatcagttttggctggtgatgagcacgccccattgccagagcggtccacagtcaggagcggttccatggcatttgccagtgacatgacattctgcaggaaagcgtctctgtgccgcgtcgtaaatgataccggtgtggtttaccaacctttgtcttttgaacctgccttttcagaaacggaatttgccttgagtgcgcgggcggccagtgagcctttaacttcttgtgctcagccccggcctgccggcgcggagcacggcggcaggaaaccattctcttctcccattgggagcgcgacccgccattcactagcgggccttcggggcaccctgatcagtttcctcaggttcagccaaggcctctgtggttctgctctttctcagaaatgaatgagtaatctctgcaccatctgggatatgctaaaactttatctccgtgcggggagggggtgcgattcatttacattgatgctctgattgcttttgcccgcggagaactgataagcgattccagcctttcaggagagcgtgtcttggcgcccaccgaggagctgcaggtcgttgcactcctggctgtggtgaagtcagtcttttcgcactttgccattggagtgggcgctattcaataacgtgcaccagtgcctgcaatcacccggagatttccactgggcagggcgaaaccagttctgtgtggttgttctttaggcttcatacttttaagccctctaggtcacattcggattacttcgctgattaatgtaatcttggtggatgccagaagttctaggtggtgacaggactgaaaagagtccgccctccctctccccttttttcattgtcatcctttccttcagtaaaattagtttttttttcttcttccataaatgaggaggggagagtggagagataaaccagctatttcagcatgctgcattcctctccagttgggtcagatgtggttaagtgcaaaggcatctcctgggaacaaattaaatgaggtcaaacttggccaagccaggagtacaagagaatatcggaaggtcccagtccctgaaggacagtcagtgtattttaagatttttgagccaaatttttccccattgtagcttgccaaaaaagagggcaaactctttacatcctcttctcgcctctccacaccctctccctagatatctctgtggtctgcatctcttccacatgtcttcacagcctcctacctgacttccctgctcccatcttaccctgcagtaccttcttgacacagtagttaagatatatttttaaagttagatcataatacactcctgcttaaaagtctccaaaggcttcccaatcacccttagcaagaaacccacgtttctcaccacagcccaagaggttgacttgacataggccctgggtggctctgagaccttctccccttccgtgggcccagccacactggcctcagacttgtctaatatgttccatgttcagcacctttgtcctcaatgagcttctgcctatagcccttctccctagatttgtatgtagctggctccttctcttcattcagatgacggcttagtgaggattccctaaccaggcttcttaagatagataccacctactttctccaactcatccctgggccagttactctgctttattttcttcttaatgcttatgcttgaaattttattatttgcttgtctattgttgtttgccactttcctgccaaagctaaattccacgaatgtggagaccttgttgttatccccagtgcctaaaatgctgcctggtacatagcaggcactcaacaagtatttatttaataaattaagtccaaaagggttgtcacatgctttcttgtgttggaggaaggggtatctcaggctgggatttggacatttattgatttaacattcagtaaatgtagtatttgctgaacattttgctaagcaccggttataacagtgaacaaaacagagtagagtctctgatcttgtggggcttacattgtatgaaagaaactaaaagtgctggggaagagaacagggggcacccattttagaaaaggtgctcagaaaagtgttctgtgtaggggtgcctttttggttgagacctcaaggctttgtaggctataggaataatttgggattcaggtgaag

SEQ ID NO: 41545 - DNA, 2188 bp, Homo sapiens
atgaggtttttatttcattacttcacaagaagcttcctattagtttgctcttctcagtacgccatgaagtctgtatacaagtgatgtccaattcctcagtccaagctcagatgtctgaataccctttcccagcacccttgcttgtttaagagacagcatgagaaaaagatcagctgtgttactccttcttccaggccagatgattctggttgactcccttaccttgtggactatggctttggaaaggaagaagtgtacccttcttagaatggttttatatctcttctgaacccaaagcatcttgtaaaatggagttcatattcacgagggtttggagcactagactagggtcaagagacctggttttgtcctccctctgcaagggttgggctatttgattatgggaaagtcttgcttaaccactctgctctttatctgtaaaacaaagtaaataatctctaagtgtcctcacttgcaaaatggggatagcatctgattcatgggattgctgtgaggattaaatatgatagtggggatatattgcttaggacaaagcccagcacatagtaattacctgtaaatatcagctgttattgtttttctgctctgtttccatgattctttgttcttaatttaacatcctctccaaaaattaatatggggtcctgtgaccctctggggtgactagccaggcgacctctactattttttttttttttttgtcctggagcttatgatatttggcaataaaggcagttttcattaaaggagctaggggccacttactgagtggtcagtcccctggatttgtactattatgtcgtggaggtttgacaatctgtggcaaattcctttgacacgtgtatctatggcagtgtttcagcaaacactgtcctaattaagtaatcacagggcggttcaatctaaattgaatggtgctgcttcatgcagaaaatttttgtttgcaatacttgagtcatctcagtttaaattaaatctattaagattctctgtctaaccatttttcaaactcctgacctcgtgatccgcctgcctcggcctcccgaagtgctgggattacaggcatgaaccaccacgcccggcctctaaccatttttcaatcaaatgtgccgaaatgaccacaagtgctctgcaggtcatctttctgagtttgtgtgtctttaatgtctgtgggttaatcattttcagatagtgtttgtgctattttccaccactgccttctataccagttactgctgatttgcagggtgctgagggaggcttatgaagttgacataaaaagtgggatcgaagatcatgaggttattgttgaggtttaacaaacaatgttggtccatgttgttgaccaataggtcaccaataaaagaagcagtgtcagggagaagcgattcttgtgttagctgtttgtcagacacagaggagttccaggaatgtactgtaacaagcagatggtgcaactcggtggtggacaagttgttgactcaggcattctggctcttttcagagacattgagagtcagtggcaagactagtaaaagtaagacaaaatagaatttccctctcccttacaccttaaagtcacctcctctgttggagcagagcaagtggatttgatcaagtactttgtggtggatggtggggagaggaagcagtcctttcctttttttcagtgattcaaattagagtaaaaaattggccaggcgcggtggctcatgcctgtaatcccagtactttgggatgccgagacgggcggatcacgacgtcaggagatggagactatcctggctaatacggtgaaaccccatctctactaaaaatacaaaaaaaaaaattagccaggcgtggtagtgggcacctgtagtcccagctactcgggaggctgaggcaggagaatggcgtgaaccctggaggcggagcttgcagtgagccgagactgtgccactgcactccagcctgggcaacagagtgaaactccgtttcaaaaaaaaaaaaaaaaaaaaaaaaaaatgaaggccacttggggctgtggtctctgagcgctctaagttccttgtagatatgcaatgttgtgctttcaggatagtaaaagaacacagcaagggtaagggggtaggtctgtggctttatgctaaagggcaaagaaaaagaaatattctaggccgggcgc

SEQ ID NO: 41546 - DNA, 1378 bp, Homo sapiens
gagagcagtctctgccaaaaaaaccccagggaggaaaggcaagattaaaagacaactctggtttccaaaagccagtgcccacattgtaggcctgactagtgttgcactttttaacttttatgcaactggctcattgaggattcttagagcagatctgattaagtgatgatttccctctctgccttttctttcattcattcatcaacacagtattttttagttcctactaagtgtaaagcattctactggcatgtgcaaggtttcatgctgtttctttgaccatctcaccagcctagctttttacttctggagcttgtcatggatttgcaattacagctctctgcacctgcctctggctggaagtgaaaggaggcacttcttttcttttttcttgtttagatgaaacagactcccaagctcctgtaatggtgcatgtaattgatgtttccaggaagcttgagagataactggaaagcctagtgtcctttgtgtttcttggcaacctgctcctggactacgagctgtcctggagaggaacattttctggattcattttgtcacagtggccatcagtagcgtgtattagtgcctattctcagagttgagcatttccttttctaaatgacatttaggaaattcagtcctaatacatcttattgtgtgctactttatgtatactgggcagtttctcctttcttttaacttctgttcaaatactgaaaagcttttaaacattttccccaaacctctctttagcataaatcacatgtcatctctttggaattttttggcctctcttgtatcagcagcactctttctcaagccaaaaactgatgcagacacactggttatcaaagagagactcagagaggctaacaaggggaagtggctcagatagtgagaagcttaaaggaatccagtagtatgctctgaatctgcccacttctgagtcatcacccttttgttcactccaccagcaccttcttattaaacactttctgtgtgccaagtactgtactggaaacacaaagacagatgtacaacagccttaagaacctcattaacagaacctcaataatatctcgtctttatctctcaccattcccgtggggattggcacaaagatgttctgtgtaccaccacatgccaagtactgtgctaaacactttatatatgacattccatcaattatcttgccctgagtgacacgggttctaagtggtttgaacccagctgtcctatggcagagcccaggtgctctgggctgcactgttgtattagggggcctactcctggtcacagctgattgaatcaggggtggatgcctgagccaagagggaccagattcccactggaatttaatattaagcccaagaga

SEQ ID NO: 41547 - DNA, 987 bp, Homo sapiens
ggtcatagaatactggagtgctataaataacatggagccatttggatgtggctggcaatgaactgaaaatgtggctccaaatgtctacttggaggtattgactctgtcataaagactcaagcaaattttaagccacattagaaatcggagtccttttatctggagtcaaacagcaactcactccagaacgttctccctcatgttttcctaagtggtaagttatagggatagaagccttctacacttccattgaaattatccattaaccacatgaagagatttatatgccagcactacacaatgtcaatttcagcagccaagtccatttttcatttcaggcatatgtgaaaggactctttaaaggctacttgaaagattcaacaaggacataaaatgaaattctagcaagttgctttgtgaactagtcttccagttatagccccactgctaattattatttcaaaggccttattcatctcaaaactacagttcctttctttcttacgaaagtgagatgccctttgcctttttggagagcaaagtctgctattagagtttcccaactctgtcctggctgaagaggaaaaacagatgacatatgtttatgtttcagagggaggactggatggtgataacaagtaaaaggagaattcatttccgaggagagagtgaaataaaatagttaacatttattgaatgcttaatttactaactcaatattctcaaccatcttataagttgtatgctattatttataaaattttatagatggatgcagggagaggtcaggtaacatttgcccaatgttctcagccatttctttccttccaagtaaatatctgcactcaaacttgcatggtgatgatgaagtgaaaaagaggaaaagacggatttcaatttgtcagggtctttctggttagcatggacacagtggggagttactgcatgtcagaaggacagatgaaagggaacatgtgccacccccca

SEQ ID NO: 41548 - DNA, 869 bp, Homo sapiens
ttcgagaccagcctgggcaatatagcaagacggtctctttataaacaatagaaaaaagtagctgagcatggtggcatgcacctgtagttctagccactggggaggctgaggtgggaggatcatttgagcccaggagtttgaggctgcagtgagctatgattgcaccactgtacactagcctgggtgacagaatgagactctgtctctaaaaaaaaagaaatcctcatttctgttgaactaagtaaacatagagttctttaagggaattatttcacgtatgggttaaatagcttagcaggaggagtcaactgggctgttatctccaagaagcctgcacaaacaggttaatttttaaagtctgtgtaatagtttttagctggattttaataaagtccaaagttcaaagtcacattactactagaatattcagtctagtagaaggaatttctgatacacacacacgaactttgtcctatctcaaaagtctgacaacccaccaagaatcagaactggtgcctcataaaataacgggggtgatttttagccttggagcaaaagcaggaggctgggtccaggctggttctcccagtaaggaggctagaactcgtgcaaatacaccacttagcctcactgggcctgcacacctgcatctgaagcatgagtggcttggaccagtggagcttgtacatataagcagttatgatttttctaatgacctcaactgagtgctgctttgcctgtgtgggctcttcaaatttaaagggcacatgaaagattcactgtcttatacttaatggagccattcctatccttctccagaaagtcctggagggaagcagtgacactgagtatacttgcgagggcaggtg

SEQ ID NO: 41549 - DNA, 470 bp, Homo sapiens
aatcacttgaacccaggatgcagaggttgcagtgaactgagattatgcccctgcactccagcttgggcaacagagcaagactctgtctcaagaaaacaaacaaacaagaagtagacattgtaaattgaaacataaaactttagaggcagaaatgtcaccttggagagcaaacagatatttaatatttgttctcaatcaacattacctgataccagttaccagccagggttatgcaaggtacttctatttacacaatctcatttatgacacaatgttgtagtttgaagagctctgtgtgctgttatagtcagggagtcctcttgtaatgatcaattgctacagcaatttaaaccttctttaacttaggtttatgatgctagaattttactttttgtattcatatctgtttttatggcgtactgttggtaagatggtttatatgatgccaagtctttggtcagaaaagatgc

SEQ ID NO: 41550 - DNA, 1001 bp, Homo sapiens
agtaccagtgccttgtttcttcaccagctctcccaccactgttatcatcacccctcctaaaccacctcccaccaacaaaagtatctgactgaggggtgggaagtgtcaagtacagcactggacagtgggtggggctgatcacaatgactgtgcaccagacaccagggtgcttgtcctagaacaaattaaaatggaaagaagggttttaagaactggaagaataatgtgagatttggcttttaggaaaatcacccaagtagcctgcctgtttgcccttgctctctctcgctctctcctctctgttcacacacacatacacaatcctctgcactgtgaccgtagaaactggaaggcgccttcctgaggatatggagtgagtggaacagaatgttggaaaagatgcctgggagatggaggagaatgacagagaagagagggcagcacagaaagcatcttccgggaggactggtggccatcagagacctgcgaggacctagagctgattcatggccacattagggcatccagcaatggcttgccctgccaggctctcaaaaacctggcactcaggagcagcatggaggagccttctaaaaatagtctagaatcaagctaccttctggctcattccgttttccttcttttaaagattaactaacctcaggctgtgccaaaaaagactagagggggagaaaaaagactcatgaagtcttgaacaggtgctactgtttattcacccaagtctgacatcaccacattgtttctagggactacagcaagtttctgggcttcaaacactccagtaatttccttagggaaaagcagagtatgaaaggaaggtagcttgtattaaatttaaaaacttgaatcctgtatagttgatctttataagtttcttttttttttttttaccataaactgtgccaatccctttgatgacagaatctattattctactagcgcttacaacagatcactgtcatttgaagtgactttcagag

SEQ ID NO: 41551 - DNA, 4094 bp, Homo sapiens
aaaggttgtgggttcaactccaggttgtgccacttactgtcagtgtgacctagggtaagttaaattttgcaaggtttagacttttcatctgtaaagcagggatactaagcagtaagtgcttactttatgatgttgcggaagcctgctaccgagcctttcctataatgggcatagttactctatacatatactatacatacgggattacatactattgctacttttactgtgcacagaacaaggtcggtccttgagcttttaaagagacacattaacaagtaaagacaagaactgccaaccaaagcacatactaaatctatgaaacacctgactacaagagatgactcaggattaaaaaaaataaagagatggctcttaaactatcaagagttctgaactcatcttaacctctgaggttcaagtctaggaagacagcaatattcttctgcaatgtgaccttccacatgggtgttttgcctacaaatcaaagtttttattttggatgcccagccttcatccaagctgagttaaaaagttaacttattttttcttctcttagtaatagtaggcagtaatgattgtggtcctggtacttcttcagagttaatatctatgatttcttaaaatgtttattctggagaattttttgtagatatcctctaccctccaaatgcccccaaaaggtgtatgttagtataaagtgccattattctagcaaaatcagcccttaagaccacattcatgtcttagggtgacactgcgctaccaagaaaaaaaaattttcttgaactgataacaatttagaaactcactcccagtaaagcatagaactcagcacaaacaccaaattcattatatatatgtaatatatatgtagatttacacacctttgtatagctatccttgttttaaaaaactaattttcagcattaggcactttcactgcttctgctctaacccaaattgctgattgtaaaaaggggattttctcccctgtatttactttggaaacagacaccagccacggagaagtagttgagtgcaactgcccacagactcacactgaaattagagcacctgagctggtccactacctgagccgtgttcctcaaggaaatttcaaaagaaaacctccaggacctcggagggccaaaagggcagcttgtagcaggactcggctgacacaagactaaagcctaggagttctctgtgtccttacccttgggcttcctgagaaacaagatcctgagtcagacactgaaatcttatgattatgagcaaatgggcctcataatcccaattaatctccagagttgattgttagaaatgcaaagatactccctagagactgttgcacagactaaggagtttcttcaacactgagaatgtagattaagactgctgagggagaaataatttaagtagtgattgggctgtgaaagaaaacattgtcaatacctatcttacttttagctattcacaaatatatagatttcagagagaggtaacaccatgatgcatagtacttaggccaaatttcaaagagcacatctgaccatagtattactcatcaacttaatcaggtagccataaatctcctatgcttctagactagaaaacaatactcaaagagcgttctgttttcaatgttgctattctgttttgggttctgttagcagacttttttttgtttttgtcttttctgtcttgtattttcccccatcccctgtgaacactggattcttggtcacatcttaatttatgactatttactcagctgattaaccgtaggcattcgtcttattcaagcaaatcttgttctgagcaacagataaactggaaccccaaggacagagcagccatggctccgtattaatcatctgctcatcccatttccccatcctacagcagaccatgaaagctggggttgcctcagagggcttggcttcaggcacctcctccctgaagcactctcagaggggcatattcatatggagcaggagggaggctttggtgattggcttctgtgataggtttcttgagggaatggaaaggttttgaagttctgaagtatttgaagtgtctcttcataagttcacaagtgggtacaaaatggtagaacaaaatgtactaaacatttaggccacaaaacattcattttctccagctgaaatcaccagaagtgttagctggggagaaatcagaatctgcctaatttgcaactcttttgaagagaatataaaatcagctttgcctccacccaaagaagaggacacactgtcctgttttcactaactttcactattttgacaaagagaaagaatgagataactctggctaaaacttgtcatgaaagtatctgatagaggcatctctagcattcctgggttactgatgttatataactaaaacctgtaaggaaaaaagtgaataatgtgatccttaatggaaacggaaatagagagtcacaggtattcctaacttgcagtcatgcaaattatccaagagattacatctcggtattgtagccaggtcatcctcctctacaatacccagaaattctttctttccatcctctatttcattgtctctccccaccctcaaccccaaacacacaaacctaggcatccctgtaaaggaggaaatataaaagcaaagagtaagcaacttgctacaatgccacaccaggtaacaggtaactggccttccccctgcttggaatagaggaaaagtacaaattatacacctggcaaatatttgcgtggtctccagagcagtaagattcatccatttgctcacaaaatcacacaactgaagctgagcgaataaatcaattcaattcatttcaacaaacatttatcaagctccagtctgaatatagagtttttctggggggaaaaaaaaatcataatgcacctggctattggagctgattttttaagaagtctagaaatttcttcctcctttctgagaaacgaggcaaccaactcccttaaataatcaacacagatgtattttatattgtaaaatgtaagtagcccaaggtatgccgcttccttttttgtaggtggaaaagaatccacttcttatctttctgggaaaacacaattgtgtttgttgtacaaaaacacagtgtccccatttactaagaaatcaatgagtaatcaccaagccatgaatcaccttttagtatttttgctataaagatgagaagcactatatattgaaacaggctatggcatcgctgctctatagtataaattcagacttatcaagaatctacttaaaatattctaaacatgcaatggaagggcagggcaaaaccaatctttgccaaacatttaaggagatgttatacacaaatttcctcctgggaaacttctgagtggaggtaagataatttaggcgactcgatcaggagtcatgctctactacttacctgggggcttcaagggaagacatttataaactctcagacctaaatttctctcctttaagacaaggttaatcatacctcttctatctaacttatggggttactgtgaaggtcaaatgaaataatgaatatgaaggtttcaaaaccattgttttatgttttatgattgatatcagtgatgtcaacgtttaactctacagtcccaaagacatggtagaagatggaaaacaacctccaaaaacccatctctgatatcaaaagtgtgcaatgggctatttaaaagttcagatgagctgtggttctttgtgcttagccacaaaaacagccttagaatcataaagccagttttaaaaagaagggaaaacaatttttttctttgtcctattctcttctgtcatattagatggtaggcggacactgtttttacttatcaggtatcaaactgctgttggctactaaatattatattttgtgtcagtctccttaatttatatactcaaacagttgagatgaagcaaacctaaacatatctcactgagttagggcattccaaactcagcagaatttttttttttttttgagatggagtctccctttgtggcccaggctggagtgtgcagtggcatgatctcagctcattgcaacctccatctcccag

SEQ ID NO: 41552 - DNA, 1012 bp, Homo sapiens
atgcttgcgtattttttgtggacttctacctgagaaggatcgttttatttagatataaacagggtagaaaaatcaagggcttcagctggtttcagcttcctagaacaagatgcagccctgcagttgtggggcggtcagtcacctgcagataataaagtgggctgttggtgaggtaccttggaggaacgccaacgtaaggacagacagacatgcagacccatttcaagcttgttgcagatccagtgttgcaggacatgacccaggaaaccaccacctctataattaagttttaagtttactaacagtatttttttaaacagagatcagggcatggggtggagtgagggatagtagggtatggggagttaatatttaactggttcagggtttcagttgaggatgatgaaaaagttctggagatgggtagtggtgaaggttgcacaacaatgtgaatgtacttaatgctgctgaattgtatgctcacttaaaatggctaagggggtaattactgtatgtacgttctacgataagagaaagaggtaccactaaaaagatttccagtaagataaattcagctaggagcctcataccacctccctgaatgtgatgcacagatcaaaactgaatttctcaagccatactcgaagtatcaactcgaagatgttaaacagtaacgggcaagttttctaaaacaagaagtcaccttctccttaaaggagactgagttcttcacatatggagttcctaactcttccctgctgtccacaaagatgatatggttattattatcatgattgttgtaacagacattttgtaatttatctagaaaaattgtgtaaccagctgctacacttgtctgcctttgttgtagagaggaacaaaatggacacagtagttctgtgcttctccttgcaaagtgagcaacaggaccaagatccgaagcaatatcagaggccactgcacccagcagcagaggttgtaatgaccccattctagaccctcaccaccaaca

SEQ ID NO: 41553 - DNA, 577 bp, Homo sapiens
ctttcgttctcaccgtcattccctcatggactgagcagttgtttacaaattgcaaatgcctatgaaaagcccctatttcacagggtctcgcacacagccactcaattaatggaactaaatgccttggttaggttcacagaagctgctgaataactgccatgctgcacttggcatttgcctccagaggaagaacatgatgctgggtgatgttggtgatctcacctcttggtacattagctttcagctgaaagttcaaggccatcaagctgcttctctgactggcagagagggtgcatattaacctcacacctatccttcatgagataactgtgctggcttattctgctcttggactggagctatattttatccagcagttcttaacctgtgcccatggatgttgtgaacctgctaaaactagatactatgctttgtgcatgtgtgatttataggaaagggagcccaaacactgatcatctgaaaggactctaatatctagaatcttaggtgacctttcaacggtccttcaacacaagctgggcaagtgtatattcacctccatttcataacagaataa

SEQ ID NO: 41554 - DNA, 705 bp, Homo sapiens
agattgctcactgaacttcaataagtatgtttctttaatacttactagcacccttttgtgacaatccccaagcccaccacctcactgggacttcaccccttcctataatcaaagggctttgaaagacaagctttctctaaggctgcatggcatttcccaaagaattaccatgacctagttttgaactccagatagacttcagccagtgggaaacaatatacgaagcatctttatttcagcaactgagcctcattccgaagaactgctccctctctgagaggttaccccagtggaaaatactgcctgagagaaaaagagattacatgtgtggtctgggtccagccatgacccagctgtacaatcctgggaagtgagtcagtctctgaactttgatttcctcatctttaaaattaaacagtgagactaggtcacctctcacttgccttccagttctaagattctataattccatcgagtgttcctatgtggagcagaaaggggaaacataattatcaaatttcaaaaatacggcataaaccctttggtaattcttctgtattctgctacctctacgtattttgagtaccctggcaacttccataaggacttacaaaaccttagagactaaaacgtgggccaaaccgtatgacccagcaattctactcctgagaaatgaaaatgtatgtacacataaaaagttgtaca

SEQ ID NO: 41555 - DNA, 2223 bp, Homo sapiens
gaaggtaaacgcaaaccagtggggctggggggagggaggtgctctacaaaggactggccacagacacggggaaaacacacacagacacacacacacacacactcgcacacactccagggagttccggtctgattgaggaaaagcagaaaacacatccctttcacctgcttaagttcagccataaaactgaaacgttacagccacaaagtcagaaagaacaggcagggctgagttaaagccataaataaaggtgagtggcagactggcatttaagggagcgctgagagggcgcccgggcgcgggaggtagaaaagggggagggggaggcagttgccatctacaagaccagcatagcaataactgcccccttggagcggcaggttcggcttcgcggggacagccagcctcacaatgtcatcttgcaggtagctggaaaacgtgaggggccagtgcctttattcacgctggcattctttttgcagaagggacagtcgggtctcgcgccttggcaccagacaactgcccggggcgtgtacacacacacacacacacacacacacacgcacacacgcctttcattttaatgctcttacaccggtataagatgaaactggcataagctctacgagccctcgggagagcctaagccacggccagaggaagacacgtaccgcacagcccctgccgtaggggctcagccaggagcacctcagcaaccccgaatcaaaacgggaatccaggttccctccccgacgcattctcccgctgctgtccccctgccccagccccagcccccagtccacgcaccgagcccattcaccctaacccaaaccactggaaagaaaccagaaaacgtcctgctcaccctcagagccgagagatctatttcatccaggcttcgagccggggagtcgctcgccatgtctacttcttcgctggagaaatggaccaaaaccaccccgaagcttttcccttggaaattccaccttggtctatttcactcgcgtcctcatgcgggtgtcgcgccagaggccccgggcccagcctcccccgcccaccccagccccacagcgccggatcccgatcctccgcgcgtcggtccgccgggtccgggagcccagcctgcgcggatctccaagccccgagcagcggtgcgtgtgggctgagcgccccgatcggctaagggcgctggggctgcgtgggtgtatttaaatgggacatgcttctttgcttgtgcgtggatggcggctgcattggctgttataatgagacacatcaactcctccactcagcagggggagggtgggggtggagaaccacgcagaactgtctatcaccgcttcctgggaggagtgaagggggagtggggaggcggaggaggcgtggtcttggactggggagaggccgcgcttcctgacccggtccctctgcaccagcgtggaggggggaggggcgcgcaccctttccgcccaggcttttgcgggctcctcgggccgaacccgaaggggctgttcctgaaccttgacttgttatcatagggacccaagctctatttttgtgtggccaattcgtgcactgcagcaaaatggcccttcagtcgcgtcttggggtttctcctcggttcaaatgctctcgcgctgagaaaaagccggaggaaaaaaaagcgacaccctccctcccccattaattatttgtggggccggagtaacgcgggctggtgcaaccggtgcatataaggacttgtgtgcaaggaaggggatccgcctccaggcgcggaaagagtagggaagaagcgcacacgcacagtgcacccagctgggcgcttcggcagtttgcagctgcggcggggtcgggtccacccgcggtccccggaatgccggacggctgatcccgggtgctggtcactcgccgattcggggctgggaaggtttgccagaagcgggaaagatgggagatctgagcgctctcttggcatcgccacacccaggacttgctcgtgccgcaattccccacggaaacaaccgagttgaaacgagaagcttgctctctgggtgcagtagctagaaggcttcaggtaactccaaagccaacactgggtgaggcaacacacgccgcctcaggactcagcatttctttcaggctgcgttttcgtggcagacctacccagattgatggagaaagtttggctggcggataagaagtaacgcggaagatgtgtacgtg

SEQ ID NO: 41556 - DNA, 679 bp, Homo sapiens
ttaggttattgatttgagatttcttattttctattaaataatataaatgtttatagttataaatttccctgtaagcattgctatagctgcctctcataagtttggatatgctgttttcattttcattcatctcaaaatattttctactctcctttgaagtatcttctttgattctttggttatttagaagtatattgtataatttccacctatctgtgaattcccaacatttccttttgttatttataatttcattccattgtggtcagagaacatactttatacaattccttaaatgcctgtaccaaatgagtttcttatactttactgaggggctctgtgtatgtgtgtgagggccacaggccttacatgctcaggcatgcagtttataactctgccttaggcttcactttctgcttccacagagcctcaaggtcagccagaggtgagagcttagggccttctcaatcctttcctgagcacgtgcattgccctgggccgttgcacacagccctacacagacccatgacctttcagattcccagggatatgttggaagtttctagtgcccactaggggatctccttcctcagcttatcctcttaagatttttagtcagcttcttgctcactcaactgttactgcctcttcagtcagctgtgatgctaaataaatgttg

SEQ ID NO: 41557 - DNA, 933 bp, Homo sapiens
tagtctaataagttcttcatgtgtataaacatttggtctcaaggtatttgtttggaaagatggaaacagataagaatgcataaaacaagagattctctgtcaaataagcttgggaaatgcgcacatcatattccttcttggtggttttataatacactgtagcataaaaaaggtgctaaggagtcctgtattaaagaattctgcaaaaccttatctgtccatggaaatctttgtggaatagttatcagcatctcacaggtaaattcagtttggaaaactctctcctccattaatcttcattgaacattcctgcatcatgcttcttgcccaatcgaaaaaaaaaaacatccaaagttcactagcacttctaggaccaggtccaaattcactaggacagcactccaggtgtagcccccaccccgcccccgccctggccttatgctgtctaacttcatcagtgcctctctaagagcgaatgggttactgcagtcagtccttttgtcttctgagcaagcaggactattccttagagtggacacccagttctgtccctctggatttccaaactcttacagcatgctggtccttactgtcacaccagcatttactcagagaccataccttgcactgtaactgaattattcatctcagctatctctccccagctaactaagtttccagaggcaaagaactcctttgctgtctgccctctcgacacccaagtgtgctttgatgacttcaccatgcaaacggacaacacttagtaaacatatgttggctgaataaatgaatgaatgagtgagtaagtcttgttaaatatccttggctttgtagattcttgagtccaggccacctgaacatgtgagggattaacatatgagcttatcagatctagtctcatttcttttcttttagtttttatttttatttttt

SEQ ID NO: 41558 - DNA, 1212 bp, Homo sapiens
agtcgtgggccaccgtgcctggcctgaatgatacgtacttaacttatgaatgttaggtttgaatgttatgtcaagttcttacaagtaatgaggacacaatctggataaaaggaaaatggccccaccttcttaatacttcttggtttgctcagaaccagctctcagaatcctgtaccaatataaacccagtgcaattccagtcccatccaactggatgggactttaaagctcaagccctctcatctaaaccaggctcctatccccctataacagccctgcaaatgactaccgagcccaggctactaaatgcttagtcaacactgtgtccaagatgttaacaaggttaaaatcaggacccacacagcagcacctgtccctaggcactctgaattgtctatggtgtggacattcgggaatgtttccctttttttttgcccagatgcccaggcacccggacatcaatgcagccaacagcagagcagtgacacagttgtggccacaacagtctcttcttgctaccagcctcctctaaacctcttctctagttaggcctgcctctcttcatgtggataaatcatgatagcaacatccaagtacttttgtgaagttccagcgctggatgaagtgacgtgccacatcacgagccgccttcccgtggactgcagaggcaatgtcatgccagggcatccggggcgtggagtacctgtcaatgaaatctgcccgggtgcaccaggcaaggatcagtcattaacttcagtgttggggcaaagtctctctgactccaactatgaaactaaaaggaaacgtgggttagtgcccactaggtatatatttcttggcttgcatagaacaacatttttataatcaagggaaacagatttcacattcagggacatagtctcccaggcacttccccacatatgtttccgtttcacttaggattagataatcactagacatggcaagatgtgagttggtacaaattatctaaggctgtgtatttgatattatattttttattttttatcctgttgaaacaatggcaggcaatgccatctctatctcctcttaaacatataaacccagtgataacctgaaaatatgccattctaacgctggaaatgcaggaaataagcagaatagaagatgatcaaagggagcctaccatttcctgaaaaattactgattattgcccccaaaatatgcctataa

SEQ ID NO: 41559 - DNA, 834 bp, Homo sapiens
ggaatcacctttggctcctttattcttcgctgacttctccacccacctccccacggcttcccagatcatgatgaaaatctgctgattctgcttttggaaaaagtttctcccatttacttcgttcttgaactcactgacacaaccttgtcagactccctgtgtctctactataaacgctataaagcctcacccttaattgctccctgcccctagggattttccaacatttaatggaagaggtgcaatgtctcagtctgattttcaaagtcctccgtaaactgctacagatatatcccaccagctcaatctgcacaaatcagcccttaaccacaattccaaaactccaaaagttctaacaattcaaatgttttttcatagctgattttcacagctcatttcataactcacaggtcagcaaaatctgacctgaactgacaagaggttatttattatctttattgatcccacttggtgttgcacaaacataaatggtttgcctacattccaggtatttcctggatcctgctgggagtgtaatatagtagagggtataggtattgtattacctttctaaaatccagaactttctgatttctgaaatctgattccaaggattttgtatgagagattatagacctatatgtatttaccacattctacactcagtctgagatgccgaaataaatacttttgcatttcctatatctgggtcttaagatgtagtatctacctaaaatgcctgtttttctacctttttagtctctacctaccgaatttctacatatgttcaaggccagttccaatacaggcactgaacaagttatattttaaaaa

SEQ ID NO: 41560 - DNA, 753 bp, Homo sapiens
aaagaggaaaaaaaaaaaagaaggacttgcctgcaactaaaactactttctaaagtgtttctgtgtttgtgaactagcacagaagtgaaacaaggccacctaagtgtactacttttctattttagaccaaaattaatgacatacaaaagaaaatctataacattaaaggaagtaaagggaatgaaatccttttaggacatttccccctctctaggaggtacagcataactcccaaaagtatgggttgtgcacagtgacttctttccaaagagtacagtgtggagagggaggaaaaaagtaactttacaatggaaaacattacacacacaacttcagtgaggtgatcaaagtggacatcaccagtgataagtcatgctgatagtatgtacccttgatacgatgtaataaatatggtattttacctctgtcctctccctccccaaacccatcatcccaatctaatcctgagaaaaacatcataaaaatcccaactgagggacattctacagaatacctaaccagtacccctcaaaactatcaaggtcatcaaaaacaaggaaagtctgagcaaccatgataaccaagggagcccaaggagacacaactatgaaatgcagcatggtatcctgggcaagatactggaatagaaaaaggacatgggagaacatctaaataaatacaggttttacttaataatgcatctatatttgttcattaattataacaaatgtatcatatacctatgtgagatgt

SEQ ID NO: 41561 - DNA, 1590 bp, Homo sapiens
gcctttcttacaaagtgatacacatttccctagtccccatgacactaccaaaaaccaccccggtagaactcaaaaaaggtaggaaacaggagtttccccaaatcagtctcatttatgttacgatactttcatgtttaatcgatccattctatcacagattatacacccacatgacagatgcaactgaaacaagtttttgcaagctctctgaaaacgacaggaggcattcacatagaaagctacagattttatttctcatcagttgagagcagcactttgttccaaattgcagtaatatctcagcaatgaatcattgtcataaaaacagcaacatctgtgaggtcagaaaagaacaattaggaaaacaaatgaatcccttgggaaccagggttcacactaacatcatatatttatataacaacttggaaaggtagtcattcaacaagtagttagtgagcacctactacatgtcaggaaagtccctactctcataaagcttaagttcttgtgtagaaaacccagtaagcaagaaaaagagaaaagaaaaagaatttcagatagtggtgaatcctagcatgaaaataaccctaggtgaaaggctggaacaggatcaggtagcaagcaatgcaatgtggactgtgaagtgaggcagctttcaatggtcagggaaaaaacctttccaaggagataacatttgaccattttgtcattgatccaaatgacaaaaaagaaggaagccatgcaaagacttaggagaagtgtgctccaggcagagggaatagcatgattaaaaggccctaagatggaacaaagcttgatgtgttctaaaaacaaccttcctaacaaactctggagataggcaactgtagttcagaaaggtgagaaacaagttgatcaaggttacacagacgctaaagtagaaatgaaacttagcacacctgactcctctgatagtctccctgcaacacgctagctgccttcctagttagaaacccaggctccaatgaatgagcatgagaaatcaggccaatggggcaaagagtggcccctgattaccaagtttcacaggatcagaatttgagttcaaacataaaaatcgaggctaccatacaatgtggccagggtccagcagcccagatgacctgattctaagcaaggtacacaggtgccagggctggagagcaagagcccacaagaggggcccagaaggcacatggggtgatcatcaaactcccaagggaacttacaaaatactattttgagtcccattcctcaagaatctaaatttattacatatgtgatagaacctggaaatttgtattttaagaagttcccaggtgattttgtttagccagactttggaactactgtgatggagaaggagggaaggccagctcttcaggaggttgcagggagaattctatctctacaaaaggaagaatcaagggttaaattgaatgcagttgagacttgtaccagaccagatcataggcacagagagataagaacattgcataactaagcgtattcctttctccccaaccacatccccaaattcagaatcactgtgacggttgacagaaaagtgca

SEQ ID NO: 41562 - DNA, 2934 bp, Homo sapiens
accacgcctggctaatttttgtatttttagtagaggcggggtttcaccatgttggccaggctggtctcaaactcctgacctcaggtgatctgcccgcctcagcctcccaaagtgctgggattacaggcgtgagtcaccgcgcccaggcagcactccaactttttatatggattgttaactgtactggttcttgagaagccagactgagcgcttatacaattagtccaaagatccccaaacaacatttaaaggctgtctacaaattcaagctaaaagactgtgtacaaattcatttgtgtgtcacaaaacatttaatactgaaagagattcttattcaaataggcagtgtgtaaatgtggggtctgttaacagttcaaattgcagattcctttccttctttaagttttcattgcaccaccacgaactaaaccatttaacatacctcagaggtctctgggtacctagtctctcagaggcctttggaggcccacgaaggcttatcttaactaaaattggcagggctggctgataaagttaacggaactccccattttggaggcagacttagtaatggtcaaacgaagaaactgttgtggtctgttcttaaaaagctactagtatttagtgcttcacagaggaagtaaagaaagcaataatccgagatgaggaggagcaaatacaggcgtggcggtagttcaggactgagtctacaagggcggttctcaagggcgtcacaaaatcctatggaaggcttggaggacggcactcctggatctgagccctacgtcccaaacaccttcaatcgtattgtgaggaagaagaccttttacacactccctgctgctggcccccggccccctcgccccacctccgagtggtcacatcacacggcgggagccgcggtcagcagctgtgatcacacccccaggaccgtgctctgcgggctgggctcgaagccttgggacgcggcacttcctggttggtacgggatgccggtcccatcgcccccaccagcccagtcatgccaccgcgcacccgaaccaagggcgcccggatgacctggggacaccacacacactgcacccgaagccctgtggcggcgaggcggtgcatcctgcagaggacgcctgggcttcagcctgagcctgcgcggctctgcgctccaggcagccgcccgcgcggcaaaagtgcgtgccagagttgtcagctttcaccctgcaggaattccacccgaaggcgtgcgagggaggcccttggggatcgctagggagtccgccgccgactcactcgctgaaatcccgtccaagttgggcggggagcggccagctgcccaggttgggcggaggagggacggagggcgagggcagtggaaacccggctcccacgggcgcccggtgatccgggtctcggcgcggctcctacctgcagggcgaaggggccgctagcacctgcgcgttggcggcggactctcagggctcgggtgcctctggcacagctggagctcagcgggagggagggagagagggcgggccggagggggctctgcgctgcgcggccggcaggaactctccgcccggattcgccccggattcgcaggggtggagcgaggcggtgccaggtcccggggcgtcgcggtgccggctggaggccccagcggggcaggtctcgcgactgggcctctgatcgcccgcgttccttgttctcttttcccaaagtttcataactcgaccgcatcaccctagggaatgctcgctattaggaccattatcaggtcctctcgagccgccaaggaccagccacctttcccggagctttgcctatgatatctattcttcgactactgcggatagtagccacaactggtccaacttataagtaaggaatcagcaaatcaaacggctaaataacttgcctgaggtgacataattaagagactggagctttgctggagtctttataagccttcttgcacctccttagggaagtgttatcgccaatttacaggtaaggaaatgaaggctcagaaccagcccgaggtcacacagcttagatggagggggacgggaatttgtgtcccgatgtctctaaaactggttataattcagaaatcttagcataaaataataaattgggagcaaaacagggaaaagacccattccacctatggaaccgttcaaacacggcaattttgctgttttcagtccacttagaataaagtcttaagaaaaagagaaccagttgtcatgtggcttgaatagcagccctttgggaatgtaattttgaatataggccagttccaacctcattacacgatattgcatcccgccaaagccaggggaagcaatggcctccccatgcaccaaactgctaataacgtcagccactttaaagcatttagtggatattacacaactgcgactgaccaagttacataatgtcttactgcacacatggcattgcatgaaatgaaaaatataatataccagtccaaattaggggaggggggccaaattatagtctggaactcagttttcctgtaacctacagttgctcagccctccttagaccacatttttgtctcttgagcacatcttttcctaatgatagaagagtcacacagccctcactctttccttgttgacataaatgattgatgtcttttgaatcctatgatactgacagatttttacaattaaacacatgactctctgagcagagtattgcctaagaggagtttagtaagtttcagacaagcatgttactggaaggcagaataccctctctcctcccctctttctcaagctttattagtcacagatggtctgataagtcttgtgcacacacgtaactgcattcttacaagcttgtctttagaaattataatgcttttggttgagaagcagcagtctataaaattgcatcccaaattcttaa

SEQ ID NO: 41563 - DNA, 773 bp, Homo sapiens
tccatgcaggggcaaactgtggcttctggtggtatcaaaggcctgtgggtgctagcaggttgtagtgctctttgccgagagtgttcctcaacttccttgcttttgtttgctcattgtttgtttttaatccaagttcaggagaaaggggaggaaggaactgggcaggaaaggcaaatatgaaggtggaaaggatttaggcagagatgctgagctcatttacatgataaagatctaggagagtgaggaaaggagaggaagaaaaatgtacataggaataggatagagggaaagtgttaaagtgtggggccaagaggatccagagtggtgtcaggagagggcttgagccccttgttgcttggagtatgaattggatcccactttacggtcatcatgttatgtaaatttcaaaacttatcttttcaaatgacgcttgtggtcagtgcactgtgactgactatgattgtgtaaactgagccgcatagagccccaggatttcttggatttcacaatgttgttggaaaagttactacagtgggaattccagatgaagtccggggaaggcatgtgttgtgtgttgttgtttctttcagtgtcatatgggaattagtaaggctcttcagtgacttcaggaaatctgacctctaaagagattatttttcaacttgttgaagaaaaggcttgcttgtaatttgtagacacataaaagaaaacaaacagaaaaatgagatgcacaagcagccagtttgcaaaagaaaaaataaaatgacaaatta

SEQ ID NO: 41564 - DNA, 1123 bp, Homo sapiens
aaaagcaatttttaaaacaagcatcatctaagaatgttttagaatactcagtttctcttttctcattctacttctttgcccttttcctctatttatttccctgttgtcctccctacaaacagcttttgtaaaatgtacatgaatggcccaaggcttccatcgttcctctgtccctgaatcaactctgtccagacccgagctttggatctgtgagtgacgcaagaagctgtttttggcttcaggaatgttttcctctacattctgactcctctcttgttgttcttctttcctctccatcttttctccacctctcttccccagacacccccactgtttctctcttcctgttttcttagtttcttttcctctccttggtggccaaagcaccaatcaatcacagctgtggtcacaattacagttctgtccgtgactcctctatctccatgataaaacaagacaggagtagcctctccaaaaggcagacaatatccacagtagcctgtgggaggctgcctggcgtggacaagtcagccaataagaggttttccttgcagctgcaaggcttgggagagtgaaacgacagctagctgtgcaagtttgctggtgacacaatgaagtgttttgcttcaaaaaccatgggaaaattctgatacattccagataatttcaaaacatatttgcgggtcagatataccaaaggcaaataaaaatctgagttaggtaagcacaggctgatgtacaaatctatttagatccaaacatcttgcagattggatgacattaaatttgacaattcccagttagggatgataaaaattgaactttgttctctttaaaccccaagccattacaagaagagcgggttcactcgaagttgaagttgaatagctagtaaaaagcaaagggaagtgtgcattatggatgaacattggaaagattttaaatccagttaagaaactggactatttggaaagacacaaaagtatatttaaaaatacctatattgtgtttgcacgggaggcgcaccttcacagtctaacctaatacacctgtcccatcattccgattctaggaagacagattctgcttggtgctgcacaggggaaaagcagcttttgccttg

SEQ ID NO: 41565 - DNA, 475 bp, Homo sapiens
actagagagtgcttaggaaatattttaagaatgttctgaggttccacttaaacaatgggtcttggctgaggtttagaaacagcagttgcaggcagcaggggaatggtaaccaaaatgaagttattctctttgaacaaccaacacttgggaaggggactaaactgttgcaaagaagcactttggctgtacaccaaggaagaatcttcacatgttctcaagatataaacaacactttggtatagtaagatttcccacaagactcatttctctcagagatataaaagtgaggaaaacatgtgatgctctggagtgctatgtctcttatgcaatgagatcttggtcaagtccagtgcattgccctttctgctttgcctgccaggaagctggcaacagaatttagatttaaatctaggacgtacactaaaaggtctaaccttgtcttttatgtttaaattactgctttgtcttttgctct

SEQ ID NO: 41566 - DNA, 1529 bp, Homo sapiens
tgaaagaacttttctactgaaagaaaaatgctgcctctattaatatcaaccttttccccttcagaacacttgcttgctagtgatttattgtggacaagcttcttcctgctccttttgaaagttaatttttttttaatcatgcaagtagaggatgaattcctcatctcttgccccaggacaatttagttaagctaatcttcaggagagagtttgggtatttacaattcacaaattgatgctgcttgtaacacaaaagagaaaagggtcttgctgctgtgtttgatgtcaattgggaactaatccaaaaacaaataaggaagaccagcccatgcagcctgtatgggtaaagatccttttagatcttgggaccttgcaattatatcataaagatggaaattttttcctttaaaaagatcaaagatatgatccttttgtttgtggcaatgtcattatttttttaaaggctgaggaaaacaacaactaaatatctccataactgtatcccaatgaaaactgtgtacactgatgattcaaaagttaatgtttagcttattgcaacatttttcctattcacatagtgaaaccattaataattaaaggaaagacaaatgttcaattctattctgaatttccttctcaccgtcgcgacttcacagatttcaacaaatgttagttctttaaaatcccacctgtgatatagaaggatgtgtacatggctttaagtgatgttatgtattaggactcttagttgcaaataacaggatactaaactccaactaattttaatagagggggttgattgggtctcataacggaaaattgcacactcaggtcttgcttcaagcccagctagaggcagggacgtatgcttttctctccagactgtctcactgggctcttttcctctgtgtcggcccctttctcaggctgattcaatgaatgtaaggtaagaggaccactggcaggtctcatcttacatttgggcagcttccaaacccagccgcattctggatcggaaacaattctggggctgattctgtttcgtccatcttgagcctcacacccacccctgtggaattctcttaggtactaatgatgtgtttcagaacctaccaagaattgtagttagattctagcataatttattttaatgaaaacacttgctctaaagaaagtgtgcaagatggcatgccaagttacatagctcaactttccagaaactctgcctttctcttaagctattttcccatacatagcttgccttttcaatcccaaatttaccaaaagtataatctatatttacttattcccctctcttgctgtaaccttcctgccttctaatttcacttctctataaaatggttttcgcaaagatcacttgtcacctctcacaggcattccactgtcatctttttggtgttcctcctatgtgtccccttggcagaatttgccactgtgaaccactccttttttttttttttttcttgaatctctcctcctgaagcttgtgctcttttcctgtctcagac

SEQ ID NO: 41567 - DNA, 577 bp, Homo sapiens
tcggaagcaccaaacctcacctcccttctcaacacctgactccggcctagggccttcccactgaggtaactgatgtcagatgacacccccaaaacccaaccaggctccagattacaccctagggcttcccagaagagcagggctcctgagtgcgagctggaaaactagtttacctgtgggaaaatccagctccagtaccacagagaaaagcccctgacaaattgctgagagtcagcaggagggaggacctgacatttcagaaaacacttttcctctctctttgtccttcccggtgtgtgtcgttaattgcgaggctgtctccatagcaaagtccaaaaagcaccttggcatgtgtgtgggagtgttatctggcagagctgtgtcaagccataggtacattttgagtttgatacccaagtaaactttccgtggttcatgccgccctccccaaaggttaaaagtaataagaccgtctttgtgccttcgcggtctgacttttcacaggctattatgaagagggttgggtgggggtagaatgtatccatataatttgcatgttaatgtttgttctataaat

SEQ ID NO: 41568 - DNA, 2740 bp, Homo sapiens
cgtctcaaaaaaaaaaaaaaaaaaaaagaaagtaataggctggagaaatgggttggaaacaaagtgtaaggagccttacaagttaagtagtttggggccacattttagtccaaaattcttttcttcttcttttttttttttgaaacagtgtctccctttgttccccaggctggagtgctgtggtgctgtctcagctcactgcagcctcgacctcccatctcagcctcccgagtagctgggaccacaggcatgaaccaccacgcctggctaatttttgtattttttgtagagacggagtttcaccttgtttcccaggctagtcttgagctcctgacctcaggagatccgcctgccttggcctcccaaagtgctgggattacaggcatgagccaccacaccaggcctcaaaattataactaggttgtgcctaattatgcaccatcattgtgaattgtggcacttctaagtatggattgtcttttagaagtagagaaaacagagtaaatgggtaattgcagggaaaagaaaatcttaaaacaaacacaaacccctgaaaaacaagtcaggggatatctactccacggaatcaaaaaaaaagtctatggaataatcaaaagaggttacaaaaaaggcacatagcacactaatcaacatgtaaaggattgtttatatttactgaatgaataaaagaaatcagaacaggcccccccaggatggaaacagaattgagggctaggttaacggcagaggcaagagggcagtaggaaatctcacagctcacatgaggccagagggcaataggaaatctcacagctcacactctcctgcagagggaaagaacaaaaccagccagctctatgtgtgggaaaacactctcagcctcttagaagaagaaccctatattgattccagacattgttattcccacatgcagggggaatgaagaaagaaaaggaaaccaaggtattgacaggaaaaccagcttctactttctcctacgtctttgatgtcactgtggagcaaccatgagactttccctgttgtcatttgtcaattcgtccttccccaagccaaggcagtttactaacgtctagactcattaaagtggatgagattttgtttccaaatcctggacagtgctaatgtaaatgcttgtttatccatggtggtgcagaatgaaggaagtccatgctctgcacaagtaaagcgatgtgtcatgtcatattgccaaaaggttgcatcatttctaaactttccggaagactggatgggcaagaggtcatctatgtttattttgtgaagtttgccctaccaggaaatgtgtgggtacaagagatattttgggcccatgagactctcactttagatgcttaatccagcagcatgtgctataagcttcagtctctaactacatctttaaaaagagtggcaagttgtgaagtatgcaaggttttttggctgcactgacagagccacgtataaaatcctgttgccaagcagagactagaaccagatgacaaagactgaaaacacacgccatgtattgactttcctataaaatactcattacaacctaatccagtcatactcatttctagaagaattacataatcagtcagcaatccatattaattaaagttgtaaattgaccttaaaagaagatttttaaacaaaattgttcatgtcagatttctttaagaatacagtggaattacttcaacaaagaagaaaaatgttttaaagaagtaatttttagcacaaattttaacaaatagtactattcatggcccaccaacggccctattcaaacgtctcttggacattttatttgtggttttcacatcattcataatctagaaaataacagtacctctgccctgaaaggaactactcctctacttttccctgtggttctgatacggctgccaaggaaaatatcactcagatgtaatcctccaacacacacacacgcacacacacagacacacacacgcgcgcacacacacgcacacacacattccaacccttatcacatagcagtaagaagtaatgaagctaacacaaacaggaagacaataccaagagatggaaacagagaggccagctctaaccctggaatgcacagccaatatatcacctctattgtttaaactatttgagttgttcctgttacttgcaaccaacagaatcccaacaccaaaacccaggactttcaattccataatggacagtgctccacattgcactattcgggggtggaaggagtctggaatagtgcaatggggagtaaagtttatatgactgtcaccccatagacataagctacgtgtgactgatagccctggagttatgcaatgtgaagttataaggggatattttgcccactaacaccatccatttctctacacacctagtgcaacttgagcttgggtaaagccacttctagaacttcctgcctagtactgctattcttgccattaccactccatatttcatgaaatgcctttaaaaagaatgttcctccactcttcttctttgcttggatcctcacaatgcaggtaccaatttctctatggagaatcttttagctcagccccacatagaacaaggccatttctcatagcagatggtggccaattatttctgcctaattcctacctctacaattcttgcccttagaaacccttgcattccctacttctctagaggttacaagttcacttctcaaaagtcaacctcg

SEQ ID NO: 41569 - DNA, 384 bp, Homo sapiens
aagaactctcaccagaccccaacaatactggactgggttcagacttccagactctagactccagaaccttgagaaataaatttctgttgcttataaaccacccagtctatagtactttgttatagagcccaaactgactaagacagtggagtgttgccataacaaatacctaaaaatgtggaaatagctttggaactgggtaataggtagaggctggaagagtttgttttgaggtacatgctagaaaaagcatagattgctgtgaatgaaatgttaaagatgattgtaagacagaaggcaaaaatactttcattggattggtaagtcaagctaggaaaagaacaggaactcatattactgaggagaggacctactatgtgtcag

SEQ ID NO: 41570 - DNA, 607 bp, Homo sapiens
tggaatgatggaaaagtttggaaccaaggtttccctggggctggaagtgttactggcctcaaggactgaaccaataacactgctggagtgagtgtgggttccaagctcagcgcctgccaaatccaggatttctcctccccagttctgaagacaaaccagatagaaattaaatctgttgggtaactgaggtgcagtggaaagtatgtgtggctgcaactcagaagagtcgtttatatttatttgttaatatcaggctgtttttccattagattcttagattccttagattcttgcataatagtgtttcattaactagtgtgtgggtgttactagtaacagtacactcttaaacaaataaggcaggtgagggatgttgtcagtagaaaatatattgatttagtttttatttcattgaattttttttattttaatttttttaccaatggggtctcattctgttacgcagctggaatatgatcatggctcacttaagtctcaatcttctgtgttcaagcattcttcctacctaaccctccaaagtacctagaactacaggtgcacagcaccacatcaagctaattttttaatttttgtagaaatggggtct

SEQ ID NO: 41571 - DNA, 693 bp, Homo sapiens
attacatttcaacatgagatttgggtggggacacagatccaaaccatatcacaaactttcagagatgctgaacaggtaggccctcagaggtggtaggaaagaaggatgaagagagatctttgacgagttcggcatgtcagggacgtttattcaggaaaagagaatctctagggagcaaatgccaggcatgttcagttcattggaagggaggtcatgtggaaggtgagtgttgttattttgtctgcctccagagggcagaaataaaaccagtgggagaaagttgtaaggaggcagtttcagaagacctgggttagaactacagttgttgataataagctgtctccacaggaataggttttcctttccctggtgctgttcagactgaggctgggtccttagttgtaattgacatgggagccaagatttctgctttgggagggacagtgggagtctatcaacctgtgatttttaagagccctgtcaatcattcagcttctacctgaatagttctggtaactgtgggacagatctctttgtttaaaatgtgtttttctttaaataaaacattgagctaaaatttgcttatcttgccttgaacaatagaaaaggcggcaaaaccacagatgtgactggtgaagttgttggagaaatgtgcttcactgaagtggcagtgttgcttttaaaacaagatga

SEQ ID NO: 41572 - DNA, 3153 bp, Homo sapiens
aagtataataaaaattgctcatactatgttagttgtatgaataaaatgctgtgggaaatgtgggagtaatatagctcacaaggttgctgtgggggttaacaacaacaaaaagcgaaatatatgtgtaaatgaaaaaaagtcagttttaggcttaattatcactgagtaaacattgcctttatattactttggcgatctgcagaacgcgcagccctcgccattcaggagttgttagttccctaagcctcaggtttctttagtctggctgaaccaaaaggagtttctgcttagctaggcagggccgggggacaacagcttctgcgagtctgcgattgtggcggccggtatattcggcggtttacggtaatgggcgggccccaaatccccatgtggtcccgacatcattgacatggcggaatcccccatcaaaccctcctggtagttatttgagcggcggcggcggcggctggaggaggagagcggcggcggcgggagcagcgaagggggcggcagggatcctccaggctgccggctgggaaggcgtgggcgacccggtgtgtggcgcgcccagagccccgcgtttcagccctagggaaggtaaggcgtgcaagagccggggactagaggagaccgggaccccgagcgcgatcgccgggtcccggtgcactggaaagccccggcctgacgccgagtccgccaaagtgcgtccctgtcccgggagcgccctgggcttcccggcaaaaacttggcgccggagtgctggggcgccccgtgctcgcctgggcaccccgggaacacgggacccgggagggggcggcccccgccttgctgggctggggtcccccgcctgtgccccctgcctcagggtttggaggagtgaaagaaacgggtagattcctcttaaaaaaaattgggcagtggctcgcggcctccccccacccccagccttcccagcagattttgtccgaggaatccgctccccctcccggaatctccgcggcaggaacgctgcccaggagggggagggcgggcggcgaggccgaggaatcttcgacgtgtcactttctgaggctgtagatttccatatggtggagggaagagggcgggagtgcgaagtggggctggaagttggggccgcctctccgcgccggcgggggcggtcgggggcctcgaacccggggatgctcgcggggagggtcccgagcccgcgccggcctggcccccccgtccccggctgggcctctccgggacactccccgccccgctgctggccacctccgagcacgccacgtcctcctccccgtcctgccccccgggctccccccgggctgggggcggtaaccggcggccgcggccggacttggcgagccggcggctggaagctcgggcgggggagcggggcgcggcgggaaggagcgggcgacccggtgtgtgggccagcggagctccggtcagtcggtcaccccgaggggcgcctcggccggggatagggcgggcgggcggaatctgcgccccgaggcggccaggaggggccgcgcggaccgtctggtgcccgcggctgggctggggccggcaggcgtgggaagggcctgtcactctcggcagaaagtggggcctcgggctgtgcccgcgaactttcccagaggtccgggtcccggcgtcccgtgggaaccggaggacccgggcccgccgtctcgggagactgggctgcgccgcccggcggcgcctttggcggggaggcttccaggagtgcgcggtcggagttggagcttttggaatctcagctcccaccctgccatcccagacgaagggaagcaatggcattttatccagacagtgccgtttgcagacttccttaaaagttataactttttgttttcttttctcctcaacccagcattttatttaaacaaaatttagaatttggccgcaatgggccaacgctggggccaaaaatccacaggtttctctctccatccctgctggtttctagtcccccctccccctcttccctcccaggcttaatcatattttggaacgggtgaggtcttttgttgggtgggcaccccctgattgcttgtctgtttattttttaatgtgcaactaatttgatttgaatttccttcagtttccaggccttcctagggaaagctaagggagagggaatatgctttttaaaaatcgttttctttctttctttctttctttctttttctttctttctttctccttctctctccttccttccttccttccttccttccttccttccttccttctcttctcctcctcctccttcttgttcttgttcttcttcttttttttttttttaaataaatgtggcaggaggtggggcgttgggaatggggaggcacggtggttgtgggcaaagagtcagaaggagcagacagacccggaagaaaaggaatctgctctggaataacactttttttttgaggcctcaggccttgggcaaaattgcttcgctctgtaatgatttctgctgccggagttgctcctccacccctaagttaaagctatgaacctgggtgcccgggcaacgccccacagtggatagcagccgggagcgctggttttgtgccttttgtgggggcccttggttccccctcattggaggctgactctgaaatttactggatcagtaaatttcctggctccctgggagcagctgttaacgaggataaagtctctgggcatgtttctggccctgcaaaaggacctcacccatgaaggtacaattctcactttgtttagataccagaggggcacccacaggctggctgagaatgaggcatagttgattaaaaaaaaaatcagtcattacaaaattgtttttaaactcacacgtgcttttaaagtgttgtggtttaaattactttaagataaaaaaaattcatctgtaaggatagcgttcatttaaaagatgctaaaactgcaggatctcatcatgaaataggaggttgtagcttctaattacagtatatacaatttcagaaagatattccggtaatcttttaatacagactttataaatagctcacatcagacgatgggttatattggagagccagtcttctgcggtttcttgaagaatgcttgggatctgtgaggaagctctaggcccttggaggc

SEQ ID NO: 41573 - DNA, 725 bp, Homo sapiens
aagccgttttgaagcagattcttttcctaatgtgtcatgtacaatctgtgggggaagaaggttatataaagcaagaatgacttctattcaacaaaatagtgatattctatattttcctgtctcttttgtttctttctttaaaatgaactacagtgagacatggccagattgatttcttcccttaaattgtctcagaaactgtacccagtccactaattgctttgttcagcggacaggaaatggttatatttgcacaagttacacaatcttaactaagtcggggcaaagaaccaaagagatctctgatctttttttccagcattaacctttcagttccacaaactaatgcatgatgcataaaccaggttactaggggacacttatcaaaaaccataaacttatttatctgaatgactttctgtttagggatactaagaaaagaagttacgtgaggtaatcatgctggtgctgaggttaagtttgtgcagtttcacttcttccttaatagtttttttatacatgcaataaaggacatgtccggaagctgatcagtgccagcatgaccatgaagtgctcagtccccattccttctctccttacccctcagcccccttgcaggctatatacaaatttattcttttccttttctagggttgggaatttgcctcctttcttcctgcccctgtctgttattggtccctagtaccccaatttctgctactttt

SEQ ID NO: 41574 - DNA, 1621 bp, Homo sapiens
gtaacaggtgacagatttggtattcatacctgtttgtcactcgtcataccttttggcagttattcttcagagcagttagattagtgcattaagcatttggttttaagaaatgtgcttcaaagtgaaaggtagttaatgcttacctaattgactaaaaagagcttttatttcttttaaggaaaataatttcctcttgttttatattatctgggcacaatggctgagtgaaattaattgttaacttgaagcacatttattttctatggatgtgaatattcccagagtacatttgacactttgataatacttaattatggattaggttcacaattctgtgtgatatgttgagatgcaagtcaggggagcctattacatttataaaagttcagtaaaaagaaactcatcattaaggtggcaggaaataaggatatagttttggcatttgaattcttttgtgtatatgaattattttcctcatcagtctcattcattaatgtggaggtctgaccaatatatgttttcataaacattttttcctgtccccaaataatgtgaataaacttagctttattcctgcctgacccagtcatttactttctatggacaaatagtattccttgttatttgcaaggctgatgtaacgacacagctgctggatgcttggcatttctgcttctggtgaaatgctctttgtgcagatttatctgatccagatgtgtgaccagcaagctacatttctaattataaggacagccaaattccattataagcacatcatgggattatagggccgggagtcatcctgagaggacatctagttcattctccagccgttcagcaggaccacactttgtaacctactccagcactgaacgaagcagcaaagaatgttccacccatgtataggctgaacgtggaatcactggaattgtaactggaaaaagagacaagtccctctggtctggccctcttgctttgtgggtaaacagattcaggcccagagaagtttgacttaatgtggatttttatgactctttgcctaaaacttactcttcttttctctgaagtggtctgtgctgagggagtgaaagggtagaagactggattggaaatgccagtttcacatccagatgtagctctctactcatttagaagtaagaggtactgaattagtgacagctagattccattgaagtttattaagtatttctgaaacccagtatgaagtacgatatttcatgtctgtatatatgtttgtgtgccttagtgataaagtacaaaggaaactaggcatgctgttagggttagaatgtttgcaagtgtggtgtgtaagcttaccaagaacaacatctcagaataaataagtgattatttaacttgatttgatgttgttgagtctgggttttgattgtaccctacttcaagtgatagttagcctgccacagtttcatggatgctgggagaagacaaggggttcctgtaccacagaaaaaggactgtattactcctgacataccaaatagtgtaaactcttatgcttagggcttactggcatgcctatgttggttcgtccttgcctccatgtcccacaggggtgataaggatggagcgtgcagatgga

SEQ ID NO: 41575 - DNA, 650 bp, Homo sapiens
taaagataagagtgggtagttacttttccactgttaaagaatgaggcttgccagctcctaaggaaatctctgaccccaccctgtacttttcaagcaagagcttttgaagtcttttgtgctagttagagactagcatagttagtacagctaagtaagtatgtaacagattctattattaggtttatctttgctgattcccatttgattgacagcgagttctccacccagaaagtttgatttattttggcagttggaagaggattttatggagcacttgttatctaaaaaaagtaaggctgtggaacctgcttcccccacccctcttttttagctgtttgggttggtcctagtgagcatgcctaatctaaggattactcagcaaacatgaccttagggctggttttgtaaatgttaccaaatctattacttaaccacagatgttcttccattgttgtgtcccacagccagagtagaatggtgacgattagttctgtgagacttggataaaacctgtattctttaggtctctttgtatgtggtggtttgaaagtatttcctcacaaaaatttaaacaatcacatggtgcaaagtaaattgaattatgttttcttaaaaaagttaacttatatcattatacaaattatagatgc

SEQ ID NO: 41576 - DNA, 776 bp, Homo sapiens
aatgtatcagacagtgttcttactgatttccatccccccaaccatgcaggagtgagaatcagataattttttgaaaaaatatttgaaccaatatctacaattgcttatgtcagaaatctttgaaatatatatttaagtataaataggaggaactgtcagtgatgtttaatggtacagattcttttccttataatgaatgtttcataacatcggttcagttaaacaaaactgagtgtgtaaaataaacatgattgaattctatacgagctgattaaacaaaaaattttagtatcctcctggctgatcagaaatgaaggttaaggcatggggtatgttttgaagacaaattcaccttctgtaacacctgtcagatttcaaagtctagaaaagaggccacagctgggaaaccaaatttagacattggggcttatctcagatgaaaggtttcgtagagcatggaggtctgttgactttgtgtggtatttcgtcagaagtgtccaatgcagattcgtttttagttaactgagtataacatttcattgtaatgctatttaaccttatgcctttatttctagaaccctagaattctagcacagtgccaccacaaagtgggtacacagtaaatatctggttaacacaatggttgattaccttttttcaagttcttttgtttgatgttattttataaggtacctttcagctaggtccttcttttggaatattgttattattaaagggagaagccttcaacctgctttatacttattttacagtag

SEQ ID NO: 41577 - DNA, 4690 bp, Homo sapiens
ttttagtagagacagggtgttggtcaggctggtctctaactcctgatgtcaagtgatccatctgcctcagcttcccaaagtgctgggattataggcgtgagccaccacacccggccgaggatacagcttttgaaccttctattctttgaagaaaacagtattaaaacttttggagtagtggatattcttgctccttattttgcatagtaagagtcctaaagcccaggaaaacatatttgccatgtatcctacgggttgtgttgagcaaggggagcttcacctacaatgtgtacccttggaccttgagttcccagtgtttgcttaggtccccttggaggcttcctgttattgtatattatttttcaatcagctttggattcaggcttcaggtagggcagtgagcaaaatgaggcaatggacacattcacatcttcttccaggatctttctagtttacttgcttatgtttttaatcctgggacattttctttgcatgtgttattaccacaaagataaatatttggcattcgcaccccatcgcttcccttttcctgatttggagaaaagagggggctcaaaacacaaatactgcttacttttcagttttgcctgaggccagctgtgttctatggcacacagactggggtctcaaaggtgtgtgtggatgaacagtttgggtatgggggcctgggaagagcttggagattgggaatcttgggggtggggctggggagtggggagttgggagtatgtgtgaccagaaaatagtagcatgaggaataggtggtagtactcttctcatgtagtcaaaggtcacttttgaagttattaggtattcctggctagaatccttagttgcgtggaactcctctgcagcttttagattgtatcattttcccccttaaagatacctgttggataatcataaatgtgggctccaagggagaagtattcatttatacatgaaaacaagctacacaaagtgtggccagtggaaaaaactctagaagtgaaatgggatctcctctctggtatggtttatatcttgattgtctgagggttggatttaacgcttaaaaatgctgcaagtgtactattttgtctttggtcagttggtactcttctcccaggaggagcttttttttgggagacagtcttgctctgttgtccgggctggagtgcagttggcaccgtcacggtttgctacagcctcgacctcctgggctcacgcgatcctcctgcctcaccctcctgagttgctagaactacaggaatgcaccaccatgtccggctaatttttacaattatttttgtagatatggagtctcactatgttgctggggttggtctggaactcctggtctcaagtgattctccccgtctcagcctcccaaagcactggaattacaggcatgagcctctgtacctggccagaagcttttttgatggactgatccattaccctgattgcttatttgagtgactggtaatttttttatttgaggcataaattagacatttgcctccaggagtagtcttagatactattggcacctggttaatcagccacccaaggtttaaattgcaaaagtagcctcccttttcctcttttaatgagtataaaacagagttaggtttagatttatacctgtaaaggaaagatattacaccttctttcagttctcctgttagacaaagaattcccatgatgctgtgtttactcaattgtattaattgcaactcttgttttattgtttctctggactttggaagagtggtcacttatttttcattaaactttgataaactgccttctgtttatttccagcttcttggttcatgtaacactaacggttttgaaacagatctgatgaagcaatagtagcttagaggatgctcccatgatttgattagcatggttcttcttaagatctctggagaaaaaaaatatctagttaaaatctttgtcttttttttcttcctctgaagacatggtgcagtatgaatcagtttaatgctgactttggaaaagtaggaaatgcttagtgagtagacaaaaaatgatgtggtttggacagcgatgttctgtatcgcattttatattaaggaggacttgtagcagttattatatttctgctttgtggttggggagagggagggagggagggggagagagagaaattgcccaacttgtatgataggaaaggttaagtgccgggagttggccaggttgtgactcatgctcctcggggctgcgtgatgcaagaccttttgccgccagctcattcatgtctgctgtcaggaccggtcattgggctggtgtgtgtcaaacttatttttatctctgctttattgacaatgaaaacagctaggtggtcagcctccctcagtataataaaatgctttcttttaaaatacctcagtgccaagatgaatatggtttgtttaaataatgacttctgctctactgagaaaaattgatattgggacacaggagacttgcctggtttctgaggtaacttggtagattataatctggttgctatggctactcagcagcagtgaaaattacatgaactaaacatttgaagggaggtattttcgtcggatgcttaaaagcccgttacctatcatctttctccctgaagaagtgggatgggggtcaggaattgaactcagtaagcagggggggaaggtataagtggaccttagaggctggatgcctctgcgtcgttctttgaagtttggcctggtgtcagtgaccactgaggaactgttacagacactttttgtgcaatatgataagcagataatgtgacgacagtccggacatgtcccaattcagaaatccgttttcttgcctgggactttccgtaatactggtgaattgtattttctgaaccggtattcagggcacattgtctgacaattatgagcgtggtagaagagagtatatgaatttgggattgtcagagaaaatctaggacatagagtcttggcatccattggttcccccctcccccagctaattaattccatgggcatatattacagttctatccctagagctttaaacacaaagcaaatggtttttgctttattacagtgatgctagaattggtctaaggacctttaaaaagacatggataattgtctgtattgaagtgtgattttcttccattgtagtttttatattgtatatttatgtaaaaataaatgattttcatgttaaagaaatgactttaaaagctccttttcaagaaaacaaatatttggcccggcgcagtggctcacgcctgtaatcccagcactttgggaggccgagacggacggatcacctgaggtcaggagttcgagaccagcttcaacatggagaaaccccatctctactaaaaatacaaaattagccaggcgtggtggtgcaggcctgtaatcccagctactggggaggctgaggcaggcgaattgcttgaacctgggaggcggaggttgcagtgagctgagatcgcgccattgcactccatcctgggcaacaagagcgaaactccgtctcaagaaaaaaaaaaaaaaaccaaatattttaatcattctagagatcttgaaggaatttccttttgagtttttgaaacagtacagtgtgcttacattggtgataatttaaatactgaaaactcaaagattatctacagttattatataggaaaaataaattgccttgaaataactgtcataattcaagataatgagaagcaccaagggtgaagcttagtctgagtttccctgaatgatcctgttttttccaggtaatgtattttctgatttaaaaaaatttagtattccagcagtatcatctggatgaattattagaagaggcaaaatacatggatattaaagattgagtatttaaagatgaaatggttttgatttcaaaagttttacaaaacaaattatagtgtatacagtaaataaagttgacttttaaattgcatcttatgaaagcttaatttctaagctgagataattatttgcaatagttttttttttaatgttttatgactttcattcattcagtgaaagtagttattgagcacataacttattctatgccaggcatggggctagatagctggatgttatccttatcatgcctagattaaagaaggaaaggcagacactaacataattgcttagttaattgattgcagttgtaaattctaggaagaagtagtagagcgggtatttttgtttgatttagaacacatagtgggggacttgacctgtcctgggagtcaaaacactgttatcacaagctgagaaggatgaatagacgttggttgaggatggaggaaggtaggtggtaagctaagatgaaggagtacaggaagagtatcacagacagaggaaacagtatgcttgacagtttcaagccagggaggaacagggcttgttccgataactgtaggatgaatgtgacactgacatcctgtcaatttctagaaattatatggtgatttttaaaatagtgttagccttgtacatggtggtttttaactatagtttttgtggtggtggtggttgtttttgagatggagtcttgctctgtcacctaggctggagtgcagtggtgtgatctaggcttgccacaacttccgcctcctgggttcaagccattttcttttctcagccttcca

SEQ ID NO: 41578 - DNA, 3337 bp, Homo sapiens
gtttttctgtgtgtgtctgcatgtaattttctagaagtaaagtatatcttggatattcattttctttttttttctgtcgcatggtctcaaatatatattatgatgttatccaaaggacatttttagtggtaaaatctgtattgggtatctgttggttagttattgctaagtaacaaattactccaaaatttggtggcttataacaacatttattaactcacagggggctaatggtaggaagttttctacagttagttgttaagtgggcctctccatggagaagtggagggagcttatgttaccgcagctggcttcagagccaataactagagggcaagagggagctagtaggtccagcccagactcaagagaagaaattatgaaagggcgtgaataccaagaggcaggtcattgggggccatctcagaggctgcccaacacaggctactctttggcccccgatgattcatgttccttccaaatgcaaaatgccccgtcccaagatctccaaaagtcttatcccattataggattagctcagagttcagaaccttatcatctaaagttccaggtgtaggtaaggcttttgggtgtagttattttattacagctcctagcacacttctagtgtgtatactaatgcctcttctgtatagttcacttggaaataaatgatgtaggtactttgatccatatggagttctgtgtaggaagatcaacctagatctgatgttagctggtaaacactgtagtgttaaaaggcactgtttatgatagctctttttgacagtgactgggattatggggcaaatggtaaatggcatgcaattgagatcagtattaggttattaattgaactggaatctaatctgaggctttactattaatacctgaacttgcttaccaatatacaaacaaactgggggaaatgccctttagtttcggtttcccataataagctgtatagaaacagttttttttttccttgcgtaatagtagagcatgttgctttgtactttttttttgtatctataagaacaaaaacttagaaaatatttcttgagaaatgagtatatttttaaagattcaaggctaatgagttttaattgaagttaatatgaaattatttaatcacttttattaatgatttctactctgcatttctctgttgtgtcccagaaattgatctttggaattctaaatcatttaaaatcaaaacctagtcttagtcgatgcacaatatggggaaacttcaggtcaaggaagagaagaaatatttttaaatagtatggactatagagtctttcacctatttgtagtactataataaacagataccgtgaacaattaaaacctcagaatcctacaaccctgtatcttaaaaaaaaaaaaaaaatcacactagaaaaactagatgaaagtcacctatatgggatgaagctgaagtttccagttcagtaagaaagcaattaagcctctggttatggtaacattggcaccccattaattggctagtacataatgtccctctacaactgagtgtgtgtaatagaatctataaaagcaaatcacttagtggatgaacatgcattaaaatctctttcattccacctaagtttactttttggtgtctaaggagtgtgtgtatgtgtgtgtgtgtgtgtatatatgtgttttttgtgtgtatatatgtatgtaatttcactgagttggccgctcccccacttttttctttttttaatccatgttataactggtgcactttgcaggaaatgttgcaagtatattgctctcttcacaaagggagctttgtatttattcatgatgatacttggagataagtgacactaacactcctaacagtgatttcaaaaatgcctttgaccaaaacagaattgtggagccattatctttggctccctccaggcttcctattctttgttctcttctgaagtctcagatactatggttatcttcattttggggagtggtggtacctggcccaattaactgaaatgacacaggatggaatgaggactaggacctggatccaggtgctttactagggtttcggaagcactggggcaataggatgaactgcagaaactggaaggaaagtcagcccagcaggctgaaccccaaattcagactcattgactgccactaatgtataaaaggcagtcactcaggcaaaaaataagaaaccctttatatgagtcccagtatgagttcgtgaatacttcattccagttgggtagaatatagcaacataaaatgtggcaataggcagtgtatttgtaaattccaacacaagttgctgtgtcatcctcacagtcccagtgattaacatcatctctaccattgctaacatttattcatctcaggctgtgctatgcattctttcctttagtgagtgtgtagttacacataaggaagctgaggcctgtcgaaaagtcacaaagctagaaagaggcagagttgagttttcttccctgctatgtctgatgccctcagttccttgttctgtgcctttatgtcagggaggactccattctcttgacaacagcaaggttaagttcctgttcctggagtaacaggattctgagctggatagcaggatgactacttagatacccagaatgagacagatggtttgcagaacaaaagtggttggtggagactgagtcttgggaataagctaggggcgagcactttgttaatgaagtgagatctactggttgagcagtgactagcagacagtgtgatgcagggagtattggtttagaactcattaaattatttctgccccaaatcaggtttgagttcagatttggggtggctcagcttccaggtggggcttccagctccagctccagctgttgttgattggggccagggagggctccagctccaggacaatgggagaggacttgtaggtacagtgggaggcagttctttgtcatttaaaaacctattaggaaggaatctgaaaatggtcacattgtaatggaaatttctgaaagaaatatttgtattttgttagggatttaagagatcaaaactctacttatgttctttgaacactggccaacaggcgggagtgtttttgttttgtttgttttttgttttgagatggagtctcactctgtcgcccaggctggagtgcagtggcacaatctcggctcactgcaaccaccgcctcccgggttcaagcgactctcctgcctaagcctcctgagtagctgggactacaggcacacgccaccacacctgtctaatttttttgtatttttagcagtgacaggatttcactgtgttaaccaggatggtctcgatc

SEQ ID NO: 41579 - DNA, 5948 bp, Homo sapiens
agtcccagctgctcagaaggctgaggtgggaggatcacttgagcacaggagtttgaggctgcagtgagctatggttgcaccactgcactctatcctgagaccccgtctattaaaaaagaaaaaaaaatgtgtttttatgggaatgtccttggtgataaggaagaaaacacaggaagcatacaatatgctgtgaacgcagattcatttctaatggaatatttctcaatatttcccatgaaacatgaatcataggtcttgaaggggccaaaaaaggtcatagtttattctcacttggggttagcctatacctatggcatcctagacaaaggatttattttctcttggccagatcaaagtgtataaagagctaattgttaggaaaaaagaatcttagcaatcagtatgaattttgcctttgcttcagttcaggaattaatagagggcacacttgggtctctcccattattttcatatctgtgtctgggctgaggtgctggcaatgcagccttccttcctgtctacacatgccatctctttatctgctccctgtaaaatcctccagccaaaacaaacatcatgcttcctttaagactttaggcctctttcttccaagagctctctcagaccactgcctgacttttccctgaattctggaggagcaggtagaggtagcactacacagtctggttatatgcgtaaacctttccttagctctcgaattagatgtgaattcagttgtgacaggaaacagtgtatcttcaccctgctccccagccacacagcttgagaataattactgactggattcctgagtggctctggtattacattcaagcatgatgatttttcttttaaattttactcttctgatggcagtttaaagaggtttagttacgtgcttatagcagtctctaaatctcaatagaagaactttgaaatactagattccattgataattgaagttaatgagtttcctttagagaaatatgtttaaattctaaagaacttttacaatgaccctacattattaatactgtaattttttatttaagactattagatataaattgtgaggctaaagaaaataggtgagtgtgatggtgataaaaaatactgattaaagtaaaattcttaggaagcaccattatgttagtaaacagtaatatttaaagatacttaattgctaatagtttttgtccaaaataatttaggaatcttttaccatagcagttaatctgctgacttgtgttaagtgaatagagacctcaaaatgactaaatgacaacagaatgcgtgcagaggggaattctaagagggcactactatgagatggctgtagctttgaagctattcgaatgtgaaactttttccgctcttgcttgttctccataagacttcttcagctctgtgtctaattctccccctgcctcagtgagtgtgggaactgtatcgttgatgaacatcatgctctgcccagtggctctgtgaatgacaccattgagagctgttcaccatttctgaatttcctcatttgtctcccatcccccgcccctccatgtatgagtcagcatccagaatgtcacagggaccttaatgttacttgtttttccttatgtgatacttttgggaccttaacgttgcttttttttccttatatgatactttaagtgcatttattagacttgtttggcacactaaaacactgacctgtcattctttctaagaattttatgacaggtcctagggaatttgggttgtctcttgctttgtttagtgtgaaatgacaagaatggtgtcatagcttggttttgcaaactgaggtagactaaaacttcaaaagcaaagcatgcatatggtctctccctttaatacatactttgcatataaatgagaaattcctgttttactagcttaaaacccaggaagaggacctgttgcaaatgaagcttgctttcaaagattgtagtgaatctctgtcttggctgaaatttgcaaccagttttttgattaaaaatatttgggtgatttgaaagtaaaattattgtaacatgaatgcattaaattctgaatctttgccaacttttattatattggatgaattgttatttgactatttgtaaaatgtctgtattataaatggaaatgtttcttcctattacaagattaggattttaggagcttgttttctacataagaaactgccttgaaaaccatttctttttttttttgttttttgagacagggtatcctgtctcaaaaacaaagacctggctctgagacagacttgctctgtcacccaggctgaagtgtagtggcacgatcagatcatagctcgttgcagccttgacctcctgagctcaagtgatcttcccaccttggcctcccaaattgctgggattacaggcatgagccagtgtgcctgtccgaaacccatttctttagtatttggtggatttgtgagggattgctaacaagctgaaatgttattgtgaacacttaggcctcacttggaaaatcttctagaattgaaaatagcaagtcatttgccaaggctagccctagtgtcatggccatctttctttctgattgatccaaagctgtatatggtgagagttaatcctcccaggaggctctaagccaagatagtctgaatttctaggaaaatctgaattactctaccaactctccagcttaccttatgatacttaaatgttagcttcaagaccaatcagtcttttacctgtgtgtgtctgtactacaaatatatatttacgtgtgtgtatatatatttgcttcattagacgatttttccattttccatgattggatttacatgaaatttggagaaagattgaagaaaaattactttcagctttgtggagtactcttgatctctgaaatgtttgggggctctattttgcacatgacagttagcaattcctctcaacatggactgatgcacagctatttgttacaagtagacattccatacgctgacctgagaaacccttttacagacagcagcttgctgctgagtaactggaagtttaccagcaggtggtttccaccagggccggaaaatactgacgggcccagagcagaaagtccaggttatggaaggaatgagagcaaaggctgtgattgtacgtgcaactgtcatcttgctgggattgtgtaatgtcatgaggctgggttacgtcaataccaaactatgttgctttcctaggaggttttaagtccctctcaagggaggtactcagggtatatgctgcttcctgcctttctccttcttcctgtctcagttatcttgatttttatgtttattcttatatttacataagaacggaatgttaaacccttagataaaactgtcacccaatgttgtgtcatcagacttaagatgaattggtgttgagttctcagagtacagctctgtagtgtgaatccctggtcatttcgtagctaatgcttaacctgttagccccaatttcctctcttaaaatgggaacaatgatagtacctatctgataggattgtgaggataatccattgtaagtgtcattattcttatcatcattatctagttgtatacacagctttactgatttttcccccccctaaatagatggcatgattgtgggcaatgacttcattttcctacttgtagaaatcagttgaaattctagtctccctttcattgcttatttatgatagacttgctttcatagggttgctggtgatggcaccagttcaaacattttagatgaaggtttataagaatgtgtatactgttcagatatggggttatagctaaaacaatgggtccagtgttccatgaatttaaagtaaattttgttgtagatttttagttgttggttttcttttgaataacagccgttcactcttgcaccacgcctgagcagctatattcagagaaggctgtatcctcttattttatccaacaaagcagtttttctaatgtgcctccttttacattttcattgaattccatacttctggctgggcatagtggctcacgcctgtaatcccgacactttgggaggccaaggtggggcagatcacctgaggtcaggagtttaagtccagcctggccaacatggtgaaaccccatctctatttccccctaaataccaaaatacaaaaattagctgggcttggtggttggcacctgtaatcccagctactcaggaggcttgagacaggaggatcacttgaacctgggagatggaggttgcagtgagctgagatcgtgccattgcactccagcctgggagacagagtgagactgcgtctcaaaaaaaaaaaacttgtttccatacttgttaaaatttttatttagtgcattctgtttcttaggcagtaccaagaagcagtcagggctatatattgggaagatcattatagattttggagtgagattgcctggctcaaaaatcccctgcacattagatgtatattgtaaaattagttccttaacttctctacacctcagtttccttatctgtagagctggaatagtaatttctctctggaaggattgctgtgattaaatgagttattgtgtacagagcactaagaacaatttctgagtcatagtaggggcccaataaataggagtgattactaagctttcgctctttattatgggtgggcattgacccccccttcattttttgttagctaatcatttttaaagcatttcagaaagcctatgcgaactggagttattaggattttttagatgtcttcacgtttaaattctaacacttcaaaataacatgtttaaaagttatgcaatcgcagtttaactcctcaacccttctgccctttaggcttgttaaacaatgattaaaatgtcatctctgaaggtaccactgcttagagttctttaaatgtcacagatctttgcatgtcagataattcagaaaagcgagcagtgtcgcattacctcagtggttggccacaggctatttcacagcttgtagtctttcagttcctgctttattctttctgtattttttactcttgttcttgcacttccaacctgaaatagaaaagttcatgttacaagtgtctttaaggaagactggattaagttcttcaagggcaagggtcaaagcttagtcatctttgtatcccagagcctatcctgcatgcaggaggcattcagactgaaggaaagtcatttcctgatacttgtcttagtctgtctgggctgctataacaaaaataccagagaccgggtggcttattaacaacggaaatctatttcctacagttctggaggctgggaaatccaagatcaagatactagcttctttggtgtttgaggaaggcctgctttctggttcatagatggcagtttctctctgtgtcctcacgtggctgaaaggcctaggggtcttcttgggcctcctttataaggacactaatccctcatgaatggggattagtgtccctcatgatccagtcaccccttctagtaccaccccttctaataccatcacctttggggttagaatttcaatgtatgaatttgcgctggggtaggggacacaaacattcagacagtgatagtactgctgaagataaaatgatggaaaaattctcttaggtaatttagagaagttatttatttttgttgttctgaaaaggtagttaaatttagttattttcactcttagttcctcaatttaagataatgaatacaggcatgagtgtgtttccaaaaacagtaattctgaaaaagtccaatatatggattagcttctcttacctgtaaaaatgcatgagggaatcattatattcatgcttttaataactttattttgggggagaataggatgggaataccttagaaaatgttaggctatttaatccttaaagatacatcaactttttcccaaactttgtatttatttttgtg

SEQ ID NO: 41580 - DNA, 1685 bp, Homo sapiens
ttctttggagataggaaagcagtttgattccctgattctctttacagctgtggcatcccaatctgattgttggatgagttttggtatatggtgtaacccttagttcctggtgtgtcagttgtctacacaattcacttgcatttgttttctggattgttcagcctagattatggaacagaaccaaggcagattcaggtctgtcatactgacctcattcctggttcagcactgactttcctgcatagcctcaagtctagtaggtaggtggacttgtgattacaaacagattttggaaatcatttacattggccaggttttccagtgttttcccctttcctggaagccattttctcctattgctcgcctctaactcagtcaacagaagcctctgcccagggcaaacaattttgtaagaaaagagagcaaaataggagtgaatggagaggatgggatattaaatatgtaataggcctatttccattttcagtaaagtcacttgatttcctttaaagaggctctgattttcttgaaccatgccttggtggaattagaaagttacccacatcatttatggtattttgttgttactgttgtaggctggatttgtacttggtccgggactagaaggggagaaacagccttatctgttaatccgttgcagtggcagaagagctgtatatgtaactatatgcttttttcctcaacttatactggaaaaagaaaaaaaattgcccagagactctttttctaaatggttttggtaaatgtattcttcaaatacaactgcgagtaggaggccatgtcagtggggggtgatcattcttttgtgtgatggtaatgagataatttctgcattacagattttcaggagactctttgtttaaatgaaacttcagagccctcacaaagcctcacaagtctctttgccttattaaaaaaagtttttattaatctcatgtgttttgccatcatcaattgcataaacaaataaaattgttttgagcaatagaactaaggctgtcatttgtttggcatcctgtcctctctcctttttctcaaatacaatttgacaaaatctggctccgagttgctgttgttcccaccattagccatcggctccaagtggccattccctctggtcttggatggaggcaagaggaagtgtgcgcaagacatagccaggcaggttgctgcctgaaggctggcagccgctttcacatgggctggcagggatctgcagccagcaagtgactggcacaggaatttccgttgcgttgcaagaaggaaccaggtaggcctgagggtgtcaagttgctagccaagatcttcaacgtttctttgtatgtatcctttgctaattgaacctggaaaacctaaccatgaaagggatctacagagaaaagtggctagtgctgagttttgaagttttttttttttttttttccccactgtctgctctctaaagcaaccagtatttatttggttaaaaagcagctaattaatctgtttgatcttgatgtggaaatgaaccgtatcgaattccaggtcaaatcacttatccttgtagaatgtttttttaaccttttgaggtgtgtttcatcagattacggactatcagaagtttacttgtcctcaatattccggtctgcatggtgacatggctattgttctaataacagtgcttt

SEQ ID NO: 41581 - DNA, 572 bp, Homo sapiens
tactcgagcccaccaaaggagcaagtgaaggggttgcctgagcggcgctccggaatgtgctgcagccttctgcagaatgatctttgctgagtgaggcctgcctgtaggagctaactggtatgtttggtagtggaggcatcggacagtgtagtcagtaacaagatactaagataaatgcaggggttaaatgcttcctagagtgatgttttttaagctggctagttttgtttattgcaggaattaggtaactttgttggagagcaaccttgaagagcagtggagatgagtcagacttcctggctacttagccagtatcaagtaattaaaaaccactccatggatggggccacgccggcagagaaaccttcttacagggaatgactttatgatacccacacttttcaaagagtgggctgcattgagctggtctcattgggaagcatgttacctacgagtgagtgagaaaagctgcacaggtgcctagcagttgctctgctcatttcacttccactggatgagttactttgttccccattccaaaagctgactgttcctattcccatttaaacggc

SEQ ID NO: 41582 - DNA, 1702 bp, Homo sapiens
gtgcctggccgggcctgtttataactattatgctcaaggtaaatgtagaatgtagaaattaaggtgaataaaacattcatattaaaagcaaaacattaattttgtatgttcaggatatatggtatgagctgggacacctgggctttgagccacaacttcactgtctacaacacacacaaacttcctccctcccccactgtatcccctcccccaccacctccgacctccaccccaactgtaaaagttgaagctgagcatggtggctcccggctgtaattccaatacttcgataagttaaggtgggaggaccacttgagcccaggagtttgatgttagcctgggcaacatggcaagactccgtctctacaaaaaatacaaaaagttagctgggcatggtggcgactgcctgtagactgagctacttgggatgctgaggtaggaggatcatttgagcccagatgacatcactgcactccagcccaggcaacagagtgaggccctgtctccaaaaaaaaaaaaaaaaaaaaaaaaaaagagtgtaaacaggtaattttactgggccttagtttcgtttcttcatctctctgatgaggggtgtggctgaatgacctctttggggtttttacatttcacagttgtcaatcataattttctgtgaccctgaccaagcctcactctgacctaatgactcatacaaacatttctcttcttctcttcatgtttgcgtattttgattgcacatgtaccttggacttagtggggtcactggcaaagcaagtgtattttctgaaatacaccagagaagtgggtgtgcacagtgttttcccttgggtcgagccatgcttctgctgtccttccagctggaatctgtcagatgtggactgtggatctcctgagtgcttagtaaaaatgcagaatcctgggccccttgcagacctgttgagggggagtctctggaagtaaggctctgggctctgcattttaataagcccctaagtgatccccaggctcactactgtttgagaacatgaatgattctcctctaagtatgcactgtggtctttagatagaacccatggttccctcaaggcaggggtcatgctgtgtgtgtgtttataaatgaaacttctcaggataaattgtgatcatctagtttattcactcatgaaacaaatacttgcatccttcttttatacaaagtcctgtgttagttgtgggaatggagagaagagaatgtatctaaggaggcagagcagacagattttggcaactgattagatatgagggatgtgggagaggtcaaagttagctagcgggtttgatccggagtgtggaactctagttgtgccagtacagaaatgggcagacagtcattggaacagttttgagaagaaagatgcccatataggaaagagcccatagaatggttataaaatatgcctggatttgtggaaccagttctaaagctggcattactttcagattcttagtatcttagaggtgggtgtgatcttgtagatcctgtttcagtctcctcagaagcgggaaaaattggtatcatttggaggctattgtttaggttggggcaaaaaaatataatggggggagacattatatataaaggtgatatttacttcttagacttgagagaagctggctttcttaataatctctaactgattttgaacctctattagaataa

SEQ ID NO: 41583 - DNA, 1410 bp, Homo sapiens
aaccaacttctttatggatttgtttgaacagtggttcagaatttttatgcttactatcttattcctgtttgaatacttggccagccatattctcagagctccctgccccagccagcctctctaatggctcctacggtgaagttctgttagcgcttccattggaaacctaccagaatggctgggttctggcatggtgccctctcacgaaagctgcagccccagtgggggaagcgcagggtggagtttttccaccctgcttctggctgctctccagaccctggagtgtctgtgaggttttttttcctcttttctttctcccataacaacaaacaaacaataacactactacttggacatattagggacatgggatatgcgtgcgtacgtgcggtggagtgggccttttagttagctccccagcagtgttcttctgccactgggctcttttgttcagtgtgacctcatgagaagtggtagcagtactgtaagctctagaggatttccctatcatgggccttttatttccctgtggttgtctaagcaaagcaatgggaatctcctggtgggtattaactatctttctagaccattctttgcacgaaatgctgacttaatgagagtctgagtcacccttagcaatttctccaactccagaccatggcgtgttacaagatggcagctgtttagtggatatcagaatagccttcatgttttcatggcagggttaccagatttaggaaataaatttacgggatgcccagttaaagttgaatttcagatatacagcatttttttagtgtaattgtgtcccatgcagtacttgggatatgctggtatgaaaagttatttgctgtgtttttgaaattcaactttatctgggtgtgctcttttatctggcagctctacttcgtgcatttttgcatgatgtaataacttggatacatgttgtacttagaatattatgtatatatgattagttcctaaaaagtgactggcttcacaaataaacccttgagtgcatgaaattttgagctccttaaaaggcaactgcagttgagctggcaaatcacatatgccagatttccagactgagttgagtcggccatcatgaggcaggaacttgaagttacatcatctagaatttcccggtaccctttttttcctccctctctttaatgactctttatttgtaagttagaaatttgggctaagcattccctgcaaaaaggcgtctttcctttattcattgaaaaacacagaaatctttagtcttaagcaatacagactggtctgtatgaggttgtatttgtgcatgtagaaagaaaaagtaagaattttataaagccttctgccttgctttggctttttttcggccagtatttccttttgtgtattctacaagaagaccag

SEQ ID NO: 41584 - DNA, 1887 bp, Homo sapiens
caactaacacccccttgtaagggcaagtggttattcctaattttgtaagttagaaattctccaaacggaacagtgtattggtctctttcccaaaggatgcaagatttgtcttcttataaagtcttaagaatggtctcattaaccatctgttattgaatgagtagattcccgtgtagacccttctgttctcagggcggtcattccaccttcccctgagtctctggtccatgacccctggaagagattgcctgaaagcacattcataattttgctccacattcatgatttggcttaaacaaaattaagaattattacttgagcctttttaatagtttgctgcgggtgtggcacactttttctgtaaagggcaagatggtaaataacatgctttgcagacatacagtctctgatgcatactcttttacaaccctttaaaaatgtgacaaccatttttagcttgtgagctgtaccaaagccggccatgggctggcagtagttttcctgagtgtttgtccttaaaaacatattacatggggagttctgtggattctgaaatttacccattattttcgatatatatagaagtgggaatgaatacttagcaataaaaatatgtgacaagctgtgggcactctaacatcctggaggacattgtctctctccctgccccccttcccctgtggcacttactcatatttttaaaaggagaatgttgtaatttcttgttaaaattttggattttgtgttaatgctaaacaaaatgtcattctgatgggtttcttttgtcaggtatgtaggagcaagtggtcagatagcaaattcatgcccaaaggcgggagaaagcaagacaggacatcggtttgtcttctctttgaatttatttatttatgacattgaggatttggtgaaattttggtataacagaacatcctagccagtttttctatctttctgagccatcaattcttaagaaactgcataagcattttattttgaaaccttatggggaaggatgttacattcacataagaatgaaactcaataggaggtttgccctttgatttgctttatcttttcgctgattttctttgaaagattatgcttggtgttcttccagatcgcagtggtaacaacaggcaggctcccaaaagcacctaaggggagagacatcccatgagaatccatcatacatttcatacctttccagctgctgctcttagtgattggtgtaaagccattcaggcaccccttgtcttttattacacaatgaaattggggtatttcccgtcactttttttcccttcagacttttacaaatgatttttgggcccgaatgtgattgtgaatagacagacatagcttctaagaaagccgttgggacccactgaattgtgactgtcagacaaaggcattttgtttagaaggcttgtcccaaagtggtgttggagtctgaaagaagggccgccagcgtctcgttctttctgctgtgaactaataggaaagctgatgtttgctgagtggatggctgtactcactgtccaaacagatctgtgtttgccaactgtgaacatattgctgcctctgtgaggcactccatcatgccttgaatggatcctcttgtgttcagaattttctgactcaaagcgagggagagagaaatatttctttcagacttcagcattcactgtagcatccatagtctcatcagacctttagaaaccaagcatgcaccggagacgcttcttaaggagagtgagaaaagagcagagaaaaaggaataaagagacagccccattgaaatgcctttattctgaccatttgtggccaagttttcataaataaaccaggctgccttggcaaatagaattgtgagaatattttttattt

SEQ ID NO: 41585 - DNA, 924 bp, Homo sapiens
agggagggcatgtgtgctgattggtccatgggcggccacaggcgggcctggaaaaagcaccatccgattatccgaaaggcatcaaggaagttctcactcccagtagccgactccacccagaactggcagcctcgaccataggcttcaggccctccctggcttaaaggtggagtttcaccagggacctgccccttcctgcctaggaaactgtctgcctcccaccactatcaatatgccatccatggcgcccaggctgtccggcccgaggggcacctgcaggcccgcactgaactgccctcagccccttggcctccttcccatgctcgttggtgcccaacgtctggagggagtccaggcagcagggggctgacatgtcagtgctgccctgagcacacacacatccggctggctcgcaacagtgcccaggctcagccacaactgttttccgactggagtgggtgccagggacagggagaggccagccagggagtggaagcaggcacttctgagcctgcgggagcgcagggatgcctgggtccagagctgcagctgggtggctgcagctgtgcccagggacgcaggctcccaccctgccaacttggtagggcacagggttcccaccgggatcacctgttcccagcccccgccagctccacgaagccgccccccactcctccatgcagttggcatctttgcagtggctgctccacgtgggctaccactgctatcattatgatatgttttgataaaacagatcattggatttttcttaagagttctgcatttttccttaattttctttttttgttttccttttttcttttgaaatggggtctgtttcactcaggttggggtgcagtggcaaaatcatagtcctgggcccacacaatccttccgatccttccacttcagcctcccaagtat

SEQ ID NO: 41586 - DNA, 989 bp, Homo sapiens
cttccaggctcttttaagaaaggttgccactgggtagaaacgtacagataccttggggtcctctctggtggaattggtaccagatctcacacatctcctcgtcacctcgtcctagggcacttccagctctgagtgagaaagaactctggtgcacagcctcttgggacttcctttctcatggtccctggtgtctcctcatacgtttcttaggattttctttgctccctctgaaccttaagagactgcccagaagggccaccttatggtttaagatgtgtgattattcattttcctctccagtgcatcctctcttgtgactacagttaaatagatctcaacattttaattccttccttgagaacctttgtggtgctccccactgtctagagaataaagtctaaactgcatgatatgacacatactcacctcttgtggcccttcacatttccccaccagacatgcggtgttctgccccattttgtgaatatgcctcattccccttttttggcctgtccttccagttcctctgcctagcaaactccaactcaggccttcaagagccagctcagttatcacctcctctgtgaagcctgcctgtctctccaacatattatgatggcagataagttaagggaaaatatttcaagagtttttgccttccttttctcttcctctcccagcatttcattttagaacagtgcttgggcatccagtccacagatgttcaaggacaggaatggaaaaatttgttcttgtgtacggagtattatgcaagagctgggccttgagcctgttctgtggccaaaacccagttaaaatagtcacattgcctttcactgcagaagctaaagaagtttctgttgctcttcattgagtgagaaggaagcttcatttcttccattttattcttgataaaaaaaccaaagcacacaatattttaaggaagttattgagtgggatacagtgagtcaggatccagttttctaact

SEQ ID NO: 41587 - DNA, 687 bp, Homo sapiens
gctaaaagggggagatttcaggggacattagctggaggcgatgggcaaacaacaacttctctatatttatttttctcccacccacattccttgcattagggcaattagttaagctagatggataaactaactgggtaacccactaaatttccaagtctttcacaacctttccttacacctggcaacttgtacaccatgtcttccgcattctgtgggctgcatagacctgccctgctacattgcggaaggggtcagcactaggtttaagtagatcatgggggtggcgaggcatcatggaggctgactaccaggtatgtcgaggtggaaaccatttctgttaataccttatctgaaagagtctcagcatttgtgatggaattttggcaaatttcctgctgctatgtcaacatcgattttgtcattgcttctccttctgtggaatggagctctaggatctttacataaactgcagtgtcaagaggcagggtgttgaacttctggttttgtatgatcagtattgtaatgtgataattatagtctatactacaaatatgttcattattcttcatgctttctgccatggtcagctgtggcttttattttaaatttaatttgctcaaccagacacacagtgtagcagacgctattaccgtatttcagtttttggtgctgtagtgagactttgaa

SEQ ID NO: 41588 - DNA, 796 bp, Homo sapiens
cacatccagccatcaacacacattcttaatattgttttcttttgtccccattcatgcttatcagcattagtaggcattgactaggtatctagcttgtccttattattgagtagtcacatttttcgttttcacctaaaattatttatttctgtttcttttttgtttgtttgttttcatattgattgtttactgttggctttaggcttcttatctccaaaatgagcatgatcagaagccacacattttccacgcccctagttcattatacatgatttgttaaagagagtagctatgtcagctccttggcagatctgagaaagcatatgatgttatgacagggatatctacaaatgagccttgtggataagaactagacagaaggtttagagagaaataatgttgatgtcatcccattggaatgatagagctgttacaaccagaaatacattctatagctagtagctaagtgtgtagctctatttcttttctaagaaggaaaaaatgtgaaataaaccaaagaagtaaagtatgtttataaaggaggatattttaattagtttaggtcttaacagttattcaaacagtctgaacttaggtttctttttggagcaaacatgaaaaccattatttatggaaaatttaaatttcacatgacacatcttccctctatgtgtgtgggttttttctttctttcttttttttgaaaaaaactatttgctttgcttgtgtatttttatttcaaccttccttttactaaaaatgctttatttccttggtgtaggagatttgtttttag

SEQ ID NO: 41589 - DNA, 2527 bp, Homo sapiens
accagcctggccaacgtggtgaaacccccatctctacaaaaatacaaaaatcagtcaggcatgatggcaagtgcctgtaatcccagccactcagggggccgaggcaggagactcacttgaacctgggaggcagaggttgcagtaagctgagatcatgccattgcaccccagcctaggcgacagagcgagacttcatctgaaaaaaaaaaaaaaaaagccaagtgttgctaaaaccttgagtttttaagagaagccagaagtttggtttttaaaatgagagcgctccagatatttttcagtgaaggcttaatttttacttttttatttcagaaaatgttagatatagtcagaagtagatagtagtttagatagtagtagtttaatgaactctcatcactcaacttctgttacctcattgtcctcacttacctctcccctgccctgatgattttgaagtaaggttcagacatcatattatttcacctataaactatattaccatcatcacacacacctgaaatgtcttcacaatcccgggactgttcccatttcctcagttctaagaatgaagattttgtttctttagtttgttgtaattggaattcaaatgtgtgaatatgtggtttggttgatatgtcttaaatatattttaatccattcatttttccctttatctttttctctttcttgcaacttgtttgttagattaatttgtttgtcctgtagagtcttccacaagtatgagtttggctgactgcatccgtgttgtgttgcttaatattgttctcctgtcctctatatttcccataaagcaatgaagaggtttaatcagatacaggttcagtttttctgccaagacagttttgtaggtagtgacatagtcctttattaggaatgcatggtgtctggttgtctctttttgtgatggtcattgcctgtatcttttaattcataggtggctctaatacttcaaaacattatgtttttgcacactgccaccacacatacacatgtgtcttgggtcagatgcaacccatgagtcacctgttggagaattctgtgtatcaaagttcaggcttgagccctgcccatgtctggaacatgttgtgattcatttaaagtaacttactcccagtgagcccatcctgacacagggaaatgatcttaccagatctaccatttagttttatattatcacgtgcctacttacagtgcgtgcaaaaaggaccttttccttcatcaggggttgggtggagagcatcccaatgataagcattatttgtttggatcaaatttcatgctgtcctcccataaggcaaatagatcaaatatgtaatatgtatgtatttttatcttttgaggtacaaagtagacatatctattagtgcctttgacgtatggcctctatgaatttttcatgatggactttgtggagaaatgactttgcaaatcacacacacacttgggacctatcttccataatgttgttatctttacctgttgtttgtgttcattgggtagggctaagggaagtggattgtggtgtttagaggaacatgattgcaggatgaacaaggggaataggcaataccgtatatactggttagacttccagggataaataccattgatccaaatttctaactgtgtggccttgggaaatgtacttcatctctgtgtttccttctgtctgcaatgggtaataagatttccctacctcagagagggtggctataagaattaagggctcaatatctatttgccaactctgtgaatagtttaatccttgcatctgttttaggcagcaaagtgttctttgttgttgttgttttttaagagtacattttcaattttgaaaaaataaattcccagtataaaaaatggaatagtaggaagatgataaaaatcagcatagccctattttatgctatttgaagagtgtggcattaatagtatgttctatgctttttcttcatggcttctctggagaaatcaagcacatatgttgcagtgttgagccaaacattttagtgtacagaccgaacatctttaatcttggcttcatgtataagagttaaatattcacgtggattaaactgtacctgaacattgtttttgtggaattagagaaagtcacacttgttagcttctctgtgaaacatccctagttttacataaatgtgtacagtattaaatgtagttcaaagatggtatctaccctgtttgtacttttatgctttctctccagtctgtgacctcttattactgtttcttttgcctttttatccagctcttaactcttagcctttttccagataaagtcaaccagagagtagctcatggggttttagaacatatatttggagatcgttctggggttaaggtttattttcttacttagaataatctcttctagtcagtagatcctgcctatcttgaaatggagctgggtggcacacactgagacaaatacctgttgggatgactgtcccctgttaatgctaaccataggtcaggacaagaccaa

SEQ ID NO: 41590 - DNA, 1628 bp, Homo sapiens
ccctgtaggaacaagaacaatatctagactcccattattaattaggacttgaaaccaaaaatgcatgacccttctaaaaagtgagtgaggatgaggatgaagcaaaggggaggcaggtgctcatagagtatgtagtattctaagcgttactaggctgggacttccccccaaaggtgatgacttcctttagtatgtgaatcttgaaatgaaagaggcacttacccaggttcagataaatgaggtgtccagcttagggcaggtgaactctgtggtaagagttatgatgacatcaggggacaggtttgcgcaaggcacactggacggaacatagagtaagatgatccagtggtgtctagaatgtggataatacccaatgtatttttgtttgatgattggaaaggagaaagaggcaaagccctttctcccttcccaggcttgggaagggctgatctgatgcatgctgtgaatatgagtcgacttactggcgagccaagtcctttcctggagagcagttttgaccagaagtggtagacaaaacaccctcgtccctggttggaaaacattaccccagggtgatgaattggtgctctcaggctaggtctgggtgtggaatgaagatagataagcaacaactgtgaattaggttgagtgcgaagaggaacactcagcttgggaaaggaaacaacccacgtttgcaatgcgtcatcctgcgccagattgagcacctcaaggtttgtctgcacacagttggtttgtactccaagatttcttcacattgtagtaaagaaagattaaccttgcccttgaatgaacttggtctgagctgcagaaacaagcatttgggcatgcccaaggttgcaaaatggaaacaagccagtgcaccctgaaaatctgccctttttttggctcacagacactggcagtagaaagttaggccagaactggctggggttatattggttcatgtccagtgaggtcagtagcccagtggctaggtctgttccagaatgatcaatggtgttcactctgaccagtttctctaattcaggtgaagtatcttttccataccccgctgagaacagggactccagtgtcaccttagaggttctgatcctgactgctcatgtgctgcgaacctgacccaccaacgcgcagagaagcggagtgcagctaggagtctcttccctcagccctgcggaccagctgactcccaggccctggcagcccctttgaaagctcttactctcctctgtgtgacacaccacaagtggcctagcagccgtagctggccaggattaggcctaagtcatggctgtccctgctgcctgtgtgtgaccagatcattgatgacaacaggtctgaaaagtgtcaggatgttacccatttctactgcagccatattttagtagggaactttgaacaaggctgaatttaaattattaacaactaagtttccgaagtcaagtcagcgtatctcagtaatcctgtgtagtctaaattagattttttaaaggcgggaacgtgccatagattataatctctcaaaatctctgggagccacacagcatataaaatatgaaagttgtcatttaccatctctaaaacttcactgacaggaatgatttgga

SEQ ID NO: 41591 - DNA, 612 bp, Homo sapiens
accagttccaccactgtatcctcctacctagctttagtttttgtcatagcacttaacaccatgtgacatacatagcagcttttctgtattgtcttctcccactggaatgtgagcttcttgtgggcaaggccttttctgttcttgggcagtgctgaatccttagagcctagaggacagcccaacacagagaaggtactaagtagtattttgatgagtgaatgatagaatgatagagatagaactattgaatgagttccctgagttcaacttttagtggaatgtttgccctcctaaaggattgtgccctttcccatctaagctgtcctttctcccatggccagaagagggcactgtgtggtcaggaagctcagccacactttactgcatagcacattgcagtttgatagtaaagacctcggtgcaaagggcttttttcatgacaacattaaaaatgttaaatgtattttcaaaagttgcttaactcctttgtcacaataaatttgaccagacccaggagaaattacagtgtgatggagataaatttttatttaaagctcaagtgctatccacaatactctgggcttctgatttttctcttttgcggtagctgcc

SEQ ID NO: 41592 - DNA, 1090 bp, Homo sapiens
ttatcaaggctggttatctataagcttccacttgggagtccagatagaataacatcaagaaaaattggttcatagcctaacccctcagagtgacaataaccatgggtttacttttattttactctcttggctatattattattttttctgtgtaaagccttagtctcttgagaaaatagagttctttgtcctcctctttccatttgttcagtaacatttcttgagcattatagtactttgtaccaggatcaaaggaagatcaggaagagagatacaaagattaatcagatgtggttgttgaccttgaagagctctgtcttcatacacatttagatttgaatagataaagaagcaaagatgccaaagtcaagttcccacctgatttaagtcatggatcaaattcgttattataagtacacccaatgtctctggtctctttggagaaaatattcgcttcataacttaatttttcagatcaactgaagcatttctgttaaattcagaagtctgctgtatttgaaacatttctgattaaactcttttgttatacacctttcttgcttctcgaatgaagcacctgggacataattaaccttttgacaatgagtcagtgtcacagcaaattgtctgatatttataatagtgatgctgagtcactggggaaaggttaaattatgtgccacactcttgtttttctaccaaggcaggatataaataaagagctgtctgccaccccagtaaagagcttcactccattatggtttttgagttttggtgtttctttaaaatgttattatatctccttctctttcagagtctatgttgtcttagcattgacttcccaaagctgcattataaaagatacattaataagaatagtacctgcataatcttgcctcgttgtattaacaggagtagaaatatattttcaaaggtctgtgcttatttataataaaatgagtcagatcttatgaagggagtactacttttaagattaccattgccacactaaaggactattgccaggaagggggtctgttcaaactataccaatttattgttatttgtggaccaaatatgaattattttc

SEQ ID NO: 41593 - DNA, 1340 bp, Homo sapiens
aagaggaggactcctctccacccttcagcctgtaccatggactgtgttgtatatcctcctgatcttcatccattgcctgtgcccctccaggagggagaggattgggagacaaaaggggatgggttgcaggcaggcaggcagtgtggcaagtttgtagggaagggaacgtgtgcaaaaaggggaagcaggcgttgcagaagcagaatgctcatcttcccaatgtatcctaaggatgcgttcatctcacttcacagggcagttaggagcaagtgagtttcacaagttgaaccaaattcttaatgcagaaaggaagcttacttttaaagaaagactgctattcatttctttctaaaatgctcttttgtaatctcttaaatttatctgttttattaaacttgagggttttatacattgatttttctcaaaacaggacgtacttgagccctgttttatacttatctattttaactaggtcatttccaattttgacgtcaatatgactttctgggagattttaagaataaagagaaatctgaaatcaaaatcagcatgaaagcaattaaaatgaggctgtaaaacctctgtaccagaggttttcttcgtcttcttttcttttctttccttttttttttttttttttgagacggagtcttgctctgtcacccaggctggagtgcagtggcgcgatctcggctcactgcaagctccgcctccctctttttttttttttttaagcatattgaatgcttagaacttgccaggccgtatctcagcacgtcactcatattaatcatttcctaataaccgctacaagttgggttttgttattatccccatttgaataaataaggcacggagacacagagaggatatgacataactaccagaagccattggtggcaagatctcaatcaggacatgtcggtacaatgctctgattatctcgtctgcatccctgattacttatggtccagatataaactactcctcttcactttcattttaaccagaatttgaagtcattttattctctctcaagtactttgggctttgaggaaaataagggaaactcgccacctggtggcagctcatagtgtgtggtaacaaggtggctgccccctgtctggtttcaaggagagaggagagaatgtccctgccttgctattcacgcctctcaaacagctgagctgacctctcctcaagggccattgtctttagaaatccctcgccctgtctaggtccattctgataaaaattggagtagcagttttttctctatgcttcaagtgaggaggttggatgggacagagtccagcgatgagaggccaagactctcttga

SEQ ID NO: 41594 - DNA, 1881 bp, Homo sapiens
cgggaggcggagcttgcagtgagctgagatcgtgccattgcactctagcctgggcaacagagcgagactccatctcaaaaaaaaaaaaaaaatctgctgaattgactacctagggaaataaatgagaaaatgacaattttaatctgttatttgaactaaggtactgcaaaggttgaagggaggatcaaattgaacgatgattcactccttcctatagaaagacaatatcattttaaatcaaaatatcttaactgtttatgagaggtcccagctagaatcacacagttctgtactcagccatgtaacccttggacatttggccaaggtccctcaaatgcaaaggtgcaaacttgagttaataaatttcttccacacaccctgacatagatcattcatttacttttaaacaaatgtttattttgtttcttcctcttttaaattacaagagaaaaacattcccgtagtatatgtagttggaggtgaagctggggcctcctgagttgagatatgactggccatggacttaggtacatttccttgcccctgcctgccccacctgtaaacatccagttgcacctcgaattgacttgggagatgcaaaacctttccaaggaaggcactcagtcacatatgattcagaaatatgagagcatgtctagcaaactgtgggaaaggatcaagaaggaagagacgagaaactgggatcagccacaaggcccgagggtggttccaggaagagcaaactttccctggacactgtcccagttcactcagtatgagttggctctggccaagcttcggtttgattacactgaacaagcaggctcacaagtctctgtaacttgttggggcaagaaggtgtgcataacacagaaaggagggagcggtatgccttttcacttcacatcagctgtaagctatctcagcaggaaatggctgaatatgggaggcttcagctgtgagaggcaaggtgcagagttgaaagctgcctgtgatcaggcagtaatggcagcaggcaacaacttatcaactgaggtggagtttgacaaggatggtcgtggtggagcttgtgccacagggactagcccaggttagcaccaattgctggctagagcctgtgatcccttctgagtattttccagaaatactttcaggaggaggtggaaggaacctggaaaattgagtaaggtcctgggtataagtggatgggaggttaacaagttaatgtagctacattattacccaggagtttataaagcctggatacattcaggatacacaggcaagcagggaagcatggaaaagtaaagaacacttttctaaaagaaaaaaaaaaccctccaaaaactaaataagtaaatcacaaaaacaaaacaaaacaaccactaatagcagctatattctcacctcctacttaacctttggatgatatctcttgtttacaggggtgagatcagactgtgtgtgtgcataattttgagtatggttgttttctcataagactatataaaaatgctgtgttctttaaatctgtatgaaaattatacatggatagcatggatatttttataacattccctgtagaaaatttgtaaaatatagaaaaataaaaaggaaaaaaagtacccataatcataccatctagagatcacattgtcattttggtgtttctctttctagacctttttatgcataaatattgatttctgaacaatagaaatccagagaggaagccccagtcactctctccaccctcacatgtttcttgcatcatgaattttggtagtttctcctatagaacttggccaatgctggtgactagacacatggcgggttgacgtgaggtgctgtggttattccaagaatgataattaatacgat

SEQ ID NO: 41595 - DNA, 799 bp, Homo sapiens
tgtaactgcacttagtttacacaatttcttgaacttacagttttgcaaagacctcagttgttatgtgatttagcagttagagtgtacccacagagaaaggaagcaggaaagtcttcagagaggggcaagctgacatgcaaagaagcaggtaaccagacatttgctaagcgcctcgaagactgagtgcactgcactgcactgacctgcttcagctcgttggtaaagtacacgtaagttacagccacacagagagactgcaggagcactgtgaagatcacgatcagcacgcaggtctgtcccaggctgggtcccccctggacctccatcatagccatgatcctgtcagagtctgactgctgtaagtcagccaggcagccggtcactgaagcccttccttctctattcttttatagtcagtgaggaaatgaaagcgaatgagttgtttttctgggttctgtggccttggccccacccacatctattgaacctgcaactgtccctcccctttcctactgcccagggacagctcttgtctcaaagtagtcgttggaaaggagggaaactgaaagaagctcctctccttgccctcaggatccatgcaccccttatctgcactcacctcaagcccatttctctcttctctttcttgctctccttttgataatgtcctcagccaaagaggggagggattttctttgcttttccctaacatatcctcattctaccacagagctctaagcctcatggcctggctgtcataggcacaaggcctgttttctaaattataagataattttta

SEQ ID NO: 41596 - DNA, 1471 bp, Homo sapiens
taaaacaaaaataattcttgctaaaccagcaataaagaaacatatttgtttagaaagtatatttccaactgaacgaattagcttgtctctccattgaccaaagacagggttagaggtgttgttaagatcctttctttttttgttttttttttttttgagatggagttttgctcttgtcccccaggctggagtgcaatggcacgatctcggctcactgcaacctctgcctcccaggttcaagcaattctcctgcctcagcctcccgagtagctgggattacaggcacacgccaccatacccagcttgtttttgtatttttagtagagacaagtttcaccgtgtaggccaggctggtctcgaacttctgacctcaagtaacccgcccgcctcagccttccaaagtgctgggattacatgtgtgagccactgtgcctggccaggatcctttctaaacttgttgaattttggccaagtgtggtgactcactcctctaattccagcactttgcgaggcagaggcgggcggatcacctgaggtcacgaattccagaccagcctggccaacatggtgaaatcctgtctctactaaaaatacaaaaattagctggatgtggtggtgcacacatgtaatcccagctacttggagggctgaagcaggaggatcacttgaaccggggaggcaggggttgcagtgagctaagatcacgccactacacttcagcctgggcaacagagcgagactctgtctcaaaaaaataaaaataaaaataaataaacttactgagtttaattttagagcttggctaaatgacaaaggaagaggataaaggaaaggaacaaagaaagaccaggccatagctttaatctctgtgatcagacagcagtgttgtggcagggtgttggagaggggaggaacttggtattaataatatttgtaatctgcaattttcccccaaaatgtctttggttgattatttcatttaaggtaacattttgacttcaaaatagtttacatcaacagtatttgtcagtctagatttaatcaacagttttaaataattggctggattctcaaccttggatcttttcctagaaaaatgtttccttccacatagtgaacctgattttgaaaaaaagatatgggagattatttctccagataagagagtcttctgggaatcaagtgtttttccataatattatgtgaaataactaggtaagacatctgagtagaatataaggagtgagagttacagaatataagaaggcagagttccttgctgggctagaactgtgctgacagctctctggtataatttattagctccttttagtaacaaacaaattatcactggaagcatacctgtgtgctacatattataaataactaatacttttgaatgctcactaagtgccaggcactcttctaagccttgtatgagtattataactttttatgtgacagcaacccc

SEQ ID NO: 41597 - DNA, 704 bp, Homo sapiens
ttccttcgagagcagagcctcttaccctttgcccctccgtgccccactaggattcctctcaggagtgcagtgaatacagaaaaagtggggtaacccagactgtatcctctctgagatacaggaggataattattttcaagttttgacacataacctgttattaactaaacaaacgtcaagagtattttggctagaacatcatgcagtcaaggtaaaaagtagatgttgatttggaaaatatgagcaaggcacatacttattttcttagaattaaattaatgattcttctttttttcttcctttcttttttaatgcagagagctctggattatcattaggggcatttgcccgaagttatcttgtttaaatgtttacacagctcaactgcttcagataatatttatgatgagtaagcatggtctaatttcactaaatcagcagtttataaaatgcatctctgggtttttctgtgtgtatttgtgtgtgtgtgtgtgtgtgtgtgtgtgtgtgtaaagaaaaagggttctccaggaggcagaggttgcagtgagcttagatcatgtcactgcattccagcctgggcaacagagccagactccgtttcaaaaaaaaaaggattctgtggtgaagaaaattaagcagttctttgcctcttcactcaacccaaggcacttatttttatttatttacttttcttgtttttg

SEQ ID NO: 41598 - DNA, 1016 bp, Homo sapiens
cctccctccaggccccacctccagcactagggttatgtttcagcatgagatttgaaggagacaaacgtccaaaccatatcagccctcctgggcctccattgcatcctgctgagtccggatctctggttttctttccaattctgtcagcagcccaaggctcttgcaataattccttctcttattaagttatctggagtcagtttccacttttgcaacccagaactcaggctaatatatacccttttgttagcattaatcaaacatgtggcatggtacatagtgcaaggtaacagacgcagaaagatataaaccatggcccctagaaagaccaataccaggctaatagagagtaagccgagcgtcaaacgaatccatgtgacaagcattcacataacctgagcggttaggtaagggccccactgagaaagagagagggacttgaactatgtcccaggtagctgatttccacagttacagaggttactaaacaaccctggcaccttatttacctccattatcttttgtttgtgagctccatggaccaagtccatctagggtgaactactagatctcattctgtcagtctcctgcctttctttctcctgctatgaaacagtttgaaaaagagaaataatcgtatctgtacaggcattcagcagtccagtcaaaatgttcttgttttcttcttttccagaataatattttctttatcagacaggacaatttacttccaaaacattatgaaatccatttttccttcttttttcctcctcattctttccctctgtctctgtcattcttccttccttctttcctccctcctttcattcttctttttttcctttcacaacaactctcattttataaaagttaatatgtcttcattttaggggaatcagaacaggcagaaaaatgtaaaaccaaaagcaataattatcaacaatcacactgcccacggatttttttgtatttggatttttttggtatatttcctttaagacttttttctatttatt

SEQ ID NO: 41599 - DNA, 1430 bp, Homo sapiens
ataatcagggacataaagcaatttattgtccacccttaaataaagtttaaacagttgactgggaggtatgcctttagcaaagagcattccttgtgtttcccagatggctgaaatgcctttcacagaggaaacatttaaaaaggacaggcattttccctgagaggtaaaatcctcattagggttaggggaagggcaaggagaaagcatgcaaaggctgagtggtcaaggccagcttgggagctgcacttggggcaggcagtgatggctgaagaaggaagaggttggtcccaatacagacctactcaagttcacagctgagaaataggaaaccagaaaataacaagaacaaagcagtagctttctaacaccttttcatgttggacatgagtggtgaattagagaaagttcttgatattcccctgagcatctatgttcagaaccaactgttgagaaatctatttgaactggatttcataacctactagagagaccaaaaacatgttgaaacatgagagaaaatgattaaagatataaataaatccagacttgtttcaatacatgtggcatctcaaagtacaaattttgttacttcatactttggctagttattttttttgttttttttaacaaaatagtcctttgccagatacctccagataaatggctgggtgtacacaggattccagaattcctattcaatgataatggaaggatgcctccctagggttttataaaacaaagggtcgggaaaagaacacatgacattattagtaaaatatacagattttctagctagttcatgtgcacaggcattgtaaaatacgtgggtgtcgttttgatgattgatttctccactcagtaactagtcatagcacaaactccagagccaggctctgggcttgtctcccagcactgtcacttattgtctatgtggcctcaatcaagttacctaaccgctctgtgcctcagtttctctatctagaaaatggggttagtaacactaacccccttgcaggattattgtgaagactaaatgagttaaatacgtaaagcactacagcacctggccatggtaaataataggaaggtgttggctccccgtctctcagtattcctttgtcttccacatcagcagttatcaatctttcccccagttcatcacattgagaaatataatatgttttcttcagtaacaggagcttactatggcagtgatttttaagaggaaggtatggaaacttccctggatggggtgagggttggagggtggggaattagactcttgtggatgccttcaccttgtaaatgctccccagatgactttgacatccacttcttttttttttttttttttttgaaatggagtccctttctgtcacctaggctggagtgaagtggcacgatctcggctcactgcaacctccgcctcc

SEQ ID NO: 41600 - DNA, 575 bp, Homo sapiens
atgttggccagctgctcttgaactcctgacctcaggtgatccacccacctcggcctcccaaagtgctgggattataggtgtgagccaccacgcccagcaacaattattattttcatgcgatagcatctattggcctcctcctatagcgaccaatgcaaagaagagcaaataaatcactgctttgttcacctgttagcctcagagcatagccaaattcctagcacatattaggcaatcaaaaatatttcttgaatgaataatcaaacaaatgaataaatagttcctaacatgttttaaaataagttattaaccttgtggctagctgcaacatttccctctttcctgtatcttgtttttaattaataggttatttttcctaacagtaaatgtattatgttgttgaaattttggatacgacacagaaaagtgcaaaggagaaaatataaaaccacacataccctaaggcccagaagcaacctctggtaatgtattggtatccttccagagctcttttcaatgcatatatagtacatcctcccatattataaatctatggctattagtctatagtcatg

SEQ ID NO: 41601 - DNA, 2247 bp, Homo sapiens
tgtagcctaagtgtacagtgtttataacgtctacagtagtgtagagcaatgtcctaaggccttcacattcactcactcaatcattgactctcccacagcaacttctagttctgcaagctccatatacaagcatagcatttttatcttttgtatcatatttttactgtaacttaacattgtattacaatagccagcagtatttagtacagtaacatgctgtacaggtttgtggcctaggagcaataaactatagcctgggtctggaaggctataacatctaggtttgtgtaagcacaatccgatatttacacaatgacaacatcacctaatgacacatttctcagaacacatccccatcattgttaagcggcacatgattgtattttaatatagtctctgaaagtggcagtgctctgggaacacttatatataaggtcgccaatatctggtatgaatgagtgagtttgtcaaagtgtttttaccattgactgaaaagatctacagaacctgaaactcaagagtcatcaggggcaaatggaaaacatttttgagaaggaggaaatgaagctcaactttacccattttaaaattgaggctgggcgcagtggctcacgcctgtaatctcagcactttggaaggccaaggctggtggatcacctgaggtcaggagttccagaccagtctggccaacatggtgaaatcccatgtctataaaaatacaaaaattagccgggcgtggtggcgaacatctgtaatcccagctacttggaaggctgaatcacttgaacctggaaggcggaagttgcagtgagccgagatcgcaccactgcactacagcctgggcgacaagagcaaaactctatctcaaaaaataataaaaaataaaataaaataaatggagccacagctggccttgatgatgaacatcaagtcagtatggcttagtgcagaatcctaataacaatggtcctgtcttgctaaagaagtaaagcaagcaaagaccccataatattacctgcatttatatgtaagaagaaggacaaagaggttttttttttttctcaaaagttgttttaagattcataggcatccagctttcacttttaaaattaatgttaacttgtttccacaaaaagtgtgaggaaatgagtcaggaaacagtaaaagggcggagtgggagagtgggggagagagagaaaagagacagagagagagagagagagagaaactcatctgaggaataaggcagggtgattacgtctgagtggttttactatcctacgcctggatttcctgagacggaaaattccaggaataggagctgccttgagagcttcctattggcattctttcctattaatttggcttttcgcaagttattaggcaacttaagctgtttaactttaacaatgttctgtttttctgtggtttctggattatgtaatacctaaccaaagaataaacaaccaaagaaaataacttttacttcatactttggcaagtgtattcaaaaggcaaagatctagatctgagaaacagtttggtaaaagttaaggtgcaatcagaaaactaagtgtcacagaaatgaacttattggccactcagggaggttttcaaggtgatatattttcagtgaaatgaatcatacatgtttgtacggtcactggtcaaagtgaaggttactcggtagaaaagcaatgttgttttgattgtactagtctgatggtgagaatgcccctgaattcaaattaaagaaatgtttattgctggtgcctacagcactgatatatgactttgttttgcagttgaactcaggtcacctttcttgctattgggaacttatttttcaacccagaagataaaagaacagatgatttaactgatattaaatagaggctcttattaccttttgtgtggtcacattttgacctgaattgaacctatgagaaatgtaaacaaaactgtatatacgtttaaatgtgaagtgaattcttcaggcagaaagcacaaggttatagccataatgtagaagaaaaaacaataaaaaggcaaccccaaagcaggtaccaccctcataactggtttgatttatgtgatcttggagatgattgccacatataaaatgcagataataataaatatttatctacctgcctcatggagactcacacgaagtactgatgggcgctactttcacagtaatttgccttcttttcaccttaaccttgctaagcgttatgctaagtg

SEQ ID NO: 41602 - DNA, 706 bp, Homo sapiens
gttactaaatattttgaatatcatatctaattggtagggggacactgttctaagttgttctttgaatatattttttgtttgtggacaatgatcttaatataactgactcccagatggcttcaagtgtagttataactttaatcaaataatagaagagtatggaattttacctaacatttaaatccagaataaaattttgcaaaaagagctttgtatggagctcaggagggctcgagcaaaccactagtcctaatgttctggatctgtaaaataagaagttactatccttcaaactctaaatttttatgattccatttgtaataaggagaaacaaaagtgaaagcactatgttaaaaaaaaaagcttagggtcactttagaacatagctaattctgggaaatcaggcacatctcagatttgataaggaagtggaacacataagcatgcaaatgctcacaggaacacacaaataaacacatatacaatggaaaaaaatcattgcagcattgcaggctggtctctaactcctgaccttgttttatttaaacatgaggaaggtatgagggaacccagcatgaaacagtgttactggcatttttttttccttctgagatttggaccttaagtacatgaatccttttcagactacgccaagaatacttaaagcagattttgccagttaatctaggcacacgcaggcttaagt

SEQ ID NO: 41603 - DNA, 2576 bp, Homo sapiens
attggccaagctggtctcaaactcctgacctcagtgatccatctgcctcagcctcccaaagtgctgggattacaggtgtgagccactgcgcccagcccccattttctgaggtgaaatgaaggaagagttaatcattcatgctccttttcttgggttcagctgccatccttacttacctctgatggaggactagggatttctgggacttgaactcctgttatagaaggtcagattagccttaagctgaacagcagcagctacctgggcctttctcccctgaataaaagttctgaagatctaaaatgaaaatatgaaaggaaagaaattatcaagttctgtctactaaatatctcagtggatttcctacctcaactggtagatttgtcttaaggcctttgtttggagtgttttcctacaagtctcaaagtctaacaaaagcaggcgttcccggtcaagctctgccaaattcaccacgtgacctaggacctgaagtgaactttcgtttctcctgttctctctctttccgaccttccctccccgccaaggcaatgcagacagggactcaatatattattttgagttctccataggaaaagaattattattaaaacaataagctctcaagataaatacctttatataatgtatatacattcatatatacatgagtatatactagctttcatatctgtattcttttttttctttctcacccagaactcaagaagacatgcctgtatcccttttttttttctcttttgagatgaagtttcactcttgttgcccaggctggagcgcaatggcgcaatctcagcttactgtaacctccacctcctgcattcaagcaattctcctgcctcagcctcctgagtagctgggattacaggcgcccaccaccacgtctggctaatttgtgtatatttagtagaaatggggtttcaccatgttgaccaggctggtcttgaacttctgacctcaggtgatccacccgcctcggcctcccagtgtgctgggattacaggcatgagccaccgcacccggcccaacatgtccgtattctcaaagctatagaggtgtctttgctattttgttctcttaggtaagaaccgggtcctcaccttacactttattcctcaggtgaagagactctgtgtgtgtccattcagggaagcatgagagcatttgatttcagctgagcaggtttagtcatctaggagctgctctcttaagtgtttaacacaatcgttaactaactaaaacttgcaggaaattaatctggaatttcccagtaattacatgttttagataagtttttgaattgagtccaagatgatgtgatagtgcatgttcataattaactaagaaactgagaaaagctttcttaatctaaaaacaaagccaaaaatctttccatgcaaggaaagaaaatcttaattgattaactcattaatagagcagggaaaagaaaacaaaagcaaaagcaaaaaaactaacttgagatatagctgaactcataatgtgtatttgtttttatttccagttgctgcttaccattagctgtgcaagaccaaaggattttgtgctttctcttgcctagtaattgttcagtccaaaatttaaccatgttgtttttgtgttattaccaggagcaagaggacatgtgtattggtgagagaagaggggtgaggagtcagggataagatgaatctgattaacttcaggggttattagaataaatcttgtaggcttggagaatcttgtaggcttggagaatctagagttctatgagaaatggtaagcagacttcataaatcctgtctgcgttgctgctatgatcttggccttcccctgacatactcccaagaaatagaaacgaatagaaatagaaatctaatagaactagaaatagaaatatttcccaagaaatagaaagtaaaactgacaaagccaatgcaaagaaatcagttcggaagctgttaattttcacacgatctgtgttcagtaaccgccctctatcggctctcctgaatagcacactatatgggacggagaatctgaaaggcctttttgctggttttcttactaacagagagttcataaaccaggatcttcttcagcctccaaggtaaggaaatgtgtgatctccaagctccctcttgtatgtattgtgaacgccactgtcagaagagaaacaccaaagttattcacctggaaatgttgcagtatgaagaccatgtatttgatggagaggttatttaaatggtaactttgttaatgaatttctttgctaactttccctgctttattttcatgccaaaaaccagagaggtacagagaacagaactcggcaccacagtctaaaagtgttaagtttcaggcacaacactgctgtttttgagctgtgggtcctcagacaagccattttagctttccgagcctcagtttcccacttgcctgcttcttcaccacttcctggggtgataagagaagaccaaatgatatgtttgtgaaggtgctttgccactcatgtaccctatgcagaccctattattagtagtactttataaaagtaagac

SEQ ID NO: 41604 - DNA, 1532 bp, Homo sapiens
gcaatcctcctgccccagcctcccaagtagccaggaccacaggtgtgcacaaccatgcccagctaatttttgattttttgtagagatgggatctcgggatctcactatgttgcccaagctggtctcaaacttctggacaccagccatcctcccaccttggcctcccaaagtgttggaattacaggcatgagccattgtgtctagctggccttactgataaggttctgttgttgggagggtattctatggcatttcatgctgagatttgtagagagcaccagtgtcactattaaatattgatttctattgatttctcatggttttatgattccttggcttgggacaacaggctgtattacacctttgtgttggactttgtcagtacctgtcattcaccctgctcatgttaagtatcatcattgcaaggtgatggaatgagagaaaagcacaaatctctaaatgttggttcttggattttaacctcaatccagtaggctcataaccctctcttggttcaaagccatacaagtatacattccttgctctccaatatttaactagcacccacagagaaagtacaaaggccaacaggatagctgtgttttgtttcctctgccctgagacacaactagatctagcaccaaggagggcaggatttaacagatcagcacacaacgaatcaatttaaagaggtagtttgaaccgggaataagactgcagtgtagactacgactgaacagaataaaaatcctatgtggttcttcattgagaacaggggttttggccacttgtaatgtaattaaacccccactaataacaaagatgcttatatagaggatgaggatctgcttggtgtgagcacagttgttggagcctgaggaaaatctggccatcagcaaaccacaccctgagtctttccaaagagaaagctctgcttttgcccttctggctcatgactggtagatttacagtgcagatcaaaggtctctctcaacaatcaaactacttccaagaaaccatagacctttaaaaataaaggccagtgatttcatacaggctagtaaaaatactttggctatagcctttcacggatgtgtgcttgggcacacatacacacaggtggagctcaataaatgtggaatgattaggtattgatcagcagtatttatgtgtgagttaagtccagacacaccatctaccaatcagcaattcaaatttccatgcccaataccagacagccaacctaccaggtaatatttccttagcttaaagcagagattctcaaagtgtggtcccttgtaacatcagcaggaactcagaagtgccactttgggggcttttgattaaggcccagcaattagtgttttaacaagcctgtgattctgatgcacactaaagcttgaaaattactgttttagaggcagacatgtgaaaacaataatgggaaaaataattcaaactcttttgcttcacttcagctggaacaaaaagtaaactgagaatggttttacttaaaaatatctatttctatt

SEQ ID NO: 41605 - DNA, 1717 bp, Homo sapiens
aaaatttctatagcatgattatctaccttttataataaaataattcagttctaatttgctaaagaaattatgcttctgtggggaaatttttaaagcagctatgacatccagggattatgtaacttaaacattgtctactccctgacatccacacactgcccaaacaccctttacctactcatattcctatattttgcttctttgtacacactttgcttacacaacttgtctgtcttgtctgggcagtagatactttctccaaacatagagcgggctggactgtaggattccatttgttactgaaatttcttctgcttcccctcatgaccaaaccccagtccatccttcagtatccatgtcagacatcccttcctctatggtgccctatccaactcatccctcagaccatcactcctgcctttgtgctctctagtttaagcttttacttttaaaacttgttgcattatcattatgagcttctagatctctccttcatttttgttcccctaggtttagcatacacctcttacataatttgtattcaatataattgtgaatatgagtgactttcggtcactcatcaatctattcactcactcagcaaatatgtgagtgtttactttgtgccaggtacttttaggagttgtgcacacagtggggaagtccacagacaagcccctcccctccagagctttcagccaggcagtggagatggaattacttaggagtaattaaacaaatccagtgacaggaagaactggcaaatgagggtaaagaaagaacagggtgctggccgggcgcggtggctcacgcctgtaatcccagcacttggggaggctgaggcaggcggatcatgaggtcaggagatcgagaccatcctggctaacatggtgaaactccatctctactaaaaatacaaaaattagccgggcgtggtggcagcacctgtagtctcatctactcgggaggctgaggcaggagaatggtgtgaacccgggaggcggagcttgcagtgagccgagatcgtgccactgcactccagcctgggcgacagagcaagactccgtctcaaaaaaaaaaaaaaaaaaaaaagaaagaaagaaagaaagaaagaacagggtgtagtgagagaaggtgagagggaaaccagactgggtagtcaaaacaagaggtcaccttctctaagcatagatccaccccttttgacaaacattcaagaagcctttgtctccaataaggcatcatagctgccaacaactgcagtgtttgtttcaaactttaaacaaagaatgaccgtctgaagtaatacattagggatacagcaagaaagacagacttaaagaagtttctattaaagacaaaaagctactaaaaccaaacagaagaaaaacctcattgttttcaatcaaattatatatttggccaccaggagttaaatgctactgtaaggttcgtaatggaatatttttatttttctttctctctttacttttattttgagacagggtctggctctgttgcccaagctagagggctgtggcaggatcacaggctcactgtagcctcaatttcctgggctcaagtgattctcccacttcagccttgcaagtagctgggaccacaggtgcatgtcaccacacctggctaattttttttttttaatttttttgtagagatggggttgcactatgttgcccaggctggtctcaaactcctg

SEQ ID NO: 41606 - DNA, 2602 bp, Homo sapiens
ggctgcagactgtagtttagattttagattctctgacactaaaaataatgcctcttaccatggaataaaccagagacagttatattttcctgtgtatggaaggaatgaacacacgcccatgatacagtggagagaaatgttaccctcccaggttaaggcaggtaacctcgctcaggaaaaggttatctgacagccaaggacataaaataaatgctgcagggcaagcagaaaacatgcatcatgcaaaccagggctgccgcctcctcacctcctttcagccagcccagcctcccagtcctctttcttgggctgagctgagatctgcctcgggtgaaacgagagatccctatggttcctcaagtgcttggatggagagccctgcctgctgtctccgggaacggagcgctccacagcctggggacattgcgagactgcccttgcctgcttctgcttctaaggtggctgcattcccaggaaccagagcctgcttttcccgagctctcctaaaaatatttatcctctgccggtccctatgggagaacgacagtgtgaagaagggtggtttataaactgcttaaggatttgccttttgacgttgcaaaccaaggaagaggaagatatttaggacagacgaaggtttaaacagttgtcaaattctattcaagcacttcttccccgtcacaaacgcagacggggaaatgcagatctagcccgctgctagcaaggaggcgaatgcgataccctgaaaattcccgactggaccacctcaaaaagcgacagcctcaatgcattaggaaaaacctgcgttttcgtggaacccggcggaggaattttgtatccccttcaaatattgcgtaagaggaggaagagagaagcagcgctgggctgcacctcaccacttgctgtgcaccccggaaagtggcgtccagcagcatcagcttccaggggtcggacacggagccaggcagcgggatgtagacgtaataggcggccagcgccaccagggcggtgagcaggacacaggacgacctcatcttgccctggctcggctcgccagcgggctggcaaagaggaaagggcgataccacccggagacctccggcaactttctgcccgcggcagctgctcattcacgcgtttcttataagcccaggagccaatcagaggctgcgtcgggaggaagttggagcgcggacatgccccctctacggtgtccttgcaaagtgtggcagtcactacaggtttgaggaaggctctgtcgctgctctggccgtaggcacagcggactctggaggacactggtttgtactgcatgcgtgtgaggatggctttcctcctggaaggtctcaaacggaaaatagtttcagtgtgacgagtctctggacaaagcaagtgggtcattctgactcagagtactgagaaaggatataaaaattctgttttctggagccagacttggagtggtttgtaagttctagctgatatatggcaaaagaagatattaaattcttctggctcaagcaatgaaaggccagtagtacatctagcacccaagtcttggtttctaaatcctatgctccaataagaggaaccacggctttttgacacaacctctggagaaaaggctgataccagggctggggctgtaaagtacaagatgaacctgttgtgccagagatgcggaagtgctcaaaaaatgataggaactggtcaaaggtccacagctgccagcttgaagggtctcccagtggctgaagctgggataattttaccatcaatataaatcatcataatggataacccattgattaaaataaaactcaacaatctatattaatataaataaatgaggaaagaagaaaggcttttcttaaaatagaatgccagctagtatccatagaaaatcataaatgaatgctaaaactagagggtaaaaatttgacacagaattttggtccttcatcagaagatctctccacaaattactacaaagggaaaaaataataactttttattggagaaacgtgtggatatcacctgaaaaattctttcagtgagtcaatggtagcagaaatacacttaaacccagatttcttgttaatgattgggggtgaggaggggtgggtgagtactgaatgggagagagaaaacttcactagcaaaatttcaaccagaaatccagaaggaaaacagttagaagacctgtttcaagaaagtggtaggatgacaactccaaacttattgatgaaggtcttaaaacacctagtatatataattatgcatcttaagatggtaattttaatttaatcaaattaatagaagtgaaataaccataaatttggttctgataatgagatttttaggaaacagttggcttcttcttcaacattgaaggaaaactgataagaagggcacactttcatggtatttcaagcaagttctctctctcttttttttttgttttgtttgtttttggtgtttgttttttgttttttttgagacggagtcttgctcttttcgcccaggctagagtgcaatggcacgatctcagctcactgcaacctccacctcctgggttcaagcaattctcttgcctcagcct

SEQ ID NO: 41607 - DNA, 3112 bp, Homo sapiens
ccatatttgtcttgtcacacctatattctcagtgctagcatagtacctaatgggtgcttaatagttattaaatgaataaactatgattaggttaatcaggacatccagtctctcaaacattatgaatgaacttggatctagctcattcactctcgaaatatttatttggtacctacatgtgaagattcctgtgtttattagagagcaatgtgtaacatttgcctttgcagtactagctttttgaaaatacctgaagatgagggatcatgttttactttaccagacaccagccctctgctaggtgcaattaagtggcatatgatcacctatgcacacgattatctgaaatactcctctccacattgctttctttgagcctgcagacagatctatactagactttatttacactcatctattatttctgggttctaatgcgggctaaaatatttattaggagacactgggtaagttacttaaacctttcctacagtttcatggtatcatgggactatgatacctacttgtgggttgttttaaggattaaataaggtataaagtgcatagtaaagtatcagtatgttcattctctttcttctctcccttatactgtaattatctgtttatctgctaatttccctcaccagattgtgtggtccagacaggcagttttctatgccttattcatctttataaccccaacaagcacaatggctgtcttaaaattagtaaatatttgctgagtaaatgaagacctaagagagtgaaaaaggttgtattacccgtttatttgttaatctaactgccacacatcccttaaaagaaatcaagtacagcttttgttagggaagcttaaaattcatggcaatgataccatacacagttaatcattagctttggaaagtctgttgagcagaaagcggtgcacaaaggaagtagggctgcttcccacaatagcttaatatgttttcagtgatgaacgtttttggaatgctgggcacacccgacttccaaatacgcaagcacattccaaatggaaatttcaattactgtttttctttttttctgccgtaacagttatcacagcattttaatgaaggtcagacttaaatactgacaagcagggaaaccaataattaccagattgcttcattcattttgtggacagcattataaacttttcaggcattctaagattgcctgacaaaattagaaaaaattgttaagtccccacaacctgcttgagatgctcacaagtgttccatcccaaagtacacgtttgcctcttcttattggtatttaggttctggcatctgattcccctttcttcttctatttatattagccttcaggtgggaactatggaaaacccacctggtgggggtgtatttttcttaagagattgtgttatatggtatcatatttagaaaataaagaaattattttcataatagcaacgctaatcacaggaaaaacttgatacattcttgactagactttaggggaaagtacaagttcttagtgggcggaggggggcaaagacgaagcaatttggctccaaaaattctagaatctcgtggcatatttttatcaaattcaagcttatctttaaaaaaatccgagaatttttctaatttctaagaattgattctaacccgcgatactccctagatgggagcgcagtgctttaaataatagcatttaaataagcggctgctgatttgaagtccacctggggagtccgagttctaggaccggtccttggccctgccacacgccaatacaaccatcaaagtcaaaatcccttaactcaaatttaaatacattcctaaagcagaaagcatcccgataggaaaatcctacagctcacagcaagcagcagggaaacatttatctctggcggcactgatttaagcttaaaagatttggtatcgtttaaaaaaaaaaaaaagctgggtggggccgaggagaatccacccaaactttcctcaggaagtaggatgtttactgagtaaatatgcggtagtcacagaaacacctgctactcctttaagacctcaggagccaccaccgccacctcctggccacatccgggcacttctctgcaaactcctggcgtcccgacgcccgagtcgttgggcttatttgaaacacacgcacaaccaatcaagcggcgcctgccgggacttggagagcgtcgaccaatcaccgcccctctggagactcctgcctatgggaaagaggttgacatcacgcgccaatcggcatggctcttagagagagcagcttagtttttgaatcggttgtggcggccgccggcgaggaatggcggtatttgtgagaggagtcggcgtttgaagaggtggaactcctagggcttttttgagagtggtaaggactctgtgtgagtgagagaggtgcaagtgggcgagcggctccagagccaagggctcttttgcctgcggtcgacgtccccgcccctagtgaccgcgaattccggagcgccccagctcaggcttcccggatccgggaactccctcgccgcaccccacccccagcagccgggccctgacgcggagtgggagaccgaagcccccagtattgctgggcatcttcgccctcacctgttggctcttttggacagaagagtgtgggtgaagggagggagttgggaaagggattttggcaagccgcgcagccctgtggctttgggggccggcacttgcagcctttgggggcttatctcagagtgcgccgtggttttattctaggattcatcctggcttctttgcgggaagtttaatttttcgtttttgcaagataaatccaggccatccgcccctcgtcctccccagccacccggcacagatgtgtccggcttagtggttaaaggcgcagcctctggatttagccgggctttgaatacctcttttaccccttactaacagtttgacttaggggaagttgcttaacctctctgttcctacgtttcttcatccatacattgaaaataataatagtacctgcctcttaggattactgcagagattaaaaggtttaggacaatgtctgccacgtattaagcgttaagtaaatgtcagttgttaatagt

SEQ ID NO: 41608 - DNA, 734 bp, Homo sapiens
attaaagatacattaaaataaattattatttctaaatcttgttcattttaaatgaaacaaatgccttggtagctatatattttcaaatgcaacttgagaagtgttggcatctttaacacaggcttatcatgtaagcatcaagcagacagaaggtgtcttgtgaacatgctggctgcagtggcggggagaggcgccatgaccagcgaggcccttttatctctactagaactctgacaggccactttatatgggacatggttccaggaatgacattccattacaagtgagtcagcatttctgggactgtcacagctttactggaaagtacaaccttatcttcctgaacaattactttcaggaaatatgatggaaaaaaatttcaaagctctgacctctccaaatttgctctttattttttcaaatttcctgtagagttgctcatagtttaagaattgttttcattagaaaatacatgtggagtctgttggcaattaaaggcagccaaatcctgccccaaaagcaaaggtgagacattgcctaggctagagccaaaaacatagcttttgaggacagattggcttgggcataagttccaaccctgtaattcattagctgtgtgaccttggagatgaattacttagcctttctgagactcaatttctacagccgtataatcagagaaaataaaaacaacagatatgttgtgaaataatatacatgaaatgttttggaag

SEQ ID NO: 41609 - DNA, 1399 bp, Homo sapiens
aaataaaagaaatacacctagtcccaaatatttggatctactgatatattgaaatgaatattaactttaatagattagagccaaaaataaatactatagaaataagacagttataatagctgatttattaaccatttgcaggcactattttttattttgttcatgtcactgaatattattttatttgcttacaaaaatataattttcttgcgaggaggaaattttctgtcttgttgactgctgtgtgttcattaaccagaagaagagttgacacagaatagtggctcaataaataaatatttgttaggtgactaagtgaataattaaataaatggtggagaagtattccagggatttgtcctgagccttaagggagggagattaaaatagaaggtgacaggaatgagagaaaagtaaaaatattccaactccaaaaagagaaaaggcagcctcatctttgccatggcatttggatgaagatgggtgttaacagtctcgtctcacagcgctgagaaaaatcattacatggcttggtcacagttcagtggcttgaactgattgactagcctgaggggagaatggctgtatcttgagcctgaaacacacagtggctcagtgtaacactcattgatagcatcagccactttaagagagaaaccctacattcaaagaaaaggatggagttaaggtgaggataaacagagatgtgatcatatttgagtcactcacacagagaaaaagaagtttgtactgaagctatagtaaggacaaaaatggtagcatattagaaaaggaagtgatttgagcaatactacaattcttgaaattatttactgaaggcttcagccagaaataattgtgcatttctattgttttcctttttgctgcattattgatttcttttttatgtctttaggctgatggactgtggaagtatagttattaaattgttcgttccctaatgagatgggctctaggtcactgattcaaatatcattaacagctttaaagataatttttacttaatatggggagtattactcattttcttccttctttttcttcccgtatcttttaggtacatatgtaacatagcacctcagggtatagaaaaccagaaacctctggcattttttgttaaataactgatatatccaattgtttcttccaaagaggtgggtataaccttcctctcctttccatttcaaaattagctgcacattcttgggaccatgtaaaatattgaccctagctgtgttatgaaataaataccttgagaggaaatttgaaaccaggaaagaattttagccaacagtttgacattgcctttgactagctcagggctcagttactacatgaagtcattgtaccattcagatacaaaggcatttcccaccaa

SEQ ID NO: 41610 - DNA, 2187 bp, Homo sapiens
tgctgtgggtttcatgactcaacccttcaagatgccgcacaaggaagaatttcctcattttgcagaactgccaaatctcattcactggagcaaaggctcctcatttggggctcatttttagacagttgtttctctgtttatacattgtaaaaatctccctcagcggatggagtttgtcatgcatttctaaatagtgagtaaacatattcctccactccctcccggcaggacacacttcagcattttggccactgagcctagttgaatttctctctccttccttcctcccctcttcccacgcagcctagctttattcttgcttccttggttttatttcttcctctcttcctccctttttcttccttccctaccttcagccacatctttcagcctcgtttgttccttggaggcttttattcacccctcttcctctcttctttcctccttcccccttcttccttccctcgcttcagctacttctcttagccccgtttgttccttccaggctccactttcttctcttccattggtaatttgtctaatttactccacttgaaaaaagaaaaatcttgatttatattcgtatcttcttccattcaaaactgttatctaagttcctctttattatctcctccctcctattttaaaataacaattaacatttagcgagtgctaagtgcaggcaggatgccaagctctctcgcagtctctcttgagggaggtacctttattatcctgtttcatggatgaaaaacaaaagcacagaattcaagtaacttgcgtaagtcacgaagctataaccaggaatttggctctgcaagcaatgggctttaaaaattcttttaaaagttttattagattcaaagactatgtataaaatatatgcaaattataaacgaaacatatcttttgatgggcaccatgggggcaagtttccagttttgcccattaaaaaaaaaatccttcccaatttttgaggcttgtgccattgaacactgctgcccgcggctcttcttcccacttggctcgacaaacgcgtcttttattatgactcagcccagcccgttccttgccaagcggctgacgctcgcggcggaggcgccggggccgccgctcgggggcgagggttcgcgccgcggctcgcgcccgcttctcccgctttacggctgctgaaaatccggcctggcccggcagccgtaccgcagacgagcccgcgcccgcgccgctcaggtaatcggagtccttttcttttcaaagttttgccaaaacaagctccgcgctctgaggcggcgcggcctcggccgagcggtccgtgtctccttgctcctccgtcctacccaagctggcgcgactgagctgtgggccgcacccctgcgcggggcccggggcgccgacccggcgtgaagtacgggggccgaggggcgcccggccggcggcgggttctgagcgactccgcggggtggcgcgcggggcacctggctctggcagtccgcgaggcgcgctggccaaaggagctcccaacccgctccaaggcccccgcccacctcccgaagccgcttgtcttaggagaggagcgtagcagctccgagtccccgcttctgacacgttcacacacgtatgcagtgcacgccggccaggcagcccgacacggcgcgctagcggggcgcaggtaaagagcggcgccgcgggcccgcgcgttcgaaatggcgcgcagcacagttccgcccccgcgcgtggaatgccgctccagtggacgcccaggatggctttcttaaggaagtttatgagaagccatggaaagagcagcctgggatcagagcctgcgctgctggttctaccctaacgtctggcttactaccacatttgccctacagttgcattgcttcatagctcgtcctccctattttcccccacattctttgcttttttttttttttcatttttcctttgtattgcgtctcttggtgccttgtgttcttttccccctcacttttagaatagcaattgaatagcatacagtagcctttacatttcaacctatggtccttaagctgtctttatttactagggcttgcatcctgaggagtgtaaaggattaattaactgtggattaagttgctggactgaaagttgtgttgcagttatccctgcggaacagaaaagatagactttttttttaaccacccg

SEQ ID NO: 41611 - DNA, 858 bp, Homo sapiens
gtagagcactcatcggtgcaagagtgatagtgggattaccttttaactcatgtaatcttgtgaagaggcactgtgcatcatcattatcatcagcaaataaaatccacgtaaaggccatctctccaaagtctgctttctctttttaaaactaaatttgaataaacattgtgggtagaatttatcaggagcaaagttcactgagagtcaatcttttgtgaggattttcgaactttctatcattcatttacaggtaagtgtagtttacctgctctggggaaatgatgtttattatttaaaaatcagaaatgaaagaagaaaccccaaagtaagatgatttatttgctttttggtaaactcgattctgttttgtaacatttgaaacatggattttatgagtgagtctattaaaatgtatactccctctagtgtgtgttaatcattatttctctgctgggcctacggattacctgtctgcattgtaatgcaacattccttaatatttacaatagaaataccagtggttcataagacatctcatatttctgtgaacaaaatgagatttacaagaaataaggacttgtctgtagaaatacatttcaaaatattaaagtcctcataaaaattcctagatttatttaaatcagtattgatttagactaatgaaataaaatatctgaccccagtgattgtactttgatgctccaaaaggtagatgaaatcattgcaagtacagttttagtataaatataaacagagcaaaaaataggtacttcatttataattgtgttcaatgcatcagacatttattaagtctctactttgtgaaggtccttttcagtttctgggggaaggagaagg

SEQ ID NO: 41612 - DNA, 546 bp, Homo sapiens
attgctgtaaaaatacctgtaaatgtggaagcgacttttgagctgggtaatggacagagggtgaaagagtttggaggtctcagaagacaagaagatacaggaaaatttgaaactccctagagacttgttgattgattatgacccaaatgctgataatgatatgaacagagatggccaggctgaggagttctcagatggaaatgaggaacttactaagaagtggagcaaaggtcacttctgttacacattgacaaagagcttggttggatagtgcctctgccctagggatctgtggaactttgaacttgagaacaaccatttagggcatttggtggaagaaatttctaccagaaaagcattcaagatgtagcttggctgcttctaacagcctatatatatgtaagcaaaaaaaaaaaaaaatgatccaaaactagaatttatatttaaaagggaagcagagcataaacatttagaaaacctgcagcctggccatgtggtaaaaaagaaaagctcattttccgggtggagattgggaggcaactcaag

SEQ ID NO: 41613 - DNA, 1151 bp, Homo sapiens
caaaagatatgatctcacttcatagtaaaacaggtcctgcaagcccaggtaactcaggaagcagaatggtaattattcacagaagaaagcaggtagtatactgttacaatactacagtagaaagtcagaaggtcacaaagcttgcagggtaagtgacacaacttgaaactgcttggccctctttaaaaagaaataataaaatgggagagaatgaagcaagtttacctaacacgtctttgcaaggtaagtaccaacagcctatgaacttttcacttttcacaatcagaaacttaagcagtgttgattacaaagtctgtgtgtttctgtgtatgcacacacgcatccctgcatgcatgttcaggtgccctggccctgtttttaaggtgttttctgcgagcgagaaaagaggtggagattgttgattcagaggaagcatgttttctcagttgtttacaaagactcaggcaacacagaatcacaaatttgggggacccgtggagggtatggaaagctttatccttaatccccagtataatgttggagaaatggtataaccaacttccagtgcattttcatgttggaccttttccaacattaacagaaccttgatttttgtctctacctgtggagtgtttattggtaattaagttttgccatctctggagtttaccagctcagtttccctgtaattaatataaccactttttaaaaggtagaaaacaggggaacatgggcgagcctatcagttaggaggctgtgatttatttcacaggtgttgcttaatcagatacctttgtcctttgaaaggactggctttgttgacattggcttgactaggcatctctggttagaggcttgttcaccgaaacaaatttaaggtcgctcacatttcacatttttgggtaacaaaagttatttcttaaagaagaaaaagaaagtagatattgggcctaatcaatatttgttatagacttctagaataccatgagatcacatagatctgcatgatcctaaaaatatatcacctattttatagttaaattatatttttctttcatttctttaatcttttctctacatagcctgcttaagaatccccgtatctttttttatctctgtatatttcctaaaaatctttcttgaaatactgt

SEQ ID NO: 41614 - DNA, 503 bp, Homo sapiens
atctgtacaatcttttctactgtttgagttaaaatattatcagtaacattacagtcaatgaatcaagtcaaacttctttgataaacatggtgttctacaacaaacatttgtaactcagaattacgattacacatcaccaattcctggaatattaaacagaattctttacgatggaaaagctctgttgttctttgagtaaatagaccaaaaatcacgctgtaataagatatagtcaaatgtaataatgaattttatataaatgttagccaaacttctcttttatatatctgaaccatagctaatgattaacaagatgcttcccattttcaaaggcatttggtacacagctttatttctcaacatctccagttctttgttattaaagcctgaggtctcaggtcataggttaatttagttaaccatgtattttaaacttgtaagctccgaatatttctattttcttagctctatagaattcgtggaaaaaaatagtgaatgactgc

SEQ ID NO: 41615 - DNA, 753 bp, Homo sapiens
agaaaatgaattaaagttgtttttattttttctgcctgatggttccagagggttcctggaataagtgcacctggattagaaagtgatctaggatcacaacattactctagtgtctagtttagaaaattcttagaagaagggaagaaaaaaggctaccctgtaagctaatgggagaaagagtcaacaacagtgcagttgagaaatgactattcagctattcaaatctgagaggtcacctcccatatcctgtgtggagctatgtccaggtgcggggaagaagatgattctttgctctacggaatatttatccaacctaagtctgggtctggaaaatgaagtaataatgtggattggaatccaaaaagagctacaacacttagcagaaaatcaaacacacttctagatctcccttgaccttggaaagttgcccaggactttccagaatctgtacttaagctgtacactcagtgtttaatagaggttacacagaatgtttttgggtattaatataactctgtcataggagtatttatgtttagtgtttctgaaattctccagagttctgggaaataggaatatgcacctagaactattgctgaaataccaactcaggagctacaatggtaacctagatatcaacttacgatctttttcagatagctactgacataatttttaggaaaataaaagaaacaaaatttgaaaaatggttttcatttgctcctgagttagttgtaccctaaagcaaaggct

SEQ ID NO: 41616 - DNA, 1043 bp, Homo sapiens
ttttttgtcttcaaataacattgtattaggctagctctacaaaaatatcaagactatagattcaatagcagattggctattgtgattgaaaggctgattttaaatgtcacttgattaagtgattgaaaagaattgtgaattcttacagacactcttcaccagcgtttaccaaactattcttctgcctagaaatgtctaccctccatggttttctaaccaagctcactctctaggaattatttttaatattacatttttcttgagagctttctatgatccacgagaagttattttactttcctaactgctcctaacacaaaatatacttccattgataaatcttcccagttgtagtttaatttgttaatttgcacatgagttactgctatagagtgtgacctcttatttgtctttgtaattccaacagctaactcagtgccaggaagataagagtcactaaataaatattaggtgaatgaatatctaagtaaataaatgattcctagtgagttatgataaaactgacctttgttagagacaggatagagagggagaaaaaataatggctatcagagtgctctttattaagaccactatggactataatttacttaagaaatctcatttcacatcaatgaggttgtcaagaaggaacaagtagcctatggaattttactggtgtttcttagaaattcaagatacttgcttattttatttcttcataatatgaatatttttctagtgtccccaggttcctggaaacttttagtttaaaagttggacttataaaactttatagttatttgtaggttccatagacatgggttacttctagagagacttgatcttagctactgtcactattataaggattttgagaggattgctggctttttaaactacataaattacattttctatttttatatttatcatgttttattttgttgcatttcaattactttatcagctaatttagcttgatttatactggttcagaatctcaagcaacacatttcagattaagctgagatttgaaaaac

SEQ ID NO: 41617 - DNA, 1647 bp, Homo sapiens
caatagtatactcttaattcctgttaaggttatttttccattttaaaatttgtttaaaaccagtattctattgtcactatgaagagatctgtaaccatagaaaaatcacagcccctcccagggtgacaatttattaaattaaaaaaatatacaaataagaaaaataatgagtaatcttaaaaatcccctggagtagttgtgacaattaaataagtcaaggactttggaataaaaaaggactttggaaaagtcctttttgaaagtactagttcaattagaaaaataaattatagtgaaatataatagtatttctatacctgtttaaatttttaaatgttaacgtatgttatgtatggggcagtcctagtaagtatacgtatagaaattgagagtaataaaaataaaggtgtctggaatattcttgtacccttgaacatttggagacataaatatgaaacatgcaatcagctgtgaacatttgaaaatagaatcaaattaccaaagattcagaagcatatatttctttaacactgtaagcattttttgtctttgtctatgagcaattcaattattttctttctgaaataaattaagtaaagcttattgagtctgatcagcccttgtttccagggaattgcagttcaatttcatttttaattagaattgaacattgtggatttcttagcactggtaagcaagatctagcaacaaagtatgtacttaatttgtattaagtttctgaaatttagtgtaaagagtgagtaatatgtctggttaatatttaaacacctcacaatgttctgttgtagaagtttccatttataaaagctgctgtcctgtaacaaattactttcactttcaaataaacctgttatcacaacatgagcaaaacttattcaattaaagcagaaaacaaagtaaagtaattatttactcccacttgatgtgcacagtaacttgtaaagattctacaaatgcctatgagaggtagatatgctggcttaaacatcatttttgcttaaatattattgttttaatcaagtttagatgtattcatgtgggatagacatttttacagagaaaaccattttttttatgaaagaagagagacataatttccattgtgataaacccacatggaaagaagctgtgaaccgtaagatcagttgtgctgactttttatctttcagcttttcacacctgtttctgttttgtgtcttgtttgctcaatatctctctaatgttgttcatcacattggggatacttgagagctgtacgtctaagtatctgttttcatcatttctttgcactcagacgttaaactgcgtatgttctcttcctagcatcctgtcttaatacagtaccaaagcaatggaaaggaggtagggggttgcgtggcaggggactggcggtagatgcctaagtcacctgggatatagtccactgaaataatactcggaactagaaacccttagatgtctgtgatgaaaaatgtagcatgttggtttaacagtgaatgtcttgttcaaaaggtaaattagagccaggatgggcttttgttatctcatctctttaaataatatctaggatttgaatgacaatatacatgtgggcaatttatttattcaccccagatggaataggga

SEQ ID NO: 41618 - DNA, 1101 bp, Homo sapiens
aggaactctggcaaaaccacccactaaagtgtgagcaggagtgcaagagttccttgagtttccctgaaataaagttaggattggtactatcctttggctggggctgagcctcttgggcacctctcaagtcaagtgaggtgaagaaggaggcgagttcaagaaagtgagtgactcatcacttgagctgcaggactagcaatgctgcacagaagggagggaaggcagcaaagtaacagcattggtgttgtacagagttgaagagcagcaattagaaacagggcaggaggagtttgaaagcgtcactgaaacaaagcctccagtgcagcctctggcaatacagcagaaccctgaaggagtggggaacaactgcggcaggcacactgtgctggcacgcagttcaaagccattcttcagcagacttgaggaggataaagttaaatcttggatttaatattgcaaatagtgacagtcacatcaaacattgtctagaatcactaatcgaaagatagagagcctgtgtgaaataagtaggttggacaggaggatcctgctttaggtatcttctagcttggaattgttaggttccatcggctgagtgccatgtgaaaagtttcaaaggtcctacgttgtttgtttttcctctctttttaactccactgctgtgtgccaataatgattcacaatttgagatttctatcactggaagggatcttagaggttataaatacaatctgttctgtataaaaataaagaaatacaagtctcatctctttaattccacaatgaaatacctgagttcatgaatgatgtcttatatttgtctttaattctttgtgcatctagcttgataatgaggacatactagtcctgagcaaaagaatgaatatgagaatgggcacagaatataagtggtgttcattacataaagtgctgacggctttgagaaatgtgccctcttcccagaaaactacatgtaacatacttttaaaattgcctataatttcagaggactcatggataccctagacaaaatatcttttgatatacccctttcagaccttatccattacctatctggatagacactatgttcagagataa

SEQ ID NO: 41619 - DNA, 895 bp, Homo sapiens
aagacaagacagtagacatgagaaagaatttgaagccacaatggaaaaagtgactttgaggatgcatgatgaagacctgtaacaggtgtaagttcttggccaagcatgtttttgtatgttgacatgtgaaagaggtctgaacatgttcgtataattactattgttatttttcccttctcagtgctgaatgtgaaagtgtgaggtctcgggagactggatggtctcaatagctcagttccttcttgtttattttggagtctctttgcttacgttattttcaaaccgagctgttttcctagtcaatcatttatcttaactctcagtgagtcatggaaccttttctttttaaagtgcaaaatcatcctttaaacatttttatatcctctcctcactattttttattccacttggcttgctttcatagacatcttccatccacatgggatccattttcttcttgctctttgaaaaataagaaaagtaacctacactaaggaataggtcacaaagatcagtggaggaaaagtgacaggctatgctgctgtattatttaggcttgactcatcttaagttggttacatgtatcacaaaaagtaagaaatgtattggagaaaggagttttattcataggaaaatcagacttatacttctgccaacattcttagtacattattttccttttctgtattaaagataaggatcattcagagatcatttgaaaattataattaaaaagaaaatgtcttcttatctgtaagaaacaactgtcccatagatttttccttttctttatttggtatcatattttgatgtgaattctaattctagtaatcagcaaccaccctacaaatattccatcactcatgttgacaaatttctaatacaatatatgcaa

SEQ ID NO: 41620 - DNA, 1304 bp, Homo sapiens
aatcttttaaatctagcatctcattgatatttttattgaaacttgagataattttgaaatctttgaaaagttcaaataagtcctgaatgccttcagaaaatagttgatgtcttttgtactgaaaaatggattcaactttaacagcacactttctaaaaatagccatcttgctttcatatgattaatattttcttcgaagcaaccttgcaaatgtgtcacttcttttgtttcatttcacggcaaacatactgtgagaaagtgagcaaagcctgtcctatgatctgtttgatttgtgtatctctgtacacttcacgagttgggcatactgcagaaatgtcaattttctttcctcatgggaacctcaaaagaattaaaaaagcagtagcaggacaatatgcagtatcagaaggagcaatagagattttttgtttgtttgtttgtttgtttgtttagttctattggacagtttatggatagtatttgtcactggcgtaatgtgactcatttatattgtacctattcttctgtggagctaaaggcactttataagcattctcattcatcctcaagctttgctatgagctaagtattaggcagcttttattctcactttatggcctgggaaactccagtttaaggaatgtcggcgtgcaggcatttgcaaagcgttccaaaaacagccaatgggattcacagtaacgtgtggactatgaccaagcagtgaaagtcaaaagttctttgtatgcagaagtgttctgtgtgaacaggtcaggatattttactttatttataggctttatagtaatacttgtctgatgaagccaaatactaaatataattatttaaaatattctgactcttctttcccttcaggcaagtcttcctactgaatccgtgtgattaataggacttttattcttatactcatccaggactgaaaccttaattgccttctctcttaattacctcattgccactactctgttcagtgggttgccaagttgtgaccattctcctttcccagacttttcacatggatctttacctttctgtgtcgagacatcctaattcatgcagctattacttcttgttgagaaaaaaaaatagcttttaacagtaatgacatcagaattttaattttgaaagctaaaagaagtagactctgatctcacctgcatagcttaccagccatatgactcttagcattacattatttctgagctttagagttatttctatcacaagaagataacaataactagtttgaaaagttggaccctcatatataaagtgtaaaaatggaa

SEQ ID NO: 41621 - DNA, 1210 bp, Homo sapiens
acttaactgctgtttttgcagtagcaactagtgttagcacagaggaaaaaataacattagaacaagccatgcattttatagtaagcttcagtttttaaaaaaggtatatattatccttattcatttgcattggtacagctgtgctttacagtatattttggtgcatgtatagatgttagctagaactgacccttattttacagttaaataattggaaggaggaatttgcagtcattattccctatccttgctctttaagcattttatgcattccaaaaatagttggaaaatttgcacagattaaatcatttagattttgcttaaaatgagagctaaaatttaaatgaaatgaaacttatttaactgttggttaattattttttctttctatagtatctgtaggtcaaagtgtgtttacgtatttaatgttatttcaggttatctaagcggacaaatataaagtgtattaaaatgggaggtttgttaagaaactggccagaggtgaggtggggggtgggagtcatttctctgctaggcagaagcttaatgaaatagatcttccaaaaagacctaaaaaccaaccaacaaacaaaagcccactattgttctgctttaatttgttccacgggtccaccagcagagatgaggaactttcttccggggaaaaccgagagcattactttcacttttaggtgaaagtgtttgggtgaatccactttcagaaattagagcatttagctaaaaccctcctggcttttttattagcataaaaaaagaggagttacactccaggcttgagatcacaagtccatttctaaagatttgtcattctttgccccaatttttgtcactttccttgtactgtttccttttctttgaaataattgccagtaagagctttaaaatgaatggagcctgagggcttgtcatctgagcccccaggtagagaggatcctgaggaatctgctaatctgaggaagaaaagggacctgccacaaccaatctaggtgggaggaaatttgggtttggattggtgtttgccctcaagtgaaatcatggttagagctttgcttttacattgacttgaaggctacattagccagttttcagtgtggcatatttacctgccgtcatagctgatgaggcccttcaacacaacattgtagctatagacggatagtaaagttacctataattataatctaggtta

SEQ ID NO: 41622 - DNA, 560 bp, Homo sapiens
aaaaatggcattcttttaaaatatttctttgtctttaaacctgttgtttctttccttaaaactttctaccctcccttgcctagtaaactcctcgttctctgcaccagctcatttgtcaccactttcatgaagctttcctatacagttaattcctaaagtttgttgctccttttcattgctccaccatagttttgttcacatctttaatagtgttattttatatagcacagagggagtgtattatagtggttaagatcatggctaccagaatcagactatctgaggtcaactcatgactcagcaattcccagaacatgacctttggcaagttatatgagctctctggctttcattcattcaaagagaggtaatactattaagttaaaagtggttgaatatttcctgcttcagttgtgacatgtaaagagcttggaagtcacactcctgtcctcacaacaagaaaaagctgaacaaactgaaattcaattactttttgtggccccaacagagaactgaagtttcagggcaaaacagaaatctggagagatgggatcatccag

SEQ ID NO: 41623 - DNA, 503 bp, Homo sapiens
ttaaaacggcaaaaccacgattgcttttgaaccaacataatatttatggaaattttttttgttcaattcagaagtcttcacttgatcagtgtttctcccagcatgttccataaaacactggtcctggtcctctgagctgcttcatgcaaaatgggttctgagatcaaacacattttttcttcatattgtcatgtttctctaaagggaatgcacttcccaatcaatatcaaaataaatttttcagctgccaagtaagagtaggttgtgaaataacagtcattgacttgtcaaaggtaaccaaacatttctgagctgatcatagacatttcaaagctaggaagaactggtgtgactgatttcatgagttctgaaggttatctgtcaggttagatatcaaaagtttctagctgcctttgaagggaagctatttaacttccagcaatatgtaattaaattaaagaggaaaatgaaactaaacatgtacctaaatatcaaatgtagag

SEQ ID NO: 41624 - DNA, 925 bp, Homo sapiens
tgaatacacattcttctcctcagcacttgggtcattctcaagaataggccataagttaggtcacaaaacaagtcttaaagcattttaaaaattaaaacaatagcagacatcttctctgactacaataaaataaaactagaaatcaataacaagaggaactttggaaactatacaaacacatggaaataaaacgatgtgctcctggaacgacagagcaagatgcccaaatacaagcctccatcaatggcccccacttcacagggacccaaaattaaaaaaaaaaaaaaatctacacacaaacacctttataagaatgaaaagccaagtgagcaatcacagtatctggttataacttcatatacctgagagaggcactgaagagggaaggaaagagagtcttcaatccccgatgcctcctcaccccagacagaggccatgtgatgagaagaaagaaactgtgagcctgggggagggaagacccagcagttttaagactttgcattgaattcagcactgttttgtcacagctgaaagcaaaactgagctgaactcagctgatgcccatcctcaccggcagagggagcatttagatgagtcttagccagaggggaatcacctatgtcagaggttggaacgtgagtttcaacaagtctcatcgccatgggctgaagtactctggggtcctcaataaacatgaaaagaactctaggccacaaggactgcaacttctaggcaactccttgtgctttgtttggcttagagccagcgggcctggggacaagcaacctagtgagataccagctgtggaagataagggagtgctcacaccacctgacccccaaccataggcaacacagctcacagaaataaaaatgactgcttccttctgcttgagaagaggagagagaaaagtaaaggggacttt

SEQ ID NO: 41625 - DNA, 939 bp, Homo sapiens
aagcaaagccagggtactacatggcccaatcaaatacataaaatcagagtccagcaaccaaaaacaaaaaaaaagaaaaacaaaaaaactaaaatggaactctacactttacttgtactcttctaacagcgttaaaagggaatctaacttataagaaagggcaccacttctcaattccgtttctttctcctccgcatttctctcatagcctctctctctggcttctctgaagccccttttaaaatactctgcaccacccaccacaaacacaaacgaaactcttcaccatcttagctttacctcatgcccactctctcctctgttctctcccaacatttaatcaaatacatctgtttagttcctgtaactcagggaattcccctttcctgtcacgccccacagtttcaccctctgcccttttcatgtatctggatgaccaaagagctgggcactggcctgacatgaccaaaggctcttggcaggcatggagaatctatgggggcaaagaacatattttctgtacaaacagctaaagttaaggggagatagcaagaagaatgcatgctatcacacacctaactccctgactagacggtcagcattttgaaggtaggaaccatgtctactttgtgtctctagcaaagtttaaaacattaaatgaatagagaaacgaatgcttgcatcactgtctcttagagagccacctcctttttaatgcttctcctttctgcttactgacctgtatctccttataaaataagtcatccttatgagtggaacaagggaccatggagacaactgcctgaagcactacctatcattcatcctctttgccaattcccagagcaattagaggagtgtaattaaaaatgtccaaaaagtctcttaaatatttcaagcatcagatattcactaatattagtaacaaatttatttaat

SEQ ID NO: 41626 - DNA, 953 bp, Homo sapiens
aaacacaaagaattccaaagatgataatcctgacaccaacatcatcagtattaaggttcttctagtaataaggaataaatacaaactctggctagattcagagagatacgagaggagaaagggggagaatgaatttactggaaggacactggaaggagttcgtaaagctctaggggcttgaagggtaatttcctgtagagcattgattttcaaccttgattacataatagaatcacacgggtaactgtaaaaaaaaagaaaaaagtaatgcactgactccactcagacaaattacatcagaatctcaaggggtagggcccttgaataagtatattttaaaagctttccagctgattttaatgcatagccagggattgagaactactcctctggaatgttagaattaacacccctcaatctttatgactccctggtccaatgcttttagctcaaaattccaaaattcccaggagagagatgtaagtggcccagtttacattcataggataccactgaacaaatttagccactgccaagtaaacaaggtcatattggaccagacacagccgctgggagtccatgtctgtgggtcagggcaggttgaattactgtgagctgggcagccacccagaaagtgtctattacaccacccatgggtgtgatgggaagtttcatgcttaaccagtactcccttcttctctgagaacacacagataaaatgacaagacagagtccagattccagtagggcagcccagggtgacaccgaagggactgcagagatgcttcgtacaccccagccagtgaatgaatcctcctatgttcattcattcaaacaccaatgtcacctggtaaaagttctgggttagagatagaaaagaatgatttgtaattactgtaacaaagtgtaagtctctgatctgctcaccttgtaaatgtgcaagagcagcttaa

SEQ ID NO: 41627 - DNA, 4082 bp, Homo sapiens
ttcttcctgcagcccctcccccacaggtaaatgctaactatttctagaactctcaactatttgggaagcttgccatcaactcccatgataccacccaacccacaccatgttttcggggagacaaaggtgccctacttccccagactataaactattaaaatggtgagaacatacaatcccaggaagtcggcattactaaaatacatcaatgtagcatgggtcttattttaacaaaaatgaaaatgaatcacactggaaaacccaaacagtcactcattgtatcttcaacgtgtaatcgaaattatttattccaagttatttcaggtaagtagatgaacacaccacgagggccttattatccaaactggtgaagaagcctttaggaaaaacggagggggaagatcacttaattatatgaggtggggggtagagcaaccattcagtcttaaaattcaaactaaaaataacctggcattttcaccccccacattttattaacaagcttgtttagatcagcatacggttcctgtttggaaaacaagaaagtgaatagtaaactttcctaagtcaactgtaaatcacataggtactaaaactcttcacccctggtgcctgcacagtccaagatttcaagtaaactccagacactgagaacacctaatttttaactagtttccaacatttctcatttgtaatcaccaaattatcttagagacacttagataacctaacaaagagagcattttttaaaagccacaacccaaattttacatgaaatacaccattttcacaacctaaatttaatcccggttgccactgcgaagtgatgcctgtttcagcaaattaagaacttccaaaaatactgaacacgttaacacatgcatggcttccctcgagctgccatttaagattaatattccacttaaataaaagtctgcttctgttcaaaaaattaaatcggttgcaaagaggaagttaccgagaaaccaccctcacaacgtggcctttacactgtcagaaaataacgtgactctgtgccacccaaaacttaccaggaagctggcaataactttgccaattctacactcctgaacccaacttcaaagagcctccaccaaatacctccttaagacgataaaaagcactaagttacaaataaacacgtcccggagcaaggcccggctgccgcgcgcccctcccccggccggcgcccccgccccggacgcgcggccccaacagccgcccgcagcccccagcacgccggccggggtcgccgcgcccgggccggggacgcgcccggggaggggagatttccattgccgcccgaggtttcacaaaatagcatgcaccgaaaagctccttctcctctgctaaaaataggctataaaggagtcggcctcatgatggctccttgattcaatttgctgcaaatcctttcctgaaagcctccccccccaaacacacacgcacaaaaagggggtgtaaatgcacgaagggaggaagagggggagaaggccgaggtgcacattttcggggacaacataattagggtgaggatcccccgagaccgggaaagggtaggggggtgggcaggcacgtgagcatttcaaagaaacctgagagaggaaaacggggggatgggggcgccccaagtgccctccctgccttcccttcccccacgcaagcccagttcccccaagggccaagttgaaaaatgcatgttccactcgcgcccatccccccgcggcccagcgcccccggccgcctctggcccgcgccccccgcccaggcccccggccgcccccactccagggtccggcccccagcgcttacctggaaacggtggcctccaacgccgctcccccctcccgggaatggaggcacaaggaaattcccctcctcgccgccgccgccaccgcctccaaccacccccaaaataacccctccggggggtgagaggcaattataaccccagcgagcggagggcgcgggggatgggcgccgggcgggcgggggcggggagcgcggcgcgggtccccaggtggcgagcggaggtgctcccgccgcggggggaggggcgggggcgcacgcggccggcggcggggggaggcggcgcgcgggggaagggcgcgagcggggagaggaattgaggcagaaggtaaaagctgttactaagggaaagagccaaacggttcggagcagccaacggctcagacactcaacactggggagagaggaatggggaccagccaggcacaaatgagctcgcgaggcccgcggcggcggcggcggcggcggccgcgcagcaaaacaaacccgagcggcctgcgccgggcgggcgggcgagcgggcgggcgggcgcgcgggggaggggccggcgggggaggggcgccgcggacgccgggaggcggcggcggcgcggcgggggggctccagcggccgcgctcctctccttcccggcccgctctggcggcactgggggctgggctgtgcggcgcattcttttaaaaatcaggcgagccccgcgggcactcgaaggcgcctcggggccccgggccgcccgccccgcccccaccgccgcgggccggcctgggtgtgctcgggtgtgggccgctgggcccgagacgggtgggggcggggaggcccgcgcggtggccggggtggagccgccggcgaagtttccccaaggacgccgcgggctcccgcgtgtccggggggcggcccggcggcgttgggggctgggcgcacacgcggcgggcatgtgggggagtgcggcgcggcatcatatggacatttgtttgtgaaaatctctgtgaacacctttgtgtgcgtaaatacatatggttctccgaagcgtacctggaaaggtgctttatctgtaataagcgactttcaaaatgtgatccagagcacgggatctggagagaaaacacgcacacaagaaaaggtttttgatactaaacacaaagctgtaattgaagtatttatgcccaaatgtactgtgaatcaagcatatggtggtatttatcatctggtgggtctgtttgaaaggtttgctcgatcagttcttatttcacaaaaataaaataatgtaactaaatgtttactaaatatatacctgcacagtggcatccacagtagaagtttatccactttgtgtactttttgcatgtgtgaagcacagcaaggcggtttataaagtataacttagatgagtgataatgtggcagtatggttgagggagggttgtttttaaagaagggaggcacctcacaggttttaaagcaaatggggtggtaatctttctaagactttcagaaagatggggtagggtgctttttagagctttgtataagctcaggactggagaagcagccacccttttacattaagatacgacttgaaacctttttgttatttcgcttattactgccttcaaagcaaaataatgtttgcagctttcttaaaggtgaagggttctgttttcctactttcatcagaatatttgaaaatagatgtagtgatcactttaaagcaaccatcatttcctctcaatatcagaaacctgaagttttgcgacacacacacacacacacacacacacacacacacacacacactactcgtaacttgcaccagtctggactcctggtggcctaataagttcagtaattagacaggtgctttcttggccaaggtcaatgtctctttcccccctgagcccttgcttgggggagctgccagaggcctttcctgaatgacctagtggggcagggagcaggaaaaccatcagaggaaagggagtgggattggaaactcccttccaaccaccagagagttcaaagcatattagtggtgtgtccttagagctattttcatgtatgaaagtgggaatgttggattaaacaatgtcacccgatgggaatttagataactgcaggtttccaaaacactatgcagagtgtacagggaaaccgcacaaagcaagttttgcatttcaataggattctaaagctgaggcttgtttacctcagaactaacacctttcagaagactttatttcagaattgaaaagagtatat

SEQ ID NO: 41628 - DNA, 1930 bp, Homo sapiens
tttttttgtagagatgggatcttgctatgttgcccaggctggtctcgaactcctgtgctcaaacgatctccccacctcggccccttaaactgctggaattacagacatgagccaccatgcccagctggactttctggtagttccctcccactaaacttgtcctacctagccataggcagcccttccctcccagggaaactgcttatcaaggggcagaggacaagagaaagtatgtgtcctgaggcaaggctccttcaaaaagagagggaaagtcgctgagcacttgtactcactcacgtccttcctataatcttgtaaatcacttgttctctgaggaaagggggaacctgcaaagactacagaaagctcctcctagggcataagagctttctctttgctatggtttgaatatggtttgtccacaccagaactgatgtttataaatttgatccacaatgggttgcgttgggaggtggtgtctagtgggaggtgcttggctcttgggggtggattcctcatgaatggctctgtgttgttctctgggccgtgagtgagtttttgctctctcgagactggtttagttcttgggggaatggattagttctcactaataaaagaacaggtttttatagagaaagatgtccgtcagggttttacttcttcccctgtgtccacttccctttgacctttctccacgttatgatgcagcatgaaagccctcaacagcagatgctggcaccatgcttcttgaatttcccagcctgcagaatcctgagctaaattaacctcttttctttataaattacccagtttccggtgttctgttacagcaacacaaaacaagtacactcccctttatagatagccttctaatattgtgagtcttcattgagcaacaaactaggaagacagtgcgtgccagtactgagttaattattgccactgaacaaaacaaactttattttatgcatatttagcaataggtgtaacagccacagggatagattataggccagagaaactgggttttagacacagctctaccttcactgttgtatgttctcagacaggcatcaaatggctgagaaacgcagtttccttactgataaaattggccccacattaacaacaaatttccagagtggatagtcaaaatacttattgaccagttctatatgccttgcaaccaatcagaacagagagcagagggtacaccacacccaaccatacagcaaattggcagcctcccagttcatttccctcactcagtcaacatttgcagttgcctgccatgtgacgtctatgtaccggggctgttgcatgtgtcaaattaaatgtttgtgaaagcagatcataacctccatacaaaagcaaggtgtttttagtcattattctctgtaggaagacacaaagagtaagggaagtggaagcctctcataacatttcacctgtttcagttttgcctaccctattgggtggcctggcctcagtttgagagctcacctccccttgagctatataacagcctaaggacatggagagctgggccaagaccagccaggatacagcttaacctcaaaccctcaaacaatagtgagagctagcactgtcttgagtacttactatgtgttaggccttgttcaaaataatttcatgcagattaactcatgtaaacctcaccacagcctgaagtagggactgtttttttttgtttttttgtttttttttgagacagagttttgctcttgttgcccaggctggagtacaatgacgcgatctcggctcaccacaacctctgcctcccaggtgcaagcaattctcctgcctcagcctcccgagtagctgggattacaggtatgcaccaccacgcccagctaatttcatatttttagtacagacaggggtttctccgtgttggtcaggctggtct

SEQ ID NO: 41629 - DNA, 1314 bp, Homo sapiens
ttcaagtgattctcctgcctcagtctcctgagtagctgggattacaggcatcagctaccatgcccggctaatttttgtatttttagtagaaacggggtttcaccatgttgatcagactggtctcaaactcccgacctcaggtgatccacctgtcttggcctcccaaattgctgggattacaggtgtgagtcaccgtgcccagcctagattatgtatttcttatgactaaacgccattataaattagcgatcttataataagtctcataatcattctaagactaaggttatcctgaacaaactatggttatctccacccccaataccgtaatcataatgacaactacagcattcacctaatgcctagcagttttaaaagtactttcctataaattacccattttgttctttataccagtatcaatgtcattttacagacagaaaatcaagacttagagaagataagagatttgcccaggatcactcaagggttacatgaaggagccaggatttgaagtcaggtttcttactgtagagccacagggcctgcccgggatgtacatacatctctctaagagtcatgggatctggccacaagtggcaataaatttacaggaataggcatccaggcaccgtgatttggtcattattttgctgcctatcactatgtgatcctctgtaaatctctgaactcatctaggcctcaggttactcatctcaaatagcaacagcctgaacaaggttagtagtgtttgtcaacagggatgactccatgcaggtatttcaaagattctgcacatgcctgactgatttcatagaggtggaggctgacctttgaccacagcaatctttttttttttttttttgatagggtttctctctgtcccccatgctacagggcagtgatgtgatcagctcactgtaacctcaaatttctgggctcaaggagtcctcctgcctcagtctccagagtagctgggactacaggcttgtgccaccatgcccagctaatttaaaatttcttttttgtagaaacagggtcatgttttgttgcccaggctggtcccaaactcctggtcttaagtgatcctcctgtctcagcttcccaaaatgctgggattataggcgtgagccaccctgcctggcaacaatcatttttaactcttattttcgattttcaatattttcaaattcctaaatatttagagttcatctaaatattatcttagttcaaatgttacaaatatgaactcaaaacatattgtaggagaaacctattaggcagaaccagtacaaagatgttgaaaactactta

SEQ ID NO: 41630 - DNA, 888 bp, Homo sapiens
aaaaaagatccaaaagtgaatgtgaaaaaatcatcccagcaattaaggacctgatatacatttggcacatcagctcctgacaccaaagtggggggtggcaagtgtgctgtctagcctaactcaggattagaattagagcctgagattcttgagagaatgcccttactggtaaggactggtaagctctgtgctgatgactcaaaggatgggctctgtgagtgtaagagattggacttggacctgtagccaggacgcagtattttcttatctttaacttccacaaagctcatgtttattcttctctcacaaaagccaagcctaaagtgcgctgctgaaggagttgttcctctttggacagctgtgtgtgccctataaatgccctcctcagatggagaaggaggagctgtgtgcatagcgctgtgagctggactggaaagcatttctgcagcccagtgatacatgcagaactacaccctcgagagccacggttcagtgaagggctaggagggtcttgcattctggtcattcattcacccggaaaggctcagcactatctcgtgaacctagtttctgggaagtcaggcaacctgcttgcacgtacaacttggtaaatgatatactctaagggctcataaaaattaatccagatgcatgctacaaagctgataccatgaaatcatgagcagagacctcctttctacttgagtccagaaagagccaggctttgtgttggtctacatagtaccgagaaggaaagagactctactaccacttttcattgttgaaactgtccattctcagctcccctggaaagggccctcacactcctgccgtagacacgaaaaaggtaatagatgccgtggaagtgggaaaagttgcctttggaga

SEQ ID NO: 41631 - DNA, 1617 bp, Homo sapiens
agcttcagtcttccgtaattcaatgcatgacaatagatttattattgaagaaatgaagaaagaggtcaggcaaaaaaaccagcaattaatcatttgaagacactgagtcatctactattttatgtcagaaatcttgtagccatgtttacataataataaaacagctataagagggcagatgttttaggcctagacattcgctagtcagtaacatgtaaatgtgagagtcctcgtggttacggtttcacacctttccatggcggttgccagtcagtttttccttgctgttcataagctaccaagtaatacacatttgtcttcactctggtctgcagtgaaaataaaatgagaagagaaagaagaagatatgaagtggaacaatgtggttgggaaattcccatatctttaccctaaaaaaaaaaagaaaaaatattactcttttaagtaaggcccaagagaatattaaatgcatatactatgattcaaagaaaatagtgttaccatttagtcatcaaagtggacctttggtcttggcagcatgtgtgaaacttaagggtggcagcatgtgctctgttagtgagtacatttgtagcaaaccacaggggtctgagttcttattgcctaagtgcccattttcttgggtgttttgcttttgtctccagaatatccagagaatgagtttgttaataaaaaataaaactggccgggcgcaatggctcacgcctgtaatcccagcactttgggaggccaaggtgggcagatcacctgaggtcaggagtttgagactaaaaatataaaattatctgggtgtagtggcgggcacctgtggtcccagctactcgggaggctgaggcaggagaatcgcttgaacccgggaggcagaggtcgcgttgagctgagatcgcaccattgcattccaacctgggcaacaagagcaaaactccgtttcaaaaaaaataataataattttttttttaaagaagggtagccaacagatgaagaaaaataagtaaattcctccaagattcaagacaagatttaaatactttctagccatttatttttctaaccagatttaatttggaagtatgaacaaaaaaagttatagcatcacgctctggtcagcttgtctcagataatggcttgtgtgaccagtggaggtcctgggggaagggaaattcagagggcaataaggaacttctctgttatctcagagtttcacaatacacacaggaaacatttgtagctggtcctctgttagcctgaaagattagctaatcccttgtttcaccataaaatgcatttttagcaatagttcctgaactgcaagcaaaaactcaggtggccagctcatagtcctcctaaattacagttgaaagatgctttgcattgtagatattggcttgggcaataaggaaactggtatagttcctggggatgtgctgggctgacatgaacctctctatgccccaccaccaatggagcaagccgatttccatgtccagcatgccgtatacattctacaacagtgttcttagggtagtattggattcctgaagcccagagatggattaactgtccaggtgccccagatgaattctaactcaaattaacaca

SEQ ID NO: 41632 - DNA, 1635 bp, Homo sapiens
ggattcttctttttcatgaagtattctgagagtgaaattggggataatagggcacttgagaatggggttagggaactgtagatacctgcaaatttgcaaaatgctgacaaacaaaagaatgcaaactaaaaaagaatggaggcgatttagaaagttacatttctttgactcaaagataaggctttaccaaggaaagcagaagggtggaatggtttcctgtttaagtactggctgaatagggtagtctgtgtgccgtttgtgagaatgtttcctaacaggaggaagtctgcaacgcactgcaaaacctaacctgatcatacagtatttgataccctcggacacaaatccaggcctagccaaacctcagcgtaactttggctcccagccagtttgattcctgtaatattattcagtgtgaaacgccatcgaccaattttattatttttagagaataggacgtgaactgatagccaaatggtaaataaaaccccactcccccatccagtttgttgtgtactgggaagcactgggtgtgctgaagaaacgacaaacagcaggggtttgattcttaaaacgttcctgtactctaggtttttgtgtcattgttgttgtgttccttatttcctttttgccatcaatggtggcagttattggataggccttggccagcgctccagggctgctgctttgcccagtgactgtatctttcctgttagcatgctgatcatacttggaaactatgagtcagtgaaatgcagccgctagcagtgggggtgggtagattactagggaaagtgcagccaagacttcctgtaccaactcagggccattatctttgggggaaggtaggaactcactatggcaataggaacacctacattcacctggcatttgctgtgtactacattgatttagggagggtataggggcacaaattaaaaaaaaaaaaaaaagaaagaattaaaccttcttttgtagacaccagggtggagctttgagagtcatgttataatatccctgttattgacaccttcaacttgctattagttgctgagactcattaactattcacatttgtctgccctcattcaactcctagcaactgcagttacagtcctatttaaaataatagagtaagattggtaacattactgatttaacaggaaattagaagacttacattcatagagcttaggtaattgacaccaacagcacttttcttgtaatttatgcactatgattgatttcattcccctgctagccctaaaagaatctctgaagcatattcagccatcagattactgtgcaaaggaattaaatgagtattaccctgctatctatttcagagctggtaaaaagtttctaagtggtttggagctcaggagtcagtctaaaattataatgctattataaaagagttcagctttagagcatttctttgtaagtgacaactgtggattcacatgaaaagggcttattactgaaaacgaggacaaaactacaagtaggtcatttgtttatgattttaagcgtatttttttgtaagctatatatgtattccccggcttaccctaaaatacactcactaacctataacagttgtgttataaatgatccatttccagatgtttattt

SEQ ID NO: 41633 - DNA, 3937 bp, Homo sapiens
gaggctacattgaaccaagatcatgccactgcactccagcctgggcaactgagcgagattctgtctcaaaaagaaaaaaaaaaaaatcaggaattgtctctggggcatgagcagccagctggatgtggtaccattatctggaagtgagatatctagaaagagggagaatgtaaggcataaggataagagaaaaagtgggggtgggaaatagacactgcttggaaaacaaagtaacatcagggaggtctggaaataaaatgtttcaagtagttggaaagtcaaccagataaaatgctgctgagagacagcaaggggtgcagactgagaaatcattagtcttagcacttactcttccataaccctcaaagcttgtctaacagtgattcttttctgcctttctccttcattatatgataaattgctagagggtttagacctccttttaaattcacctttatctctctgggctcaacagggtgccttaggaacagggtagactgcacagttcctgactgaaaataacactggcaaggaaacaccccaaggtgctatcagctgccagatgccagaaggaaatggaagggcctggactgctccctaaagagcctgacccagaagcggtgtgtaacaggttccactcaatgccttataggctgaaaattgctctgtcttctcagagctagaaagggtgttcagataaggcagggtgggaccctgactcatggacacacaattagccggcttttgtctttgaatctgactggaagtgactcatgagctggaaaaaaaccctttggaaacaaatgaagggggaaaaaaggagggtaagccacgactgcattttactctgttaaaatgcagatctgctgtcctataaatgtagaatactgtacatttcctcagcctccctccaacaaagacccaggggaaattattaagcctgacaattcactcattttctccaagatttttattaaatgcaatttagaggggataaagtttcttctcttttctctttctattcacttgaataagccctaattaccactagggtacaataaatgggcttctagaagtctgtggcaattggcgatgcttcccctttaaattaaccagttgaagcctccagtttcaacagccaccagggcacttcccgtccactcacaacttgctcagtgcaatctgaagagcatttattgagcaccttgttatggggcactgacatatgctgcggaggatagaagacttctcggggggttataatggggctggggagctcttgaactcaactgacatactgtgtaagttaaactagtaaatgccatgggatttttggattagaagcaacaaaaacacaaactaggttaaacaataagaatttgtggcaaaaaataatgggctgtcgcaaggaatcgggggcaggcagggctgtaccagggacacaggaaccgatgctgccaataacattagactcctgttggcctcagcgctctctcccagcctgtctggctgtggctgaggctctatctttgttttctgctcgatctttatctctgtttctgccttcagattggccttgcctctcctctcctgaccatgggaaacatggtcatgtatgttataatatcttgcagttttagccctggggagaaactgactttttcacttccagtttcaaaatttcccaagaaggcttttgattggattcaaatatgtcagctcttcccgctgggaccaatcccctgtggcaaggtgggggagggaaatttgagaagggccgtgaatggtccagcttaggtcagaggtacagtttccacgtccccacccccacccccgccccgtcaacaaaacagctctgccctgtaagcctgtgggtgtgggtgaaggtggaagtgggtcggaagaggctgcgggctccactttgccaggagtgtagggggaagggctgagttgaggaaacaatgggtctagcacttctgctgaccttgttttcagaaacaaccacagggcctctggccccagtggaacttgactcataaaggcgagagacttgactattgaaaaaggtctcctatgaaatctgaatttcacttaatcctcagaacaactgttgagggggttgttactactcccattttaagacgcgggctgtagagagggtaaccaccctgtccacattcacacagcgaacacgtggtggggcagggctcaagtccaggcgattccaaagtccccccgtgctgtttgcgccacgcggtgctcccaccaagcccactccgcggggagaaaaaccataggcctcggaggaggagcggctcctcgcagtggggtggggcagaggccagcatgaggccttgttcactggaggattccacaggcctggaacggaaagaatgagagctctgcaggcaggcagagcccagggcgcccagtgcccccaggctgcgacagccaagtcggtgggcgcgcatggcggggcttgaaggaaaggtccagagccggtgggaaaggccacgccccggggtagagcgcttccttccagatcccggcctttaactgcaattccgttttaagggcaaccctgcccggttcacacctagccttgaagatgacagattgcactgtgagcaatttgcagggtgagaacgggagcctacgactccgcacctgcactgccagagccataaatgcagcaaatcatggcctataaaatgtcaccactgctgaagtgcaattttccaggggtcttctgcagagggaactccaccacggagagcgaccctcggctctgcagcctaagaggaaggcccctgcagggtgggggagggaacagggaggtcttcctccccatccccttcgtgccactgctcccccctttgtgaccccactctgccacgtggtaaaagcttccggggggaggcattagttatttctgtctgaggagtttttgaccaaacgtaaacatcagaggagcgggaacccgagccccgcctgggctgggcggcagcgaccccgacgccgcggcggcagagccggagctcgaagcagccgccgctgttgcgagccgcccctcccccgccaggctggcgagcccattttcgcttggccggtctccgcgctgccggatggattgcgccccacccccgctcctctgctcagtcattcagacttggaaagtcaataacacgctgacatcatcaggggtttgtgtattattacacggctactttccagagtacctggcattatctaagagaggagcactccggctgcccaagaaagggcctgaactgggagcttggcggcctcggggaggggcggctgctcagagccaggcctttccctagtggggagggcatctgcaaggcacaaattagaaacagactatgagcttttgcttcactaaatgcagatgcactttagatatcgatacatgcttcattttgccttcgggtgcacttataaatcatccttaagtgacctctatttctaccaaagacatccacttggtctttaagaagcattcttagtgatcctcacaaaggaaaaaaaaaaaaaggagatatcttctgtgacaggaagccaaaggctgattttcttttttttttttttgagactcttggagtgtgtgtgtgtgtgtgtgtgtgtgtgtgtgtgtgtgcgcgcgcgcgcgcgcgattctctgttatgtaatcgccatcacgggtgattaggtcttctaggtctttccctccagggctgaactggatggtttggttgctgtgtttttcttaagcctcacacagggcaaacacacatgaaaaacatgtcccagatttatggcgcaaaactgctctccaagcaaattgccttagaagactgtctcggttttggaggaaggaaatagatgaatttgttgctaattaagactccttatcttactactctggcatttcct

SEQ ID NO: 41634 - DNA, 629 bp, Homo sapiens
atttcatgaaaactactactggtcactaaccaattaagttggttttagagtcacctaattgtgtgtctgtggggtgggcttgctgtgtttaacacttaacctctgcttcagtccatctcctaattcctgtcttcttccaattgtaggggcagggaccaaatgggacttatccaccttatctgtcactgaactggggcgttatgatgactaatgcagaaggaacacaaagtaagctaggaaggctggcatgaaaacagagaaatgtaataagtgcctgagagcagaaacaaacctggtaggcagtaatgcagcctcaggcagggctggcaagaatgttttgagtatcctttagagatcttcaatgctgtcagttttctacgtgtcactgagctccaattcccttatccggggcacagtagaacctcctctgagagaaactaatgttgctgactgaaggtcatggccaaaatcatggtgtgcacacacccccagggtcacattctttctgattcagtgataattatactaaaataataatagaaataactgccatcatttctttctttctttttctttctttctttccttccttccttccttccttccttccttccttccttcctttcttt

SEQ ID NO: 41635 - DNA, 1225 bp, Homo sapiens
cgaaatgatctattagaaaaatttgggtccttctagtgccagaggaaagaaatgcacaattaaatacactcagatacaaaaagcaactgaaagacaaaggagaagagaatagagaagagccttatggtcctgacattttatttttgaagtgtaagaaaatgacatttgagattttaatgtggttttgtctgagctcaatctaagattttacttatttctacgtaacacgtcatcattagtttcagctgacctcattgccacatgcatagctgagggcttgtggaaagaaatcacagggatttccagaaaaggtgacctcaccacagaagcacaggagcaaggagaccgaggaaggcttcagggctgagaagtgaagttaatgggatgaattcctgtagaaagctgcaatgtgctgtaaacagggccagacttgcagtggcacccaagcaatgaacaaaggcaaatgggttgggagactgtggttgagccctttcctcaggcaaatctcctttctcaaggcctcagtttccttttgactcaatgtggcagttggacatagctggatgtctaagttttctttctcaatgctgtggttctgggtgaccaggtcaagagcagactctatttctgttacgcaagatcagagctcagggccctgcaccgtcacctgctgtggctatgaaccctgtgtctgcaaagaaaagagatgggtggggaaattgcataactatgagcaaaattgcaggtcaggtctcacccctgttcaggaaatggaagggtttccttttatcttcttgcataatggtattagctaaagatgaatttattataaataataaaacagtcaacatctattgagtggttatgatgggccaagtgtgacactaaggatttttcatgcactgtctcatttacttctcacaataaccctttgaaggaagtgctagcatcattctcatttttatatacagataaaattggaggcccagagacagagaataaccagcctcagtttcctagaccaataatggcagaacttgtattcagacccagtttgactgcagagcctgggctatttattgatttattttgaagtaagggttgcactctgtcactgaggttggagtgcagtggcaccatcatggctcagtgcagccctgacctcctgggctcaaatgatcgtccagtctcaacctcccatgtagctggggccacagacatgtgc

SEQ ID NO: 41636 - DNA, 632 bp, Homo sapiens
ctggctactgtacatgccataagtaaaacaatgatgcatgaagttgaactgactgccaaaaatagatcaggaagaaaaatttctcccatgacaactggctgtgatcctagggattttccctttcactctgaaatcttgaataggactttatcttttctctcactttccttttctttctttcctttcctctccctccttcactccctccttcctttcctccctccctttctttcccctccctccctccctccctcccttccttccttccttccttccttccttccttccttcctcttttttctctctataaacatactgtgattttgccttgaaattctcagcgcagtagtagcaaacagaagtgtggcactgatcaagttagtttgaatgcagagccactgcagtggctttctagtggaaacatgttctcctcactcctagttctcagaccttcattcctgactcagaagagcctggtaagcctggggtgatgtcattttcagtcctgaggtaatgctattattcaagacatattattaagcaattggatagagaaaggagttcctttgaatgaatatactttatgcagaaatatgattcctccacaatcagaggcccacacctaaacccag

SEQ ID NO: 41637 - DNA, 2378 bp, Homo sapiens
gagtgcagtggcgcaattttggctcactgcaacctccacctcccgggttcaagcgattctcctgcctcagcctcctgagtagctgggattacaggcatgggccaccatgcctggctaatttatgtatttttagtagagatggggtttcattatgttggccaggctggtctcgaactcctgacctccagcgatctgcccacctcggcctcctaaagtgctgagattacaagcttgagccaccatgccagccagcctgatgcttttcagcagacatcttcctggttctgaaacgaagagatgaagagtgaaaaattcaatttaaataagattttccagcagtgtagggttggggtggagctctaaaaccatcttgccagcctgagttattgaataccaatgtcaggaataattgaagcagcagcacaaggggtatctgtgaggggcggaaaggtctagtttagttgatctatttgaccttgtttgctagatgtgaagtcttcttttcctcgcagaaatgaagagtttaaaacaacaacaaatcaatgaccatatcacattgtattggaatattgaaaatactcaggctgcttgataatgtaaaacagccatacttatattaattattcaataataggcagctatctatattttgaactttttcctattgtttcagctaggagcaattctgcttctcacacgtgtagcttgcttgtctgtttcttttccctctttagactgtaatagtgctgagttcaccatggccccttcatcataatgagaaagaacttttctaatgactcagagatttctaaattaaacctaaaatgtttattacaaagatgctggacacacattatgcatcgctgttgcaatacagtaatataattcagatagaaattatctttgcaaatggcaatcaatttttgctactactttttgcattcttgacaatctagtcactgggctgtggaaaagtgcttttacttgattatttacactgttgataatcactgtggtttttggcagagctaaggcattatttcacagacctgcattgcaatagggaacgggtgtaacttcaaaatactgccaaagttcctgtggctttagccgacaccaaggaatgtacaaactcaagcacaattcttaggagacttcattcttttacagtggtttgccacagggcagtccacatgcagggacaagttaaacaaatatggtccctggagaaagtgggctcccctgtagcccaagaagtctactgctgtggaggtcttcaggaactatctgcatctcccacttaatgcccaggacacatatcctcccacttagaactttgggtttaaaagggaggaaacatattttaaagtattagataattcaaaaaccggccaggcacagtgactcacgcctgtaatcccagcactttgggaggccgaggtgggtggatcacctgaggtcaggagttcgataccagcttggccaacatggtgaagccctgactctactaaaaacacaaaaattagctgggcctggtggcaggtgctgggaggctgagacaggagaattggttgagcccaggagatggaggttggttgcagtgagccgagatggcaccactgcactccagcatgggtgacagagactccatctcaaaacaaaacaaaacaagacaaacgaaaaaacaaaaaacaaaaaacaaccccgtggtgccactgcactattttcaaagggaaaaagagccaccgctccaggctgaatgttttcttatagatcatatgctgataaagaaatgaacacagacctgtaatgtggcagataaccttttgcaagcgactgcaaaagaataaagaaagatagaagcagcggaaagagctatattaaatgactgccttatcactcttagacaactcctacctttgatttttaaaaaatttaaacatttcaaacaaatcgttatgccatagtgggatgctcttgggaaacacaaaaacaacaacaacaacgacaacaacaaaaagaaaaaacagactctgactagtccaaaaacatctcagcaggcaatctaaggactagaactgatttaatttctttcaaaaaactctcctctatcataacaaaggtgtcagttataaaggggaacatctgttttgctagaccctaaactaaaacctctgattcttttcacatcagtcattgaacagctgtcagatatatgaacaagttttagacacctgagaattatgactttgaacacgtgacctagagatcctctgcccctgttatcacttccttgggccacccgccatggcagactacacagtcattatagaaaatgccatcacccagttttgtttgagactacaccagcatgtgtt

SEQ ID NO: 41638 - DNA, 1089 bp, Homo sapiens
ctagaacttaaagtataataaaaaaaaagaaaaaaaaagaaaaaaaagaaaatagggttaggttatattcactaccctttctggtagttatagttttgttggtcaagcttttggtataggcactggaaattgttattggtttatttgggaataagtgagtgttaattttacacacacacatgcaaaatacattatcattatttcagattttacatagcgaaatgaatcaccggacagctgaggttatctattcaccctagagccttctcaagagcatgccagcagatgatcatgaacctatgagtcctccagaaaaaaacaggccctgctggggctcagcagctagaggatcaggtcctggaagggccttatacgcaatcatagagcacaaggatgccttcatagtgtgttttaggaggttctgaggttctgaaaggccttctttgtgatacaacacatttaattagaccaacatttgccataaccagtttgtgtccagtaatgcgtcaggctctggatgtacaaagataaagaagtcaaagtccatggcctctcagctttccccatccagtttgaaaggaggacaggaaagaaaatagtggcgctgtaacaacaatcagggttgcatgtgaagctctatgaggacatatatgtgcgtataattaatgctgtaagatgggaaggtaagagaagaaagtcagcagaagctgtaagaagatatttaggttggatgtaatggccgagttagaatgcagcagggttatgagggcacagggcattgcagccagagggaagtgtgggagtagagctttgagagccgagcctgggaggctttgaagagtcacgggatggagactggaaaggtgcagagggccacatcacaaggaatgtggctttatcctgttggctatagttagccaacatcaaccaaactgggacacttttgagagtaaaaggaggtgctaaaaataagtggaacttaatcttttgaatatttattgaccatcaagttgactctattaaaaactttttgaaaaaaaaatctttttttttttggagatagagactccttctttctcccaggctgga

SEQ ID NO: 41639 - DNA, 946 bp, Homo sapiens
gtatcatttgatatgtattgtcataaagcttttatatttttcaaacacttcagcagttttatgcattgagtttgttatgaaatgtcattgtgtcactttatgggatcctatttaaagaaagtcagtagctaggaaaagagatgagaaacatttataatttgaccctaaactcaagggcaatataggacttagtaaaagagaatttataaatttctcaggtgctcttcataaaaacaaagtcaaaacaaagcaaaacaaaaagaaaacccaaggtgaaaccacatcaaacaaaaagtttacttggtaatcacctggtaaccagatattgggttttatgaataagaaattccagacgaggtgtcgtgttctggaacaacccttcctatatttcacaatcatgtaaagcctagctcaaatgtccctttctctacctcccaggaagaattagggactcccacactcatatactgtagcattttgttcatacatatgcttcctctcacatggtcaaatggttagttttttatctgtttgactgccaagcagtggactttgccctatccatctttgtttttttttagtgtctaaggcctggcaaacggaaggagctcagatgacacttttgaaaaagcaggctgtttatatgacttcagctcttagaatattaagaattgcatcatcattgcacgggaagaaaaaggtctgattggatccttctctctcaacaactgccttaatggtttagtggcaggatggctgggtgtacgtggcaggatggctgggtgtacgtggcagaaaatggagcagaagtttgacattagtttagtgtcaataatgcatattattgaatttacacaatatagatgtttgaggccttttttaattgggcctttccaggatcaaagagacttgcattaaatttattattttgtttatatggagatcc

SEQ ID NO: 41640 - DNA, 819 bp, Homo sapiens
cagttaaatttaaatttcaggtaaataacaaatcattttcagtataaggatgccctatgcaatatttggggcatatttatactaaattttttttattgtttatttgaaattcaaatttaactaagcatcctgcattttatgtggcaacccatctgggactgttctgtcactgtaaagcacgtgcttatattctttgctcttctgcctaacactgagctccaccatggctaaggctgcaaagaaacacacacacacacacacacacacacacgcacacacttggtagctatgtaaataccaactagcgcagcccaggaagacatcccatgtgggtgttttgtcctgggctggtctttcccagcaactcctccctcccactcagtgcttgctgactgaggagctgcccatagcttggctctccttctcctccctatcatcagtatttccctccctgatagcaaacactccagtcactgcctttcacaatcagtacctggtgcagatgatcctaaggtcagaatgttagagctagaaagactcaaagaggatttttacaagtgaggaagccgaaaacatcataaagatcacttgttcaaagtcacacagctaggcaggggcggagctggtgctggaattaacatttagcaaggatttcttctaattcgggtggctctgccttaccacaacatggggtcaatgttccacccccctgtttacttgcacgatgtggggcacttttcctcttccttgatggtgctgttgatgatggtgatgatcataacaatgtccgatttctttgattctagacactttacacat

SEQ ID NO: 41641 - DNA, 1586 bp, Homo sapiens
ttaaaggtttactcagatgttgaaagaagcatccaaagtcatattttctgttgtttattcttttgctttttttttctctttgcaaatgaaaaccagaggtgtaagtgttccatcccaaaggaggaagattgtatcaaaagctatacctccttctgctcactcatacaactcccatgcacatcccttggctttaatcacacagctttccacgctgctgactatgccagggcaactctgttctgcatgtctgtattgcttcagggcacatttcagaccagaactggatggactcacctggctgggtaatttagacatttgtggtttgcaatgttccagtgtgctccaagctatcccagcttactggtttcttcccaggaagtgggagaagactttatccatttgttttctgacaagagacattatggccataatttaagcagttttccagaagtttggcagcagagggttacaatctagcaggattcggtattgcctaagcaaatttgaatttgtactctggctcactcagcccattttaaacccagcagcctggggagaatgaatccttatgaaatcaatgcggtggcttcagtttcctgtggatggcttccagaaatgctccagacattgctgaatgctctaggtagactctcagtgcttcgaccaaggcacattcagacaagccttttttgattcactacatatatttctgtttagaagcggcaaggctgaactgatgaccctgcaacgcggttttgtttccctctcattatctatctggcttcacaggaagtgaatgcttggctggtgaagacaaaaaagctgttctccagcctcatgcttcatggctggaacatagccagtttaggcttgtgaagagtccattaaaaacacacggaggcagttgagggatgggatctgtgtatgtacaggtctttcaaacgtaggcagcctatgtttggcttatggggcttggaggagaggccttctttgatgtgattcttggatcacatattgattaaaaaaaaaacaaccagaagtctaatacccactgtaatgcatccagcagacaacctcttagcatctctatagagacctttcctcctttactgggtcacacttagggcacatttagctctcagataaccttaaataacccacagttcatttcctgttgacttcgtgtatcctctacttcctgaaaggttttcttcttttttttcagttgccactcatcgttaatatgacattctccaggtcttctccgcacttcagaattctcttctgggcttttgaatgttcttgtttttttgctgaattgtttttcctgggttttcatcttctcttaccctgttcacagtggagaggggactacatttcacccctgctgtctcagaatgtttctcatgcttaacattctattttcctactgacttggacaaattgcattataacctttgatctggcacagttcaatcacattttggctggaaatgttttacacattaaaatgatgaaggatgactttatttgccagacaaaagatgtttaaaatggaaaaaaagaaaaaaaaaactcaaaaaggt

SEQ ID NO: 41642 - DNA, 853 bp, Homo sapiens
aaggtgaagcttttatgaatcctggattgtcttacgttttatttccattcacttgttctgaggaaatctaactcatcaggagacttgaagataatgagtacccctggagtatcttgtgctgatttttgtgatgcctcagctgaggcaactggttgagaaaggagccagatagcatctttacactaagccccatggagataaagctactcctgtttcctgtgatgcccggatcacatcgagatgctttgcttgacctgttgctactctcacacagctttcatgaaatgcttcctatttgctatcctgaatcatagtttgactttgttcacatcatcctagcccttttaaaaaagatgacctcatcagccaggtgagttggcgccctgcctctagaaatcttcctgtcatctctttgtctgctttaatcttggtccccgctccaacttctgttcagctctgtattgaagttctactgtttggccctagtgctctgctaaactgcctggtatcagcttctctggctccgtgttagcctttgcttttcccacagccctcatgtttgtcattttgttctatacacttaggaaaacttgcttgccttactttacctggttcctcacaaggaaaagagcacaggacaagcctgtttccttttgtaaaaaaatcactgtgcaaatggtctcattagcataatttaggagaaaattttaagtcttaccaacagagattgagatttctgctgtggtagctgataggctgaagaagaatttctagattcttagctttgaatgacatttactgaaagagggagaggaggtggcagggggagagagagagagagactgagcagcaa

SEQ ID NO: 41643 - DNA, 734 bp, Homo sapiens
aactaatgttcactccagtcagctatattgaaaatattaaaataattaaacaaatttctgggagtttgtgataatgggatttgactggttcttcctttggtattttctgtgatgtttctccttcattttattgccaaagtcagagggattgttatagtataggcctgaagcctgctttcaggatctgtgcagaaccaaccaaccaagagagccttttattttgtcccccagttgacctccttccagatatgctgagtccatttccctgaaatgactgagcggggagaggtaactgcagctgtgtttggataccttctttctctcccttggctccagcccagggaaacgcacacactctttcacaatcacacaaaccacttcattatcatatttttgaggatgttggccaggggaaagggcagaccagtcagtaggctggaaagttagaaatgtgtgtgtttatttttccctcccctctccactgtgctattggaactggtatagaaagggaatagtcattcacagttgccccttttcaggagggtgaagttcagaggaagaaatgtttgcatagacatttgataatcataataaaaagaccattagaagctcattgattaaacagttactgcagatttcaactacaacttagaactgttttttttgtttttgtttttgttttttttttttttttagacaaggtctctctctgtttcctaaactgagtgcagtgg

SEQ ID NO: 41644 - DNA, 533 bp, Homo sapiens
cttagaaacttcaagggaattcagaacaggatttctttaatgatctggctgtattatattaccgattaccaagctgaaaaatgcttggcagaacttttggcttctgaggttttggatgtcttccaggtaatctgcctcggaattttgaaatacaaataaatgagttccagttcaaattttaaaaaatctgagctgctaggcctttgtttaccttccatctgaacattttggtacagatataccaaccaagcagaaagaagataatcagtcgacatttctgaggttattagtggccttggtttaaaagaacaaaatgagagtaaatggtttaaaacttcatcatgtttcttcctagtaactggcttctggtgttggcatttattttccaggatgttttctcccagtttttatttgggagaggaggacgagggtgttctttgctgctttgtttctcccagagggaagattctgaatgttcctttgttaaacgttacacacgtagcttttgttttactttcttgtctggtagccaa

SEQ ID NO: 41645 - DNA, 1547 bp, Homo sapiens
gctatagaatgacaaaagttacagctttcataatcttttcctgtggaataacacatactaacagaaaattgtttgctattttccctttagcaaggctaaggtattgtccagtggtttggccagtgaagtcaaaatatccccaccatttacttggtgaaaaccactgaatcagtttctacgaggtagagagaaataacctcagaagctagccttatagactcaatttataaagtcatggtaagtctaaaacaaacaaacaaaaaacaaacaaacaaaaacctccccaccaaatgtaagagaaatgaagaaacaagattccagattcaatttatataagttttctcttcgaaaaagttatttctaagagccctgaaaataaaaaccattttacctagttatagagaaaattatttttccagatttttttggcagtgttttaggtagaaaaaaagttttgtaatgagattctccttccataattattcgtatctgtgcatttggtaggtactgaacacactccactgtatctcagaagggatctacagataaagatgactcagcacaaacagttccaatctgaagcattcagagaatctcttctttccttgttctcagatgttttgaaataaacattggcagtgtttatttatgaaggttcgggactttttgaatgtgtcagcagcatgccttgactctaaacagactatgttgcaatttttttccctgatgattcaaaactataaacttaaaattacctaattaaaaagatactgaactacaataaacttggactacaacttcagttatgtaccttgtctgaaattagatcatttcaataacccctcttcatgccaaagacagcgtttcctcttagtgcataaacatcctctgaactctgactgagggttctttgttgcttgatcattgttgttttgaacgatataattttaattctttccctgttttgttaaattgaggattttggctcaaatttatttttcttaataggctatgagttacacggagaagtagaaagaaaatagctcaagagaagtgtcaacaaatactgttgggggggtactcaattgtttaaataagaatttaaagcttaagtttattgtgaataattctcattctggagagatgaaacgaagaacctatatatactgcagtctaatgataaatatttaaaatccaacgagaaacactcatccgacatacatatttctagcattttcctgatgttggtaatgcattaataatgcttcaattgattggcatatattttggtggataggccaaaaacaggatgtcaattgctagaaagcaagatgccttctctcctctattttctcttttctttaggtcccatgaaacctcagcttccctatttgtttaatggagataatcattctttcttcattttttcatagtcaaattggctgtagagttcacccaaaatgatgtctatggacatatttaaagatatcacaggccatagaaatgtgttaaacttttttgttaatgctggataatatggcctgatc

SEQ ID NO: 41646 - DNA, 1357 bp, Homo sapiens
ccaagaggctgaacacaaggatagctacaagtaaaaccacacctaggcataacatattcaagctcctggaaaccaaagttaaagagaaaagtaattattagtacgaaagagcagtgttacaaaagatagctgctttctcagacagtggggacttaaatacaatgaaataacactttaaaagtgttgaaaggaggggaaaaatctgtgactttaaattttatactctgattaaatattgtgataggcagaataatggccccctcccctcccctcaaaatgtccaccatagtctcatccccagaacctgtgaatatgttaccttacatgacaaaggggacttttgcagatgtgattaaggttgcagactttgggatggatatatttattctgaattatcttggtgggccaagtacaatcacatgggtatttaaaagaagagaatctttcccagctgtggccagagggagacgtgactatgtaagaaaggtcagagagatgtgacattgttggctttgaggatggccatgagccaaggaatgcaggtggcctctagaagcttgaaaagacaaggaaatggattctgtcctagagctcccagaaagaacacagctctgctgacgcattgattttagcccagtgagacccaggttggatttctgaactgtacaataataaatttttgctgttttgaggcgttaaatttgtggtcattttttatggtagcaatgggaaactaatataatatccttcaaaaataaaggtgaaattgtacatatttatggggtacagtgtgactctttgatacatgtgtacattgtgtaaaatcaaatcagggtatttagcacatccattacctgacacatgtattatttccttattgtcattaaaaaataaaaataaaatctaaaggtgccgtggagacattttcacataagcagaagttgagagaattcagaattcatctttagtggacccgcattaccggacattttcacaaagcaaaaggtgagagaatttgtcaccagcagaattaagctgtaagaagtactcagggaagttcttccacctgaagaaaatgaaattaggacggtggaatggagtaaatagcattggaaatgatacatatgtccttcgttgctgttgtttctgcattaaagatggagcagcactctttccaactctctacatccccagtgggtgctgcaagtaagggcaatagcatggactaaaactaaaagtatggcaaaagataacccatgccaaaagtaaacataagaaagctggcctggctatattaatatcagacaaagtggattgtcagaccaagatcattaccagaggtaaagaggatactttc

SEQ ID NO: 41647 - DNA, 2260 bp, Homo sapiens
cctgatattgtgttgtattttctgtgtaggagtctgtctcatcacccagactcttgagttacacaagggaaggacatgttttattcatttttgtagatttagtacaaaagagtacattataatagggtgcctagtgcatattaagaaatcaataaatatccattactttctttaaaaaaaaatgaattgcttacacttataaatctattgaaagtatcatggcaagaagcaaagctcttaaaaaccataaagaaattatgaatttttcagggtttttggaatgtggttgccacttaacattcaaactattaataaaatactaatgtgggtataaactgaaaactcaggtgtgtttttctttaaataaatttggtgcaaggaaatctgtgattatgttgttaaaattgagaattagaaagcggttcttcatttaatgaagaagactttctttatacaaaataagccataagattaaatggtgaactgcttgtggacattaaattgactaaaaaagaggtttaaattcccatacaaggaatacgtgatatgcactaacttatgtatatctatatcttaatagaatgtgttgggcacgtctacaagattttccttaaaatgtagaagaagcctagagtataatatttaagaaagattacatattattccagttaaaactttcaaattaggattgattgccaagactacttcaactcatgtggggaaattggaggagtgttttgacgggggaaaagacaaaacagaaaatgccagagcccaaaataagttccccagagaagctgggagtctttgccttgattggatacagactgggaactttctcattgctttggaatttgggctaacgtccaaaactgagggtaacctgtgacaattgcattgcacattctgaagaaaggtacttagacatgttccccacaggatgtgttaaggtgttggccaatcatcaaatattgtcactccaaagaacacatttaacagccgggaagaaaattgtaggaaaagagagcactttggcacggaagggtaagctgctatgtgacttcgtcttgatccaagagaggaaattgagagaaaaccctctggagcaaaggtggtgaggacagagaggctcactagtggggaatactgccatcttacagagttcgagaaatttcctcagagagtttgaagggtgccctctagagcaggactttgcaaactttctgtgataaaggaccaacctgtttcaatttccagtccatcatggagtgacaggtttatagatttactagaactgaatttttagaaaaatgaaatggaaacaatgttcagaggttacatactctgtattgtaacatcaaattgctataaaaatttctgaacagtactcttaattcctgcacttattttgtcatgaactggtaacagactgttaagaatcaacatgagtgctgagacctcagaataagtacctctatcctacatcagaacttcacccagagatctggttaaaatgacaattctgagcactactgccagtccaagctctctgctactaagaggctcctgggcgatgccagtgctctggtcgggggcattctttgtgtccaaggctctagagaagtgcaggccgatagaaatatgatgtgagccacacatgtaatttattttttagtagcctatttaaaaaacagggaaaggaaatgggtgattaattttactaatacattttatttaagccaatatatccaaaatattatcacgtggttgatataaaaattagtgatgagacatcttgctctgtgtgtgcgtgtgtgtgtgtgtgtgtgtgtgttttaatactaaagctttgagatctcaatttggactggcacatttcaagtgttcaatggacacatgtggttaatggcttcagtgtttagccaggcagtgcttgaatgtgggcagcacagggcctggtgcctgactctgcaggagaaatcacaggtatgaggtggctgaagatgcgcagcatgacagagtgaggccaaaaggcagcagtgcttgaagtttgagaacatgatgggggaggatgtgttcattttcctgcaggacaagtagcactgtgcaagttagtgcaagttatttgaagggcctcccaccatttcacagcaagaggggtgcatgctggaatgaaggaatcccaagcaccttctggtacaggagtcaaggttcttacaaaagattaacgagagagtgttttgaatgcatcaggaaatgt

SEQ ID NO: 41648 - DNA, 1798 bp, Homo sapiens
ttctcctgcctcagcccccgagtagttgggattacaggcatgcaccatcatgcccggctaattttgtatttttagtagagacagggtttctccatgttggcgagactggtctcgaactcccagcctcaggtgattggcccccctcggcctcgcaaagtgctgggattacaggtgcgagtccctgcacccgaccaaccctcctatttatagctgaagaactgagggctaagtggttgaaagacttgcacagctcctacactggcctgctgaaagccagggctgcaacgcatttcttctcacaggttcagagactcctgtacctcatcactgttacagaacctctctgggcctcagttcatcatttgataacaagagtaactcaacctgcccaggggttatccatcaaaggcaatcgaggttgcaagaattcctttaaaattttaatttacagtatagcaccttgcaggtagcaggcactccataaatctctgaggaatggaatttgctgaagaacagtggcaaaggctagctctgattcattccccaaagctcatggtgcttgtccaaactgtttaatcaggcttatgcaaccaactcctctgacctttattacggggtgggtgcaatcacatgcgctgtgggaggaggggcaggtggcctcggcctgatcagggagcactagaatggggacaacattttctattgttcagaaactaaaaggactctgcttgaccccagtgtaagcctttcactgcagtagttgggagccaagctttctcttccaacctatctgtcctggcgatcttcattttctctgtttttttcctaagacagaaatatcagctagaaggcatttccctcactggattcatccagccctgatgtgagagtgctgggggcagactgagatcatgtgtgatgcctgtcaggctgcctgccaggccatgtatattgttttggtggactggcttctgcaggaacatagagaagacatgggaatagattctgaaaaggggggtgggggacaggaaaaaatgccaaaagcccacttaatactgaaaagtcttacacttccaagtccttgttactgctggccagagaatgggttgttgccctgtgtttttttttttttttttttttttccccaggaaagctgccacggcttttctttattcaataagtacatgactgcatttggtgaattgtgtttacacgttctggtgaaatgagattttaaaaagaaaatgaatcagggagtgtttttaaagagcacagagtgaggagaggaggtggggagcgctgctgccagtcctgttctgttctctgccttttgtcatccttccccctctgtatctctctcctccatcttctcctccaaggaatcactatgctcctggcaggacatccctggcgtctgtcaggggagagaaggaggaggagaaataggagaaggagaagagaagaaaaaacaaaagagaagaaaagaacatcacaattgacgttggagagtgatctgtgctaggaggagttcatctctgcacttccccattggaatgacagtctcaactttaccccaactagccccccaccttacatgagctgtaggatcgacgtcgaatctcttggcctctctgagcctcagtttcctcagctattagatgaggataatacctgtactgtttttgccagagtggttgtaagaaagaaatgagaagcttacgaaaccataaagcatgatgccagtcaaaaacatatagtgatttatatcttaaaaagatttattagtcctggcacggtg

SEQ ID NO: 41649 - DNA, 5587 bp, Homo sapiens
atatgggctcaggtgatttcacatttagagttaaacctgaattttgcagtcgataaaagaacattttgttggctgtaagctcagctcattcacacaggcatgtctatccctgcaaagttcatccctgatgcttctgtgggccccaagtggtaactttatgtgccttcacagatccagttgagggctcccctcaccagtgcccttgctgcttccccagcctccaccttgctgaagagcagacctgacctcgcagctgagcttcaaagcgctcagtgctcacggctcacaagctggcagtcctttgggaagtgagaagggaagggcttcctggctgtgcagttacacccggttaagtggacccctcggtggtactggggagcacggcgtagctcatgcctacgacactcgtggggcaggggcactgaggcagcaccaggaccagctggtgttcctgacccctcttgctcctcctgctcagccttatggttgagactggcttgtcaggcctacctccgtcctctctagaacactttctcacagagatttagccaaattctcttggcaccttggttgctttctctccatgccattcccagtcccctattcgttcccgcatagatctaatccccaactgggaatacatcttgcaattttttagaagattcctcatctaccatgtaaatcaccagatgaatagaaacaccataatggacagcagtttcttctaaagccaaagccaggtattcctggatttccgttccaggctggttgggactgtctcccctcacctcattcacactttttatggtgaaatctcctgtgaatggcatcataattggccctttacagtcaaacagaagaacagaaatcttttaagtaatctcccagataattgtcttttatttttccaatacctattatacctgggagtcactatatatttaaggtgatggagatttaaaatagggaatatgagaaagcttaatatccttttatgtcactgaagaaataacaaaagttaaatctctagttgatgaattatgaagtagctggttccttatgaaacaggattcataggatttaaaataaatttttgtagttggcagaacttttatttttatgtgtctcctagcatatgacttcagcaacacataaacccttctttccatttttcttaaaattctaagtagttcattcactttatcatgtctgtattgttcaatgttagccctatataagatggtaagtacagtctttatccattataaacttaaagtctatagccatagagtaatttatgaaaccagtcactcgtccagcatatatttattgagtgtttattatgtgccggatgctggagtgacaaaaaaatgaacaagatgtagatccggccttcaagtgtagctggtgattttccacaaaaccctctattattgtatcttaacatccaggagtcagccaggagttacactgatcataaatcgataacctcatttcaaagctcaaacacagagatggcaaataaagccctgggcagcactgactgaagcaacagatgactcattaatagcaggaggcaatgaataactttgccactgagagtgaaagaaaattccccctttgcacaatgcctttcacttaaatagcatttggatttcttaaaatccacaaagtttatattagagcgtcatccattaatgctttggctaggaggggtaagtgctgggaaatgtcatcttaagaacagtgggatttgtgggggcaattgtcttttacttgcagcggcataactgatcatctgttcaccatttacctcttattacttgcagtagttcttgaacaatgctgggagctaatatttcaatgttaaggactcggaagagacagcatagttgaggcagtgtagcaaagtggttaggggcacaactctggagccagccagccttggtttcaatgctggttctgtcatgtacttgtggtgtgatcttgggaaagttaccaaatgcctgagttcctcagtttgcttatctctaatatggaatgataatgacagtgtcatcttttacggttgttgttaagattcaatggtgataagttcttagtacagtgccggcccatagtaagtgctgtatgtgttgatcatattattatatatcacagctcttaaaatacagagattgtcttgaagacaattattcatcttctcactcttttttccccattagccactagctaacttggaagtgtgtagtaataaggccagatgactaaatggaaagcaaaagttatcttttaagcatgagcaaaattatgaacaatctatagagtgattaaagttgtgattcagtaataacaatttaaagaaatttatcaatagcaaatgtaaaaataatttaaatcaagaattagtttcaatcaagaaaatttcagattttattttattattcatttatatttgttatatctgtggatctgttttatttatgttcatgaggacctgtttggtctgaaagtaatttaagatagcttacaaagaagcatattatatatagtaaaatgatattaaatttaaattaataggaaaagttagataaatggaaaacaaaggtagaaaagaaggagatggtgttttgaatatgaaattgtatcttgaatcccccatgcttgctacaagtggtaatgagagtggtaatataattcaagaagatgattgtgtaaaacaaactggttgcttaggcagaggacatccattattgatactgtgataagagtaatttctgccatgttgctcagtttcagtattcaccagaatcttaagcattaaacttgaatattaaaccaggaacttggaatatggtctttaataaattcatgcagtaattgtttattgaaatagtttctgacccacagaaattattgtgttaggtgctacagagaagagagacatgtctcaaactatccctgctcttgaataatatgcattaaagaaagaatataagtaatacattaataaactacattcatcaggaggctgaagccagaggatcacgtgacgctagcagttcaagaccagcctgggcaatacagtgagaccctctctcaagcaacaacagaaattagctgggcatggtggtgcgcagctgcagtcctagcttcctgggaggctgaggcaggaggactgcttgagctcaggagtttgaggcttcagtgacctatatgatctgttactccagcctgggtgacagagagagacactatctttaaaaaaattaatagaggctgggtgcggtggcttgtgcctgtaatcctaacactttgggaggccaaggtgggcggatcacttgagatcgggagtttgagaccagcctggccaacatggtgaaactctgtcacttctaaacatacaaaaattagctgggcaaggtggcatacgcctgtaatcccagctacttgggaggctgaggcaggagaattggttcaatgtgggaggtggaggttgcagtgagccgagatcacgccacctcattccagcctgggcaacattgagcgagactccatctcaaaacaaacaaacaaacaaacaaacaaagttcaaagtagatagtgatgatgagaggtacacgtgtggtgttaaaagtagctccccatttatatcttaccgcattctgtggaccaccccacagaagatattgtaacaaataaaatctttatactttctaacatattaactcttttaatttcttaatggtggcttttaaatacttaatgattcttttatgtggatttcaaaagccagacagtgcagtatccatgcatagccacccaggactactaaaggtcatagtggagaagacttgtcataaatattataatcccatggataattctgtcctttaactctgtatgcaacttagatcataaacttgcaaagtggatgccaagcctcatattagttcttcatctcaatttgtcaaaaattgatttcaccaagttcagagagagagaaaataaagcacaaatgcactgttttcctagagggcatgtgcatattttctatacattcgttcaacattattaaacatttattatattatgggaatggtactgagcatggaattataacaaaagtaaattttttaaaattttcctcaaggaaaataatttattgtttaggtggagagacagatatataaacgaatagttatagcaatgagagaagtacagatagacatttgtaagaagggaaaaggcaagctctgcctagcaggatagagaaaaggccacattgaactggcgtttgaatttcctcttgaaagatgtgcattttgccaagtggagattgtacaataggaatgatattcatcctggttaggaaatgttcttggagcacctcccagcctttcggtctaatatttcctgagtacctctcaaggattcagtgtgggattaggtgatgtggtaattataaagaaatagaagccttgttactcgtcttcagaatgtttactcataaggggtagtaaatttccctccccacactttcaacagtgattaagaggtcatgactgtcagtcctaaattgtgtgtcacgtcataaattctgtagattagagagcatgatcatgtaattcacagcaaccagggcaagcctcacagatggggtaaggcctaatctgttccttggaaactgggatgaggtttggatgtgggagagagaatgctttaacagtcaagccacaaacctgtattgagggcctaccatgtgtcaggctcatgaataaagaagcagcatgggagtggggaaaaaactgggattgaggttacatgtgtttgtggaaaaacctggctggactagtgagtttgaggtgagggatggcgggcaataagtatagagtgaaacgagtttgggcaagaaaactgcagctagattaaaaggtgctctgaaggacaggcagtggcttttgggtttggcatttatgaaaatggggagtcaccaaaggtttttgagtatgggagagagctgctgaaagaagtacacaaataaaagtaaccttctttagggaagttacattggaacagctggaagggcttgtagagatccctttactcactaccccatctgaatatccttcagatggccatcatttgactgaaaaggcaatgaaggcccacagaggttataggatttgcttaagacaaatagagtaatcttgtctccatttcaggctccttcttttgatcttaacagtgtgtgtgttctaggctgggtggatggacagtaaagggagtaggagcatcgaggtccaggaccagccaggctgaatgagagggcaaacaggaagcagccgtgacccagattatgttacagccatagaatgagcatattagaactcgtagaagacctaaatgccatccagccttatcctattgctttgcagagagggacagttgagggcccagagggaaagtgactcacacaacagagcgatctaatgacctgactttaagtccagctattttccctgtgtccacctcccttcctccttcagattctatggttgtgtggatgggctctattttctgtccc

SEQ ID NO: 41650 - DNA, 557 bp, Homo sapiens
taatctctttaaatgcaagaactttgtgagatcagtgctattccctccattttccaggtgaggaaccatgagtctcagagaagctaagaagtttatccagacacccacatttttgtgagtggtggacttaagatttgaacctgttttggtttccaagttctttggtctttttactgttccttaattgttgcctgttacaggatgccttgcatttcttcataaatgagtccaatttttgcctgccacctggtttatatgactgtccagattgatttttcttttaaatttacattttgcaactgtaggcttttttcctttccatttacctcctgcctcagtcatgaggttggaaaaaatgagaagtatgctggttttgtttggactgagaacattccaaaatgtttggctgcacctcaaaaccctgttaaaataatattatttataactttctgcttggtcaattttgttttaagtttggctatctcccataggaggttattctttctccttgatggtaaggtttgctgcttgaaagccttaatcttaaacatttttca

SEQ ID NO: 41651 - DNA, 892 bp, Homo sapiens
ctgtctaaaattgatggcaaagcaatgtgaattataggggccaaggatttgctatttagaaacttaaacaaatctgctttttctaaaaggcctttctttttcacacaaaaacgatggtcagtgaagtggcaattctcagtgaaacgacaatgcttctccctcaggagcagctaccctcaaggaaacagagccaaaacacagagactgaatcattaacctaaaaatgtagttacataactgctaaaattccacactttgcaggcctgtggcctgactttagcctttagagacattcctagcccagtggttgctagtagccactgctcacatttctccatctctctgcctcccaggagctaaactcctattgattttcccagaaccctgagctgtctccataatagaatgatttggtgggcgtcctgtcaaatgcaaaaggaagcctctgccagactgagcattagaacacggtgtttttaaatagaaatgtgaaatatcagtgcaattacaaatcaataaaaacccagagggaaagagaatctcatttgaggaaagatctttaagtttttttcctttcttttttctcgtaatgaaaaattagatcagggaaccaaatttatgaggtaaaaactgtcaacaaagtattcctagctgttgctgaggctgagaaaaaagaaagctaaatcatgcatgcagtgtgagtatgtgaatgacacattttaatatattagggagtcaaaatacctctcattttttacttgtgtttttggctgttgcccaaatcgttattgttttatttattttgctaatgtcattctcttatgcctttttccaaattccatattttctcctaggtttgctttccatatgctggatgatgtgtgtggatttt

SEQ ID NO: 41652 - DNA, 951 bp, Homo sapiens
tattggcaatcttaataataacaatccagattcctgaaatccagaatcctgaactcaaaagtccattggttttcccttatcagttctcagggctaataacttaactaaaaaaattactgtgttttcactgcatttaccaccatgctgggcactggtagtatcacaggtaaataggatagagctgaatcagacaaacccactctggcctaaaagtgcacatggctgaaatgcacaccaaggtgatgacttagtgattaatcagcatagggacaatgagcacattttctcaccttactaaatccgcaagggaagctgaggataacctggcaatgccagtttgccctagggacccccaggctctgcctttttctgtgcttctgtaactgatcaacctccttgttagtaaaatattctatctttagaaatgttcatacatttaatccagccttagtcaaaccctgcaggcctaggagtcattctgttcctatgaggtaactttgcatacttctattctgctgtactttgatctctcagcttaaccctcagagccagtcttagtctctcattttcgaattattgggggcatcattttgtagcctcctgaattcacaaccttcagaaagagttttaactctttttctatgtctgtttaagatagggattctgaaatacacattttaacacattccttttaacattactctgtgtactcagctatataacaatgatgatgtttcaatcctctcaattctgtcaagagctattagtgatgattagtacagtagatattgctcctgtagtagctgtttttagcctgtaaaaataggtagaatttaggcagtaatttcacagtaatgaaatgagaaatgaatactcttgaatcttttatgattaccattgtagctttatggagactcaggatttacatatgctttgggcaaaagagtcgat

SEQ ID NO: 41653 - DNA, 817 bp, Homo sapiens
gcaatcaattcatctagtacaaagaataaagcattctactatttctcagagtttccttctgctctctcacattttttaaaggctattaattgatagtgtaagatttttcttcattaatagaatatggtttattctaatggtcattatagtgaagatactctgcaatgaggctgttaaaagagggtatggcacacatctggcaatgcttgcttcattccctgtgagcatcaagcaactgtcatcctgctaaatgagttgtcattagcagtcagatttttattgcagccttttggagaaacacagaaagaaatctaactttgaagtaatgtctattggaagagctttaatagagatggagtcttagtaaatcccttctctgatgttccccatcctaatatattagtagtctttctaaaatgggaaggtatttggcatgggactggtgacctaaaattacctctgaaatctggcaaggtatttcaacactggcatgaatattgtttcctctcagccagcatttttggcaggcatcttatgcgttgcaagtacctaccaaaaatgggaattagataaggtgacttgcagatatgaattagcaatggtttcctttattcaggttggaattttcataagaaattatggtcttagctttcttagtcttcctttgtagttacactatggcaatttcaaaattttccctgaagacagaccttattgtactaacagattttcaacctccagataactcccttcctccctccctcccttcctccctccctcccttcctccctccctcccttcctccctccctcccttc

SEQ ID NO: 41654 - DNA, 3737 bp, Homo sapiens
gctagttagtgctcagaggcactgtgccctctagcgaggcctgccttctctgggacacctcagtccccactcagctgctgcctgtacttgttacttgcctgttctctgtgagctcttgagtttacagccctgcctcatacagccttagattatattcatcagcccctgtaaaacccaaatttttcctccttctctaggtaaattacctacacaaaataaggtatcaaggaaatgtccaatggagtaatggatcacaccaccataagccacagtataattccagttcctcaatcttgaggctatttccctcctccttcttaacaaataactgatagtctctattataattccctcagaaaagacccaaaatgttcctctccctcttcaatctttatccataatgtctcctgcctcccccccagatggcgccgtctaaccctgagtgtctcaaaatgaaccacagtacaccctttgagttcccaagattctaattaacccaaattagaatccttatttcaaaatccacaattccctccactctctcaatacagtattattaaaacctcttctcttggtcaatagaatatggctattttaagctgctgaaattttccatctgcaatggaaatgtgtacattatggcaataatagaattactaaaatgaatcaagtaaattttgaaaagttaaagtctattttaccatatttgataactacacagcacctgaaaatcaagtaacaactttcagacgaaatttggggtggggaggcaacaaaggaaatcagcgtgatgggaaaataatgtagttaaggacaaagtgcataagtattagtcatagaatttaacaatacttctcattaatcacaaaatttagaaaaatgataatattatttaatttttaagcagaagtgtactgcccatatctctgggaacataaaagaaaagcaatatagagttttaacatttaaaaagtcaggttctctgtaatggtattatttctcttaattgaatcaagcaaagatagtccagaaagcaaagacagatatggtcattttagaaaacggaactaagtagacaaagaacagcttttaaaaagtttaactacctaataataataattcataatgttgaaaagctactgatgtcaaattgccacaaacattctgctagttcattagtgaaaaggtgggggggggtgtcaaaacctctggataaaggaaatcagcaatataaacagaaaatcaaatgctaccaattgcctaggcatgtctggacttgttttatgaaagctcactttcacttgaggaaattctagcatgtgtctcccccagtgttatctacaggtttccctcaaaataaagatccttctcaaagaacagaggcacaaaaggcctcctaccagaggtgacagttacctgatttaaagaaaaaattcttgccaaacacagatttacccattatcacatttgatctttacaatttttaaagagtagcttgatatcccaaatttatttcttgttatatttaacaatcaacacaatgtcgactcctcaaaaaaatctatgtatgacaattgcatcaaatattagtacatttgcaaacaaaaattagtataaaatataaatcttaaaatgaataaaaccaagtcttcagtgaatgcatgaatgatggaatacagagacccaaaacatgcaactcagatctgttcaactgttgcattggtttaaaagggactaatttgaagactggcataaatattcttcaaatcttaaaaaccagtcactttgatgcttgcgatggcataaatgaaggatttatgctggttaatgtcctggtttggaaaggagctaagacgacattaaagaaaatcaaagcttcacaaggtaccctgtttaaagaaaattaattgtcatagcatacttagttttaatgattggactggggcctactcttcacatactgtgttaaagacaatctcttgtctcatttggagaaatctacagaggaaagagaatagaataaaggaacaggttaggagcacctcagcaaactaggtaagtctgtaattgggaattctggaaatgagggaaaggcagcgagcattactcagaggtcatcagaacgcagcaagaaggaatgagagggagaaaagttaaaaaaaataataataataatcacttgaggcaaggtgtatcctataaagaaggctcaaaagaacgcagaaaactggggaagaggccttggtgaattggcgaatgtttttcagtctccgctgtgacggttcctaatcctagagaactgtttacagatttgaatcaaagctacagacagttcagcgtcgcccacatccaccttacattcctaagatgtgcatgcatacacacgaacccacacacgcacctcaacccggtatggatgccatcacgaaggatggaatcccccgactcccacggggcgggggcaactgagagggccaaggcagctgcacgcacagatgatccacctggtccacgtgaaatgcctgaaacaagcaaactgataaatagaagcagcgcaagccctgtcacgtggagggcagatggaaagagcatcggaaaggaaccgctagtccccggcgctccaggggctcgtcctgaaagctccgcggctcccaatcgcccgcacttaccggaacccccgggacgcgccggcagtctccgcgccgcgtccgcccgggacgcccgcgacgcccgccctgcgcgcccggctcggcccagctcgacccagcctcttctcggagcaactttctccgccggccgccgccgagccccctccgcagccgaaggctgactgtcaaaagtcagtccaacccgacccacagggaaacagctgcaggaagtgactgcggaaccgggaggcggtggaggaggagactgagggcgccggctcggcgtcgccactgcgcatgtgcttggcggagcaggcccggcagcggtggcagcggtagcagtggcggctcccgcatccccggcgggcggcgcgtgggtcaggtgccctggccgcgagcgcaggggcgcggggttaggccggcgtggggaacaaaggcacgagtgagaggcgggagggtcccgccgccaatctcagcagacagccccgaagagcagttcagcagatgccctggaaagttaatccttggtagaagcctgggcagagcttttgcaactttcatctccagtcattgggatccaaacattgttcattctgttcctcccttagcctgctggttggcggttaaggcggctgagtggatcctttaaactgctgcaacagaacctttaaactgctgctctccccacttccgccccaggatggaggaagaagagcgtggctgcctgcccagtatcggcctccctcacacaaaacgcccccacccacccacacacacaccttccctcccctacacgaaagtgagcaggagatagaggagactttctcctgacccccagaggctcacctgcaagacaggaaggaccaggaaaagagtggccaacgctaggatgtcacatccttcataaccaacctggacatcttcaatgttaacactgagtgatgagctgaggaaattccggctctaaacttatagcgtaaattaactcgtatgaagatctgctggggtattatttttgtgtgtggcaaacgataacaaatatactactttaagagtacaggccgggcgcggtggctcacgcctgtaatc

SEQ ID NO: 41655 - DNA, 2902 bp, Homo sapiens
agtcaagtgaaactacgaccacaaagaggaacagatccatctcatttaccattggggtatggacggacgtgcggtgttcgagaagactgttattggtcagagttttgctctagaggacaagtaggactgtaacatctctaggatgggtcacttcccaagccctctattacttaaaaattcaaggaggaaccgatgctggagtacttgtatctcagacttctaatcactgctcctacgcttttccaatattacaacaaaagaccagtagggggagaaaaacgcacagtaccgaacccttatcagtagtaatctcaaaagtcaacagattgatttactctcaagcaaacagacttctaaggtacgcagcaccaagacactaccttgaatcaaatctatagcctatatgacatttctgaagtctctgttggcattacgcgaaaaatcccccacgtcttctgaatagttagaattgaatcctacaagctgcttcgaatcagaattcgatttaaaaaaaaaaatgagggcatagcaaaaggtctccacgaagtgagtcaaaggactgcagagggctgtgacagtgcattccgccttcgggatggtatacaacttaaaccatgtcggcagaagaacgcacagcaacgctttgtaaaaagcattctttctattatagaatccataaccacgctggttagccactgacagcggcggttagccaccgcacctcctctcacccccgaactaatctcgtttcctctatgggtgtaaaagtgaaataacccacttgctcccaatattcctttctatatctctaccccagctcgcctgctgctcgtagaaacaaatatactacacgtacgctgtcctaggatgacacaacaccctcactactgcagaagacggatcattaaacaaacgtcagaagagcagccccaactgtacataaacttcgggcggaaaagcaagacgcaggcgcagtagcacatattgttaccctatttgcccactccctgctcctcctcgcctcaatttcgcttccgcttctttgcgcatctgcttccgggggattgtaggctctgcccctcctcagctcttaccctcttctgccggaggagggggggggccgagggggtggggaagagttcgttgtttgtttacacgatgtgagcggaaaaagagaccaataaagtttattctggaaacaaaaggaaaaaaaaacaggggcgacggagaaaggagtcgggggcgggggcgtgtggcgggggctagcgaggagagggagcgagaagtagaaagcggcagttccggtgccgccgctgcggccgctgaggtgtcgggctgctgctgccgcggccgctgggactggggctggggccgccggcgaggcagggctcgggcccggccgggcagctccggagcggcgggggagaggggccgggaggcgggggccgtgccgcccgctctcctctccctcggcgccgccgccgccgcccgcggggctgggacccgatgcggttagagccgcggagcctggaagagccccgagcgtgagtagagcgcggactggccggtagcgggtgcggtgggaatggggaccgggtgggtgccggagactcccgggcgcgcccgccgtgttgggcggaggctacgggctggtcgtctcccagcgtcggcccgcggcggagttcgcctgcgatcgccgcaccctctccctcgcctgcctctggcctctcctagctgcagaggcgagggctcgccgctccctctcctttctctctggctgccgcctcgctcttcctttgcttctactcccagttttggggacggggcggctggaggttgaggaagtgcgcccagggccgccgccccggccgcggtggctctgtctcccgcgccctgcacgcccacccagcccgcgggtggaggggctgccgcgaggactgcggctcaagggacgcgggcgcgaaaccgcgagcttttcttgaggggctgtcacgcccgaggactccggccccgccagcctggcggccctgcgtttgcctcttactgggtttaaatcgcccggcaggggtatggaaggaacaccgctcccctcacccccgccagctcccctcccacccttcctttcgaggttgttttttccttttagctgagacaaacgcttagatctttcattcatagacctgagacactgactcatgtgacttgtctctttactaagtgtattatgtgatgcctgttccatggctcttaagtggctcggaaaggtagggtagggcccgggattgggctatgtaaacaccagacgttcagccggcgtgtttttgacctcggctcgaggggtttattttaggatgctaaaggaatagtgatggtggccaaccgtgttaccagacttgggaatcgaaagctatttttttatgtcaataattgagactgtttacatggttaaataaagggtagggtaaagggagcgcaacaagagggtctttctagaaaacagtctgcatattctttaatgaattagagttgtgatttcatcttggtgaagcttcctcattccagcactgcgcctttgtgcacatgcaggacctgggttttcggaacgatgttttgaatcatagtttgtgtggccggggagaaccccttagaatacttgggtaggtaaattccaggttatctcaggggattatttctactgcgacttttgaaccactgagggcaatattggtcatatgttatcctgcttagaaattgaatttttctgagtatttgcttacattgcaccgtacaaaatttgtttatgtgctggattgcgtgttttaagaaaacttctggaaaatactcaaaataccgtgttgctaagttagtttggataaatcaaaacactttgctttcaaagcaa

SEQ ID NO: 41656 - DNA, 721 bp, Homo sapiens
gtcctttggggaaagggagaaggagatactgcagtgagctcataaagaagggggaacatttccaatccatggggactggagggataatctcatttgctgcctacctgtgtctcgtgagcaggatgaatgcaacaaaatgaaatcccagttcagagcttggtgaaaagtccatctaaataagctaaagtgatgtgtaatcaagtatttttaaagatattgtagcaaacaagcctaagaaatgttgcctcatgcaagtctgtagagatctgtttaatcaataactagagaatgttgtatgtaaataagtgttacgaactttgttatctttcagggatattgcacgtccctcctgaaaatttgtttacattctcctttgaattccacatggaaagaatgactcaaaaagttcacatttggaattaacagcgtcctgaacagggtttgacttattctttcatattcacctgttggaaaggcagcatatccaccaccagaatttctggccactgcccagtccactcagaattatgaagttgtcatggcttctttgctcctctcaccctccttctcctcctctctggccactcatggttctgcataagtgtcccttcatttcttctctcctctctccactgtgcctgcaaacctgctccagcaaaggatgagatacattctcgcagggcagggtgtctggtgaacagaagagtccaacacaaaggtc

SEQ ID NO: 41657 - DNA, 616 bp, Homo sapiens
cccacccagaaaggccagcgtggctgcagacgggcccagcatgttacgagaccccttctcagtaaaatatttttctggtctctcttctacctccttctgctgccgctccagctccttcatggggatctcacgagcctccgcgcgggcctcccgttttgcggcgagccgggcctccgccagcctctgcgcttccgcgctcaaacagtagatctcccggctctgcgtggccgcggggctggtcaacctgctgggctcggcccgctccacccggcgggaaacgctcggggaccgtgccggagcccccccccgcgggccgggccagggggcgcgcgctctgtccgcggagacggagccactcgccgcgaagtgaacgctcgcgcttccggggccaagagccagcccgccggggagcggctcgcgggactgggctcgggcgcagccggcaggggcggggcgtaggtggccgcgggctgagcctggccgggggtggaatggcgcgggggaagcggggctcgggcgcctccgcccgccccatggcccgccccgccccacacttgcaatttttttacattactatggtgtgaaagcaatatgaattcagtagaaactgtacctc

SEQ ID NO: 41658 - DNA, 2833 bp, Homo sapiens
cttgaaattgcttgcaatttgtgactatgttaaacaacatctaaacaaagtcaagctcctctaagtgcaaacaatacgtgggatgctggggagagtgtgcgtttactttcactacaaaatgttttggagtaaaacttcattttgaaatataaagattttgttggacacaaggctatgtggtaaggcaaaatggtaagatggtggcatgacacccccttgtggtttccaccgattcccggttctgtgctagatactaactattctaggatttaaaaatgtctctacatttcttcgaactttaattcgggccatactagcattcgtgagcatttatttgagctgagtacgcacataaaacttaggaggtcataaaaactgagcctcacaaacaagtagtgtctctttcaaatatagctttatctcctgggggatggtgaagggatcagagtaaagtctgtgattattactttccagcgattgattggttgattggcatgtggttgtcagaaaaagcagtggacgtgaacaaagagacatcattgcagccctaactatccgagtgaccttgggtacctgataatccacatggctctcagtcatcctcttaaccgtttgaacctcaggggtttaggctaccaaaatgaattaagacccagtctttagcttctcacacatttacttttccattttgtaaaatgtgactaaaaacctcaactcattgtcaaaaggactgaattaaacatatcaccacacttgcacagagatcatttatggaaccatgttcacaaatttatttatgctcgtgtaatttaatcatttctacagctgctcaaagaaagtcaaagtcgagaaaggacttaaatcgtcgagtccagtcccccttaactcctcattcattccactatttctcgagccaaggaatcgggtgaaactcaacaacgactcgcagtcttcaggtttcaccctcttgccctgagggcagcatcctagccctaggtggttctctggtgtggcctcagtaaaaccgtgacgaggtcctcggcctctctgtccccaacaggcggctggcacacttcggggtctgagatgccatctgccttgcctaacctgggcaagaccactcgcgtcctttcccttgaggagcagcgtgggaaaggtgccgctgcgcgccacgtttctcccagttccccagggcttgaaggggcggtggaggcgggcgggataaattcgctggccgcctggcgtggagtaatcctagagggtgggatcgccctcggggctcgggaggggctcttccccgcccagaaggagactgcggcggcgcaaggcctccggcagggggcgcgggccgctgggcctcccccggggctgcgggccggtggtccctcccaggccgcgtgtgcggtgcgttcgcgcagcccgctccctgcccccacctcacctcgtcacctccccgccctctcggcgggcccctgaggtgcgcggcgcaggcgcggagcgtggcggccagggcagtgcggccgcggagcctaggccaggggcctggcgctcagggcgtggggcgcgcggggagggagaggggtcggcccagcacagcgtccgggagcgctagggccggagcagcgctgcccgccgccgtgcgtccgcgggaaggaccgcgcggcccctccgcctgcgctctcggccgccgccgcctctgcgtgggccggccgggagggcctcgggggactgactggtgagtgtgagggaggagcgggtgggtcgggcgctggactgctccaggggacgcgggcgtgcgggcgcatcttctaacgggagagggcgggagagaccggagctccctttatacggaaactctgccttcgttatatggcgggatggcgttcccctcccccatcccgaaggcagttccaccccctgcgcaggacgccttggccgggctcccctcggccccctgctgccgttgtctttacggaacctttggtgtcggggcttggaagtctccttggcgccggcttctgggcccgggcgaagctggtgcgtggcgccggggtggaggcggctaagtcccagggacttctgccctgcgcctccgacgggcatttgtctggctgcgtccgggctcgggacgatcctgggtcctcgctggcgctgcggccctgcccggcggcttcgtgacctccggcggcgaatccccgggctcgcgcaacgagttgtagccgcggagagcaggcgtcgatgctggcgcccaaagcctccagcctgagagtcgcctcactcgtgtgacggtgcttagaaacccccttttttggttttgtctttaagtactgtctagggaaacgaatcatttgaagcagtttatgccttttttgtttttttcgaagagaaagatttatgccggactgaaaaatagcgaatcaagtatttagtgaccgtgtgatattgcagtaaagactgcctccacgttggacatgtagtggattctagttcaggctctcctgcaacatgtttttgtttcaattcttttacaatttaaagcatatgcttattttaatgagaacgaaaaagaaagcttaactctttttaaactcgttaaaaatggagttatttactgtaaagacgtcttacagcaattaggaagaatatacattgcatgaaaggccttttgaaacgtttatctatttgatgattgctgactgcctgttgtatgtattctattttgtgcatagactttcttgttggttgaaaaaaatgacaggtggaaagatgttggtttctaggtgatataaaaaatttttaaacatttttctgatttttctgcagtgacacgtgt

SEQ ID NO: 41659 - DNA, 2172 bp, Homo sapiens
attgtccttaaaaattctgctccccagtgctgctcggggagactgatttcagtaataataaaactccagtctcccatacagccggctttgcgtgactaagtctttatttgcaatccccctgtcttgtatcagttctggctagtcagcgggcaaggtgaaggctttccttgggcggttaccatccgaagctttaattttaagtataatggcaagctgttggaaagcttttttttttttttttttttttttttttttttttttgagatggagtctggctctgtcgcccaggctggagtgcagtggcgcgatctcggctcactgtaacctccgcctcccgggttcaagcaattctctgcctcaggctcctgagtagctggaactacaggcgcccgccaccaccacgcccggctacttcttgtatttttagtagagacgggcgttcaccgtgttagccaggatgctcccgatctcctgaccttgtgatccgcccgcctcggcctcccaaagtgctgggattacaggcgtgagccaccccgcccggcctggaaagctttttaagttcggaaagtaatacgatctggatttcttttcttttatttatttatttatttatttgaaaaaatgtctcgctctcttgcccaggctggagtgcagtggcacgataaatcacagttcgctgcagccccgggcccaaacaatccccccgcctcagtctccgaagtagctgggaccacaggtgtgtgccaccacgcctcgctaagtttttaaaatttttttaatttttcattttttaattttgtagagacggggaggaggaagagggtcgggggcgggggggggggcgcctccctatgttgcccagcctagtctcgaactcctgggcttaagagatatcccaccccttcggtctcccaaagtgctgggattataggcgtcagccaccaccatcattggaagctagctaagcctaggctgggcagatacttggacactttgaggggagaagggaggggaagaagttggaagggggaacggaaaaccactctcctggtagcagtctctgcccacaacaaaccttgccttctgcccttaaggaaaatggcgcctggcatagatgcgcttccggccacggagccaaacagaacagaggaggcaagaggccggaagtgaccgccctttgccactccccctgcctcctctccgcctttaacttctcgggaagatgaggcagtttggcatctgtggccgagttgctgttgccgggtgatagttggagcggagactgtgagtgccggctgcctcgacagcacgtttgcgacgctcggagtgaccttcgagcgactggggaccgggggcgggagtcgtgcatgcagcgttgtgtgacgaggcgccgcccgccgcggtcctgtgggaaaggagagagccagctgtcgggcgaacggggctggcggccgagtcgagcccacggagcccacgaggccgtgctcgggggtgggattgggggatccggacctagacggtcgtgcgcggggcgggggtgggctctggccctgactcctgcgcccggtgtgggaaggtgggaggccttttctaaggcaggtgttcacaccggccggaccggggcgttacccccacccggcttttcccacgcagctccttcgcgcggtcatttcttgactctctggaagaatccgccttctttatggccactgttcctttccatgtacacaccaggattagaccgtgattgtttgtctttggtgtctttttcttgagaaaccacctatgctttcttaaacttatagtccttgaagtttctggtactttggctggaagcgttaatgccctcttgaagccttacctttctaaatgtcagcctcacattgtgatcttagaattttatttcctcactctgcatatccactcctactcacctagagcttcaggttgagaaacttagtaacttccttattgtgtgtgaatttggcttcgcctcactaaccctgttccctgatgtactttagagtcacatgcagtgacaaacttagtcacaattagtttcgtcttcaccaaagggaaattgagtagaaattgcaaccaagattttggctaatagatttcacttattttagtgaaatatcattcaaaagtcgtctctaactgtctgactag

SEQ ID NO: 41660 - DNA, 1517 bp, Homo sapiens
ccaaagtggagcgcaaaatttttactttttcaacataaaagttagtttaaaatactttttctgaagaaaaaaagaaagaaatccgcattccccacagtcactggacaggaatctcggcgtggagacacccgttcaatttccaggggtctaccttcccctacccgggttcccgccgctcctcagcgcccagacgcacctcctagtcccgcccccatgcttcttccagccttcctccttcttctcccactgcctccgcccattccctcgcccacccgggaagctccgccccctccagctccgcaacccaactccttctgtcctgctgtcgctttcctctttcccgcccccatggctgccttcgattggctaaacctgctgggccgcggcggggatgcggcgcagccgcattctgattggctagacttaggcctggaccctagtgattggctgataggaggagccagcaagtgtggctgagctccggggtgtgtggacgccgctttgttgcctgaggtgggtggcggtggaagttaagggagtcaggggctatcgctcctcgagactcgcagtcgcggccactgcagtcacttcgccagttagcccttagggtaggagtcgcgccggcagcagccatgagcggcggcgtgtacgggggaggtgagtgagtgcggccggacgagagagcgcgccttttcggcgtgtggggtttgtaaccgccgctcccagccctcccctccccggcgttcccttccggtctccccctctcgggaccccggcctccccgccccgtccccgccccacgctctgcccgcccccggagcccacccggctcgccgtgctcctcgggctccctgaagtggcggctctctgtggcctcttcctgcctctgtccccggaggagcagggttttggggtgcgcgctcggttctctagggagcctcggggctgggcgggaggctcagtctagccggccgccgggccccggcttgggtgaccgccccagggtcgcatctccccgagtgcctcctggactcagctgtgtcgggacgcgtgtgcgcccgcctaaacttggaaggtcccggcggtttgcaagcgtggacggagggttcccagagtgtcccataggtggcaaagcgagcctcaagccgtagaactgactagggaagcggcggccacttagggtactgcctcctccccgtctgcgccccatgcgcgagctgcctcacctttcagtaactcttgcctgttttttggctgcggagtctccagagtgactcgtgggcgggtctgtttgagatcaattcaggagcacgtgtaatttaaggatgcccagaaagtttgctgggggtcctaggcgtgttattttttcactttctttgattagactgtggtgtggtaggaagattaccaggtgccgggggttacagacctgggttgaaatatccacctcactctttattaagcgctttggtcttgggcagtttatgtaactttccaacttcaggcctcatttatgg

SEQ ID NO: 41661 - DNA, 2004 bp, Homo sapiens
aaattaagatgtttattaaagcactatataggatgtcaagtttttaattatgtaaatacgcagctaagaatggtttaaaaattactgtgcatctggatgataaattattatgcagtaattcaaaaatcctgtttttaaaaaatagttaacgacctgagatgatttgaaactaaataatgaagtttatcacaagtgttgtatccctaccaaaaatatttagcctaaatcttataatgaggaaacaatcagacaaatccaaatgaataagattcttaaaaagctaatctcatcaaaatgtcaacaacattaagaaaaaaaaaaaaaagaaattgttccggatagagactaaagagtcatggcaaccaatgtaataaatggatacttcactggatccaggaccaagaaaaataaataaataaaagaagttactaagttaccagttactttcattgtaacacatcctgtaaatacaaatatctcttcttttttaatccatccaaacttgacacagacttgagtatcacaacaaaaacatcttcggtaaagtttttcgcacctcacccagcccaagaggatgcttctgtacttatagatgtatttacttcaacaaatgctggacatctacaaaccccatatactgtcttgtccacagcaggcagcaacaaaatgaggaaggaatagaaatgtcggaggtgagcgacttctccaaggtcactcactcctcaccaaagtgggctccggctctgccatccaggcggccgttccattcttgagttgttctcggcatctcggcatctcggcaaccaaacaagatccaaagttggagaggtgggcaaacctactttatacatcacttaccctgtgcaggcagggacctgaggagttattaacgatcgggaagatttcagggcggatgaaactctcctacaaagaagggccaaaccggccgcagccatgttttcgcataactggcaaaacgcgtttccgccaacgatagcgtcacttccggcgtctcaagccggcggtgaggagaatagaaaacttgccctcacttaagatggccacatcctgcctttgtcctcattggtaaattggctctctcagcttccgtgacccgcctcccttcttcctcctgcccgtagtagccatggcggccatgagtttgttgcggcgggtttcggttactgcggtggcagctctgtctggccggccccttggcactcgcctcggatttgggggcttcctcactcgtggctttccgaaggctgctggtgggtgctggcctagggagaacgggcgtgaagcgggtgcggggcgagaaaagggaggacgcttccagggtgaccttggtgggatccggagggagccgggacaagttgtgggcttggggcttgacaggagagacggagcacgagctatatgaggggttttcctgaagtagccagatagatcgtgtttacattattagcatttctaaaacgttgttattcaccatcccaattaatgctaatttgcggatgaagctgagtctagaaaggtatagagctgagatctgtatctctagggcacaagcttattgttgcgttccacctgcccaaaggctaggttctagtcccacagatgcaaagtcatcttgccgagaagcccacctatgctaaggaatatgaagacaggtaatatgtagacaggtaaagaggctcagggccaacttattctttaggcacagtaagtaccgtgccgcccaataatgagatgcagatgaactggggaggaagagaggtttttgttttgttttgttttgtttgtttgttttttgagacagagtctcactctgttgcccaggctggagtgcagtggcgcgatcttggctcactgcaacctccgcctcctgggttcaagcgattctcctgcctgaacccatgatagttttaggggtctacgaaagtcttttaatttaaatttcttttttaaaaaaaccataatgtttatgaatatgataacgaa

SEQ ID NO: 41662 - DNA, 1163 bp, Homo sapiens
ttaggataagcaggtttgccattacctgagggtatgcagcacaactttactgtcttactcaaggtcaagttcatcatcttcagctctttatcaccaagaatgaggaactcagccaggcacggtggctcatacctgtaatcccagcaccttgggaggccgaggcgggaggatcacttgaggtcaggggttcaagaccggcacggccaacatgttgaaactccatgtctattaaaaatacaaaaattagctgggcatggtggcgggtgcctgtaatcccagctccttgggaggctgaggcaggagaatcacttgaacccaggaggtggagtttgcagtgagctgagatcgcaccatttcactccactctgggcgacagagcaaggctctatctcacaaacaaaaacaaaacaaaaaagaatgaggaactctttggtgagcttctttggattttggaggcaatatgtatcatatttaaatagcttgctttgacccatttactgggaaatctgaaaagcaacctttggtctcatggttaatattttattactgtgtccacactgagcttctctacctgaatggaggacaagactccctgtgtgtgcatggaacttgtggtgggcatgaggagcgatggtgctgtcagaagggcctgaaagacaatctgactacctctgtatcttatgagtcaggctcctggaaggactgtggggagtctttcacagcatgaaaccagaaaatgtgaacaggcatctcacatttcctcttaagctgaataagagcttacctcatcctgatgttaagaggtgctcaaggagtttgttcattcctgtgaacctaccttgtggctaggtggctcatttataaacctaatagcagaaacctgcttacttttaaataaacagtgaaagagggaagcagataagaaagatggcagatgaaagtgaaaactgatatgatcactggcagtatataaagttaacatttccctcttattcacaaaaagaagtggatactcagctgggtgtgattggctcacacctgtaatcccagcactttgggaggccaaggagggcagatcacttgagctcaggagttcaagaccagcctggacaacatggtgaaacccaatctgtactgaaaatacaaaaattagccaggcatgg

SEQ ID NO: 41663 - DNA, 2182 bp, Homo sapiens
ttacacacacactcccacacacaccccgccctcccccacacacacaccctctatcctcactcgatcttattctattcgctctatttttgagccttggatgttaaagtaaggaacgaagcttagtggggaagcactgaagtgcatggcgcaaatttagatttaagcctcacgttagatttcagatttgcacatcgagtcccgcccctatccaatccggggacgtcaccgccctagtcttcggctgttttaaaagcaagcggtttttaaaacccccaatcctgctctttgtgttggcctcctcggagttgcccctctgcaagccaacaattcgggatagaaaacacctccgtggtgttttcccggggccctcccgcgccgcgttcggccgccagcccgctcgagctcccgcgccaacgcctcaggggttcgccctccgccccccgccgccgcgcccggcccacgcgcagggcccctctccagcgccccctccccggcacgctgcggctggcgctccccagccccgcctgacgctgcagctgggccggagactcgccattggattaaaaatagcgtcgccagtccgccccaagcccgcggtgcccgctcccgccccgcagcccgctctccccgcccgccccggctcggccggctgccgttgcccgcgcagcccgcccgtcagcccgctcgctggcgccgccgccgccggcagaccccgcgctccggctccggctcggctcgctcggctccggtgcgcgccgaggccatgcagcgccggggcgccctgttcggcatgccgggcggcagcggaggcaggaagatggctgcaggagacatcggcgagctgctagtgccccacatgcccacgatccgcgtgcccaggtccggcgacagggtctacaagaacgagtgcgccttctcctacgactctcccgtaagtgaggcgcctcgggggagggtcgcggggccggcggcctgcggcacgtgaagccgggggagaagatgcgcagtggcggccgggacctcttctcttcctccgggcggcagagttggctcaggaacactgcagttcggcagacacttagtgagcgccccagggctgctgcagccgaggactggctcgtgctggtggttttgctccgccagcctccccaggctggaagggcccgattcccagcagcttgcacacagccccgccgccgtttaaagatagatgaaatacaagagttccctgttccgaactgcacgttgcagatcgtttgcgtcctccgcggggcagagcgcagggcgggtaggtggacgggatgatccccccacaccccgggacacacacagcccttctttttctgggaccacttgctttgctcagggatccccacttctggacaattctgatttgctctctgagcttttcttccaccagttcccatttcaccccactccttttcttgtctttagaatgtcagggccaggcgcggtggctcacgtctgaaatcctagcactttttaagaggcggaggcgggcggatcgtttgaggtcaggagttcgagaccagcctggctaatatggcgaaaccccatctctactaaaaaagaaccccaaaattagccgggcgcggtggcgggagcctgtagtcccagctactcgggaggctgaggcttgagaatcgcttgaaccgggaaggaggaggctgtagtgggccgagatcgcgccactgccctccagcctgggcgacagagcgagactccgtctcaaaaaaaaaaaaaaaaaaatgtcagacgaaaccttccggtgcctccactcgggcagcagaaataggggatctactggattgcgatggttttcttaagccttccccaccttgcccttctaaatgagtcacttggactgacatgcgcaagtataaattattaaaagttcaatcccgagtcgtgacctcggagaatgaggaggaagctgagagggatcgccgccttccacccggggcggttggtggtggttttcacctggttctatgtgaatgtgtgagaagcagcaggagggtgaatgtccctttcaaaagtcaaaatgggcttcaaagtgactcagctgtctggcgtttatcatgtctttttgaggaccaggttatttttatccacccactttagatctcatatgtcacccggcagatctcaatgcattggg

SEQ ID NO: 41664 - DNA, 2910 bp, Homo sapiens
tttggaaataaaatttggttttgttaatattacagtgtccttttatgttaaaaaaagtagttcttatatgagcaaggcacactatctatgcagtctacaagtagtatctgtttggagcccttgtctctcttcccccactggattcggtggctgtagtgtagtagctccttacatctccagggtctgaggcttgtaggtgggagccactgctctggatcaaggtatgtgacctggaagcacttgggccatctctgggatgtgttttgcttggtccacacataaaatctaaatttccatcttctcttaaccattcagaacgtctgacagtcccaggcccgcaatgacagctggagccaaggggcagccctcccttcacacaggacacacagtccccagctggctccggtccctttgtgactcatgacctgactgggactctgggtatttggatttgtgacccttgatctagatgacttgtgaaatcctttccagccctcaggtgccacgatctagtggtcttgaagaaagaatcttgattatgagaagcatatatgtgcatctaggcaggggcagggagggcccatccagctgggtgggagacaagtcggtctttggtccagcatcggtaatatttctttaacactcaaatagagctcacattgaccatgattttccttgtggccctgggggtgtccgtttcaagctgttccttgaatagacaaataatttacagcaaaaatctccactttccttgacagtagaaggaattagtttctcaggcatcacgattttcactggcagttggtttcaaaggaaccaatttgtgagactctttccttttctcagttatcagaagccctttggaaggatggtcctgtcccaggcctctggtgtttgtgacttatagatgagcctgaaatgccccaagagagggaaagaagattcactgaaacagagaaggggatagatgatgagaggaatgtatggtgtgggggagagagcatgaaggatgggtcagagccatgtggcagaaacgcctttttacggggccaccaccacgcatggtcttaataactagcatcacatagtgcttgcaaagggccaggctcttcctctatattcactgatgcggaaacggatgcacagaagccttgcccaaagttgcaaagccagtgagtggcagagctgggaattatatcaggcagtttggctctggagtctgtgtttttgatcaccgcattatcctacttccctaacagttgttccaagacttatttcaggctcccagtgcctcagtgtgtggatggtggcaggtggatgacaaaagggggcgtttgaagtttgcagaattaccaggtagcccagttatgagggtttctcactggcgtcttccaagttgagtcatttctagaatatatacttcccagtattaaattaatctgctataaaccaaggttaaatctagctttttatatatgcatgcttaataaacattgtcatgcataaaaaggcagcagtatttatttgtggtaccgccatttttacttaaatatgttgaattgaattttaagattaacttgcacttgcagtagataatagttactataaaagggcatttttttcttcaaaaaatattttctctatctttatgcattctaaggcagtgctttcaaatgttttaaagctgaacactctacctcatttcttcctccaaagataacatatcttaaataactctgtattctgaataagctgcatttcttaagcgacaatttatttgatttctcatctaaataatcctcaacacatacttgctggtctcaacttttcatcaacgtgagataaccagtgttctgcttcaaggtggtataattttagctgtgaacataagagctttgtttcccttaacctctattttcctaggttagacacatgtaacctttctgattcacctttgaaatatgagtaatagttcgggaatgcccctgtcctcttagcttaggagatttggggtttgggcctgggttaaacacttactggttcaaggtttattgtttaaggttaaaaatttaaatcaacagacttcatacacttttgttttagggacaggcagacatgtgtctatcttccttttatcctgtggtttaaaagtatctgtgcaagtattgctgtgatgtgataaaagcctcagtcttgctgcttgcttattaattaaagcattcggctcaggggaatatggtggactgtgtctggctgtctgtgtggtgcactctgttaaacagaaagtcctgtgtaagcatttgggagagattctgaacactgaaggcctccctctaattttagctgatctgttttgcaattgctgatggagaaagtaagtacagtatcttattaatatgacagattccttagttggatgctattttggtgacttcctgggtctctgtgttataaagttagtggtcaggactagccattgcctcaggtgtctgagagccagctctcaagtgagagtgtgtgttccctgaaggcagggccgactcttggtcaagttgggtctctgcctctcatcttgtgaggtgttgggcccataggggacactcaggtgatgtcactggctcattgctaaatgggaaacatgctttctgtaatctaattctttggttcttattttggatttttggtttcttttagggaactgccttgtccagagcctgacctttttttttttttaaaggaaaaattatttaaatttgcatatatatacaaaagtagagagcaaagtataatgaatctctatgtacttgatgtgcagcttcaataatcatcctgcaaatctggttccaccagtttccctaaactcttcactcttctctttcatttcctttctccttttctcattttttctct

SEQ ID NO: 41665 - DNA, 577 bp, Homo sapiens
atgctaggattacaggcatgagccaacacacctggcctctcttttaacttccatcggaaacctctcctcccaagcttgctttgaaatgggctgtgacatttggtcactgcgtagcaagtcctgtgagaatgagccgagtgcctgactttagaaagtgagtactttctaaagtgtgtgtcacctattgtcctagttttaagtaaacaggaagagtctcatcctgtgttcttcataaggttcatagtgcagggcctggcacatagtaaacacccagcgagtattggccactatcattatttaccttctttgggctgtagttttctcatctggaaagtggagtttatggtgggttctgctctgcttgccgcttagggctgttaatttgcatgaaagtatcataagtccatttcatttttatacattagccacagcagaacgggatctctccgcgcatgtttaaggcctttgtaagcaagagccacccggaattctcctctaacaggcagcaagatgcccaggaattcttcttgcacctggtgaatctagtagaggtgagtagtcagtcttcacggatgct

SEQ ID NO: 41666 - DNA, 880 bp, Homo sapiens
ctgggtttaacacaggctttctctggtgccagtgaatgtccattgatttgtagatagtaagacattgttaggaacatgacttcattctaagttgtttttcagagctaagtgtgagtgatatgcggtatctcagcacttatcctttacaaattctttacactgtacttcagtaaagatcaaaagacaaatctgaaacaggaagttcattaacaagtatccaccaggcccatgattttgcacttagcttcctttacctctggagggcgacaatagctgcttgttcattttcattctccgcctgggttatcccgaggaactgccatgcctacgaaagacaactgatgttaacattgcaagatgaagcagaattactcatgtgcttcagttggtttgttgacctgtgatggatcccctatgcagagcaagctgtctcatatgtgagcgctatataaaagggaaaaatattgtatgcatttcttcattcaaactctcttgtgacacctggctcaagatcctctgtcattatttccaaattcgttcagtatttatcctttcctataacccagtgcgatggaaacctctgaatttctgagatttcgttatattaggtatcttaaaaccaaaggataaatatataaaattatacgattgtgaggaaaaggggtggaaatataacccagaaatgtagctaaatgaaatttacaataaggaatctcaagatgtacaatattaacttagcttgtatgaatgaaagtcacttactagaagaattcacaggagatttaggaactaggaaaagcaaaacaaacaaaatctcccatgatgtgttcattcctctaaggtaatcactgttaaaatgcacaaaacatataacacaatc

SEQ ID NO: 41667 - DNA, 1627 bp, Homo sapiens
caagtcagtaagtaaggggatgggggacctaagttgaaattccctttgaaaatcacttgaattgtccataagaacagtatattgacttttgcgtacataccactatacagtaagtcccacagacactaaattttgagcaaccattgagataaactaaataagaaatgcatgtgttcattagttattgtaaaacttgaatggcatatgcacgtgtggagacattaaagccatcctggttttagaattcacaatcactaacagtaaatggggtatggatggagaacaccactccaggtgcttaacaaatgtccgtgtccttcctttcttctgcccttaaaaccacctggaaaccttcccggagcagccggttgaatggggttacgccagagacacaggtattgatttacgcagagagtacgtcgagggaagaagcttggagactcgtatagggttcttaccctggcactggcacttagaagcaccttgatgaatacgaaaaggaattattatttaccctaggttacagctcgagctatttcgacgtaataacgatcccacgtacactttaaaaagcaaacttctcacatacatcacttcctggaagccctagtcagcctttagcccaagcaatgctgagcccaatccttcggccttccgtagtctcgctcggtttcgcgagatcgaggctgagctccgccgcgccgccgtgggggcgaccccagaacacttccgggtgtaactggttgtgctgtctgtgtacttccggcagcctccagacagtttcttccgcttcctgtaccacccggctcaagtagcggacacggaacagggaactatcagcccgtcggcctccgggccctgcattctctagccatggaccgggaccttttgcggcagtcgctaaattgccacgggtcgtctttgctctctctacttcggagcgaacagcaggacaatccacacttccgtagcctcctggggtcggccgccgagccagcccggggcccgccgccccagcacccgttgcagggcaggtaatgagacgttggtgccactgcgccacggaagaggggacgcagctctggcagccactaccgcagccccgggtttgcgtctagaggaagtggagccgcggccgtgagcacaggacgatcgcgcgctggtgtcttgggctgggtggacggggggcgctcctgggttgtgcaatgcgggatgcgggctgaactttttctctggcactgcttggtagaggcgcagattccttagctaaaaatcccttgagctttcctatctgagttggaggcgtcactttttaagtttccccgctctccacctccaggttggttaatgagggaatgcctagttaaaactttttgtctgaggttgtattgtctgcagcttaggatggagcggaatgggcgatgaaagccataagcagaaggttagaagtaaagaggctttgcagataacccaattttcatatatatttttttctttttaagaaaagagaagagagttgacaacatcgagatacagaaattcatctccaaaaaagcggatctgctttttgcactttcctggaaatcagatgcacctgcaacttctgaaattaatgaagacagtgaag

SEQ ID NO: 41668 - DNA, 1983 bp, Homo sapiens
ggcgaattcacctaaactctgttctagggtgtgaacacaattacttgccctgaaaatactcagtttgacttttaaagagctaaagtggtaacaggtggggagagggctaggccaaattgtttgagggggtgtggaactgtggaatttgagtgaagagaaggcccaactttttttaaaaaaagagcggggcgaaataacttggggcacaacagtatgtctattttgtaggcatccctcttccccagggcaactggagcccaaaaagtgggtgagaaagccattccagggcagccagcacttccagaagtttaaggtcaggatgccggagctcaggggaatgccgatgcgccgggcaggctgtgcctgggcagttcattctgtggcagctggaggcactactcggccgccgcggtgcgaactgcgggcactgtggggcggagacctaggggcgggtcaacaaaggtcgggcgattgtgtctggaggcaaatccgacgtagacggcggcaggcggagcccaaagccggtgatgcagggtgcgcagggatcccacctggagagtcggggcggcacgttgagaccccaggggtgaagggcgggggatcccaatcccagccctgttttcccctcccctttccccgcctccttctcgcccctcccccctcctcccctctggttggaaagtttctagaatctcttcccagcggcctttgcggttccaacatggcggagctgacggtggaggttcgcggctctaacggggctttctacaaggtactgaccgttttgccactttgtcgagtgttctgggtgctggagcgcgtttgagggagggttggtggtcccagagagtgaggtttggggtcggaaaggcagccaggccaaagctcgaggccgctggattccttgcttctcccccctccacccgcggtttaacggtctcgggggccggggctccgttatgttttgaaacaacacgtcggacacctcttgcattttcctagttatgaaccctcttggttgctagtgcggttcttggcgggccggtgggaagcaactgagtggctgctgggcggcgggagctccttcggagcaggcccgagctctgggaggtgggggagtcgtgaaaggaggcggtgggattgtgtggtctcacccgctcccccgcccctcgaactgggccgggcgggagctcctcagcccgctcctccgacccctccccaccccttggggcgggtgtatcgcggaatctttggaattcacccttgtatttgagttttgggccaacaaatctttagtgtctgaggagaatgggggtaccggattgagggttaggatcaaatacagaaaagcagaaaaccttgaattgtggcgggttggaatatttttgcggcctgggaaattgggcggcgccttagcccctctattacggaagaaaaggagagttgtgagctttaaagtaagatttaaaatgcgaaatggatcagggagataggtggagaggtgactaatttctttatatcactgcccctgtttttggagggaggttttgttttgttttgttttttctcccacgaggttttttgtttgtttgcttgggaggaaggacatccattactatggaatcggggctgaaaaacgtaagaggaatagagtagaggaatttggtggggcattcagcgttcacatatctgaaaatgaaatcctaatagtttattttttgccactatagcgttcttttctccttattttcccgaaatacgccaggttgttagaagatcaatacagaatctccccagctgttgtctgtcagtcaatctcactaagccagcatctcaaatgtttgagagtcttggctatttttatgaagggccttcttctaatacatgagtattgtgcgtatgcaaagtgaattctcacaggttttcatttcagcgtaccttttatcctatgggtttttattttatttggccacgattttctat

SEQ ID NO: 41669 - DNA, 1323 bp, Homo sapiens
gtagtgagccaagattgtgccactgcactccagcctaggcgaccgagcaagactctgtctcaaaaaaaaaaaaaaaaatgtggaaataaggtttctgctacagaaggaaaaactgtttacagacggctcctgtaaaattctaacaacgcattttcgaggctaaacgtgggctaaactaggagactaatacctttggcactgccctgttgtttcctaacaagacaggcccaaatatgttcaggaagcatggagaagacatctgtcagcaaaagccaaagagaaggacatagcaaagtggagctagtgctgtgaagatgtgttagggcaagggcacttataatcaaatacgtttccactaatctccgagtccatgacagcctctgaccttacaggagttccaggcaagcaacacctgcagagcccgtgcggacaagaagctggagaaccgtgcagaaagacgatgtaaaaacacaaacccccaagagagcgagccaacagggttgtgtcctggtgagtgtgactccccaataaccgaaacctcccgcccgcagtcgcactaaggagcacaacttcaactccacacctccgaggcggggagctgaggttgaggcctgggccggaggtcgccaagaagaccggaaggccgcactcaccatggctccggctgggctcccttgcttccaccgggagcacggctcatcccagctcagaggccgcggccaacacctgcacgcctttaccagagagcgacgcaacccccaacctcaagcacaggcgccctacgcaacacggcaggagcagccgcaaactaggccggaaaactgtcgtaaaaggggacgcggaggagaaggaaagtcgctcaagcagtggacagagcggagaaagcgacttcgggttggttgaagggtgggcggatctctttatttctgggtgtaggggtggggcttctctgtgttttctgtcctttgctcctgggcggtgggtatttggaaattcttgcagggaagggcatgggcagccttactcagaccgattttttccccctacatcttagcacctcgttttgcctttattttatgttaataattgtcaagggtaatgaatgtagttaaacatgctgtgacatttccaccacgaacccaaacaaatatgttgtaacccagtgtaggaaacgagatgcccagaaaaacaaatgaaaccaaccacactgtgtttcagggattgctcggtagcattttttaatgtaaaagaacttcatttaaggatgtgacttgacaagactttgtgaatatttgggttttcgttttgtagaatgggattaaa

SEQ ID NO: 41670 - DNA, 2101 bp, Homo sapiens
aattatctggagcgtgtttgatctgggactgcgtagtcagcttctgctttatttgtttgtttgtaatctcatatttagcaagccgggacggtggcagcaagggagaaaggacgggatggaggagggggcttcgcggtaaccacaccccttcctaatgagttaatttccatatttgcgcctcccgcatctagcgccctctttttttttttttttttttttttttttttgcctgacgccactgtgctgttgcgtcttgcgcagcgcagacacctccactctggattgaaacgaaaaagctcgcggtaagagcagaaaattggtctattgatacattcgctccgagtgttgatcttggcatcaccgatagccggttaattcccccaccccgcccccgccagtgggtcgcacgcggattgccgagggcttgcaggcactcaggcagacgcagacagaaacccacatcgaccccccccctttccccgcctccagctgtccgaccctcaagtctctttctttttcttttttacccaactccggattattttccccctcaaggtgagggcagtgagagcagcgagggcacagtccgcacaaaaagggggaaaataatcgcaaaccaaggaaccaaaagtgaaagtttcaaactagataccaaccctgatggaggttgggtgctgacccgactgtgggtacttaagagaaggaaggagggaaactgaggtggtgagattatgtccacagtatgggtcggttaaaagttgtagtaaagaagttttgggagggccctcactagaaactcaaggcgggtttcagctgatttaacctggtttcctacacatttttgcggtgattctgctctggaaattggcgaaagagacagacctttgcaattgctcacccctccctgcccccaaccaccctgcttactttcgcgaagcgcattaggatgtgggctctggcttgagctccaaaatagcttgcttgtcaattgcgagctgcagcaatatcaaagtgaactgtcccaagtaactcttgtctagaagctgggaagaagcttaagcagctcgctttaatgatgatttgtagctcggcgaggggcacggacagcaaacaccccgcaggtgtgtgccgtaacaccatcatccggacttgaatgtagattactctggcgatcgtttgatcggccctttgaaaccctttacaattgcctgtgacgaacggccagtctcagtttttctctgaataatccctgagggtaagtcctccgggcttttaaagagctctagtattttttttttaaagaataaaaagaaaaacgttcgattttagtttagacctcgtcaacttttagtcgctaacaggcatcactcaagccagtcaatacttaatgaccgttagttacccttgctgtcttcctagaaaccatatacatatgtgtgtatatatgtatgtgtgtgtgtatgtacctacatacatactttgtgtttataaaaaggagaacaatgttattaatttcattttctttagtttcatacctccttgcctgtttatagaggtgtgtgggggtgtttattgtaaacatgcattattattattaatgccattgttaatcttgtcttaatgccttctctgttctctctgaattatacctactcagtgggagttaacgtaaaggttaaagctttacaaagtaaaactagagtttaacccccctcagcaccttcacaccaaccgctgtcaccaaaatgaaaatgtagtgctgttcaacctttaatatttacttagagtatttacataaggggagggaaatgaacttttgtctgaaacatacaacaagcggcactttgattttataaaataaatgtcaacaattgctagggcttatcaaactggggtagggagtggggtggaagtgcagttggattaaaggcccattcctgccacttcagactacaaagggttacacataataagtgccgaatttgcctattgcaaaagttttcttggtgctttctaagtcacaacaggggagggggaaagctgtcgtttattatccagttctgggcaggagcagaccccagtaccaaggggctcttagctt

SEQ ID NO: 41671 - DNA, 797 bp, Homo sapiens
catgtttgcttttatgtttctatataacatgtctatattgctaacttcttcatttttcagttttaggtgccaaaaaataacttcccactgcagaagaggaggttaattctctttctccctgcctctcccacacccctgtccataccacactccctgtccccctctccttccaacattcttatgtcataatttttgcctggtcagcattagggtttacatcacaatgattcttcacagctgagtcatactgtaaaccatgacattgctttttctttcttatacaacttttgtttccctgataattattttattttttccttttgctttgtttttcttttctgggttttattttaatcattagttcaatgtgtgctctttggtatttgtattctcttaggatgttcagacacatcacatagtctcccaattttatctccctgaagattctctcctggagctttatgatgtgtcccaccttggactagctgctctcagagattcccttcactatcgctctggaatttccctttaacagtccctgtgtgaattctgcttcctgtatccattgcttcctctttctggtttactgacaacattctaatagctttctgagaaagggaagaagacaagtaaatgttttgaaaacttgtaattcccaaaatgtctttttttttccctaccatcatacatgataaaagttttgttagatataaagttccgtgttagtaatcattttcctttagaattttgaggacattattcttttgctttctaacttccagtgttgttattaaaaa

SEQ ID NO: 41672 - DNA, 891 bp, Homo sapiens
tccaagcacagagagaaaagtgagaaatatcattaccaagtgtatatgttacagtaaaatgacatacatagaatttttttttctaaatgtttcaaataaacacaacattttctaattattcaatgacaggttttacctttaaatttctaagctgtagcacactcctgggctataagtaaatatgcacacacacacacacacatacacacacatatttttaactattatacagtcaaattaagttggctggaactactgagtaatcccatgaattaatgaggtaaacatttgcccccactgggatgtggaagacttccaggactcccaagcttacacctgcagaaaccgatgattcacctctgagtcactcggcaaacgttagcaaggagaagccagctgggatacaggggatgcacttggctgctggctctctctcgctctcctggaataatgacattaatgacacttccaaacagctcacccagtcacaaagtgggagattacaaaatccatgtggcagctgatttcctaataggaggcattaaacaggacattgcatgttttatgggctagggttgattagactataagacttaaaatatgtagctaaagtggttgaaaaataggccttggaagttcagatcaaagcattacagaggggtgattagataaataaaaagtttaagcctaactgagcaaataattgcacatcccctgaaaagctcagttcacagggattgatcaaatgtgagtcaccccaggcacagatgtctttctaagaatatttcttttaatttttttaatgtacatcaaaagaaaaaaaaatctgggcactgaccagcaaatactcctgtttgtataagaaaagcctctttaagatactgacaaata

SEQ ID NO: 41673 - DNA, 755 bp, Homo sapiens
ctaagtgtaagggggaaaggagagggagagggagtgagagaacgcagctgatttgtagagttttttcataaaaaaaagacaatggctgtccagacatggagttggtggtgaaatatggtaactgccacggctgcagctggctctctgacacaagattaataagttgccgtttcctagccgaccagaacctagtgggaactatccagcattttatcttgaattgtgggtaacagccttactgcaagctggcctagtttactgctctgttttttccacatctcccaaagtgcagcaaacatctgtgactctaatgaggtcatcattgagggtgtccagcgagctgggccctgagaactgacctcacctctgcctgaacataaagtacaagtgctgtggggaagcaggacaaattaaatgggggagctggcacttggctgtgagttaagctcttaagaaactttttgctgtgattaaaaaagagagggagagagagggagagagagagagagagattgaggttcagaaatgacagtacaacaaagcagtagcaagcctacagaattacatttaggcctcactgatgaatattatcactgacatgaacaagcaaagcttatctaggccttccttcttgaaaggctgaataaaattgaattgccaacttctgcattttaccacattttggtggaaatgtctcagagacctacatgatttaaaaggaaacctgggagaattcaaccacaaagtgtatatat

SEQ ID NO: 41674 - DNA, 760 bp, Homo sapiens
aatcaagtagttgtttgcctcactcacattcctgaggcaatctggttccagctgaactccttgggaacagtctgggctatgtacccctggggcatctgccccaattagcattgacccttgtgggcctccttgctggctctaggttgctcccaacctcttgaactctgggtaaaccagattgctttaagagcctccaaagctttccacagccccaagatgaactggacatccaggctcaccaacagaaattcagtcaccctgtagcgcccaaatcaacatggcctcctccaggttctctgagccagaggagagacccatgtgttgggattattgctatgactaagaaacaagaggaaagaaggctcaaagagtgctttgccaggctaaactcagtagtatgtggaaagagtacacaggtctaaagcctcacagaactaggttggactcttggaccttctctaactagctgggtgaccttggcaagtcaccaaaccctatcaagcttcaatttcctcatgtgtaaaatggggacaaagatgtctctcctgcagtatttttgcgaaaattaaatggtttaatgcatgtaaacatgttcagtaaaatgtctggcttatagttggccctcaggaaatgggagttaattacaaaaaataaaaaataaaacccatcatgtttaaccagggcaataccactcctgagaaaatccaggcccacacgattcttgaattccctcttttttgttgtggttcatgatccgttt

SEQ ID NO: 41675 - DNA, 1743 bp, Homo sapiens
cagggctctgcagttagcaagtgggaaatatgggaaatagatatcaggcccgactctgaagctcagacttccttctccaccccacactcctgtccggactatttcacaagtgatttatagtgtgaaaaacaaaccaggagaactacacagatcctggctcccagtaccattctctaataaaataaaaataaaaataaaaacagggctccttggaaaaatggctgattccagaactatagcaggaaaaatacaagatcagcctggaccatcttgtaggcccaaaaagtaaggaagtactgaaaaaaaaaaagtttgaagaagacacacacacacacaaacacacacggatacacttatgtctaaggggcgtaagagccaactgaaagagcttctagccaaagatagaacaatttgggacacaaagttaaatagtgttggattatagcccaaagtataaaataaatatccgtgagtcaatactgatataaataaatgattgactaaagaaataaatgaggaagaatagacaagtttcccaagcaggagactgccaaatagcttgtgtggatactccaccctcaaggaggtgaaatataactccttaagtacagactgcacatggtaacttccttcaaaaagcacagtatgaaaaggggtggggaagagtaactttatagcagagaaacctgacaaacactacctcagcaggcaatcaaggtcaacatcaacaatgataagcaatgttgatagtaagtacccttgatatgatgtcatgagaatggcactttacctctgtagtttccctcccaaaaactcgtaaccccagtctaatcatggggaaattatgagggttctcctagtgagacatcctacgaaatgcctgatcagtacttctcaaaaaccatcaaggtcatcaaaaaccagagaaatctgagaaactgccaaagtcaaggaaactaaactggacaggattctggagcaaaaggaacattaggtgaaacctaaggaaatataaataaaaacatgaacatgaacatcagttaataatagtgtatccatattagttcattaattgtgacaaatgtaccatcttaacataaaatgttaggggaaactgggtggggtgtatatgggaactctctgtactatcttcgcaacttttctatacatctaaaactattctaaaattaaatttttatttagaaaaacaaaaaccagagcctgaatgtaaaaacgagtttcaactatggaattggccctggaagaatctggagtacaggccaaaaaaagaatttctcattttcttggaaaacaagaaagtaccacctgacaaaatgcttgccttccatcacattttaaagctgacttgcctaaccgagtggctatctgatgattccaaatgaggaagcaatttgccaagtcataaagcaatctattccatggttatctgatgacatctatcaaagtcccccctgttatctttctcatagcacacattactcacttttcttttagaacttacctcttgtgaataagtatttcaacaattatctgctcaatgtctatcttccccagtacactggagttttaagaggagagaaacctctttctgcactgtattcccggaacttagcagagtggtacctcctaggtgctcaataactatttactgaatgcttgaatgccagtgcagtctagaggagcaatgatcaacactgctaactgtggtgcagaaagaatgac

SEQ ID NO: 41676 - DNA, 1835 bp, Homo sapiens
tccttaaattaaagaaaggttcgaagtttagtttgacattcacctctgcctttataaaacaaacacagcctataaaataacttaaacgcccagagtgccgagtttcgtcgggccctggctgcgccgggccgagccctgccccgcggaggtcgccgcccagcacggtctgcagatggcagcctctcgcggaaagccccgcaacgccgcttcctgcctgggggcggcacttggggcccgcgccggggtttcagaaacctgttcgagccgttcctttatggcggaacgttcttatttagtaaatatttattccactccccgaggacccagcactaatcactgccacttctctttaataataaatggtgaacttcaaatgcggcagaactcagccggctaatcagtgctcgccgggaggtgcaaaactgtctgaagcccaccggtggacatgaaagacggaacatttcctgttccagctctcggtggcccagaataaacttcagccgaatgagaggatgtctaggcggccgccccccgcgcgccggcccgggagcccgggttccatctgcccgcggcccggaggtgcgcccctgcccgcttcgccccggggaccctcggaacccgcggctctgccctccacacaatctgggctgccgctcccttgggcttttcgtgaaagcttccttttaaattcgctgtttggtcgcaagccatttagccctttccgtgggcccgggcgaggggcggagagcggagagcgacccgagctcctgggaacctgggggctccgcgctggggactccaggccgcccgcctcggctctggccaaggggtcagcacgtggggtggcgtttgccccagcattccagccctttggtctccaaaggctttttgtattcactagggaaggtaagggccgcccctttaatggttgcattttggaatgtaacaaactatgaggaccacccggtacgcttgcgttggcatcatacgagccccgcggtcccaccgtcacccacggctgatttggaaatgccacggggcctttggacatatggaaagacttttggcccagacacaataataaaaatattcaaaacgtcttgagacataactcatttatctacaattctgtttactcaaggtgtaattttcattctatattgcccattctggtgaagacatgagtgtttgaagcgggctgactatagttttatgataagccatattttagctttaaataagaactgcattgcctccaaagtattccatcttttgtgtaacagagacccacagatcctaagtgaaatttgttctcaaatttaacacatttctgtaacatatttaaacctgagttaatttagaatgggttgctggcaccactgggattgatactgaaatggttttgcctcattcacatcgagccctgcaaatgtactttaaattctacgctcttaataatccctaggcatggagaaaagattggaagttctttttctacaaccgctcactgaaaacaacacagtgcacggtttcagtgatgagcttggagtgcccctctgtggaagaaggtgggcactgcaatttttctttcctaaattgacttgccggtgtcttaggaactgtggttctttacctctgccaaccatgaaattcgatgttacttttccattaacttttgtggattgaacctcactccttgttttatatagaaacttaaatatgtgttgaaaataatgaatgaatcttcttgtctctcctgcccccaaagctttccaactgatgataaaagatgagaacattttcttgcaaagcccaaagctgtgttagtacctatt

SEQ ID NO: 41677 - DNA, 1236 bp, Homo sapiens
tcaagaaaatgttaagttgttttcctggaagggcaagaaacgtgtattgcattatagaacaaatcccactaaaacataaccaggattcattttgtaaagtgagtgaatgtgaaggtgtaactcacctgttcaaaacaccattttacttggagtaacttttttttcttctcttcacatgtgattagataagctctaagaaactaattgtgtggtgaagaacctgggttctgatatcagacagatctagactcagttaacagctgtgtgactttggacaagttacttaacttccgtaagcctaggttcctgatctctaaaatgagattatcagtacctcccttacaaggttaacatgaggattaagtaagatgaagcattgtgaggcccttccgcctcacagtaattgctcaataaatgaaaactattacttctactatctcaatactggagacagcactgcctaataactatggactctgcagccaaaaggcataggctcaaagttcaaatcctggcttggctacttacataatagtgtgaccttgaacaagttactaaatctctctgtgcctccatttcctggtctttaaaatagagacagtgattgtacctacccgataaagttgtgaagaggattaagtgagctaaggcaggggtctccaaccccggtgagcggtaagcgagcattactgcctgagctctgcctcctgtcagctcagcagtggcattagattctcataggagtgtgaaccccactgtgaactgcgcatgcgagggatctaggttgtatgctccttatgagaatctaactaatgcctgctgatctgaagtgaaacagtgtggtcccaaaaccatctccccaacacacagtttctgtgaaaaattgccttccacgaaactggttcctggtgccaaaaaggttggggaccgctgagctaatgcattagaattgcttagatcagggcctggtgcatagtaagcacatttaagtgttgactgtcattgctgttaatgactgatcatgccattgttaggaagcacttttcctcctttgatttagccatgacttcctcctttgtcctcccctggcaatcatgtcatatacaaagtccttttatgtgtatcatcccaaatgagtcttaggacatgataccaatgtttataaatttcacacaggtatttgtccaaaacaatatttaactgaatcatgaatcctagtatcaaacaatacaagta

SEQ ID NO: 41678 - DNA, 582 bp, Homo sapiens
tttacatcaacccaatcagacacatctaaaagactcagtgtgactcttttttctgaaagtgggccaggcgcggtggctcacgtctgtaatcctagcactttgggaggccaaggagggcaggtcagaaggtcaggagatagagaccatcctggcaaacatggtgaaaccccgactctactaaaatacaaaacatcagccgggcgtgatgctgcatgcctgtagttccagctgctcggctgaggcaggggaatccgttgaacctgggaggcggaggttgcagtgagccggaatcgcgcccctgcgctccattctggcgacaaagcaagactccgtctcaaaaaaaaaagagaaagtaaacagtctgagaaaagggaaggtaaacgtctgttacccaccttctcctcactcttcatatcttagtaaaggaccctagaaaataatcagtaatattagcttctatctgcaacccctcttgctatgtcatcaggcaaatgccaacctctttgtgacttgtttctcaatagtaaaatgtacataatggtaagtaaaagtgcataatcattaacaggacaggctctctaa

SEQ ID NO: 41679 - DNA, 759 bp, Homo sapiens
cataagagattgctataatccaaagttcacattcactgcacaccttgagaaaggacactgaggtagccacatcaacggaagtagataaggacaaaggagtctaagtgcgagagagtgaccacgtaggggcgggcaccaggggcctgcggagggagaagtgaaggggctcagggatgcgtgagtacaggaacggactgcaggggtaataaaccgccttgttcccaaacgcctttaaaagccaggctagttgccgttctaagtccatcaccttttgggtcaaatcatcattgacaacgcactgatgcaactgtcgccttccatgcaataaaaaaaatggatctggtgctacttcacctctccaagttgtttctatggttaccaagataaggaagaaaatgcaaagaggtcaaaaagagaacaaaagtcctgcaattctgtagggactttctccgccactgagcttggcaaagagttcatatctaatctaagttcaacactgcactagcaaacaagagctggagccaaagttatgagttcatgattataatgaggtctaacaggtgaatgtcacatggcaagagaaaaatgctgccataagacaattgcagtgtttaggttccataaactgtgaacttcatttagggcagacacaaaaaacataattgtttttaacaagctacaaccttaattttgttttcagaatgacatatgtaactgtttttatggctccatatttagaaatataccaatttgggccca

SEQ ID NO: 41680 - DNA, 2734 bp, Homo sapiens
taaccacaaacgtctgtcggtgaagtgtgctttaattcagcaaaaatacagcattcaatacatatacataacacaatatgtatacggggctgcttttaaacaacgccaaacctttaagtcaaagccttgttccagttgcttgtatattccttctgagcttgtcatccacacacttttttaacctaggtcaagttactgctacgggtgtttttgattgcagaagtttggcagttagcagtaaagaactacctttttatacaaattatcttcccctgaacctgtccaatttagcacacggcaagacagaatatctcatccattcgcctagaaacacgggtccaggctgtaccaggctcaggggacttgcaacgctttcgaatcacttaatgggtgtgatcaagatttccctagccccgtctcagccatttgctaaagaagaggcctgacttgtgttgagacgaaagctcttacagcttgatggaacccaaactgggacttctggggggattaactttcagtcacatacgttcaggactgtgcgtatgcgtgtcgggagacgcgtgaaccaaagaagccacagagcccgaaaaagacctgcaacaggaggtagagaccgaggaatcggccccaagctgcagactccggagatggccagacccacagacacgacttaatcccactcccagaacggggaggagggtggcagtggacagaaacagcgttcgagaacccggcacctttccacgctcgcttcttcccggacccacaacacagaaaccccccaactcggaacggcggcggggcgcgccaggcccccctcggtccgcgcaccccctttcgtcacgtccgggggcgggccggggcgccgggggcggtcccgggtggagccggggggccgggcggggcggggcgggggtggggttgcgggggtgctttgggtgacaacggtcaataatgaaggtggctgcggcgcggcggcaggctcagctgcgccgggcgggggcggcgccggggccgcgcctgtaggactcggggccgacgccgcgggatggggacgcggcgcggggagtgaggcagtggcggcggcggcggtaagcggaacttcggcccgaggggctcgcccgctcccgcctctgtcttgtcggcctccacctgcagccccgcggcccccgcgccccgcgggacccggacggcgacgacgggggaatgtggcgctggatccggcagcagctggtaggtgcccccgcccctccacctccattcgtccgcccccgcggggcctctcggcccggggtggcggggaaaggccggcggcgcggagccgggaggccagggcgtgggcgcccggctaggccgcagcggagacgggcgcggggcccagagccggagaagccccgtgcggctcccgggctcgtctcgcctccaagcccgggccgccgaggctggcgccgagcggccggaggcggccgcttctagccggcgcttctccgttacttcttcccccttgccgctccggggctgctgtggccagaggcgggagtcccgagcggggtggcggtgcccccagaggaaacagggcgagggagctgagcgagagtaggtcttggggagatgagagaggcgtgctcttcctgcctcgaacaatttgggacgtgtttgggtgaaggggaagcgaagaacctgtcttctgcccccactcgtcacggacttctggaagcgtgtcacgatccagagctgtgttgattcccgaggaggaggctgtcgtaggtgtctagccccctcagcgagagacgtttctccccaggacctggaaaggggaaagactgtgccagctgccggtctagcttcggaaacgatacgtattgtacgatagttacgaacgatacgtactgtcgtttccttcctacctcgtcctcaccccaccccgagtgaaacttttcgagtgtgaaccttacttttttcccgttctcctcaaggcagtttgaacgacacaggtttggaaggaatagttaactctccagtattattggaacatctggacaccaccaacaaaaaatcttagaaaagggtcatttaaggcctataaaaagtgccacctttcccagaattaattcagagagaaaaatcttatctgcctcctggcagctacagcgcagaaagtacagcattaaggcagctgtgacaattaggacagaaattgcccctggctgaagaagcctaaccttatctgtgtgatgaggccggttactatttaatttctaaatcgcattaacttaatgcttctacaagttggcgttttcatttactaattctaaaggcagtggtaaaatttagtgaaacaggaactatttttgtgggacgaaagcactgataactctttttcccttctgctctagaaaagcattttaacgttaagaccaagaagtgtggtgtttcagagccagccttctgttacttcgttttgcagcgggcatcattctcaaaaaaaaaaaaaaattataaataagaactgcctaccactccctcctacaaatgttgggtctctgtttttagcattgtaaattcagatatcccagatatatgctttattaggaaaccaagctaatgatgtcattataataccatcttgtaatactttggctttgttgcagtaagctgtagcacagtaattttactcagaaagttaattattacagatttgatcttatgcttttgatttgccaaatcttcttgt

SEQ ID NO: 41681 - DNA, 1249 bp, Homo sapiens
taaaaatctatcttgttttttaattatcatattatattaattgtttagtgggcaaataataaatgatccctaatatgtttctttttctcttctttttaacagagacattagtaaaaaccgcctcttaagtattaaaacatttctttattggaccatcctgggcttcagtcatgcctttattttcttttttggatcctatttactaatagggaaagatacatctctgcttggaaatggccaggtaaagtatatagtttttttaaagaatgcttgttaatattttatgggttttttatagcttttgtcataaagtaaaatttaatttaaattacagaacttcaagtattaaaatgcaaatataaaaaggtttaaattttgtggttaaataataaagtttcatacaagtgaaaattgacaggcaatacagtgtaatctcgaaatgaaactcaagttactagacagttttgctattcaaaaattagctcacacaggggatatgttattgcccctgcatgctcttcaccttagtattgtgttttattgatagctgccatttatctggtacttacttttgtgctaagtactttaatatgccccatctccattagtcctcccaataatcttattagagaggtattattactcccatttttcagatggcaaatgaggacttagtgtttgtttgcttttaattgcattgttgtttgcctaggaaatgctaccacattcttcattgcacactcacaattctaaatagatgtcataacttactgtttaatttggccacttttccgaagcatgaaattaggaaagagtgcattttaaacagtacactgttacactgtgttctgattggagtgctcatgttgagagactcttggcagagctagacctctctttcggggcttaactaaatgggttaggaaggaaagaaatgacagcagtggtagggactctggtggactggaaatggttgtcactcttagtttcccttttccattcccatcacttaagtattgcaaaatatgtttggagatacagacatacaaatttgcaattggaagaatataaagttttatctgctcaacagatctttattgaaggccagctattcccaagtactatactaggctctggtaagtaacttggtcatggagcttagaatcttgaaaaggatacagaaaatgagcaagtaaactaataacaaaatacaccggtgtaataaaggaaatgggtttcaaatgtagag

SEQ ID NO: 41682 - DNA, 1886 bp, Homo sapiens
tgtccatacccatgaaagaggagaatggcactcctcctgagagagctaagttgagacccactgatcatcggtatttctgggtcatttctagagatgataaaagcagacagcagacagataagcacaggttcagtatgacttttgattctcctcttgacaaatacattccccaaatgctctcaaataaaggaatattaattgatgtttcattgttgataatcataactattatttactgattgcctattatataccaggtaccccattctttttgtataccccaattcttatagaaaactgcgatttatcctcattttacaaatgaagaaagtgagatatagagaggttaagtaatttgttaagtaaatgataattgttagaaatctgtaataaaaaacaggctttttattaatttttttgaaccagtgttaagataatgattgttaggtttggaagggaaggtgagagttaaagaaagacacacacacagaaagagggcggctcaacagcatgcaggctttttgtctagcataaaacctacagaagtcagggaccagcctaatgccagagcccactggctgcttacaggctagggtacttacaggtgtgggcgggaggggtctgggcagtatggctcgctgcctggcaggatattgataagatgttcccatgatgaggcagttctgacccttgttctggcaggatgtcttcgtggtgttccttggacctttatccagcaagatacgatagggctctttctttagtggtcaggtggttaggcaggatgtttctcatgtcccgaacccccgtgaaatgttgcactttgaccaaggtctgcaaaatagcagggagcttacaaaacgatgcagtttggactaacaatgattactttgtaaactaaattattaaacttctggttgtattcttgtagagataaaatcctgaaactcttttggggttctgcgtgattaataccttagtaagttttggctctaaagcccaggggaaactttctgactggcaataactgcatttttacatggaatcctttgaggagtaattccatgatccattatccttcctttcagatacaggttttaagtgtaaatttcttttctcctgctctactgtactgtatccaaaaataccgtggcatgtgctctgctgtaacgtctggttggaaaggtttctgaaaatacttgtgattgaaaaggattttgttaccatttttactgtgcaacagcaataaagcagtccctaatgactacattattctaactaaaaatagtctgtgccacaccattctaaacccatctttgggttccagtctgataatgatatctaaaagatcattgtctataataataacacatgtaaataatgctttatgctgttcttctcatacttttaactttatgagtatagtcaccagtttcaaatgtacctgacttaaataattcaagggatttttagtagagaattaaatgactttttacctgacatttaacattatgttaacacgtaatgtaatagtgtattctttctgtttagatgtttggaaactggacatttggcactttggtcttcacagtcatggttattacagtcacagtaaaggtatggtactgaaattagaaatgtggacacattttgcaactgtttacatagttagttaactttcttcatttctttagccatagatactttccctttttccattttcaataacgattaatttcactggttactattttaatagttaaatttttgtcaaaaaattatttttaaagtttattattttgggaagcctcagctgatatttatgatcacatttttaaaaatctctaaaaattttgcttctctgtgtatagtgcaagacagcgtaa

SEQ ID NO: 41683 - DNA, 633 bp, Homo sapiens
atgtaatcctttaaaaattctctgcattgtcagtaaatgtagtatattattgtacagctactcataattttttaaagtttatgaagttatatttatcaaataaaaactttcctatataattaaaagtgttcctttatttaagcattttaagcctgtctctgtttatcacaacctgcactgccaaacttgtttcaagttaagttttactgtatttacccttcattatagcacagggatatcatttatgcctttcactgactgcagttttttaaaatgtagttcttacccagcttttatagatcatcatcagtacaactcctggaaaaggctctgataggaatgtgccagctgtagataccagcatacctcaactagaaattgcatcattcatgaaaagccagccaagagcacttgtgaatttggaaatggcctggttcatagaaaatatgtgcttttttaaaaatataggactgattgattgattgataatagaatgtatacgtccatataaaatattccagcttcctgacaaccagttatttgcactgcttcctcggttgcaagttagaacagacataattgtctaatctacatctgcttaaaaagttaagctgttgtctttgcccagttttt

SEQ ID NO: 41684 - DNA, 654 bp, Homo sapiens
gaattaattttctaactcaattcttgttatctcaggatttgatgaatctagctcacaaaagtcaatgctttcaaaatcaaaacacttttacgatcacctataattctcactaaaagctctgtatgttgttatgtaattatcatattgacagtttaacttcatctgaaatttagaagagctagttttaactttagaagatcatactttccatacataatacacggtattcagcagacatagcaaaacgttaccaatatccaaaatcactcactcacaaaaggccctccaatagactacaggtccgaagtcaaaagtgcaggaaaaatcaattcagccaatgagcctacctacaactcccagagcagactttcacctagaaacaaagttctactccaggaaagtcagaataggaatctaggtaggagtagctctatctctttccttctacctgtacagaggcaatataatatgattcactagtgaagagtgcagactttcaaaccagactgtcaagattttaactctactggtgccacttaatggctgtatgactttgggaaaattaatctttctgtgcttcaatttcttcatctgtaaacagagtgttgaggttacacgaatcaattcaggttaaactcttagaactgtaactag

SEQ ID NO: 41685 - DNA, 2210 bp, Homo sapiens
cgcgcacacacaccctcctcaaagaggcctttatgttccccacgagcaaaggacaacaatatcatttttactattcatacagtaacctgcacggaattcaactcacgctcagactgtacaatgccaaacagcgcttctgaaacgcgaagagcgtccagcagagtcaggtacttaattaccaaagtaaacaactcgaccacaagggtctgcaagcctggagaggactttttcccccccccaaacaaaaaaggagagtaacttgacaaactgttttaaaaaaaatcacaaatggcccttaactactataataaagcaattactcctcccacccccaagcaaataaaataggtgctcgaaagggcgctcgctagtctgtgttccctaattttatgaaatgagaacaggttgcacttccgtaccccctcccccaagctcagcagtctcccatgttttcagtagagaggtaaatataacctccaccaactggccggggaaactctccttctccaaaagcatgggacgcctcgagaggtgatggagaaaggaaaagggctgataccccgccccaagcaaaactgcctgggagacttgcggggtattggagccgggagcggaggagggagaggcgcgccgggaaagtctttccttctccccggccgggcggagagggaagccccggcttcggggcggggggaggctactcacccggaaccccagaccccagtccccgaccagacacaatggagccggcagaggggcaggggcaaggccgttgccccctcccctccccccgccccaacgcctcccccacccgcgccgggccccggcaaggggcaccggggccgctccccgcgccccaaactccccggggctcccgactaggcccggctccgctccgcctcctcggctctcgcgtagcggctgcgcccgggcgggaaggggcgaaggaggaagggagaggcaggcaggagagcccccgcctgggagcgggacggaggccgcgggccgaggctcggggctgcagggtcgccgcgggacggagggcggccggggcgggggtgcgcggcagcgccggcccccagccggcagggcgggcgggcggccgcagtgcctcaccatgttggtgtcctccaggcctctcccctcctcctccggctccgcagcgaatggacggcggcggcggcggcggctcctctcacgggcttgcccggctcccgctcatgcgcagtgcggggcggcccggcgcggcccgaggaggcagccccggacctcggggaggcggagggacggaggcaggcggagggcgccccgcgcggggcttcccccgggcgcgggggtcccccggggagtgggcgggggcggggggcgcggcgggggaggggcgggcgacgcaagccctccgcgcgccgacatcctcctgccgcgccgggcggtctctggtgggggcgccgggggacaccccacctccgtttcctacgcggttccttccggacgaccacggccgggtctacgcaggctggaagcgggcacgagcggcggcggataagttgagcagctgggggcggctgaaacggatggttgaggagcttcatccatcccagacctcccctccccatcagtatcaaaaaaagggagaagatagtggaaacacctccccctgccccgtgttttcttctttttccccccaatctcagtatcagacctacatcagttccctcgcgtgggcatcccaggggagaccttagtcccccccctgcggtggctgtcactccattagtgaggaccaggctctccccagacctgtctactgggagacagttggggtaaccctatagtgagatggggtggggtgcactgagacccaaggccgggctgcgggagtccaggttgcctgcctactgctagctctcagtatcccctcagttcggcccgcccaggataagtttcgggaagcaactacacattttttcactgagggtctagtcacgcagggcggacagtccaggtgtgacctgccctgggcgttaaatcaactgaggctgaggagcactaggattctgagctgaggatcaagtggacaaattcgtgctgcaaggaggacagaagactcctgtggagtaagtggtccttgcccttcagaaatgtagtatccagttggagagataagacaccttcacacaggaaggaaataaaacagctaagaaagcaaa

SEQ ID NO: 41686 - DNA, 735 bp, Homo sapiens
ctggccttatctacagagtgaataggatttcaccgaagcatagcactgacactaacaattttacttctgcaatctttcttttgtaactgaaatgaagaagtcctcaaaccctgttctggcccacgcaaaattctcccatgtgaaactattttgtttgggcaattgatggaaatagaaaatatgctgacgagaccaaggccctgccaaagacaaaggctgacctctggtgctgaccaaacacatcaaggtcactggcacggtctcagatcactcacattgtactgacgaaggctgtacctcagttttgtcaatgccgcctggcgatctgctgcccacacgaccagcttcgcaatcatggggtcataatgcacggaaacttcgtctcctgaaattgaaaaccacggtaacctcttcaagtcaaaacacgaaggaataaaatacaacgagcaagacattttgttatgtacatttcacgcttaatcctcataaacccctgcatgataaataacaacacaaatttattcatgaggaccctgaggttcagagggctttgaaaactcaccaggtgtaacgaggtgggccacccaacagcaccaggccctaacgtggtgattcaatggcacacaagctggctttccctgtcctatcttcttctgaatcttcttttcccttctcattttcaaagtcaacacaatctccctccaccctctcacattcccctcatttctgccctta

SEQ ID NO: 41687 - DNA, 1722 bp, Homo sapiens
gcatctacaatatttctggaaaataaaagcaagcaaacgttcatataaatggttgagtttgcatttatagactgatcttatgtaccagattgtgcttaaacctcattccatgaattaattcatttagttttcacaacccaaggtactcgtatcatctccaaggtgaggaaattaaagaagaaatattaagtaacttacccaaagtcacacacctagtgagtagctaactaagacctcagccttgactgcagagtctgtgcccttgaacactaaactgtcaatctttccagaatgatgaaggatgataacgatgaagcaaaagaagacaaagaagcaaagctatctacaagcctgagggttttttcactgccagagttattgccaccaaagcttagagctcaaaatttgaaacagagctggagtcaggtgagctagactgagtcatctgatagcgttgttcaaacttgggtacaagagtttttgacaaaataatttcccagctctgtggaaggtacatttgctcttcttgacaacttcactcttctaacaatgagaaggaactccaggagtctttctctgaactggacacctgatggggcacagctgaactgaaaaatggctttgagggcatcccggccccatttcttactagctgtgtttcgttgaggaagtcgttgatccctttgggcttccccggaaccggattataacaacgctcccacctaaggggtgctgcgaaagcccgatgtaaacggctacgagctgcagcgacggcgaggggagcctggaggatggcgggcccagtcctcagaaatggaaaaacagaagccaaaggcgcgctgaagcgtggatgtgcggaagcggggagaaagggaagggctggtggggatgtcttcctcccgacgccgtgactgccggcagaacccctccgaaagtgcctggggttttcctaccgtcctccccacaccgaccctgggttccgccgcacctcccaccgctcacgcgggtccgtgcacccctcgctcccgcctctgcccactgagccatggcccctccacccacctcggcggcaggagcaggctcgggagacgatgccaccggttcctctccgccgccaccagcagcaccgacaccgcagaggccgccgccatgtccctggagcccggccactccgtgactccccagtacagaggcagctgcgtcccacacgccaaacccgttcctccactacgaagcctcgtgacccccgccggccaccgtcggagcctgagcctacctttgggctgatccaagaatgtgagggcgtctccacgaacaccaatcaaagaccagagcccggcttcagtagcgacgattgggcagtctggccacgtgctcgtgggggtgtggcctttgtttctgcgtcccctggggcctgctctgactaaggcaagggttttctccatcctccccctcttggttgcctgtcactgtttcttcctgcatcccgtggggtttcttcgctctcgtcaccttctgggagaagaaccctggggaagaagccaaatgcggatggacagcaggatacacaattctctagtgctctcagggatgaaaaaataaataagctaaagtgaaaatctttaaaccacctgagcttaaaacaggtattctaactgactattgggaaaaagaggaagtcaaagagcaaactgaggaacatctagagaataaagaaactgt

SEQ ID NO: 41688 - DNA, 873 bp, Homo sapiens
cctgacctcaagtgatccgcccgcctcagtctcccaaagtgctgggattacaggtgtgagccactgcacccagcctgattcctccgtttttaaaaagatgctgatgatgctgatattttttatgaatacaggccagttgttttgtacaatatccttgaatttgggtttgccaaaaataaaatcagattaaatttaaattctcaaaaagattattgagcatacaaaataacagttcccaaactagagacctctgtgcagcttcctaaatgaggaagtacgttgatctctgttgtgcaaataaagctgcataagcttgtttgtattggcttaatgttattacgctgacaaggaagaaaaagtgtgttatggttagggctagcattttcagggaaatcaggatagtttaggttttgactacacatggctgtgggttgttggcctagggaaatatccaaactgtggcctccaattttatttttctttaacctgttcatctggtatttcctcatgattagatttaggttattagatttaggtaattagattcctcccttttggcaggaataccacagaagtgatgtcatacccatttcagtgcatcatatctggagctacaaaatgtgagtttgttccatgatgttaactttatcacttgattaaattggtgtctgccaggtttcctcactgtaaatatttttttttgacattccatatggttttgtctccgagaggtagaattgtgtttcattctccaccactccttctcaacattacttctgaataattttctgcacttcgcaaagttctacaagaaacagacatgactttaacaagaagtaatgtttaaatctgactgaagaaaatactgggggg

SEQ ID NO: 41689 - DNA, 728 bp, Homo sapiens
caggagcgcttttcccggataacaaagccaagactcccattcctaaaccctagctcaggtctccatctcttaaatccgagtgacctctacaaactctccctgagaaggtgtccagaacccttttggaagcgagggacagtgtcactgtctttggggttgacacctgctctgagtaactcacggaaaacaagttccagctgggaagcccttggacgcgccacacctccctacccgcagcccgtcctgtggcgcccgggactccagagtgcgtttagatgaaaggggaccgacacgtcagggccaccgcgggaagcgctgagggccactcaccggccagggacgcgaagagcgcggccgccgcgctgagctgccggggcatggtgggcgctgggcgaggttctgcagcgtgcggcgaagtccgggcaggccccgaatcggtgccagagaaacctacctgtgccggagaaacgaaaccacctgcttatgagaagcagccgaaaagcccgcccagggccgctgggcggggagggaaactccgccggccccctcctacccctacggagcagggaggggcggggactcggcgcagccgccggggcccgggcctctgggaccgtttaccgcacgcgcgtggtcccggcagcgccggcctcctccgctcataccctgggtctcctcctttctttttcttttctttttgagacgaagtctcgctctgtcgcccaggg

SEQ ID NO: 41690 - DNA, 738 bp, Homo sapiens
gtcgctgggtctttcaagtctggcagaaacatatgggcacatatcctctgggtcatgttgcacaaatgttctcaggaccacacatatgacggtattgcccatctccacgcccaaggtccgatctccagcgggtgagcacatgccctacacggtgctgaccaagggcaggcacacacactgttcactgtgctgtgtggagctgctccgcctccaacaggaagctgcagggacattccctgagcaggagcaagaatgaccttttccgtcacgtgtaccttttctttccaactagactgtagttgatctcaaggtcggagaccacgttgcacaacctctttcagatacgtgttcaccagtatttatttatttattggcattccctagtatttatttatttattggcatttagtggtgcttgggagtaggggacaggaaacaaaatactcatcactgtgagggaatattgatttatccaaggagttcattcagcgacgcccctgtactgggttgaatagtgttcccccaaaaactcatgtctatgagaccctcaaaatatgatcttattcggaaagagggtctttgcagatacaattggttaagatggggttgccctgggttaggatgggtccaaatccaatgactggtatccttataaaaaaagaaaacaaagaaatggagacgcacgctgagggaacagccatgcaaaggcagaggcagaaattggagtggcacagctgt

SEQ ID NO: 41691 - DNA, 2143 bp, Homo sapiens
attcatgtgcactctggcttccagttggccatttgagtaagtgatcgcaattaactgacgagcggcagggaaacacttcctggaattctcatctacagacaagaacaaactggggcggggcccatcaccttcacctacgcgccgggagggtggcggctggcgggcggggccgggctcgggccgtgacgccgagagtgcggggcgcgcggctgggagcctcgcgcccccgcccgggcccgcccccatcccgcccgcatacagcccgcatcccgccggggaagcgagcccagtccagcgctgcccgtccagtcctcgcccaagatttaaagcccgcaagttttgttcttgagaccagcgactttagctccgatgcgggaaggaaagccgacctccgatttggacatttaaagagctgggcttgaacttcgtgagtttcgctctaaactgcccttgaaatgaagctggacttggaggtaaagtcactgggaagctggcctggggcggggtttccccctcttctcgtattttagaaacggacagcggcagtgcagccctagtttgctgtaagtttccttactttgttactgaggcccccagagctccacgcataagtggtgtgaccagaaaccttttaacaagacccgcctgagcctgcgttagagctcccgctcggaaagtaaaagaccatcctaatccgcggcgctgcggaaccggtgtcccgtgtgggaggaaccgcggcgttccctgggcgtagggcccgcgaggccagcacagtccgcctcttggcggagcgccctgggccggtggttccgcgcggagttagtctgtggtcagttacgtggtgaaaacacggctgtgccgcggccgcatctttccgcggccgaggcctctctgggtgggagtgttggcttcctttccggatcgctaaatggggaaagttctggccgctcggcgggatacgtctccaggccacggatggttcgttctccgtgccgcggccccgagctgggctccctgggtctccagcgcgggctcccggcattgggggctgcgggccggcccctccgccccgcccccgccccgccgcgcctcctcggccgagcggctcgcggtctccggcgcgggaggctccgagtctgcccactccgggccgagcgaggtctctggaggagaagagtggcgaggaggtgagggcacgccggccctcgcccggcgggtggcgccaggacttcaggtgggaacgcgcgcttgggccgggggcgcgtggctggcgtggacaccggatcggggcccgccgccctggcccggaccgcgcacggcccagcgccgggaagtcgggaagccggggaggcctctcccaccgcgggccccggcagcccgccctctgaaagcgcggcggagaaggaggctcgtcccctccccggaacgcctttgttccctccggcctgcccgcgcgggtggccagcggctgggacccaggccgggccgccgcccaggtgcggcaggtaggctcgggggccgggcagctccggttggggcggcttcccggggcctgcgggtccccgtccctgaggagctccggctcctcggtggcgggacaggcccgtgcgcgggagccgcgaggcgaacgccgcgcccaccaattcggttgccggccgggggccccaggcttgcggccacccgcctccggctggagggctgaattcgagtcgaaagcccgtgtcgggctggaaagaagaaaccgccaacctgagaacgctttcggcgagttactggcgggggaaatggggacagggaagtgggcaggcggggagactgcagccgcagatctccctggcggggaggtcgtggccactctttcctttgactctgcctcatttcattttgaatcctgatgtgacagaggcaattgcttgcttggataccatataggtaaaagtaacagttttcaactcgactcttgactacaccctgtacattcttggccggtgttggttttcttaggttatggatcatgttaaaggtacaccgatgtggtaaccgcacagtggccgatggtggcctgaggctcatatttatggtaattatctgatgaaagtacatccatcagaattggatttgtgcgtctgtgcctttattttgg

SEQ ID NO: 41692 - DNA, 1877 bp, Homo sapiens
tctctcccatgctttttctatttcctattttcagcaggctctgaagtcatttataatttttactgcccctcggtgacattacatggatattcatccctgatttgcagattaaagcaccgaatcagagtgaggtgagggttgcccaaggttacacaataaatctggccccaaacaggggtaacccttgagtttctagtctgttgattggccactgacccgtgctgcaggcacacaaaggaagctgcacccacagcagtctgttgtggatggttgctgagctgcgcattcggcattgggcttgctttgtttcctgccaggcccagcattttcttctaccagatcggcaggcttgtgggcttcttcctaggtccctcccctgcactctgaataggaaagctggaagctgtgctttagagaagctttaagacgccgaaagaaaccagaagagtgagcgccagttgtatgtgcgtggtctccatccgcaaagccggagctgggcgcaacagtgttgacttgtaattgatcaatttagatcgggcgcaggccgggggagggcagtgcttttgatttaggctgggaaaggcctcctagtgactatgttcaatttggaggaattcagatgttcttttgttatacaagtgaagctgtgtaatacaaatgaggagttttacttttcctaaatcttccccttatcattcaagtattgaggagttttacctttcctaaatcttccccttatcattccagtattatcagtgagatctggttgtgatttatgtaaatggtggctaaaaaattcaaactactgagggggagaattctcattttacagcttcacatgctgtgctgaactaaataagtagcgtgggatgttggctttgtgacaggtcttttgtcatttttcagaaagcattttgacttgttgatgtcaatttggaacagctgaaaaaatacaggaaaataagataaatacgtacatgttgagggtggggacaaaatgaaggttctgaaccagctgccggcttacagtagccatataagcaacagcagcaatgcaccaacctggtgagtaataggcctgattcactggagagatactagcacctttaatgagtcagatagatgcacaatgggtgtgggagcagttggacttgtgggcacaaagtctagcaagaagctcagacttgcaaacaactgtaggacgtgcaaagcaagctggcattggagcttgccgggcacagctgctcaggaataggcagctggttttccctttgatccctgagattccaaaggttactttcctctttgttcccttcccagggtcaattagagtagaaactgcagatgcttttcagttgagaattttcctagaattctcaaaaatgtgtatgctggcttaaaatctgccatcaagaattctgttaccttgctttaagcctccagttccttccagatgtatggtggaggaggccagagggcccttgttttggggcttcagaggatggttgttatctggatgagcactgtggaaagactgagagagcaactgagagaaagtgggcccctgaatgaaagtgatttcgcaaattttaggcagatgccaccatcagaaactgatattttctgacgtctttctcaccttcctctagagcattcagtccagaaatgaccagcctgtccaaagggggaaattactgatattgatctgttccttagagcagtgtttcagtcttttttttttttttgagatggaatctcattctgtcacccaggctggagtgcagtggcacgatctcggctcattgcaacctccaccttcctgattcaagtgattctcctgcctcagcctcccaagaagctggaattacaggtgtgca

SEQ ID NO: 41693 - DNA, 1219 bp, Homo sapiens
ctctactaaaaatacaaaaattagccgggcatggtggcaggcacctgtaatccagctatttgggaggctgaggcaggagaatcacttgagcctgggaggcagaggttgcggtgagctgagattgcaccactgcactccagtctgggcgacacagtgagaccctgtctcaaaagaaaaaatatatatatatatatattttttattatattgtttattaaacaaataaaaataaaagatatctcatcagttacgatgtaaatgaaaaaattgtgtgtgtgtgtgtgtgtgtgtgttatgatgtacttcttgtgagttgtggtcaggctttgaaagccactatgtatgtgtgtgtgtgtgtacataaaagtaagtatcagtcccaggattcaaattcgaaccagtcccagtcaaattcaatctaattattttcaccacactaccaaaagtctttcttcacattttctatataaagttgaactaattaatacagcagtgaatgttacattgtatccttttgcagtttctcatctatgacattactatgcctgaattccccactggactttgaactcagtcttactcatctttggatccccagcgtgtaatacaggcccttcataaagagtgaccattattactaacaaaatttcctctcactgtgaaacctgctcccaattataaaatgaattgtgctctttcgaactccgttgatctattgtatgcagggtggatcatagagtcttatttcataataacctagtgatggaaaaataacaatgattcaggagtaggtaatggaccttgtcatcttttacactgaatgatgagatttccctaatttatagattttgtcatgcatgagatgccctcaggagcttgcagaaatgccttggcacgttgctctgctgacatgtgtcagatggctggtgtggaggtagagggagtctcctctgccaagcaagtctaatggaatataacactggtgccattgaggatgcaatgagaaggacccacagcagatccagagactgcattcataaaagctgcacagtataccatgttttattaaggtatagacagattagttgtgttctagcatagtggttttcaaagcctgaccacaactcacaagaagtacataacacacacacacacacacatacacacacacattttttcatttacatcgtaactgatgagatatcttttatttttattt

SEQ ID NO: 41694 - DNA, 3560 bp, Homo sapiens
ctagaaatacaaaaattagccaggcatggtgacaggcacctgtaatcccagctactctagaggctaaggcaggagaatcacttgaacctgggaggcggaagttgcagtgagctgagatcactccatggcactccagcttgggcaacaaagtgagactctgtctccaaaaaaaaaaaaaaatttagattccaggacccgaccctacacctccctaattagaatctcagagagtggggccctgggaatctgcataattcataaccttctcagagctctggtacacaagaaaccatgagaatctttgttctggaaacttcagagaacttggctgagggccaccccaggatttggtggcgtccctgaatctcccattagctctgacactgactagacttcaaatatcacagaaggcaagcattgaagtgtgtttatattcaaatagttttcttgttgagaatcagaaatattaataaaacttttgggagtcaaagtaatgagaagacaaggaactgaacttgccccctgatctgttatcatttggcagtaaggtacatattcaacaataggataattctgtataagacctgaatctgaccttctttcatctttcacactgacaattctgtctctaaacacaggattaaatgaggaactaaaattcaccaagatcctgctaggtgtcaggtacagtgctagctgcttccacacatttctcatttaatcagccacctgtgaaattgctatgatttatcaccatttggcagaaaaggacatttagggcacaagagattaaataagctgctggttgggtacattaagtattaataaataatcagatagataagttaggtagttaagtaagctgccagattagtaaacagctagtttcaaatcccagctccaacatttactagttgtatgacccttggggaaactcaacctctgagtctcatggcactgctgataaaacggaaaacatcatcctcacaaggttctgaggactagggatggactcaggtacacacagcacccagtacaatgtctggccttcagccagtgatagcaacccttcactcacctctccattcccttccagcccctgcattcaaaaacttttatttatttatttttttaatttaggaggctctttgctcagaatcctgaaaaggcttttgttactttattttttcttttttttcatcttctgggagcacagaataggcttctgctcctttaaataactttaacaggcaccaaaggaacactgctagctctttcttaattctgtaggtccacatttaggaaaaagaaattgtcagcctctgacttatttccagcttacaaaaaggctgtgatgttggcagcccggggaaagcagttcccgtgagtcatgctttcacctttcagccagtgaagaacaggaaatagtcacatcactattgccaacaagcacagcgaatcgcttccaccaccgggctttcccagatgacgtcagtgagccaagtgcagggcatcacccttgccagatggccccggaagagtctcagctgccctgtcaagtttagcttctcaagctccccagaaccagcatggcaaggatcacccctccagaaaaggaaatgatttctctgatcatgatcaaaccatgtcataattttagctgtaggtggtgagtatcagtgactgtattatagatggttttggttcacagctattttttttctcggtatatttactctcaagggcaaaggggtggcatttatcacaatgctatgattcactctactagactggctgggtttcatttcatctttgagttctagacctaaggccaaaaggatgtcagaatcgccacccagagctagatgcatgctcaatgcaacctggccatctctctcggacagtggccactaaacacaagctgcaatgattattgttgatgttagtcaattgatttgtcccccttttaataatccatgatccacacagacatgaatctaaaccttttttttgaacctatctttttcttactagttttcttacatattttggaataacaatttccctggttataatacacaatgtgtgaaacactaattgcatttattggtcctaaattcattcccaagtctaggatttggggatttagtgcacaaatccactttcttcctgctcatgttgttcatgactttatggattctgcttacatttcctcccaaagccttggtctttctaagcagaaatctgaccagcctctgttcctactctgcttcctccaccaccttgactgttaacatacactgttgtgggagaagcttttcattaaatacgcaaacaaatcaacaataaggaagaaaacaactgaagcacagaaggatgattgtaacatggacttgtgcttgtttaacagtacccatactgtttggtgagttgcctaaatacagagggagatggcaacttaacaggatgggtttggagtctgaattaaataaacaacatggcaaaagaaggaagaaaccaaaagttgggtgactagggcttcttggattctactcaacactttccacacctacaggcctctgattctatccccaccgctgctcctacactgtctatgtttctcttttacaacaacaacaaaaaaatagcacttgtttactgttcacaattattgaaataaatcactctaatttggattcctttatatgagaacttccatatgcttaaaactcccgtagcatttttatagtgtacaggtcataaacatgttgtctgaagatgggcaaagtaggtcgtagagataggaagtgagttcacatcacggcgtgagtcaaggcagcagcatatgagctcaggggccaaatctgagctgtgatcatgtgacacagtcctcaccttcagagatgacattctcccagaagtccagggtgcagaaatggataggctgatgttcacttttgaagaggaccacaatgaaacccttttaatattactcaatgattccacagacctcctgggtgttaaatcaggtgaatctatttttaaaaattgctatttacttttttaggtggctgatcaggacagtatgaaatttcatacagtttcctaacttgagaaaacatggtgatgcaattcctccaaccaggagggatttatggacagcggtggctacgtcctaatctgcccagaatacaggatgactaaacaaattggcaaacggacgcagctttctctctctctaagaaaagtctgctgagaaccctcgttcccactctgtttctgcctccaagaagaaaagcctaaaactcactttcttccggactctttcaaggtcagtggagttcctctggggttcatattcagatactttggggattgatgatggatcataaatgttgctgaagttcatttgagcccatggcctctggtttcagaaccattcagccagtcaaatatttaaattttagtgaggcaggggaaagggaaccccttcgggggctgctatacagcaacttatattcacaattcacaattaaatacacttcagtttctaaatatat

SEQ ID NO: 41695 - DNA, 627 bp, Homo sapiens
aaattccagctcttaagcccctccacacatcttctttatactgtgaaatacaattgcttatcttggcacagactcagttactaaggaatcagacaaaaatgtttgaaaatccttttagtgacttgctggagtccacactcagtagatacttaccaaaaacaaaagtgcaggattgttctgcaaaacgagctagttgtttgacttaggtcaatgacaacctgttcagacttgacaaagacctatttattctgggaaggagtgttatctattatgaaatcttgtatttgaaaagctgagaaacaaccctgtaattcctgctttatttacttgaaacaaacatatgtacctggaaacaacgaatgaggccaagtcatagatgtgaacatagtttagcttgaggacagacgaaaggtcaagagaaccaagttctgtttccaatcatctaagaaggatgtctctgtgtatgtttgggtatgtctgtggtatgtgtgtgcaagtgtgtgagagtgtatgtgtgtggatgtgtgtgtgtgtgtttgcagataaaaattcaggaaagaaatacactaaatgttatcaaggcttacttctaaaaagtaggatacatggtggaagacaagggatcgt

SEQ ID NO: 41696 - DNA, 534 bp, Homo sapiens
caggcacttggtgttatctaagtgtttatgtcttccatgtctgcactatgctatatctgtagtttgttttaaatagtatctgttaaaacagcgaccattatccattgtagacaaccagtcacagtcctcatggtgctgatgaaacacaaaagccacaaagcttcttttcctcaaataacctacccgaggtggagggctggctggtttttgatgacacccattttggtgaagactcaggatgtggggccacaggttgcactggacgagtctgtttggctgccagtttcatcagactcacttgcctcttgtgaaatatttcctggacatcatccagcctctgcaaaactttctgggctttggcctacagtaacaaaagcaaatcatgatgaacaggtctctctgtatacagcctgaggacacgaagcattccctttctcccaccttcccctactccccccatccctacctccctcaggtgaccccctctgggcatcactatgcaagtcgctgcaggtcctgccatgctccagaatt

SEQ ID NO: 41697 - DNA, 1993 bp, Homo sapiens
cacaagcccatctgggatctttcagatgctgaaaattccagaaggctggatcgtcaagtttcagcttagaagttgcaatcagaaatctttattgaaataagtttatttccccccgaggactctgctggtataacagatgagagatgagagtgcctactagggaagaaagtggcgagaaagcgagtgatgctactctatccgggaatctagaacaaacccacagaggatccacagggatggagtgtgtgtatggggaggtgggccagatgaaacaagaaaggcagaaagctaatggttgttgaaattgaatgatggacacttggagttcattgtgccagtctatctgcttctctgtgtgtttgaaaatttcacacatgtacacaaagccatgaccctccaacaagatgacatccttagatgttaatggcctgggttccatgccttcttagacacagcacccttatggggagaggtcaaggctgaaatcaggtggttcctccaccctgtcctggtctgttccctgctggcccctcagcaagggtctcagtacggcccacagtcaaaaccctgcagcaagttctgcttttatagaagaccttctgtaagtggttgaaactactgtttttcagaatcaggaaggagcattcaaaagactgctaaaccctcaaacgagaacaagataaagaacaggctgaatcagcatgcgacaggagcctggttagtgagttgactgaggttacttgtgagaatgatgtcactgtgtggaataaggaagctggcaacaccccagagccagcgtgtggctgtgctgggagggagctggccccttagtgccgagtaaaggacaaactccaggcagatatttgtcagattgtggccagacacagtcttgttcctttaacactttaaaggacaaatggaaagattagccaagccctaatcatctgaagaagccatgtgtctgagaagtctgagggaagatatattgaaaacgatctcagttacgatgagacagctttgtttgatttacgcaaaggcagagacacaggtgtactacatccttcaggaagcaagtttagaaataagatctgcaagtcataggatgtgacaggtctgcaaatcctgcaagtcacaggtcatccacagtgggctagtctagctgcttcaagaatgttgcccacgaaaggtgggtcatgggttcacagagcattcctgtgttccataaccacaggtttcatccctaactctggtcagcaacttttgaagtatataccaaggaccacaagttcaaggaagtgggcagaagaaagaatgtgatgcagtcatgcagatccatcgccactattcaagacacagcccagagcgccttccaagggctttctgttccactgagaataaaattcaaatcctcacaaaagatctcagggtgcaacaggactacctggcctctgctcatctctgttcactcatttcctcctggcccacctgctctagcaatgttccttgaactcaccaagctcatttccactttaggacctttgcacctgcagctcgctcttgctttgatactattccctaagtctttgcatgattacacagatcaaacagatctcagaccaaaggtcgtcttctcaggcctttccagaccattctagctaaagtagcatccccagtcactttctattatatcttgttttcttttttatatcacttgttactatctgatgttattatttatttgattgctttttagtgaactgtctctctccagtagaatgtaagctccatgagggcagattctggactgtctggctcaccgctgcacccacggaacctaggataaggaatacctcttgatgaataaataaccctctggataggtcagtagctactttcatatatatatgaaggcattttttttgatgaggcactttttcttaatatatgaataagcaaaaaaatatagtatctatattcagtaaaaaattatttt

SEQ ID NO: 41698 - DNA, 2677 bp, Homo sapiens
tcctgttccctctagaccctctcttgaagagtccatttccagcttctggcaggaggctatgcttcccagcctgtcagaatggtcaccctgcaggttggaactctttatgagaaataaagctctcctttccaaatttatgaacctcctcattctttagttgacaatagtaaataaatagtaaaaagtcaagccctctctggctcatagtcttggaaaactttcttgattgcataataaatgttgaagggcgtggcaaacagttgtctactctacatccaaagtttgattttaaaaaggcaacattcacaaattttatagctaatcgctcacccactaacttctccaacttcatctcaattcttcactgtaacaacccatatcacataataaataggagaggaggctgcttgttatggtatgtggctatcatctttataattgatcatgagagtggcaggaggcagccaaatgcccaggcagatatgggcaggtccccggtgaaaccccctctccaagccgaagatagtttaaagcctgaaagccaagctacaagttaaatcctcagaccggattgagaacttgtcttcccatttgtcgagctttcctgtgatggatccccacccctcatgtattttacatatacctaccctttcctaattgttcttctacactgtcgtgtggaaccagcagatgcggatgcaagctataacacaggtgagctgggcctcagtagtgtggccgagcaatgcccgggtggggcatcgggcaaggcccagggtctctggcttgccaagtgaccaagaagaaaaatcatgcatcaagaattccactaagaccaaattccagatgtttacaatcattagcactcataaattcaagcaaaagttgtgttttgaatttctgaagcaatctaaattgaaatgtcgaaagatggaacgtgggtttctatctgaacaaaacagaatagatgacgcaaaggcagaacagtgaggaggtattctaaaacaatcacccaggcaaatgaacaaagaaaagccatcatacacatatgaggtcattccactgggaagaagtaacatcagacccctagtttttaaatagagaaggacaagagcctggcatattaactttgtttcctgccctttactacaatttacttaaattctcgtgacatgtaagacttacttgccagtgccaccatttactcttaataaaaccaaggagtgccttctgatttcaggcctcagttgggtgcccaaaatctagcctctctggtatcctccctgagggctctgaagcaaatctaccctccttgggcaacacagctgcccacatgactgtacactctggattgacaagtacactctgtactcgtgactgtacactctggatgtacatcctgatgagtcagatgaatgaattcatctccctgaccctttgagtcacagttccacagccagtccagcgaaaaccacacctcaccccagctactccatcaaagcagcacttttgctcgttaatgttgtttagacacttgaaaaacagtattttccattgccttctgtgaacccaaaagtatctgagacaggtctcaatcagtttagaaagtttattttgccatgggtaaggtcgcacctgtgacacagcctcaggaggtcttgacaacaagtgcccaaggtgctggaggcacagcttgctcttatacattttaaggagacgtgagacatcaatctatacacgtaagatgtccattagtcattcaggaaaggcaggacaactccacgggtgaggggggtttccagttcataggtagataagagacaaaaggttgcagtcttttgagtctctgagaagccttttttttttttttttttttgagacggagtctcactgtgtcacccaggctgtagtgcagtggggtgatctcagctcactgcaacctccgcctcctgggtccaagcaattcccctgtctcagcctcccaagtagctgggattacaggcttatgccaccaggcccagataatttttcttttttttttttttttaagtagagatggggtttcaccatgttggccaggctgttcttgaactcctgacctcaagtgattcaccctcctcagcctcccaaagtgctgagattacaggtgtaagccaccgcacccggcctctgattagccttttacacaatacacaatttacatgtgagaagagggtagaggaatagtcacttatgcctcagtttggcttagtgaaacaggagggcagaggaagcaatcagataggcgtttgtttcacaggggcagagggataactctgagtactgtccgtcttttttccacgaggaattccttgtgggcaaattgtgagggaggtatatagtattttttatctttagggaggtatatcgtttttttttttttatctttgtagctatcttctttaggaataaaatgggaggcaggtttgtctgatgcacttcccagcttcactaccctttggcttaatgatttgggggtcctgagatttattttcccttcacacttcataatagtaagaggcccagattgcactcacttctctgacgaggctggtttctaaagctgagtagttattataatcccactgagtctttcaatacaaaggagtaagtctcatcacaattcacaggccaaata

SEQ ID NO: 41699 - DNA, 1121 bp, Homo sapiens
tctaaagattgaaggtcaagaggagggtttcttgccctggagcctgcgatagggtgggcccttgcggttcttgggcggaaacggcgatagggacacccagggcctaaggaggctggggacagagcagatcctcccagcccccaacatcaccccggagtagatgcagacccccagggtcccggaggccgagaccacaccccgcgggcacgagcccgattggcagattgtagccgagtggtttcaacggtgacgccccccacccgaatgcctcgctgggattggctcatttcttggttcagacctggacggtggccagaggaggacaagaggcttttacaccgaacggaggtgatgtggacgacaacggagacgcagccgcacttcaccaagcggccggtccgaggggacatggcggcaacctctgcagcgtcagtgctgctggcgggtgcaagaaactggtggcgacactgcctgagcccgctgctgttgccaaggtgacgaggcataaagccgcggtggatcggtgcgtgggggcgcggggtgggtggtgaagggagaacgaagctcgagcggaaagacaggaccgcgaccgcttgtcaggggattcggcttccagtcccccttccagagggcgtccttctgcagccaggcctctgtcttcccccgcccccacacggtacgagctacagaatgcttttctgttttctctttttctatagtaaggaagcgctttcctttctcccccgtttattcatttgcttacttctggttcccgtgtccttttaacatgtccccccgtcattctctgtttaaggacacaagatgttccaggctcatcttgtacttagctcctgccttggaatcagacatttctccaaagaatcctggttcctttttttggagaatgctattttacagccgtatctgggctgtaggttgtgttcgttgctactaggatgccatcgcttctagactgtctcagcagacaacgctaggaaattttatgtatatatatatgtagagagagagagatgcaaacacacatatttatgtacatatgtgtgtgtatgtacgtatatatacatgtatatttatatgtatacacacaccctccccacaca

SEQ ID NO: 41700 - DNA, 1738 bp, Homo sapiens
tctgagctcagacatgtgagattcagtcttcatatatgctttcccatccccttcttcaccgctcttaatcccaaatgcttttctgtctagtgtgcagaatgtactgtcttgtttatttaccttccttatccttattttgttgttgttgctgctgcaatttgatgtactgcttgatacagtgtagaaaacagtccttccatccatcattaaaataacagtcatttaactttcttttatgatgatgtttatatcatgctagctttggtattgtaatccttctcagtttcatttcctgaactcttagaaaatatgatcacattactcactgtgttaaaattaaactagcactatctcaatactaaacacaatagagaatccacaggccaaatcaaagatgagctgttgacactcacacttatcatgcacttaggtcatgagtttaagttgcatcacttagagtaatgcacacatggatggcatcactcagagtaatgctcaaattacttagagtaatgcacaaatcaattattgtaaactgccaaccctaatggccgacatcaataaccaggagggaaaaaaagaccatagcaactctggaaagcagttaatctatgctgtatctattcaccactaaaaacagtgttgcggccaggcacggtggctcacgcctgtaatcctagcactttgggagtccaaggcgggtggatcatctgaggtcaggagtttgaaaccagcctggccaacatggcgaaacccagtctctactaaaaatacaaaacaattagccgggcatggtggcacatgcctgtaattccagctacttgggaggctgaggcaggagaatcgcttgaacccaggaggcagaggttgcagtgagccaagatcgtaccattgcactccagcctggggaacgagagtgaaactctgtctcaaaaacaaaacaaaacaaaacaaacaaaaaaaaccagtgttgctttcaggcctatgggggaggggctgccatatggatttatacattttccccaactttccacgcccgttgcttaaaattgggactgttcatgtactgggaagggtttcctgggaaccctgtggcctcactgggcacaccctggtctccacctgcttactgtagcttcctggatactgaaggtttctgacttaaaggtgctcttgattgtgcattcatagatatataaccgaaacaaagttgcaccaaacaatatttactcttgctataggtgatacatattttcctgcttcgttttttcaattctgttggtgactcacaattccgtgaaccatttagtggaaacctgcaatttgaagagaacaccaatagggggatccaaagttctatccaactgtaaagtgatcctaacgcttgatcattgccaaaacaaaaataaaccccatggtgaaaccccatctctactaaaaatacaaaaattagccaagcgtggtggcgggcgcctgtaatgccagctactcgggaggctgaggcaggagaatcacttgaacccgggaggcagaggttgcactgagctaagatcacaccactatgctccagcctgggtgacagagcaagactccgtctcaaataaataaataaataaataacccccaaagttcatgtaagtaggtaacactattcaaaagaaaaactagtgtactgtaatcaggggatattctatgactatcagaaaaaaattaattcatttaatcattccattctgat

SEQ ID NO: 41701 - DNA, 997 bp, Homo sapiens
agctgggactacagggatgccacaatgaccagctaaatttttgtgtatttttagttcagacagggtttcaccatgttggccaagctggtcgcgaactcctgacctcaaatgacctgcccatcctggcctgccaaagtgctgggattacaggcatgagccaccgtgcccagccatgactgttccttaaatacacagaagcctcccacctcagagcctcattagctcttccctctgcctggagtaagcttccccagatactctcaggcctctcatgctctcttcactcaagcctctgtttaagtgtctctatcagaaaggttggctgtgttcatcctagctcaagtagcatgcatcacccttcccctgagttactttctttggacatttatctctacttgtcattatattatatgcttgtttgattcttgcctgtctctctctactagaatgttagctcatgtgagcagaggctttgttttgttcacagatggacagaaatcatgcctggcacgtagtaggcgctcaatgaatatttgttgcattgtttcacaaagactcaccccattccttctttcactaatgtctacttagaactcagaacaaaatctaaggcatcatttttcctacagattcctccagtgaccttttcccggaatgtgacattctaccagaatgcactttgacaattaaaaacctcagcatttcttcctagactagttttgtcactgtcctaatctttttcttttttttttttttttctatttctggcttggtctcatgtttcagggaaattactcaatagatgctcctattactacatttttactatgaaagaatagaatttcggccaggcatagtggctcatgtctgtaatcccagcactttgggaggccaaggcaggcggaggcggatcacctgaggccaggagttcgagaccagcctgaccaacatggcaaaaccctgtctctactaaaaatacaaaaattagctgggcgta

SEQ ID NO: 41702 - DNA, 814 bp, Homo sapiens
ctgtagtcccagctactcagggggctgaggcaggagaatggcctgaaccctggaggcggagtttgcagtgagcagagattgtgccactgcactccagcctgggcgacagagcgagactccgtctcaaaaaaaaaaaaaaaaaaaaaaaaagaaagcctctcagacagagagactctttgacctccctaaacctgagcatacgaagaacccctttcaaaacctcagacacaaagcgagagagtgtgtcagatttaacgtcagtcctaggtctaaatcccagcttggctactttttatttgctgtgacactctggactttggctcaccgtcggtaggctggggataggactccctgccttgtcaggttgttgtgagggtggagtggactagagtatgtgatacagaagctacagggcctggcccacagtaagcgctccacaaacaggagttgataggaatagtagcaccggaagaaagaatcctgtctccaggacagtattcattgtagaaggaaagtcacgttgaaaatcccaagagaagaagcaaaagtcacttctctgaagagaagaattgaaggaatttcctctcatgaccaggcagttttgggagaggctctgtatacacagtcagatgccttcaccctcatgttctccagcttctcattgccgttgcctcctctgacgaccggcagagactttccctaagtatcctggatcagcagggctggaaggacccaagcccaaattcccatttaggatgagaaacccaagaaccagagaagaccagtgatcaactcgagggcacacagccagcgg

SEQ ID NO: 41703 - DNA, 512 bp, Homo sapiens
ctttttgtttgtttgttttattttccattaatacggcaattttcacaagtcttgcattatgaaatatcaactctggcatttgaattaataaataaaaagcaaggtgccctccaacttcttactagtcttcgggacaaagatcactcggagttcatcctgaaaagcatctaaatttagagatttgctgccggagcaaaactttcatgtaccagcaatagaaccagtcaggctttccaaaatatgtcaggcatgtgcttgcgatgctgtcacaagcggggtcaagaggctctgtccctgtgtgctggtgacctgggagccctccttgttttctaggccagtctcagagcactctggggttggaagcaaaagagattgtgcaatagtgaatacaggcgcttattttgatcacgaatcaggccaacaaaaattaaatatttaaaaaaaatttgaatactatatatatgcacatagtttttgggtttttgtggttgttttttttagtgtgaaaagct

SEQ ID NO: 41704 - DNA, 2841 bp, Homo sapiens
gcagaggttgcagtgggccgagattgcgccactgcactccaccctgagtggcagagcgaaactctgtctcaaaacgaaacaaaacaaaaagcttgcagacacaaaacgacaacacaatgtcctttaggaactccatctaccttggaaaacagggatttgtgacagctttggtcgacgtgcatgtgcgtttaaaataaaaaggtaacctaggatttgataccagggacagtaacagctttatcaaaaaaaaagaggtggttttccttgctccttctaaggactggggttttagtctcgtccaccctgcaggccctcaggcctgatttccgattgtctatcaaagggtcaaataaaaagctctctaagcttcgacccaagctttaaagtcgaagggctgatcgcgggctttttccttgggacgtggcaggggcctttgagggaaggaaagaaacgactctggcttctcactcggctccttacacaagaggcatttttttaactgtctctgcttaaaacaaggtgtttttgagtcagcagccctttgggtgggtctcgtcctcttgggcacccgacacccaccccacggcgggagccccaggtggccccggaggccaccgggaagcgtgaactacatctcccagggttccccggggcggaggacgcccacccggattggccagggttcgctgacgctcagtgttttggcccggacggtcacatgtttcctttgttgtgagctgcggcagagactggtggctggaggagacgccggcgctggagagtgcgctgcgccgcccgccgctgagggaccgcggggttagccactgctggctgcttccagtgttcgccgagaggtaccgggggtgacagctccgggaccggccgaaaggcgaggaaccggtcagagtctgagtcctcgggggcggaggggcgacggcggtcctgaccaccggggtgtctgcgggagggcagccagcggcggccggcctctcagagccagactggcggtctgcggagaggctgcagctgggctacagggcccctttctgaggcgaggggcctccagggttcacctggggggtcttcctcccccgcttggtagctacagccctgagggagggcgcgcgcgcctcctggcactacggcccggaaccgcggcgcggctggtgcggcctggctagggcggggtggttgccgggactgggggtagccgcaggtgcggtaggctagtcgccgcggggccgggcgccgccgggggaggcggctgggcagacgggtgctgcttgttgccgatgggctgcgaacggggcgctgctttttatttcaggaagcccgggggagtgcgaccgcctcaaatccagccttcttgtttggtgggacgaccgtcggttctgtccgggaggaatgacggggtcaaggtggggtccccagggccgcgggcccgtgaagccccattaaagcgattgcgaaatgcactcggcactgtcacctgaccgttacccccgcccccgtcccctgcgagcctttgtttaccacgatcgcgacacccggcccgctgcggccgtccccggggagccggggcgggcgggggagcgggcgttccgccggcgcagtccccgcctaacctccccaccttcttaccactccaggactcagtttcttaatttagttcctaatggacccgccctcaagttctggacaccccgggtgaagactgttaacgcggcggggattgggcgcctgcggcagcttgtgggcggtacccgagggagagttcgagtttttattggcgagtttttattgtcactaggtgggcctgccctgggccattcttcccgcccccttgaaggtgatctggaggacgcgcgggagcgcgcgctgtcgctgcttttgcagctgcggcccgagtggagccgggtggcgcgggtgcgggaggcgcgcgctcccgcccctgctgcgggcggctggtagcctcggtggccgccgccgccgctgctgctgcctgatcctgcaggcagttctgggcacgcagagatcggctaccgtggcctgccctccgaggaccggaaaattaacaccctttaactagtgtcgcgttatctgccgggtggttcgcaggaagtcctgcgaacacgttgttgccagttctgtaaacgtgtttagatagctaaatatagatcacagtgccacatcttagggggccccacggtcacccctgaggcagtggctgttcacaattgattttagtggattttaatgattaatcacttgctcttgtgggcagcttttcaaaaatcacgtctttgtatttgcagctacagactgggtccaccagctaagaggttggtttttattagggttgtaaaatagatttaaaatctgcttgttgttggctgagatttaaaagcagatttctactatttaaaaaagatagtttgaagatactcccctaaaaagtaaagattcttccatactcggctcggatgagttgttttccttgtttgagggattctaggtcacacacttctatgttttaattcccgtggtaattcaaaatgtttgagaagtgggttgcgactgtgtcgttttaaaattgtacattaagctgacggtaataaaatcttcaagaccaatcatttttagccatagtgtgttgaaaatggtttttctaatcgcttgagttaatagggtatttgcgttttgtcagattttcttctgcagatataggaattcactcaagacttaatacacttgttttgtttttgagacagggtctcacattctgtcacccaggctggagtggagtggtctcactccgtcacccaggccatctcagctcac

SEQ ID NO: 41705 - DNA, 664 bp, Homo sapiens
tgacaggtttttgcaatttaggcatgttttgtgactttgctgtgttacagagagaaaaacaggaacgtataaaacctttgcaaacttgtaaaaatagttacaaaactaattaatgagagcagaacaaagaatgatggtatggggagagaattttagggggagactgataagaacttgtttttctcatacttgcttttggaacccattttttgggggcctttgcctggttttgcagataatgttatagctccagctggactttggatgttgatctgctgagttggtggccgcctaaataaatcctcctgtttcacccagtgacctctccagtctcctgattgccacaacatgttggcattaatcactaggaatttcattatctgaacaatgtgtattatttgtacaggttctcatctttctgagaaactccaaacttctttgaaagaggagtgatgtctccacttcttcgacagcagttcattcctctgacttctgctccagtcactctactgaaactcctctcaatcaggtcatcactgaccttctatttgttatttgctagcctctcttcggtctttatccagcttgagctctttcgaatttgatattattaattgccttatccatcttgaaatacctccattggcttctggaatgccattct

SEQ ID NO: 41706 - DNA, 1548 bp, Homo sapiens
attcatagtcttgggcagagagattacagggtcttgggtagggtggtagagttacaacgaaagagaatgttggcctcaagtgatatttaggtggaaaactggacttggattgtcactagctagtgtgactgagataagtctcaagccttccctgcctcagtttcttcatctgtaaaatgggctagaaataactactgttattttgtatacccagcacttagcacatgggttggcacaaagatggcacacacaaacatcatagtcactattgtgattaatagggaagctcatacacgccggcagaatgaatattctgtcaaacttggggttgaaattcgccatcttctggggcaggaaagtgatggacgactgtgcctttgcaagaatcgacgcccacactgcccaggaagtgccctcgcgggccggggtcccagcccggaccagccccgccccgccccgccccgccctcatccctgggagctccgccccgaggccgcgcgcgccgccgcgcgcgccccgacgcgcccagctgctgacgtgcggggcggaacgcgccgggcgggctccaccgcgccgtgtgcttccgcaggttgcgggggtcgctggggccttgtggcggggcagctccgcggggcttcgcccgctctctcacctcgccgtgctctctcgcggcggccggcggggcccgcgctgcagccggagacccggagaaagggtgagtgttggcgggcgcaggaagggaccggccgggagcgcgccccgctctccggggcattgtttgggcgggggcggcgcgggcacgtgcgcgcccctcccccatcggcaggcagcgcggcagcgggacccggtgaggccccggggccgaggggagggcagggaggatcccaggtgcgggccggggagccgcagaagcgggagcctggaattggaacgtgagttgggggcttcctcttcagcggggcgctgcgctgaggggatacgggaccccgagccacagcggccggagcttttaggatgttaagctcttggccttggaggcaagatttggccccagcaccagaaagtcgtgggtttaccgaaaggatcctggaatgcccctccaacctgtcgccatccccaccgggcctccctgggatggaggggaggggtcagagaggctttgggggtccagggatggggccggggccaacgcgccggagctgcgggcagtgcggggcggagtggaagcctcggaaagtgaggactcctgcaggaaaggctggcttgaagggctgtggccagactgcagaagacaatgaggttttctccatcatgaatgtgattatgttaagaaatagaaaccagaggaagagaaatgccatcagcaatcttacaggcctgacacatcatttttttttagtttgatgttggctagtattttcatctaagcattcagcagttacagagttgacccacgttttccattcccttttctcgctcacatgtaaaaaatgcggtataatattatatagaattcagcaatatcatttcccctttcttaatgagtag

SEQ ID NO: 41707 - DNA, 601 bp, Homo sapiens
ctcgcacaaatcccctgatgaacattctgctctagccatggcagtctattcatgtcatagagatgccttgggccgtctttccttgggtcttttttaatgctcttcccctcctcagatgcttgtctgaattctttgcattcttcaagttcttatgtagcttttcctggctgttaaagcctgaagtgatctttgtattttgtacagtaaataatgacgtgtatttgattctgtaaatatacattaaatattaaatactctaaatattagagttacataaaatttaaagttcctagaatgtgtgaaattactatatcctgcatttctgacaggtagtcatttactctctccttacccattaccctagagcacagcacttcccaagccaacacattgatccatttagtaaaaccttgaccccgtttgtccttttgtcgtagtgtttcttttttctgttttgtttgtttgttttgagacaggatctcgctttgtcacccatgctgaagtgcggtgatgcaaacacggttcactgcagtctcaacttcctggattcaagcaatcctcccgcatcatcctcctgagtagttgggaccacaggcgtgcg

SEQ ID NO: 41708 - DNA, 1592 bp, Homo sapiens
ctctcctgattgtgatttgggaggactggggtgaggcctgggacataaaatccatacaaactcttcaggtgatccttgagattaggcaatggctccgccacattagagcctcgattatttaccactgactatcccacgtgttgataaacaatgtttcttatcagcaatcaggtggattcgaggcacccatctaaccaagtcagaaattggaaggaatgaagttttgaacaaaagaggaggaaaattttcaaagccaaatgcacatcagattcttaaacaggtgaggaatttctctcttctctctcaaattagaaatgaattactgtgatgcaaaaatcagcaatactgatcaaccatacgcttcacacttctactcggaaggttcggcagttttctttccaaatcaaccggaaacgaaatcttccactgtctcaattcaacaataaagcctctcctacgactttgccagacacaaagtgataccttccatcagacttcgtcctcccttagatcacaagctaaagaaggcgactggttgtaatggaacacaacctttataattagatggaaaaagaataaaaaccgccattctgccagctgtactaacttcttcacttcagaaactggctcaacagtttccactcgcgattatgaagtgtggcacgcaatgaaccctcagcttagttccccttccagtcacgtccttcccaatgggaaaggagaaagcgcaggctcgcggggggctgggctgggcaaggggagcgagaagcgaggactggacggaggcgagagaggagagagaaggggcaggtaaggtgaagggggtgagctggggccagcacaagaggcccagacggcctccgcccccgaggatacacggccagagctcagggaccaagaggcgagaagaccagagcgcggcggctattacctgcgtccgaggagctgcggcggggttaggaccgcagtgagctcctcgcagctgcggccgcccaccgacgcaccccacgcctggccgcagccccagcctctctgcgcccagcctcgccacgccatcttcccaacctctgccccaccatggcccgaccttaccaaccccagctgcgcaactacttccggggcgaaggcaacaccatagagcacgaggagcagtctagagcgcccccgcgcggctgagcggcagccgaaccagccacggtgcccggacgactggctggcgcccttctgtcccaccgcttcccctcccactgctcagctggctccgggagcgacctgcgagagtggcccggcctcccggcatttgcagatgaggaggatggggccagagcgaagagggacaactgtcattttttcgagtaacggcacataccaggcgctttgcctaagatcgcatttaatcgtcacagcactgctagaggtagatgtcatcactgtttcactttgcctctggtcagaggggataggacttgcccggagttgcagggctggtccctagaggaaccaacgtggcaagccaagttttcttaaattactacttttttctgcatctcaccacttcgtgttattctgtatgcctttaacaaagtccaagc

SEQ ID NO: 41709 - DNA, 777 bp, Homo sapiens
gtaatagcatcagcgcctcccagatgggaggagcagggaaggtaaaagacatagtgaatgtttacactatgcgaaactttcaaagggggggaaaaagaggaaacagcagattaaagaagttccaacacatcgggtttttaaataacaatgacatttcaaaccattttttaggggataaagaaaaaagaggttttcatgaaaaatccaaccaaaatttagtttttaaaaagttacaaatgtatcatttaaatctaaacaaactggaagaaaacttgagactgttagcatagctgtctggctgtggaaagcattcccagtgaataaacattaccttacctgaactcttggcgagagattctgcccagcttgactctctcattctgaccgcagaatacagccatcctgaaaattctaaagaacagcttctgtcactggttccactacagagagactccccccaaatccagatcctgacagcaccaagcaagctgcaggtggagagaggttggaagggtgggaaacttacctctctaagggttttacactgtcctttccccaaaaggccctcgagcagagttagcattcaccaagagagagcactgcaggaggcggccttctcttgcagatctacagtgcgatgctaattctttatacacagatcataggtgaggcctggtcttttagaactgtcttaatccaaaaaggccccaaagcatctctgtaagtgtagcaatgtggctacacaggaccacactgttagagattctggtactccat

SEQ ID NO: 41710 - DNA, 671 bp, Homo sapiens
tctctcctttaaaattatgtacatagtcttcaccttctgggaaaaaatacccttcctagggaactacacatttaccctgtataaggagcctcccaggatacagaaaatgatgagagcaaaagcctttctttccacccaggaaaatgatccctgaatgcaatttgtgaataagaactttctttttcaggggcccccaaccctttctgaaggttcctgtggtaaaatgtaaagttgtaaactacattttaatcatgacaatcagctaccacaaaaatgtattctgtcacaaggcagcaacataatctccctgcagactcaggaagagaagcggggctgagagagagagagaaagcccgtggttaaaacaggatcaaaggtgaaataggagataaagcaaaagagcaaagagaaagtcatccccaggccgcccgccctccactggacagctcggctctttaaagacacagagctgtggacttcacactcctagctcaggccctgcccacccggcatgggggagatgagggtggaccagaggcgcctaccttctgcagttcacgtcagaagactcgtgcttggacagagaccacacgtcttccattgagagctcccccttcttgtgggccacacgggccagagaagaaagccacgaaaaagtcatacaggaaaaa

SEQ ID NO: 41711 - DNA, 1432 bp, Homo sapiens
tggatgaccgtggagagatctgggctgcgttcccggcacagccacggctttgctgcgcgtgcttatgtcacgtacctccatttacccgcttgcaaaaacgaaggggatgacttacttcgaaggtcgctggcggctccgctgcgggttgagcagggtgccccgagccacccgctgcacagcctcccaggtgggcgtttctctcagacccgcttcgcctgggatgcccgggccctagggcgttcccacagcccgctccggcctgcccaggcgagcgcgacccacacccacggcccgcgggcgcagcgccccctggcggccgcggccagggacgtagcccgcgtccctgcccgctcatcccgatcctacctgcctgtcttccagcacacgaccccgtcaccagaccccgggctcacaggcctaggaggcggcggcaggagaccagggggaggccatacgccgttccccaagtctccagtgtcccccgaactgctcgcagccctggccacatcccgccacgccccgaggaaatgcaaaggggtgatccccgtgacaaccgagctggagggcaggggtgcggcagcagccatcacctacctgcgcccctgctccaggacaaccgcgccagccgctcaaccacgctcccgagcatgagccctgcagcaaaacaagcctttatagcggcatcggccgccacaccgcgcaagcgcgctgcacaaagcattcccaaggctgaagggaactgtagtcctccttccgagtgcccagggctgcggacgcggcgaaggactacatttcccagaagcgccggtgacatcccgggggcggtgcgggctgcccctcttcccaccgagctcccggctctgttccatccttccccgtgcctctgcgagactgtctggaatcttctcaggggtcgtgttccctgggggaggcagccgggaggcttaaccgtggccctgtgttcgcacacagtgctgttcgtaggcagagcagtcccaccctgcgtggccgtgtagctgccagaaaagatcgtgaaggtcatcgtagcccgcgtctaacccgttgagagtcgtcaggccggccagccccagttcttatctgttgtggcagatacgattgcttgctcatggttcgaccctgcagtctgcgcagataccgcctttctcactttaacaccaactgcccatcaatgtctcgctgcctggtctctagataataaaatgccaggatcacagtcttagaagtggcaagagccttagaaatgttatgctaactcatcttcttctttttataaatgaaactgaagctcccagaaagattgatccctttatttctctgtttcatcggtaccttcagcatcattaaataaaagccactgttgagttcttccctaccttgtatccgatgctttacataccattcttgtttcctt

SEQ ID NO: 41712 - DNA, 966 bp, Homo sapiens
tggttatgactctacaaattggataggatgaaagaagtagggaaaggaatttttacttctttatgtagtgtgtgtgagagattatgtatatgtggtttccaatatatttcaagtaagtttttaaacaacaacaacaaaaaacagtttgagagagtcttcctgaaactcgtctattaaaatcatatccatatagctaccagtctacagaattttaagacctggatttaccataagcacaaatgcctttcggcagcggattcaccacttcccaacttcccaaggttgcgggaatcatttaaaataaattctgcaatcggacctactttccatacccaaacacccccccaagagtgtgtgtgtgtgtgtgtttgtgtgtgtgtgtgtgtgtcctatttaattccttctcccctcccccatttctacctctggatttgtagggcagttgaacattccttttctacaacgtgcattcatttaatggaaaacttttacttagttggcttcagcctttccttttctaggataaatcaaatggttttcgttccgcaccctaacgaggcaagaaatgacaaactcctcggtccccctaggcgggcgccggagcacgacgggtcaagtcggaatcgccacgtggaaacagctctcagcatcgcgaactccaaatcccgacgtgcaacgcggggcgggatgggaacagtttgcaggaactgcagaagcctgtggcgtggaacctggacaggtcccgtgcagaaagggcgctatgccttacagaaaagttccttgcctcccaaatgacgcccagccttcctgccccgttccaccgctttcccacggccccgcccctctacagagttggtttattccccgcagccaccgcttctttccccaaagagaaaaaggtgctgctgcgccttttcaagccttggacctttacgcccgcactttcctctgcccagaaagcttact

SEQ ID NO: 41713 - DNA, 1805 bp, Homo sapiens
aacttggcagcaagattgtggaactctgcagtcagacagatcgggttccaataccagttcttccacttactagctgggtaaacttccttcatccttctgagagttcaagaaacgtttgctgaacgaatgaataagatgttttgcagagataatgcttgtatcgtgcctggcccaaaatcagcgctcaatggaattactggtctccctactatatgcctgccaccttctctatttatgcaggttctgagttcctcgcagcgggggaacatctggctcggttctatctccccaaggcgctgggttcccagaagtttctagaatgaatacggagggctacatatttcacatgcgcggggcggggaaactgctgggcgattacagattcccgatggagctggccccttcgtggcgaccacaagtcctatcacgccacaagaatctcggcttgttcacctacaaatgaaggccgacgatacttgcagaccgagtctgacatctatgggaccccactcctaccctgcgcctcaggggccgggacaaccgtgacccgtaccgactcctcgcgcctccgggatcaacctcagacccctgtgggctcccggggaagacgcatgcgcactgctccctcctcgtctccttcccttcgttaattagtccatcgcatttcaagtgctggatcctttttgtcccctactgcgtgcggtggcagcttccttgcggaagtggtgaccgtgagagaagaagatggcggcccctgtagtggcgccgcctggtgtggtggttagtcgggctaacaagcgcagcggcgcggggccgggaggcagcggtggcgggggagccagaggggcggaggaggaaccgccgccgcccctacaagcagttctggtggccgatagcttcgatcgccgcttcttccccatctccaaggaccagcctcgggtgagcgccgcgcacgcgagcagccagagggcaggaagggtggcagggctggagcaagttctcatttcggctaactacaacagcatgcccttgaaggacctgcgtctatgctgttatcctaaaaccggatgcagagggactgtctaaaccctgatgactgctgaccaagttagtggccggcagatttgggcattcgtaatgctgtccacctcgggtttgaaaggaatgaagagagctaaatgtagaaacagcgcttgagagaagccttcacgcggggattcagtgcccctagaagaggctgcgccgcttttaaccttgccgatgacggttgcttaggtgaaaagaaacgaccttttgcctctgaaagggcggtaatatgccttaaaaagagcgggctagatctcaggcagtgtattttttttttccttccaggttctaatgatagccggtgctatctgtcgaaaggacaaaatgggtttagtggttgattgccatcagcccccgagttgtctagacaatggggtattggactcagctgggtcgttcagcagtcagttcagaaagagggaactgcattggatttaaggaaaatcctctctaattccctcgaaaaagcctaatggctgttcatttttgacaagtgacgggagatggctaacctctgacacttagaaagggatcaaggaaggaaatcttatggggaagaaggccttagcaatgcttaaatttatggaaatatgattgatttccagtattatcctttgccagcagtgaactgccattctgtcacagctctgtgtctgatacaaggcacatagattctgtacttaccatccccaaattgcaatgtctcagactcaggctta

SEQ ID NO: 41714 - DNA, 2597 bp, Homo sapiens
agggtttctccatgttggtcaggctggtcttgaactctcgacctcgggcgatccgcccgccttggcctcccaaagtgctgggattagaagcgtgagccaccgcgcccgggccccacttattccgcattcaacccatttattaaaccactaccttgcaactggacgctaaggttatagggaggaatcagaactggatgctgtccttctctcgagatcagtttagtagactcagtgacagcagttgtgcttctcaagaaacactgaagggccatgttgaggtcattctcctccagggatccagagtcagacccaccctctttccccagaccatttctggggaccaaagcaatccctgcattccactcttcctggactgcagaggagtcgccgatcccacttgggtccggagtcagggccttcaggggtccgggaacgccgccatcccggtgaatctccccttccgtttctagggacccgggaccggagcgccgcggcccggccagtgggcgggaaaccctgccatctgccgcgacgccggcgcctctccgcggcggccgggggcggggcgcgccggggcggggccgcgccgggccggaggaggggagcgggcccggacgaagccctgggccgggagggccgcggccaccggaagagtcgcggtcgccagtccagtcgggagagtggggagcggaagcggcggccgcggcggcggcgggcggcgctgggacccggtagcggccggagaacaagggagctggcgccgccagcagccgccgagctgggttgagccgctgggccgcgccgcgcgccgccgccgtctgggaggctcggcccggccgcccgagcaggccgcgcgcgggccgccgggcccgaggccagagccatgggcgagaccaagatcatctaccacttggatgggcaggagacgccgtaccttgtgaagctgcccctgcccgccgagcgcgtcaccttggcggactttaagggcgttttgcagcgacccagctataagttcttcttcaagtctatggacgacgatttcgggtgaggatggcccccgccccgcctccgggagccccggccgctctggcttctaagggatgacgcggtccgtttcgacttgcctcgctacaccggctcctagccccgctctgacttctaggggcgactcggcccatttgggcccctttggttccagccccagtagcaactcccgtttacctctgaagaggggacgttggcctcccttgtttaaggggacgtccaattccccactagcaatcagagttcctgccggtgcggtccccttacctcttcagagaccagtggcccacagagacagacacaccccccctccacctagtttcagagcccgagtcccccatcctcctcctgccgaggagccagagccacctttttccgcacagacttgggtcgtgtggccctcgttcttcgcccccttcatcttttcagcagcacagctcccagccatatttggagtatgctgcatctgagggctctgctgggactttgagctgggggaggggtgtcgggggtgctcgggcgcctggccgcgagcggggtctgcagatctgatgtttatctagctgcctgccctctcctttgtgggctgttgtgggtgttgtcaccggaacagagagcctgacccctgcggagtagtcctcactgacccaggtgctgatctttcctccaattcgggcttttttcctccagttggtggccagtggagagacgttaggaagggcctggggcctgggtgggatagccaggaagagtttcttggtgttctctatcttcccctccctggtggggtcttcccttccacccagctgcagagatctggacaggcacagtttggaagcagtcactttccctttaagaggggatggaatgttggagccggaaggttctgaagcagctggcctgggaagaggggggcctggctgatccccctcgaacccccccaactcccaggagactgggggagggggaggcgcccacacttgcctgccgcctcactaactgggcgctgggcctggaggcggtggggaaggcccctccaggcctgaaggctgcctctccagccctagcctgaggcctgcactgctctttggagctgaggccccacagccaagaggagacattcttctccccagtgttcatctgtctggcttctctcccaagcccctggcccacctagcactaggaagcaagcaccttctgtctaatgcctggcatgttttgctgtcaccttctgccctggaactcagggttggatgagcccctgaaatcatgtgtgtgagagtgctttgtacagtgggcagtgctttgtagattctaactattcttgtttctgttgttgttcctgccctggggtggggtgctcctggtgtgataatgattgtctgccttcagcccagagacagacacctctaattggaagattctgaggagggatggatctagaaggggtctgggtgagggggtggatactttggcctggcaagagaagaatagggttagaagggatcaagctactgcctccacataaggaatgggggaagatgagccagagt

SEQ ID NO: 41715 - DNA, 1319 bp, Homo sapiens
agtcctgggactctggagacagaaaaggcctacagcaatccaaggcttaacagatgtgcttccacaaatggcattaatatcccaaagctctccagaacacaaataggaacaggaggaagtgcagggactacaattcccagagcgctcagtgaaaaaaaaaaaaaaaaaaaaaaaaaaaaaaaaaatgaggcgggtggagcggtgtatgctggaatgtgtatttctggtagggccgactaaggccacgcctaccccttcctgaggcgggggcggtttctcgaaggcagtcggtagttgtagttttgctaaacctagagcgcttcaaattgcaagcaaggaggccgcgaggcctgacgggatttgtagtcggcgctagacgccggcgcgcacgcgcagccggggccggggcggggcggcggcactgcggtgaaagccgaggcagcgggcagacgagcagggggcgggcggacatcttgggatccggagagtggccgggccggcagagcagggggccgaggacaccaggtgagccggggatctggccttatggcgtggaggaggacgctgcgggtcgtctgcctcgccgcgcagctttgtcctgccctgcactgagctggcggaaagctgcccacacccgggagtggcttcagccttcggacccgggagctagctgacggtggggcgggggcgcccggggcgcgattgcagggctggcggggagcggtgccctccacctgacccgcctggcgcctcccatgagagggataccgcttggaatcctcccagagcaggaacgctgcgcagcgccccctccctaggatcgtgccaaccccctacccctccgcgcaaggacaatttccccgtctcgtaggacagtgacacccctttgtgccgccgccttgcaccgtgacaggtctcacgccatgcggcaccccctcctcttagttcagtggcaccccgcggctcttcttccttagacctgtgacagcccccgcacccccatggcaccatcttttcccacaatgtcctccccaaggcgaaaagcctaccaccctctcattactctgcacctgaaccccaagcaggctctgtctccccagctttcccttattcaccactgtcagttcccccggccggtttttccttcttaaagccttgaccttttccatactggaaacccttacctttacgttcactccaccagcccagtttgctgctgtgggctcacctgaggacgctgcctggctttcactgaaggtctttccccttaactaaatgttccattcttgcccaaggcccccctctggttctcgggtgcc

SEQ ID NO: 41716 - DNA, 2338 bp, Homo sapiens
cacttaaccaggtgtcttatcaaatttttccagataaggtccattgtggttggttaatgctcctcaaattttaaaaattgatgtttcccttcaggtcttgcaattttgtggaagaaaccagagttctgtagtttaccacatcagaatttgcctgttgtccccatgaagtcacttaacatattcctctttacctgtatttcctgtaaaatggttcaatatcgggattgatgcctcatgatggcaatgtttaatccaaagggatgaatgggtaataatgtaattttcggtgccacttttagagaccaattggaggaatattcacgttaaatataaagcagtagcatcattttggaggaaattcctaacttcccgagggaatcggtgaaaggaaatagccttttattggcatttattgagtgcagagaagtctgctcagggtgtaggtagggaataatttatacaggccacgttgtcctggttttcttgccctttggcggtggatttggtcgtgccctggggtggtggaagaactgaatgggcttaattcacaaaggtcggctgaattacacagtgaaaaggcggtcgcggcggggaggcgggtggcgctggccaccaggctgagaagcccgtagggtctggggacccgcgaaagcaaagcactgagcagggggcttctgagagtcagggaccggggtgagtcagcaaagctctgggcaggctccaaaatgggcctgactgggtacgcaccagcagcagacgcgcctcgagggagcgcataaaacctggcaaagccaaagtgctttatcagccgcctgcctcttgggaggctcccacccgccagaccacgggtgcctcgcggccccgataaaccttgagctcccagcctttgccccacccctcgctcccggaactccacctcccagaaggcagcgagaaccgcacatgtggctaatctttcagcggaaaaggtgtcgcgcacgcgcagagagcgcggctccggcgcagactcggcgcctctcctcaaggccccgctcgccccgcccaccgggctctgcgcactccgctcctttcctgcgtcaccgctacacatgcgccttgcaaggaagggcgagatttcgggggcagggcggggggcgggcctaggccggggtctcacagcgactgcgcggacgggttcctgagtggaacatggcgacttgcgccgaaatcctgcggagcgagttccccgaaattgacggacaagtcttcgactacgtgaccggtaagcagaactgaatcggccggctggggagaccgaagtggaggccgggggaaagtctaagcgagcgtcgtgcccgggactgttgccaggcctctcctctgcatgacctcttgtcccgggggctggttgggtctggagcctggactggggcctctgtctggggtctgaaactgcttgtgtgtccaccctacccgataccttcctcgttctaccacgccctgcccaggcgtcttgcacagcggcagcgcggacttcgagtctgtggatgacctggtggaagctgtaggggaactattgcaagaggtgtccggggacagcaaggatgacgcgggcatcagggccgtgtgccagcgcatgtacaacactctgcgtctgtatgtgccagggagtaggggttgatgggggcgaagggacggcgaacggtccggagacaagaggtgggggaggaagatctgatggccatagagcttttccctcaactcctaactctgcgctttctatccctacccacatagggctgagccacaaagccagggaaatagccaggtgctactggacgcccctatccagttgtcaaagataacggagaactacggtgagagtgaggggaggttgaactaactgcccccctgtgcttttctccgcccccaaccatctgctgcctgcagcttagggctcctacgtcttttccacaggacaaggttgtaggagctagttgatgtctttaccgagggcagaagagcccatgatgggggtggggaggaggttggagggttctccctccaagctcttgggtaggataggaagcataagagcctggagctggacagacttgctttcacccccagttttgcaacttgctaaccagctgcatgatcttgtaagagttggttatctgtccccagccttgtctatgcctctgtatccttctacgtgagttttgttttgttttgttttgttttgtttttagtgcagggaagataatagccatctatctgcagtattataaggttttgtagaaaacatctgtgtctgtgcctggttcctattagtcactcaaaatgttagtttcccttc

SEQ ID NO: 41717 - DNA, 700 bp, Homo sapiens
ctcggcctcattgccctgggcacttctgggccctggtgttggccagggtgacagtgccacggcctcctgcagcccgtcccccagctcgggctctgaggggccaggccaggtggacagtgggcggggctcagacaccgaggcctccgagggggcggaagggctgggcggcaccgacctgcggggccggacctgggccactgccgtagcactcgcctggctggagcaccgatgcgccgctgccttcgacgagtgggaactgacagcggccaaggctgattgctggctgcgggcccagcacttgcctgacggccttgacctggccgccctcaaggccgcagcccgagggctcttcctgctactgcgccactgggaccaaaacctgcagctacacctgctgtgctacagcccagcgaacgtgtgaaggctgccccctgctgcttgggctggcgccccacccaacacactcaagtcactgccgcccagggctggcctcttggtgctgggaaagtgtaggctggtgccagcctgtcccccactgcttcttactccctccctagagccctcttgcccccacaaaaagtgcctgcctgtgctctctccctctcctcccaccccactcacactcccctccatcctctgagctccctgcaacacagtggaagggtagagagccacagtccccaaatcctatgcaataaag

SEQ ID NO: 41718 - DNA, 2627 bp, Homo sapiens
gccaccatgcccggctaaattcttttttttttttttttttcagtagagacggggtttcaccgtgttagccaggatggcctcgatctcctgacctcgtgatccgcccgcctcggcctcccaaagtgctgggattacaggcgtgagccaccgcgcccggcagaaatgcatctcttattcaccactgtacctctctctggtaaccagcataatgctaggcatataataagcactaaataaatatttgttgaattaagagtctttagcaagaaagccaagtgccttaagcctagagtatagtttcagcctggaaaggagtagccaataatgcctaatggactcaagtggtcacaagatgccatcattgagaagggacgttcaaagatcacagaactgaacacatggaaaaagctgagatccaggaggagacctgaggtgtccaaagccacagagaaaagcagcagcagcagcagtacaacaattttggctcaaatctgacttctaagctggtttgcaggctgtaagttcagtgcagaaggccaatctctagggtatccacctctgccatgcgggcagattaagatccggttttctgtagagcaggcttggcgctcaggtaagggatatggatgggttcgcaattgacgagtgagtggatacagagtctggtttggagttccaggtctgagatccagtttgggtcgcgggttcaggtctccctccctcccctcccctccccctcggcgcactcacatgccaccctgtgaatgacccagaaggtgatgcccacctccgccaggcagaggcaggcggccaccagcagcgtgtagcgcggctcccgcagcagcaggcgccgctcttgccaggcgcgctgcagccattgcttgcagagtccctctgcctgggccgcggaaccggaccggccgcgtttccgcagcccagccgccatcttaacggtgcgccgcttgtgtgggcccaccacccccggaaacccgaaccttcgacacttaggttccgcttcccgtgcctggcgtcccaccaggctaagcgccgatccgagtagccagtcttcatttactccactaaaatgtaatttttctgcatttgtctcctctgatgcactccacgctccataggagcagggacaatgtcttactcctcagtttatacccagccctgggtacacaggcgctaatttagaacgaatgtccagaaaagcaacattcctgcctacctcccccacaaccgctgaagccagcattctccttcgcctgcgctgggaacatctgtgttcatgctgtctctccaggagggcaaagcccctgttcgcgcccctcctgcctgcccttcgagccttccggatgctgagaaaaatgaacctttcactaattttcagatttcctgataaaagtcattcatattgaaaatatgagaggacgcagtgatgagcccacgtgagtctgacaccttgagtgcggccctaggaaatgacttggcagtacagccggaggattcagggtctggacgatagttttcccagccggaggattcttcgaagagcgcttagtaaaggacggaagttccacgtgtttgtgttgagcaactgcaggtggtgggcggagacaccagcgccccgccttctgcatcctgccttccgtattggctgaagggccggcggctctggctgcccggcggttgagagcatggcctctccaggggcaggtagggcgcctccggagttaccggagcggaactgcgggtaccgcgaagtcgagtactgggatcagcgctaccaaggcgcagccgattctgccccctacgattggttcggggacttctcctccttccgtgccctcctagagccggagctgcggcccgaggaccgtatccttgtgctaggtgggtaatcccggcgcggccccgccaggtagagctggcaggaccggcgccgcatgggcttggcctggtccgctttcctcccgcctgtctatccctcttggaggacgcctgcgttgggacgcgagatccagctccttcagagtcccggctgtatttagtcaaggctaacaggagtaagagattgttggtcccggggccctctggagaaagacagtccctcagagtttgagcgttgggggtacccaagaccctgtccggaccctcgggaggcaggcagccttggggaccggattgctcagaggaccgagatcaagtcctagcgctaattgacttgtaaaacttaggacaagtcatgaacccgttctgagctttagattcagttctagaaatggtactgcgagttcacatcggaggcggcacgcgcaggcacctcgagaataatgcccagcgcttttctttttgcccctgggcactgggagccagagtcacctagagagagtcctgtctgaaacttggtcctatgccttagagagtgagaacagcaccctctaggggtggaggggagattgccgcccagggtgatacgattccccaaagggagacgtgctggaggaaaggtagggctctggggtgttcggctgacctcttgaggttctctcctagtgtcagccttggaggcgctagtaaagtttgaatgagcaacagattttcttccaattgtcgtttttact

SEQ ID NO: 41719 - DNA, 1952 bp, Homo sapiens
aaaccaaatgaggttaatattccacagtggtgtggggctagacacagttacacagactttatacaggcggcaatcaagcgtcctggacgtcaagaaatctagtttgtctgtcgcgccacgcagtcaactggagtgtcactgtgggttctatttacaccgttatgagaaaaacctgtggcggagtaaaactcggtaactccgctcgcagaccgcccatctacagcagtgagcgaacccaaaccccacacggccaagtcccgcgggtttcaggaaactccgaagaggtcgggggccaggggcgactatggcgcgggggaggctgggaattgtagtctccacctgcctccgagggcggggtccgagggcggggctctcaggccgagggggtgggtgggtcgccgagcgccccggctcgccccggcgtttccggtcgcaggcgggctctggaggaggaggggcgccgcgaccgacgcgcgcgagttggtctgggaaaaagggcggtgcgagcgggtgcgcgcgcagcgggccggcagtggcggcggagatggaggagggaggccgggacaaggcgccggtgcagccccagcagtctccagcggcggcccccggcggcacggacgagaagccgagcggcaaggagcggcgggatgccggggacaaggacaaagaacaggagctggtgaggcgcgaccccgagagtcggcgaaggaggctgcggggctgagtcacggcggctccgcaggcctcaggcccgacacccaactaccccaccgcgccagggagagggcggttggggcgaccctcgggactcccggcaccttgcctctctgctcctcattctccgttccgcgctgtcacctccgccgtccccaccaaccctcaccaccgccgcgtgaagtggactcgggcaggtcattgtcacctccgtttcctagagtggcattcaagtagagcctgattcagaacccaggctgatttctcaccagggcttcccattcccactcggtttccttgtccacctggcccctcctaaggaggcaggcttattcttcacctgccccgggtaagtgggaggaggacgtctttgggattccttctcttcatgagctgcttctcccaaccctccagtctgaagaggataaacagcttcaagatgaactggagatgctcgtggaacgactaggggtgagtcacgatgttaacatgattcggtgcatgtttggatctttcccacttgttttattcttttttgaggcaactgctatgtacggtggactgtattttagggtcagtgttatgatgatgttgggaggcaggagagttacaaagggtatttgtacagttttgcagctttctcttgtgggagaagcagagttcttacctcttaacttgggtcatttgtttttgtgccaggcagggtgcagggagttgaggaatcacagatgaatgaataagacacagcatttccttggaggagttgttaagttaaatatctctgtattatgacttgaaggggtgtgactcctttttgtctgagccctgtcgtctcttgatcaggagaaggatacatccctgtatcgaccagcgctggaggaattgcgaaggcagattcgttcttctacaacttccatgacttcagtgcccaagcctctcaaatttctgcgtccacactatggcaaactgaaggaaatctatgagaacatggcccctggggagaataaggtaaaactgtttcaaacctggtggaggcctagtttaggaattcctttttacccagatcatggggggactcattgtgagtcacaggaagcctgatagacctaagccgtgatctatttgagcagagttcatcacagtcaaaatatctacagaagagctgaaaggaaggtcagcttctcagaagacactgtttctgtcatgtgtattggactttggggtttcattagcatggt

SEQ ID NO: 41720 - DNA, 2481 bp, Homo sapiens
gtctcgatctcttgacctcgtgatccgcccacctcggcctcccaaagtactgggattaaggtgtgagccaccgcgccccgcttattttttttttttttttgccgagactttgatttcagtttctcagccctcaaccagcacttcgccttgtacttagcatgcactcaataaatggttgcttaaaatatgaatgaactaaagaatcgcggaacagagagaaacacagaggggaatcggtctgggagtttcaaagttcgggaggggacacgggggcgggctgtggctgtcacgtgacggggcgggggcaaatcccatgtgctcggcggcgcagatcgcccggcgcggctccgccccctgcgccggtcacgtgggggcgccggctgcgcctgcggagaagcggtggccgccgagcgggatctgtgcggggagccggaaatggttgtggactacgtctgtgcggctgcgtggggctcggccgcgcggactgaaggagactgaaggtaaagccgccatgtccgggcccgacccggcccccccaccccctccccccgcatccgccgccatccgggccgggaccggccaccctgcgccgccgccccggcgccctggccccgcggcccgacccagggccccggcccgccagggtcccgatccccggcccacgtgtgcctggcccggccgggcctggctgctgggtgggggtggggagcgcagggccggactatgcgggccccgcgggctggtagggcgccgggttcgtcgccgcgaaatgccacctcggcctgacccgaggaggcccggcagcccacgggcgcaggcaccacggctcccggcccgccgccccctccccccttcgcggccaggccgccgggaagtgacacgttgttctttggcactggcccgcgctgcgcagggagggcgcaggggagggaggcggtggcggcgggcagggaggagcccccggccccgcccgccctccgggccgaccctcacttgcctgaaaccggctcctcgacggccgccgcccgcctggccttttagggcctgactcccgcccttcctggcctacactcctgggcggcggcaggcctagcttctggcccagtgcgggttccccggcggcaggcgtatcctgtgtgcccctgggccaggcccgaacccggtgtccccgggtggggggtggggacgccacggccgaagcagctagctccgttcgtgatccgggagcctggtgccagcgagacctggaatttccggtctggttggtctggggccccgcggagccaggttgataccctcacctcccaaccccaggccctcggatgcccagaacctgtaggccgcaccgtggacttgttcttaatcgagggggtgagtgaggggtctgtttcagtaggtcaggggttggttggaagtgatgcgggtttgacagcatgttggtggggacaggctgtatcttttctgcttcaccctcttggcatctctgggactccgtatgggacccagcccttgcatcaaccctttcaccgccccatttgccttaagcttgggtcccttcctcttcctgagcgccactctttcccaacaggtgctggggggaccctgatgtggcaccaaatgaaatgaacaaagctccacagtccacaggccccccacccgccccatcccccggactcccacaggtaattagggaggaattagcaggggtgggggtgggggagaccaggcagtctccagcctctggatcttcctacccccatctgtgtcagggcaaagtgcagccgcctgctgccaaattgagacagggcccctgggctgtccccgggggctgtcacggggagggggtatgtggattgttaaggctcttgccgcagatctgctccccttatttcaccagcttgggtttctgccccacctgggcttcccctcttgctgaactctggtctcccctcttcagccagcgtttcccccggggcagacagcgccggtggtgttcagtacgccacaagcgacacaaatgaacacgccttctcagccccgccaggtgaggggctgtggggaggggagtaggggacctgggtgggagcagtggaaagctttggccagtttaggtctaggatggaaactggaggccccatacctggccttaatcctctgtgttctttcatgcggctctgcgccttgccctgttgattactcacggtggctggtcccttggatagtatgttgtcaatgagggtggcattactgggatcctagtgcctctgagaattgggggcagtgctttgggccctgctgccagctcttgctttcctatttgctccttttaccggaggctgctattgctctattgctctctctgctttctctttggactgtggtgaggtaaacactccagctggtccttgcctttctctgttccccagcttcttccttactaagtgggaggattcttgtcctgtcttattgccttcattccct

SEQ ID NO: 41721 - DNA, 1293 bp, Homo sapiens
cagcccaaggggtgcagcagtttcccactggcgtggcccccaccccagttttgatgaaccagccaccccagattgctcccaagagggagcgtaagacggtgagtagcagtgaggggctccgggacatctgggaaggggagaatcaaggtcaggtgctgctgggacattgtgccggaaagagcagtgacttgaggaggaaggagctgagagtgggcagagaatggtgtctgtggagggctcaggttctttgtaagatgctaagatttcagcatagaagcaggtcatgggaagactgaagtgcctagcgaggaagttcctgcgagacctgggtgctggggggttggaagaactatgcttggttttgggtttctagtggcttgccttggaaatggtttgttttctgtggccccagcccccattcccccctgcccccccagtcctggaagctctcaaggcctccgcctctgctcagtcctcaagccctgggcgtggtgcccagaatagggtgccagagctggggaagccgctgagtcaccctggctccacctactggatctgggccctgcccccagagatcaggcacactagccacaagtgagccgattgggttctagatgggggtcctgggccccagggtgtgcagccactgacttggggactgctggtggggtagggatgagggagggaggggcattgtgatgtacagggctgctctgtgagatcaagggtctcttaagggtgggagctggggcagggactacgagagcagccagatgggctgaaagtggaactcaaggggtttctggcacctacctacctgcttcccgctggggggtggggagttggcccagagtcttaagattggggcagggtggagaggtgggctcttcctgcttcccactcatcttatagctttctttccccagatccgaattcgagatccaaaccaaggaggaaaggatatcacagaggagatcatgtctggggcccgcactgcctccacacccacccctccccaggtactgtctgcttttcgagtgataccctggctgggatgtctgttctgccctggactcccaagtccctggatcttttctttcaactaagggatttatttccctgctttcctggatttctaggcagagctaaagtagaaatggctctagtaaagaagggttgtgggactcttcagtgcaaacttggtaaccctttgtgtcctgcagacgggaggcggtctggagcctcaagctaatggggagacgccccaggttgctgtcattgtccggccaggta

SEQ ID NO: 41722 - DNA, 5648 bp, Homo sapiens
ctgaagggcccaattcagaatctggggatcatttgtttctcccatacaggccaacctgagtgagcagcagatagtatccaacacgttagttcgagccctcatgacggctgtctgctattctgcaattatttgtaagaggaaccagggagatggaggggcaagggtgggcctgacagacaagtggagggaggtgggtgtcagccttggcctcccagttctgaaccggggtaagggtatattgctccactcatccctgtcttcttgtagttgagactcccctccgagtggacgttgcagtgctgaaagcgcgagcgaagctgctgcagaaatacctgtgtgacgagcagaaggagctacaggcgctctacgccctccaggcccttgtagtgaccttagaacagcctcccagtaagagccaggccatggggacaggggtggggtggagggactgccagatagcagggcatgagacccttcatggaagggtcttaatccaagaaaggtaggtagtcattagagagcaaaatgccctctgggtttcattctttccttttacgtttgtgttgtgttgttcctacaagtggaaggagttagacacagccttgaagggtaattgcctgttttgtgcctagccatgtgtttgatgccaacagtgcagaggtgataaatgataggatcttcccagtaccgtgtgcccccacggcgtggcacagggctgaaatgctttgcttaccttgcctcatgtagtcctcacaaatgttgtttagggtggatggtattacccctattttccacatgaggagactgaggtctcagtgaacatgtctcaggttatgcattcagaacataggtatgtgtcagggcattggcatgctcacagagaggaagccgagcaatttcctgtgctggcctggagttagtactggcgtgagcaatgagcctgggaagacgggtgctctcggagggaggacacctggtctgaggggtaatgagtggtaattcactccacaacaactgggaaggggagggggagaatgtttgaagcgaaggcactatgtgtgttctttctacctatggtaggaagaacttgacacagggaaaagaactattaaagaaaggccagtgtgggagagcacagcaaccagtcctaagtgaggcaagatggggccgaagagagggatgtgggcctgaccacacagggccgggtgtaagccatggccagagtctggggctttagcctgggggcaagaaaacgcctttgtgggattttaagcaaggaataaaggaatttgattttagtttttagatcatcttggcaatagagggaagagtggtttggaatggggtgagagtggatgtggcagtgttagcaccagtggctcagccttgctggtgatggtggagaggagtaggcagatcaagagatacttaggaaatggagttggcagcttttggttacactggtctggggagggggccgtgagagattagaagtcatggatgactcccaggatggtttttaaatcacagtgggcttagaggccatagtgtgatgtcatttgctggggtaggcaacggtggatcaagttgagttgtggtccttgagtaagggaatcgagatgtcagctcaatagctggggtatctgggtccttttggaaaagaagagatcagggcaggaggcagctttgtgaaatgccggcacagggtaactcatgtgcaagtcataagaggatacgggcttgcctgagggagagtgataagggcctgagatacagccccaaggaggtagagcggacatactggtagggaccaaaggaggacaggcccctctgaaccaaggacagagaaatttgaggagagggatgtggttgataatgccagatgctgctgtgagcgtttgtaggagtgggcctgaaaatgcaggatgtttggaatataaaaacatagaggccaccctggcaaaaacagtatttagtggggcaggggacagattctggattggaaaggactgagaaatacttaagtgagacagaaagaagggaaaacatcaagtgtagacaaaatattttattagctgtaagatagtggttgaaaacagggctttttgtttttaggttagagaaacttgggcttgaaaatacagggcagagtgcataatcgattggatggggtccctgggtgggtatgtgtgggatttggagtgtaggtacgggttaagtgaaggttctgccctgctatggcccattgctatggggtgggggtagcaggtgactgtgcccctaggcagtttgtgactttgaggctgggcatgccctgcagaacatcctggctggcagcatctcatagatggcttagaagtgtaaggtttggtttggaaagactggtggtgccttgtgggcactggggtcggttgtgtttcaggggttataggacacgttgcttgggaaggctacccagcagctaggggttgaggagaaagagggcccgaacaggtgatgcttgagttgagtcctgaaggaacaagacacgaggaagtttccggcaaaggatatagcatccacaaaagtgtcaaggccagagaaggtgtgtatgtacaggaaatgtgtggggaaggaagggaaattgagatcaggagttgtcaggatctgtttggggggcagtgaatgttcaggttacatgtaggatatatataggactttatgtatgatatatataggacttttagcgatttcctgaattcaggagtaccaattctgaatatagttttctccattaaatacatcatgggcagagaggtttcaggctgccaaggtgaggccaagcaagtttgtaaggtttttctgatggccaagtgactcattgctgtgcagcagtctcagatcatgagattagcatcctgtcagaggcctagtcactctggaatggccacaaatgtcaggctggtgcatcagggccttgtttgaacagtggaacttgggagggttccctggggtgggctggggtggcggtggccagtcacctctaactgctgtcccgcctgcttgcagacctgctgcggatgttctttgacgcactgtatgacgaggacgtggtgaaggaggatgccttctacagttgggagagtagcaaggaccccgctgagcagcagggcaagggtgtggcccttaaatctgtcacagccttcttcaagtggctccgtgaagcagaggaggagtctgaccacaactgagggctggtggggccggggacctggagccccatggacacacagatggcccggctagccgcctggactgcaggggggcggcagcagcggcggtggcagtgggtgcctgtagtgtgatgtgtctgaactaataaagtggctgaagaggcaggatggcttggggctgcctgggcccccctccaggatgccgccaggtgtccctctcctccccctggggcacagagatatattatatataaagtcttgaaatttggtgtgtcttggggtggggaggggcaccaacgcctgcccctggggtccttttttttattttctgaaaatcactctcgggactgccgtcctcgctgctgggggcatatgccccagcccctgtaccacccctgctgttgcctgggcagggggaagggggggcacggtgcctgtaattattaaacatgaattcaattaagctcactgcctttctgctttatgccctgctccctctagagaaggtgtttataggtggggatccttcccagagctggtactgtagcgctgttccctgtaacctggcacccctcctgcctcttcccctgtccatgattgcagggatctgaggtttcctggaaggttgggccctcagatgggcttgataggtgccttcctggtccggagaaaagggagattagtgataggacatccttgctaggctctgctctcctaccagaatgattcaagcccctgtgtggggaaggcttttgggtttcgggttgtttatagctggagaatccctttatggcttgaaggtgtcatctgtaaaatgaaggggctggatgcatgaagggaggttttgcgaccccgtgtagtgtgactgggctggcttagtgagtgttcgccgcccctgccttcaggtggcagtcggctctgggaggagaggaccggcattttcgaacccggtccaggccgcctctgcgtggctgtgacgtcgctgcgccccgcctactttgggtggtgacgcggcggtcacgcccccgcgcttacgtcaccggcccggttccctctccggggagcggcggcggacgcgcggctcccacccctcccctctcacgggctctcccctccccagtgtggccgcgaccctaccctctgcaaggcgatggcccgcgccccgagcgcaggctagcgtgcctgggtgcccggccatgggctgtatcggctctcggagcccggcgggtcagggtaagaggcggaggccgggtacgggttggggagtcgggctgcggccgccggtgcgcgggccgcgggtgggtgggggccttgaggagggggccggtgtcgggagagggaggagcctgcaccgggaggcgggccaggcaacaggagggagcgggaatgagcagggaaggggccagaccgactccggttcgctcccacggcctgcctgccttggggttttgcagggcagacgcatggtctcgccgctggctgccgtgtgcccactgctcagggtggccggagacgcacagccccgggaggggctgggcagcccgatgcccccaccactccagccctcggcgactggccttgcgcgcccacacacacactcccctccgcctacacctctgccttcacagtcctgggagtggccctgtgctgggaacctgcttctcccagccgtgtccccatcttcttaaagaggtagcctttcggtcctggctaagcaccctaccacagaatttttgtcggacattgactcccctcttcagtcagtcggcgaagggggactgaggtcccgtttggggcacctgtgaacactgaatcacctctcacctattacagttgttttaatgtcctgcccccactcagcaaaaacaaatcactctactctgtggagggaaagaggaacccagaggcaggccatcagggcttccttcccacagtgctgacccctgcctgggcctcggtttccgtgggtggccatgcacaccgggcctggccgtagtcctgtgcatcagaggtcggccagcttcctttactccggtgtggtggatttctccacgcataaggcaaggcaggactgggtttgggatgggtcctggaccttcagggcaggtggtcagtcacacaggccttggtgtggttggtacttgatgttctttggagctaagactggctgagatttgtacttcccttgaggaattctgggatttgtagtcctaagttaacctcgtggcttttgaagctgaggagcagctgactgctctgatctctctggccctatcaaggcttggagttcaggaagtcatcaccttctcttgtcaggggtgagtttggctgacctcaggactggcctcgagagccctggttaggtaccagttgggggccagggatggcctgtaacctcctgttttccttctggttggtagcatttctggggaccaa

SEQ ID NO: 41723 - DNA, 1051 bp, Homo sapiens
aaacgatgcctggctccaccacagagcaggaggaggctgctcccacctcccatcatccaagcagtatgtctaaaaaacatctccgcactgagccaactcccttctcctccctccttccccactggcctgagtccaaacttgtagggggaccaagatccccactgtgtcctgagagcctagaccagccctgggccaggctgctggccctaccttgtgcaaagaggtccgctccaccagctggaagggagcaggatcaattttgcagtcactgaagttgacaggttcatctagttgctgctcctcccactccagaatctgaggggaagagactatgaggtttagggagaaggtgcctgtagctgacctcacctccctgaaagctggcctgccctttttccaaccccgtggtccctcccatggggacagcagccaacatgatgattgaacacaaccaggaagaaacagggtccagagtccagtggcaccttacctcttcagggctcatctcgccttccaggtccgcgtcactctagtagagagggagggaggctggcagctaggggctctggagtttatccagcctagaccctgccctccctgcccggtgccgccgagatgctagaagagcaggcatacttactgccagggagattcggacacgcttcagcttgcgcttctcacaggattccaacttcttcagttttgttagagccaaaccagaaagatgaggagttgaggttatagggagaggggaggtgaggggaagtggtggagcccaggggaaagggcacgccacaggacctgagctgacagcagggagggccgaagggcagggagaatagaggcaggcactgcagggttaatgacgtggtctcagcattggagagggagctggggaaaaagcaagctaggaggacaggctccagccactcacctccgaagcagcctcagggggtggactgccacagaagaggctccggagggcgatgcctgccgactctgcgctccctgtgttcccaaacataaggccccagggggcaatgtcatcttt

SEQ ID NO: 41724 - DNA, 3047 bp, Homo sapiens
gttcaatggtgtgaatggtgccgcggaaggggcagtggggtgctgagacttgggcccaggtggtgaaggggaggtgcaaagaaaacgtgcatgttgtggggtgaggggaaggacacctgagacaagtacctggtgtccttgtcctctgcaggccctcagcctcagccagaaaccagcatgcagttttccatcccttcggccctgcagcctcagacttccaagcctcagtttccccagctcaaaatgctaggacaggattagggtaggcccctggtcctcgcgcttcccagggtaacctggagcaggggtcccggagcgcactcctggggctcagctcagcttcacttaccagggtctgctcgtactgcagcgcccgtggctccatcccttcctccgccgccgcggccgccatctccgcgcactgccctctcgcctccctcggcggttccggctctgtcctggactcggctcccggcccgcaaagtccgcgccggcagccgtcccgtccccgcagcccgggaggccgagagcagagtgcggcgggcccccggcgggcgccgctggcgcagcctcccgctcgcgtcccctccccggcgggcgggccgagggcggtgccctctgcgctgctccgcccgccggcccatccggaggggacggcccagccaggctggggtccgcgcggggcctcccgagaggcggcaaggggcgctgggaaggcgcaagcccgcgccggctccctgcggatgcccgggtcggagaggggcgcccgggaggggcgggtctactggcacgtggaggggccggcccgggttcgcggttccccgtgcccaggcaggaggggctgcagacgcctgagctccgtaggggttggggctgggggctgcggagctgtctacatcggactcctccgggtcagcccgttaggagccgcctcccctctgcccctccgaagagacgagcggcccagacaggcctgggaaggcccctctgccccgtcaggggtgaaaagcaaagctggaaggattcggagagggttggggccgtcttcctcatccttccttttctcggggctcccgtgggtaggtgcacttggagcaaccgggcctgcggggtgtgcgggggtggaggttggggagggcaccggaaggggtaggccggagggaagggagctccaggtgccgggaagtctactcctgggacgcgggcgtgggtcgcttctccctggctgggcccaaggaggaacccaagtcgctgcttccatccctccgctttgggggaactgcctgctggtgttctgggttctctatcaggggctggggaaggatagaacagagggcggagcgcgcgcagggtggatgggcagcgtagagatagtgtgagaggagcgagggcagcgcccaggaaacgcacaagtgtgcgggagagccagcaccaggagtaaggggcatttgggaggcagaggcggggctcagggggcgggagcagtgcccgggaagggggggccttgtgatagaagccagcactcaggaggaagggccagtgtgagggaagagctggtatccaagggacagggcagtgccaggctgaaggggcacggaggggatccgtgtccaggagaaggcagtggagggggaacgcgcagcactaagctggaggggtaatgcccgggggaggggggtggcgggagcccggctgaaggggcggtgtaggggaagagagcagggcctggggggaagagggagggcagtggtgggagggtgcagtacgagaggaggggacaatgcaggctttcctcttctccatagcgacgtcatggcaaattcccaaactggacggatccggctcgggttacgtccagcagggccgagccggcccaggccggccccggggtcctcggtgccggctggaggggctgggcacctctggggcggggttctgctccacctgccctcggcgcggactgtgccctcggcgggcacgcggaccggcggggtagggctagggcccggcttctctgggccaaggatcaaggtccctgcctgggttaggcccccacgcattccagtcttcggaacccggcctctgaagagggcgcagtagggccccagcggagcgcgagaacccgctctacagcctattgcttccccgccctgggcagagccacctggacatgagacccgccctcaatgccgaagcctctcggaagcaatctttcgggacggaagttaagtagccccgagcgggaggctgtggcggaagtggtcgcgttaccgcttgtttgtgcgcatgcgccactctcgtctggccgccgcgctttcaggaggtgcttttggttctctccggtcttgtccacgctagggggtgcacgtactcccaactgtggtcgcgctctcaccccttctgctgctctcgtggccccctcgcgatggcgggcatcctgtttgaggatattttcgatgtgaaggatattgacccggagggcaagaagtttgaccgaggtaagtaaggtatgtaggggcggtttggaggaagaggctaacctcgcggacatgcccctgggccccgtgtccacccagctcttgtggcctgcccctaccagcaggtcctggtgtagggacctccctcagtaaacattttatggatgagaaaacggagactcccgagctctctctggcttcacgcatgccgtgcccggtgcctgggtggccttttgtcatggtgctggcaaactcctaggcatatttataatcgctacctgctctgtgctagacactgtcttgtgagaccagcctggccaacatggtgaaaccccgtctctaccaaaaatacaaaaattagcctggcgtggtggcgggcgcctgtaatcccagctacttgggaggctaaggcaggagaattgcctgaacctgggaggcggaggttgcagtgagccaagatcgcgccactgcacgccagcctgggcggcagagcgagactccgtctcaaaaaaatgacagtcctcatgaggtgggtggtgcctttcccatttttctctgagaggttgagta

SEQ ID NO: 41725 - DNA, 3782 bp, Homo sapiens
gaaaatgggatgcagggcctgggtgaggaactggcaaacgggcgcaatatgttgaggggtaacttctgcggtggggagtggggctggggaggggaactgcacaaagctgtaactgggaccactagaggtcaggattaaaaggcggtatgggagaaattaacctctattctttccctatctacccccacacataaagccactggagcttttctctggactccaagtcctgaaatactccattatctgaggccaagagatgggctaacagttctgggacttccttcctgagaccagctgcccaggaacgggcacctgctgggtgatgcccaccttaggggcttaccttgtcttaggcgcccactaacatatctgtctcatagctcacacctgcctccctgcccccttggcagaaccccttccggttccttcacaggaccccccacatggcttcctcctcctttcacaagttgtgcaaagaggcttgcacctgattcaatattgggatttcctgtaggtctgtcaacatgagtgggccctcctcccattaccctctccttgcgccctggcttgcctggcccagcttccccagcaccagattcagaaccttaagctaacgaggaatgaccagctaagaatggggattggggctgtgtccatcttactactgtgtttgctaagccctaagtgcagctccctctcttattttctccctgggctcatgtcccctttccttagggccagccagggctgtgctgtattccaccaagtaagtgatcagtccctcagaaaccagcaccccaccccctacccctgctctgccctgctcctcccattctgggaaggctacactcttctcgacaaaggtcagtgcctgtaggttccagtttgcctgcccctcccccagctgggagcccatttctctttgctgtcctttctaccctcacataaccccacaccctgctggccactcaccgggtggagaagggctccaggacccaagtgcacagcaggcagccctctggggagcagatgggtaggaagacatgtggcggtggggcacagcccctccacagcagcaggtcatacgcctgcctgggccacttctgcccaatcagagaagggagccaccagacactggtgaaggcccccggaagtgacgccttctcttccctggagcccctgcctggaccagggtccactcctccacccacacacaccacggagaagatttggatagggggatccatcttttcctggacatgggcaacctgggacctggagggggacaggagcagaagtttttttccaggaggaatctggcaggacatttgtgttgctggggaagaagcacagaggtcttgtttaagattggtggggttttcactccctggctatccaaatttcttttccctggacatcatacctgctgctgaaatccaacaggatgcttgctttcctgcttttctttctgtaatcccctagggagtcctatcttgtcattccccctttcgaagtgggaacacggatattgcccacatgagagaaatctcctgttatgggttggtgttatggggaaagggtttggacgggttgagtggactgtcaggtgcggggcacatgtatgtgcgcacacgtgcactgggttaagcctgagcttaggtgctcgtctgctggggtccagtggcttagatggctacacacacagacctctgtgcccagggccctcctttgcttgttctgtctccgtcttccatctcctaccgttccacatgtgacaagaggaataaccaggcccatgtgtccctgtcttaggaaagacagctgctggacctcccccgcaaatacctccctgctggccccccttttcctttggccctggctctagctcctttgctttcttcccagtcccagtctccccacagtctctgtcctcaggggcttcctggcctgaccttgatcccatcatccccctgtcccccagaacttcctcaggctctctcctgttcctcctccccaaggatgggcatgtctgctgagaagtgtggcctagatcctggaattttcccgtccagccagacgagatgtctcccaagattaggaaggagggtgctgggatagctgggaggatagtgggtgtgtgtgggagggagagacaggagacagggaggcaggcatgaccagggaaccaagagaaaggaggctgggagtgggctggagaggcagagggtcccttgggtgaaggaagggggtgagaaagcaagaggggactgtcgaatgcgcctgaggataagttacaatgagagggagatactgtcactccacagaagggggaatgctgccggtttctggctaggtccctgtcctgggtaacacaagaatgaggagcgacctcagagagaaggtagggaggcaggctaggcagtgagagagggtggtgagggtttggggggcgctgtgggcccaggcagggggagatcggctgatggacctttcctgtacgttgtcatctttaaagacaagtcttcatccttcgggcggaaccgggtcctcgctcacagagcggtccaggcctcaggcctagcctctgcccctccctagcctgaggctcccttcctgggctggacaccgacctcctggtccagccgccctgtggccgccagcagcggggggctccgggcccgcctctcctccccctcttcgcgccccctggtccctcccctccccctcccccgctcccccttcccctcccgcccctccctcctcccctgcccggtcccagcccctccctcccctcccccacccgcgatccgggccgctgctgctgggtcggaccccccgggctcagcccggcccctcgccgagctgccgccgccgccccgtttgctgaggaggaggcccccggccggggcgtcgggcgcggggcataaaacgggccggagccggcgcccggggcagtagagccgcgtacggcccgggtcagcgcccgcccgcccgcgctcctcccggccgctcctcccgccccgcccggcccggcgccgactctgcggccgcccgacgagcccctcgcggcactgccccggccccggccccggccccggccccctcccgccgcaccgcccccggcccggccctccgccctccgcactcccgcctccctccctccgcccgctcccgcgccctcctccctccctcctccccagctgtcccgttcgcgtcatgccgagcctcccggccccgccggccccgctgctgctcctcgggctgctgctgctcggctcccggccggcccgcggcgccggcccagagccccccgtgctgcccatccgttctgagaaggagccgctgcccgttcggggagcggcaggtaggtgggcgcccgggggaggcgcgggcggggagtcgggctcggggcgagtcagcgccagcccggagggggcgcggggcgcaggtggctcggcgcggcgggcggcccggagggtgggcgggggcagaagggcgcggtgcctgggacccgggacccgcgggcagcccccggggcggcacacggcgcgagctgggcagcggcctccagccaagcccgtccccgcaggctgcaccttcggcgggaaggtctatgccttggacgagacgtggcacccggacctaggggagccattcggggtgatgcgctgcgtgctgtgcgcctgcgaggcggtgagtgcaccccgcggccggcccgggccctggcgggtggggagcgccgggtcgcgcgggcgtcggagtggactcggagctgctgagaa

SEQ ID NO: 41726 - DNA, 1462 bp, Homo sapiens
cccaggtcatcaatgccgtggagcaggattaccggctgccaccacccatggactgtcccacagcactgcaccagctcatgctggactgctgggtgcgggaccggaacctcaggcccaaattctcccagattgtcaataccctggacaagctcatccgcaatgctgccagcctcaaggtcattgccagcgctcagtctgggttagtacctctgcctctgctcccgccaagccagtagccctatctcccaccttcaagactcaccaggtccttctcttcttcccacagcatgtcacagcccctcctggaccgcacggtcccagattacacaaccttcacgacagttggtgattggctggatgccatcaagatggggcggtacaaggagagcttcgtcagtgcggggtttgcatcttttgacctggtggcccagatgacggcagagtaagtgtgcctcagatttggaggagcagggcagggggccctaggctgggcccagagttgagggcacgaggaaagggactgatcctaatttggctccacctgcagagacctgctccgtattggggtcaccctggccggccaccagaagaagatcctgagcagtatccaggacatgcggctgcagatgaaccagacgctgcctgtgcaggtctgacaccggctcccacggggaccctgaggaccgtgcagggatgccaagcagccggctggactttcggactcttggacttttggatgcctggccttaggctgtggcccagaagctggaagtttgggaaaggcccaagctgggacttctccaggcctgtgttccctccccaggaagtgcgccccaaacctcttcatattgaagatggattaggagagggggtgatgacccctccccaagcccctcagggcccagaccttcctgctctccagcaggggatccccacaacctcacacttgtctgttcttcagtgctggaggtcctggcagggtcaggctggggtaagccggggttccacagggcccagccctggcaggggtctggccccccaggtaggcggagagcagtccctccctcaggaactggaggaggggactccaggaatggggaaatgtgacaccaccatcctgaagccagcttgcacctccagtttgcacagggatttgttctgggggctgagggccctgtccccacccccgcccttggtgctgtcataaaagggcaggcaggggcaggctgaggagttgccctttgccccccagagactgactctcagagccagagatgggatgtgtgagtgtgtgtgtgtgtgtgtgtgtgtgcgcgcgcgcgcgcgtgtgtgtgtgcacgcactggcctgcacagagagcatgggtgagcgtgtaaaagcttggccctgtgccctacaatggggccagctgggccgacagcagaataaaggcaataagatgattctcttgccccttcttatt

SEQ ID NO: 41727 - DNA, 534 bp, Homo sapiens
aaggagagcccagggcttccaccaggccttccacctgccccaacctgcctgctctgaacatttttaagcattcttcaggcacccgctgcaagggcacctcttctggggaaatacccctgatccccaacacagctggagtctcctgctccaggcttctgggctcacacttcctggcagctcttatcaggctgcttggtaattgtttgtttttccaacactgtttcacaattactgtgcaatttacaaacttgacaactcagtgtgatccagctactgcagaggtgccacccaggtgctgattcctgcagggccagcccttccaaggaagaaagcaccacccccagcccttacctgtgcccacccccaccccagggcctacaccagaacctggctggaggaggcccttggtaaatgtttatcgactgaaggaacacgtgaatgagggatggagtggaggctctgggaacaaggcagaggggaagagatgcttcttgttaacatctcttcataaaagccagtgagttcctacatcca

SEQ ID NO: 41728 - DNA, 1525 bp, Homo sapiens
cctggccctcatactggcttcagctctggccttggctctggccctgtcggcctcgtctgctagggcctcacggtactgcactggccagtgctgcggttccttcttatgcagtttggccacgaaccccaggacttccatcttgctgatttccaggttgcttcggggaccccaagagaattcatattctggtggattggtgtgaggcacccgcctgtaactgagatatcgctgctgcacaaaatcttccataataagcctcttcggatacccaaagaggaaatgatactttgagggttgcacccccaaccgacgcagcatctcccagacctgggcctccctggcgctattacctctcatatagataaggcccaggatcatcattaacagacccaatctggggccatctcctcccagatcctcctcctcctcctcctccagaggttttagtttgttgatcaggatgtaagtgtggtgcttgcggtcaaactgtttcagctcaaaaccaaagacataccgcagatgctctgcggcccttgcgatgatgtccgggaacagaatcttcaagtctccaataacgtatttcaccatctccgagcgtgtgatgggactcttcttcttgtctttcaccaggaggaactgcaccaactccgccaccgtccgattcagccggcggtaggccctgcgccttgccaaggctttggccgccaaggccctcgcgcctttccgggtgagggcgggctccgcagccccctcctccctcccggcgccaagctcctccttggggcgctcctgcgaggcggtcggggcccgggtctcaccatcatggccgccatccttctccccctcggcctgcgggaccgggagccccctgctctctggtgtctgcaacatgttttcgggcaggcaggtgcagagcgcgtacacgggccgaggggtgtgggagccgccgcgcaagccccgggggaggggttggacagcggcagtgacggcgggagtacaaggagcaatggcagcgggagctttgtggctgctgggccgcaccgcacgggagtcaaacctgcggccgcaacgccgccagcagccggaacctgcggcgcgcagcctcagtccgcgcccgcgcgaggggccacttccggccacctcagccaggacggcgaccctagtgccgcgcgcagcccctccttttccggtcccttctgggttgggggtgtgcccaggctgctataagtggaaatgccctggagggtggggacgggggtgcgccctgtgacggattttaggcttgaaaagtcgggggcgggggaatgtaaccaggactctcccatccaaggcatgcagactggggaatgtttcggtgtacaagagatgaaatagggatggagtgccccccacgttctttctgcaagtgcctatttgtgagtgtgtgtatctgggattttcagtgctttaccggggctcttgtgcagagtgcacggtgaaggctgcgaggtaagactgtgcgaaccaattagtaaaggatgctagg

SEQ ID NO: 41729 - DNA, 1037 bp, Homo sapiens
ccaaaaggcagggaatcaacttcccttctgggctggctgcaagtaagttcactttcttaaaggaggagctttctcctctcacctcaaggactgttatttatttgtctgcgctactctttcgacgtttccattctcttggtcctcaagatgtgaatcacccattttttccgtaggggggaagacggcgtatctctggccctttaaataggggcgtggtgaagaggcgcggaccgcccaggagggggagcagtgcgaggaggaaagcggaagcgctgcccgcagtggtaggtagtgcgcgtgcgtgaggctagagcagtgggtgcggtcacgtgggccggcggtccacggccggaatggcagcaagctcaggtaacgagtttccagagagcgggcccgtggaaggagacaggattgaggggccgtattcagggtaggaggagagcgcgcgacaggtctctgagcctcggcgtctcctccccgcgcgacagcggcgggacctcggggagcgaacagagcagcccctgacgggctaaccggacccgagccacgggccgggcggggttgattctcgagtggaggggcgtgtcgtacgttggcccggaactgggtcgggcaatttccacttactggttccaaatgaatgtgaaaattcaaatgggcttaagtaaaaagggatttattggctccaaacctggaaggggctgaggtatcactaaatccagtgactccggtgatgtatttgtgtatctctccctttctgcaaagggccagtaacccctcagttccctatctactttgcgactataattgcaagcctcattctgtcctgttacagtcgtgcggcaattaggctgagggactggcgcgcccgctcccccgactgtgagcctaggcggcgggtgtcatgcccctccccactcccgggcggaacaggtgtgtagccggtctgtcgggcctgggaaacaggtgtggacccctttagcctccagggactgatatcaaggtgcctgagcctgaggcttagatggggtgtccac

SEQ ID NO: 41730 - DNA, 1077 bp, Homo sapiens
atcattactctatacacgattatatactgtataattgcaaatacatgtacatttatattctacacatttttatatcacaattttacatttttctatatagttttcatgattataatttaaaatagtaacacataattgtctaaagccctgaagtgttaaaaggtgaattacaggtttaaagcaaatggtgcctcaatatttggatgccaccaagtggacaaactgtataatgtcgttgagatgaaacactattttgtaagttttataaagtaaaaatgcttaatttaatgtttacaattaattttaaattgtgaataaattaaagttataaccagaccattttagaaatgtagctaaggttgagacctggatccaggtctcctagatcatgaacctcaactatttcttgaagtaacttaattctcaaatcagaatctagggaaatcacttaaggaaaagaacttcctgttgaaattgagacctttacaaactaaaactacagatgtgaatgacagacacgggtctacctttagcaaaccaaagaatcatttcgggacctccaaatgcaaatagcctttgctgtgtgtctgtcaagtgacttctaacaaaacaataagccccctcgggaagcacaatgatgaaaacacagtgaaggttgcctgaaaggccgagaaaaatagtaggaaatttatttctatttgggcaaggacttgctgattctctttaggggtctccattattttctccccatcgttcctcccctctccagttcaagcttttactttcacattgaaacagtaactggctagagccacaaaaaagaaagattatttcaggaaagtgtttggtctctgccaaggtcaacaaaagaatgactccttcaaaagaatgcctttgaatgacactgggccattgcctgccaccaagcgggagaccagcactctgttctgcctgtaacgcaatactcttcccaattatttttttctggctatttttaccctctccatcttgctcatttaaagatgacaacatccatagactgaaaagaaactgtgaaacaaacaaaaaaacctctgt

SEQ ID NO: 41731 - DNA, 1210 bp, Homo sapiens
tctctcacatctcgtatctgctctgtcacaaaatcctgttggctctactttcaaaatatctccagaatctgaccatatcttatgatttacattgccactactcagatccaagcccccatcatctctcccttggattatgatagcagccctcagtcttcctgtttttgtccttgtctccaattagtatattttcaacagccagagtgattgtttgaaaaacctaagtgagagcatgttactcctctgcttgaaacactccaatgcctttcttcctcattcacaagaaaagccaaagttctttctataaccttccaagcccaaaaagatatgacttcatcctcttactacttttcccctgactcatttcattccagttacattgaccttcttgctgttctttgaacattccaagcatgtccctgcctcaggtctttgtacttgctattttctgtatgtgggatttcttcctccagatattggcataacaagcttccttaccttcttcaggtctttactcagatgtcattttgtagagaaaccttttctagctaccctacctgaaatattaattcacctcccattcctaacattttatatctctccctttctgttttgtgttttcttagcacttatctccacctgtctatatctatctatctatctaaattatataataggtaggcatatgtgtgtgcatacagttgtggtggctagtctccaaagtgacccccagcaagtctaaccacttggtattcaagcttcttcccatactgaatagagaagacctgcatagccaataggagagtttagaaaagatggcatgtgactctaacggtaggtcataaaagacactgtggtgtctttctggaggaagcgagctgtcacactgtgtgaatactcaggaagctctatggagaggtccccgtacataggaaaggaagcctcctgccaaggtcagcaccatctagtcatccatgtgactgggtcatcttgaaagtagatcctccaggccgggcacagtggctcacgcctgtaatcccagcactttgggaggctgaggcaggtggatcacctgtggtcaggagttcaagaccagcctggccaacatggtgaaaccctgtctctactaataatacaaaaattagccgggcatggtggcgcatttctgtaatcccagttactcaggaggctgaggcaggagaatcacttg

SEQ ID NO: 41732 - DNA, 4308 bp, Homo sapiens
gcatgtagcagattttgccaagttttaatatatgaggaagtcatctgcagaagagatagctaaaaccaagactgaatgagtctaccaaaggaaaagagagctgagggcagatcctctggatatatcttcatttaagaagtgggacaagctcagcagagtgattcagcaagtgagctcaaagtcacaaagaccaagagagaaaatttgtgaagaaggaggggattaataagtaccaagcaataagagaatctagggcaagtggtgaggaactgcttaaaaggaaaaaccacagaaccagattccaatcagttttgccttggaattccaagtattctgagtaaaatctctgttctttagtacacagggttaaaaataaattttaaaacaaaacaaacaacaacaaacttctgtaaaggccatattgttaagaccaacaactattagttaaaaccccaagaaataaaaaggatacttgcccttatttataatgattcccttacacctaattacttttcacctcttaacctagatgaaatcagacaaaacctcttggcttcagctggttaattagaagccaaatctgaccatgaaaagcaaattcagaaccattatataacatcaaaaagtccaaaaggcacacatttccttctgaataaacaatgcttacaaaactagccaaaattagctcaatcagtgccactgaggagaagaaaccagcttttcccatttcaacctatcttccttttttatgttcataattttgcaaatatcaaaaacaggaaaaaaatgaaaatagctataacagatacgcactttactagattcaagctgacagagagagtcatagcaatgtaaaggccgcagaagttatgaaattattttctcctgttaatactgtcaggcatgaagaaatagagtctggagtagagacagcatttcatgactactgaccaaaactcttcagcttctttgactatagaaggtctttccttttttttttagacagtttttttttttaaaccaaaagtcatcaaatcaagtttgtggcttgtgaccaggattttttcaaagaaaaagaagagatgagaaaatagactatatcaaacaatataccaagtaaggataggttttgttttaggaaactgctttcggttacgtgtttgtatgtaagtgtgtcttgaattgctacgtaaaaacgtgagctttcttactctgtggattacagtaaagcaatcgtgtgaaagccattgttctgggagacaggcctattaatcaggcatgtcctatacttataaagagggctggtgtttatctgaatggaagcaaacatggctggctaaactagcaatgaaggatttaaactatttgttttggggaaaaaatttatatgtgtgtgtgtgtgtgtgtgtgtgtgtgtgtattacactcaagtaagaatctctcaatcagctaggaggagacgacttcccatataaaattagaaataggaaggggaaaaggaagaaagggaggaaagaaaaagtgtaagaaaaaaattgaggaatctgttaaacttgaggaactcctaggatgtccatttctacctaaaaaagttcagaagacagacaaaaaagggcagagaagtacttattcccaagtggagaatatcttcttgatgaaactgaagtgggtcctgagtagcagggcctgtttttggggcttgaacaggtcttctgactaataggaataactaacatctattaaatgccacttcataatttccagctgatttaaacttcacaactttatgaggtaggccctaacatttctcctgcaaagaggatgggggtggcacaggtggttgcatgggtgggcaaggagagcaggttaaattccagaaatattaaaagcaattgtcagaggctgggcacgtggctcatgcctgtaatcccagcactttgggaggccgaggcaggtggatcacgaggtcaggagattgagaccatcctggccaacatggtgaaaccccgtctctactaaaatacaaaaaattagctgggcgtggtggcacgcacctgtagtcccagctactcgggaggctgaggcaggggaatcacttgaacccgggaggcagaggttgcagtgagctgagatcacgccactgcactccagcctggcgacagagcaagactccgtctcaaaacaagcaaatgagcttaaaaaaaaaagaaaaaaaaaaaacagttgtcagaaaatattcctagtcatgggtattagagtatggaacttttccccctaaggtcctaatatctagcaattctaatcagtatatagaccagtccaaaattgacatgtaatcatattacttacatttttctttgtcaaaaccaatataacagatattttgctttttattctgggaatggcaagttagtagacatgtcatccttatgtgattttagtcctgcattttttgacattattaaatgcaataattcataatgaattaatattaatactaatgataaatcaaatccaatgacagtaggatttttaaattctattaaaattagcaggtcttctcatttcagtctctttgcttcagcagcatgttataagaattttgaccaaagacctttctctctatgctttatatattcttgataaattataatttccactaatcttattccctgtggataggtaattctttttcaaggctgacatataattatttttttaagagatgtagaaggaccaaaccaaataatcattacttttcaaaaaggcaacattgatctcactttttaatgtttaaagtgcaccacacaaggcaaatactccccagtgagaaaaagaagataaggtgcaatttttcagaaaatgctattgcataggcttagtctgatgtgagtcttccttggaagcaccaaagtcctgaggtttaaacaaatcaggagaaataattttgcgtttccgggccagggcaaaattctgctttaatcactgagctggcattagtgggacttttaacattaaaaaaaaaaaaaaaaaaagtcccactaatgccagtgattgccctattcctaaagcctttagccaaacattgtaaggacagcctggactcaaagaaggggagtgaggctggatcaaagtccaacatcaaactaagttaagacctttggattagaaagtcggcctgcacactgggacctgttgtggggtggggggaggggggagggatagcattaggagatatacctaatattaaatgacgagttaatgggtgcagcacaccaacatggcacatgtatacatatgtaactaacctgcacgttgtgcacatgtaccctaaaacttaaagtataattaaaaaaaaaaaagaaaaataaaaagtcggcctgcaaagccaaagttgcaagtaagcaggagggctccgcatgaaggacaggtcgaggccaactccctaagtgttgatctgtctcagcctcagcctcagtttccttatcagtaaaacggggacgagagttccctgcgaagattaaccaagctaatctaggttaaaaaaaaaaaaaaagaaaagaaaaagaaagaaagaaaagaaaaaaaaagttcctggcatgtaccagttgctcaactcttgagtgtccttctcggtttaaaccgacgggggagagtcaaagcctccggagccagagggcggctaaggcccgcacggtccccgggctggaggcgaccgagcccgttacctgatcgcgttgaccggcgggtttcggaggcggattagcgccaaggcgttgtgcagccgcgtatactcggccatgtttcctctatcaccgagggcacctctgcctctcgccgtcaggcaaaccacttttccgggcgcgcccggcctcctccagaggagggacgccggctgggccaatgcgagccggggcgccgcctcccgccgcgcctcttcccacccagccctcctctcccgagaccccacccggcgctctacagacgcttgtcgctttccctttattaactcccatgctgctcccaccagaaggtacagcaaggagaatgatggaaaacagctgtaattgccggcaagtcgaagtttgtaaccccttggcccataggggctggctactgaggacaagttctgagttcgctgagacgggcaagctgtcctcatcgcggtattcatcttcatgatctttctgaacagggacagatacctggggccctccctgacagttatgtgatattgatacacatctggaacacataaaatacacattgttcatttcacctaaatgagtagggtactaatgaaacagc

SEQ ID NO: 41733 - DNA, 1637 bp, Homo sapiens
tttctatataagattccaactttgtctggaggggctcacagttccgaagagggtgccaggcatcatcaattaattaaaagccgagtatccataaacataaaaaaaagtaggggggacataaagggtagcaggaaatctggttccagttgtccttaagcacaggtatgttccaacagggaataagagtgcatagtagtgcaaaaagtaatggttaacactcatcgaatgctttcaatatgccagtgctttccacgtattatctcaagtaatacaatcgtcctattttctaggtactagtattatgtttcacacttgaagtgggcacagagaggttaagtatcatgcccaggtaacactgttagaagtgagaggcagcacttgaaaccagatagcacaacctcactgcctgcactcttagcactccactaggtagataaataagaaaaatcatagtaacaatcatgatttctccaagaggccaggtgaatttgaccagtgatgagtccaagctacagaaggagcagagggaagtggctgccgaaaagaaggctaaagaagtttgcaaaaagataacatgcacttttccaggctagatacacaggcggagaagcaaaccggcgaaataaaatccgacaagcaagatctggagcgcatcaggatgccaggtgaactcaaagacaggtcggaagtgacgtcactagccgagtcgggcgctcagcgggactgcgggtccggtggaattccggccggacgtggcgcacaggaagttacgcacgggaggcggtacctggttgtggagggtgacgccatgggtggggcggagcgtctgggatgcgctgggagcctaggatccccgacaggtaacctgcgggcggatctgaacggggggcgagggtggcagctggagttgatggcctagatcgctcggggccctaagcgcgggtggacacaggttaggtaatggacagcattaggtggcggctgaagaaaaggctccttggcattagactctctgaggggttgaggatatggagaactcttgggaacttggtcttggggcccgaagtcgtcgaggaaatacagacaggttgagtcttctaggaatcagacatggctgggggtcatgggtttccgatcactggcgcttatgttggagagacggagcctggggcactgagatgagttgacctagggttcacctaccccgacctgttctgctaataggggacagggacctcgactttttgtctcttaactcgtagcatagtgccttgcgacaagtaggcatgctttagatgttgtcgaaggaatgaatgaatgaatgaatgaatgaaccaaccaacctgtttctggcttcccggcagaacctctcccaaatttcagtattctaacctctgaatgtagaaatgactccagtttagtttgctaaccaggggtttatgaggatgctggtgcaggagatacccagtacattgttggtttttgttagttttgttttttatggttattgaaattcagaaatgtgtcttagtattcttatccgggtggagaggatgagtcatttactttggcttctttcaggttcctttacttttctgggaagaacttgtagggaaatgataccagggaggagttgg

SEQ ID NO: 41734 - DNA, 2991 bp, Homo sapiens
aatatgtaaaaaataaaagaagagatgttcttgaaattccactccccacctcctgggatgccaacatttttattaatatcctttcagacatctctctatattgcaataacttttaaagaaagtgtttgggaaagtaaaggttaggaaatagttacaaattctttatgttaaatattttattaatatccaaaatagcatcatcaaaagttcttttttggctgggtggggtggctcacaccattaatcccaacactttggaaggctgaggtgtgcaagtcacttgagcccaggagttcaagaccaggctgggcaacatggcgaaaccccgtctctacaaaaaatacaaaaattagctgggtgtggtggcacatgcctatagtcccagctacttgggaggctgaggcaggaggttcacttaagcccgggaggtggaagttgcagtgagccaagatcacaccattacactccagcctgggtgacagacctgtctcaaaaaaggaaaaaacagtttttttgttttgctgactagatgggagtagggaggtaggaatggaagagagaagtccttgggaaaaagcaatttgattatctagtcttttctctccctctgtccccaaccacaacaatttaattccagttttattttaaaaatcaagattgcggttatatgtggcattagtatcccatcctaaattggagacgatagggataggaaacattgtgagcttgggcaggaaggacgatgactgggtttttaatttgatcctataattattatgatgtcatgttaatagtttaaacattcttgttaaaagacttgtaatattgaaaatattccagccactgttataaaatagtgtattgaaatattctaggaaaaatattaaaaagcagtgcttcctttgctggatttccctgatactccactctttctccattcactcttgtgtgcccttcatgtcaacttctgaaacaccaatatgttctgtagaaactcagattatgaaatctgagttacgttttttcagccctgaaaacagctttggagaggaagctagatgactaggctaaaattccagagcaatctttattgttctttcgccttctgaaaatgggggagagaagtgccaagggtgaaactagaggtgtggccaggtcggggaaatattttgtttctgctctaaattgtccttcctgttgcctatgactggaatgatcttcagtgctttagggttagtttcatacttggctcatgctggaaaggaaaggtttcctgaagccttttcatagtttatctgaagtgatttctgtcagtgaaaataggtatcttagaaattctaaagtaaaacaaaaatgataaatgctttatattatctagacttttaggtagttatactaaggtcacaggaattacgtatggactcagattctaactttagcatgatatattaaatgtctgacagacttgaaaatagacctgtctttgaataacttaaagccatatcaagagtaaatttcttgaagtgggtaaacgtgaagttttctatgtataattgaccctacatcgtgataatgtcaaatatatttatacttgatctcttcttaaatggcctaagtggggaagggaaacctttcattttgtgtaaagtttattgattcatctgtggtgtaacattcaagttcaaggtattgagacagatactacttggcataccattctaatgccacttacaaaagtggtttctatttgaaagttccaaatagatactccagaactgacaggggaattccagcaaggtcattcacccattaaaactttaaagaaaaaaaaaaaagcgaaggaaaaaaattgcctttgtgtaaacattaacctatctgcttttaagtggttctttttgtttaatttttttaatattaaagggagagttcaaactggttttttaaatatttcaaatcacaaataataaatttaattaatttagaagttaagtttatacctttgtggtttattatatctcttctgggttggcaaaatatccaatgctttaaaaaaaatggcttcccattgtgcagcccacaaaatacaagagacagagtacaggcaggaaggaattcttaaagcgtctgtggtatgttatccttggtagttatatcagttgaaacataccaagttcttgctcttgcagctttataaacctgcctgacagacagtcatttgactaagcaaacattgctggaaatacatgatgaattaaagtattgtcattctgtaaatgtcttttgtgaggtctagatacacagtgaaatgttgactgtttagaaaatagcaaaagcagttattcatccctaggctggcagtttattcagtcctgaatcttgaaattcatatttcatttaatgttaaaattctcacatatggtgcctcataaaatgatagcacattgaatttagttttaattttaattatgttggtagctttcaaatcttttttgttggagttgtgtgagtctgtaggggcttctgtgaaagtttctatataatttatgctttcagtccctcctgttccacagactcatactgctgcagagatggcagatacattcattgtctactttggacaaaatagagcttttaaaaaatgtttattaaatgttgagtagatacaaaatatttataaaacatctgtaaggcttatggaataactatacagagaacatttgtgtacctacagcctagtttaagaaagcaatattaccattacttctagtgtctcctgtgggctcattcctgattctatacttttcttgtaccctcagaagtaaccagagttttaaattttgtgttaataattctcttgcggttctcaatggttttatcacatttctatatatccctaaacagtatattgattagtttttcatgtttttgaactttataaaaatgaaatcctattgtatgtctttttctgggacatgcctttttttaaaaaaa

SEQ ID NO: 41735 - DNA, 3124 bp, Homo sapiens
gaatgtggcaagagatgaagcagtatcatattttatcttgcaaagaatagaatttgggatccatgttctcactttacatcagatcagccggtggtttgaatgtcagaaaatactacgtttaccaagaactttctttcactagtaaaaaagtcagggagaatggagatgggggaggactatagtggagaaacaactttctggcccttttctgccatgattgtacaatgtatagcttctgaggaggaagggaaagttgtctttttgttttttgttttttgaaatggagtttcaaaaaggagcctcagcctcccgagtagctgggattacaggcacccaccaccacacccagctaatttttgtatttttaatagagacagagtttcaccatgttggccaggcttgtcttgaactcttgacctcaggtgatccgcccgtctcggcctctcaaagtgctgggattacaggcgagagccactgcaggtggctgggaaagttttatgagaggaaagcaagatatttgaagctcagaggactatccttttcttttttcttttttccaggaacatatgggaaagaaatcccctcggaaaccaaagcccagccatcggagattttaagatttttcaggctttccttataatcttccttacatttgtctctttaaacacatttaagtcgacctttgagaagttgctgataagcagttatcaaacaagagttagagtaacaaaccctcccacctcgctgtgttggttggtagcttccaaggccactgtaaatgtgtatcagtgtgaacctgatccagaaacagccaggaagggagcaaagtttagtttagtctgtgaggaaactggcggctgctggtagttccatgctgtctgttcagacttcagcttggtgtaagtagttttttttaaaaaaaactattatgacattttcatataaaaaggattgtaagaataatttccatcaaagattaaatcaagtttctacctggctctaaatcttagggattagaactactgaaaagaaagtttcagcactcagcagtagttttatttttttttaatggaaaagaaagccgtgaggtgtatcagcaagtgtgctgctaaaacaggtcccgtgtgcacgaaatgatttctaatgtcttatgttgagtgcaagtgtttacagttagaaaataaaagtgagtatgtacctagtgccgagagattgtttctaagcagtgcttagatttatcctcatgttctttccagttgcttttcctctggtttagattcatagttacagattcatgtcagcaaatatttagcagtctctcagatcattaaattggaggttttgatgttcaaagaaattaaaagaatgagaataaagtagaacttaatatcctgtaacaagatgttgggatccaagatttaagagcagcagaatgtattttcaaagaggaagaactttgtaaaacagaagtggcaagcagcctgaggtttcacgcaacttcggagaaatctgttttcttaagatttgacatctgtatggatttttcagactaaattcccagtactatggtgcgtaaaatgagtttcatatatgaaattagagttgccgtgtttcagctcttctgtcttgagattaggatccaggaactacacattgttacacaaacatattgactttattaatgcagccatgagaatgttaaggtcgcatgtggtgttggaaaggttggtattttctatttcccttttaccacaatgcatttttaaaaaacctggtacatgacaattatatgacttttaactatataaaaggtcgaattagccagtagcctttttttttttttttttttttgagacggagtctcgctctgcagtggcacaatcttggctgactgcaaggtccgcctcccgtgttcaagtgattctcctgcttcagcctcccaagtagcttggattataggcgcccgccaccatgcctggctaattttttttttttttttttttttttttttttttttttagtagagatggggtttcaccatgttagccaggatggtctcgatctcctgacctcgtgatccacccgcctcggcctcccaaagtgctgggattacaggcgtgagccaccgcgcccggcctagccagtagcctttcaaatcactggaggagtgctcagaagagagattatttatatagacgttcactgggtttccccttcctctgtcttcatctcagacctcagtctgtttctctatcctgcttcttgtttctgctgtactgagcgggagctcagatcatggtgctgggccccaactgaatctcggtgagatggaatccaggacgcgttgtcctaaggctctagggctacaatgaactgaaaaccttaactcaccctctagctttctgaatctcgtgattctagcctcttgagctgattaacttctccaagtcaatagcttctgctgggccaagttcctcatttacttgttggttgaggagaaggagtggagggctggggggtgtcctgggaaagaagccagtgtggcaggtaacattgttactagggaagcagctatttttctcatgggacttgaaatgtttcagtcttttaacaacctggaaggccatacaggtgtgtactagccgcatggtaacaagcccctttgaaaacaatgtttttaacctccagtaggtgcccataccatccagaccactgctcgtgccctacaaaccagccctcaggatctggctttcaagcatgtgttttacatcattgcctgccattgttctcactcaggttgctctagctacaaaggtgttttgctttctcttgaacacatcagacctgctcttgccttagggcagctgctgcctagaaagctcttccccctcattgtttcttcccagccttcattcgggtctctattcaaatagctcctcctcagagaggccttcccagactaccctaactaaaatggcaccctactccacttccaccataacactttttttcttttaacctaatttaccttttttttttttttttttgagacggagtttcactcttgttgcccaggctggagtgcaatggtgggatctcggctcactgcaacctctgcctcccg

SEQ ID NO: 41736 - DNA, 1772 bp, Homo sapiens
tttcttgatatatgtagtaaggaaatataaaagtataaatagattcttatttccctcctttttacacataacattatacgtaatgttctaaatgttttcagttgtaatatatgttgaatctctttccatgtaagtacatagagagtgtcctcatttttaaatagctgcctactaatccattgtacggatgtactgtaatttatataaccagtcacctgttgatagacattttggttgtttccagtgtcttcctattgtaaacaatgctgaagttcatagccttgtacatgtatcattttatacatgcatacagtatatccatatgactaaattccccaaagtagaattactggatcaaaaggtatcataaatattgcctaactgccttctttagggattgtaccaatgtgtactccccccccccattataagagtactgtttctcatatccttgccaacagaatcatcagacttttggatttttgccagtttgataggttaaataatggtttcagcatagtgtttgttttttagaatttacaataaaatttgtgttgaagttttaaaaactaattttcatttttaattgtggttaaaaatcctataacataggtaaccatttttaagtgtacagttcggtagtgttaagtatattcacgttcttgtgcaacagatttccaggacacttctgtcttgtgaaactgaaattctatactcattaaataacaactctccacttcctcctcctgctaactcctagcaactaccattctactttctgtttcaatgaatgactagtagctatctcatgtaagtggaatcacacagtaattatccttttgtggctggcttatttcacttagcctaatgtcctcaaggcttatccgtgatgtagtatatggcaggatttccttcatttgtaaggtgaacaatatcccattgtatgtatatgccatgtcctgtttatccattcattcatcaatagatatttgggttgcttctacctcttggctattgcgaataaggcctctgtgaacatggatgtgcagatatctctttgaggtcctgctttcagttcttttggctatatacccagcaatgggattgttggatcatatggtaattctatttttaattttttgaggaaccaccatacgttttccatagcagctataccattttatcatagttttaatttgtatttctttcattatgagaggggttgagcatcttttcatatttaaaataaatgcctttttcttctgtgaactcttcatattctttgccagtaatggaatttttttcctatttttaatttgataacattttttgttcttgtgcccttgagttttccaaatttataagctagtctagtagtcgtacatacaggtatggaataagactacctgggtttgaattctagatctactaatagctgtgcaatcttgattggacaagttactgaacctttctgagccacattttcttatttgttaaattggaataacattggattgttgtaaagatgagatgatgtatattagatacttagtatagggctagtatgataaggcaaaaacaaaaaaggaaaaagaaattaaaagacctaaagtgcagaaaagaaataaaactgtcattaacagatgacatgattgtatgcataaaaaaccttatacaatctataaaaaaaacttgaactaattaatgaacttagtaaggccacaggttagagtcaacataaaaatcatactagaaacaacagctaaaatagg

SEQ ID NO: 41737 - DNA, 616 bp, Homo sapiens
tgtgaatcattgttatactttattatttatgaaataagaaagcctatacatgttcagtacagatgcaattttttccccaaatattttcaatttacagatagtgaggaggataaggagggccaactgtactggcttggcctgctcagccctcctctctcactgcctagcaaactccaggttattaaccctttgcttctctgtactcagctcctatagtcctagttcctaatggcttgaagggctgtagactgacagtctttatgcattctagattctgtagcatgcctggtctctgactcatagtttactgatgaatcagattcccctacctgctgttgctgcccatgaactgaagttttatggaatatgagttgtcacataagaagtaggagaggaaccagaagagagagtagaggccaaacttcaccttaaccagaatttgacccaaggcccatcctgttcaggaaaataaatctcaaaaagaagtcaaaatggaatgtaatgtcagaataaatataaaaagaaaagaaattggctgggtgtggtggctcacacctgtaatcccagcactttgggaggctgaggtgggcagatagcttgaggtctggagttcaag

SEQ ID NO: 41738 - DNA, 1784 bp, Homo sapiens
aggcaggaaaaccacttgaacataggaggcggaggctgcagtaagccgagatggcgccattgcactccagcctgggtgacagagtgagactctgtctcaaaaaaaaaaaaaaaagaaaagaaagtttaaggaataatatttctggattgtatttttaaaattgaactactgttatagatatcagtttctcctgaatgtggaaagctaataatgagatatggaaatgtcatcaatgtcatctgaatagggcttactagatagactatacatgactggaagttaaaaggctttaactttagatctgccactaatttgccttttgatagcaaaatatactcttttaaagaaaaaaattattgccctccccttattacaaaaaaagtatgaatatatgtgtgtttatgtctgtatctatgtacatgtacaccaggatctgtcctagatacttcctcatgtgccatcttatttaatcatctgtctgtgtctcagctcctcaacctggaaaatgggataataatatctcattctgccttcctcacagaacaacaaacgtgattataatgaaacaataaaatatactactttgagcatgactctgtaatttaaagactaaatcttttttaaaaaaaattttaaataaaaatagagatgagttctcactatgttgcccaggctggtcttgaactcctgagctcaagtgatcctcccacctcagcctcccaaagtgctaggattacaggtgtaagccatcgcagccggcctaatgactcggtctttaatgccatgttgtgagatgcgtagcagtggtttccatagcaaaatgatgtgatgaatcctggtaaaattcatttcaaaatacacttgcaatacaaacttagaagaagcaacttacacaggatgtttcacagacactcacagaacacctggaaagtacagcagccttttctctaattttcaataaaggcaacacaaagtaaacacacgctttacggtattttatgacacatctcatctaagaaaaatgggcaagagaaacacttaggcaaataagtggaggcagaatgccaacgcagatgataatgaaaagaatttcacatcagaacttgaaaactgatttcgggcctgtgttaacataaaatgggtgtttagaagatgagaaattccacagaaggcatatagggggttgtaggaggtgaaaggaaagaggcttatataactctaatacttattaacctggacctagtcactgaaacttgatctcttttctagcaacctgattctttattatttataatcagaaggtttaagaactactgggcctcacctctaggctgtctttccattgtctgtccagttttcagaatttaataatatggtgggggtggggaggggacacaatagctcccaagtatctaggaaactacaaattttcctcactaaaactccctaaaataactaggttaacacaaactaggaaacaagctcatcaaggaaagaccataaaaagtcattcactgaaaaattgtaaagggctgcctgtataaactattatctgaaaaatgatttgataatgagacccataggaataaacatgaaaagcaatggccagtcgcagcggctcacacctgtaatcccagcactttgggatgccaaggcgggcagaaaacttgagcccaggagttcgagaccagcctggccaacatggtgaaaccccgtctctactaaaaatacaaaaaattagctgggtatggtggcgtgctcctataatcccagctacacgggag

SEQ ID NO: 41739 - DNA, 1548 bp, Homo sapiens
cccaggctggagtgcagtggcaagatctcggctcactgcaagctccgcctcccgggttcacgccattctcctgcctcagcctcccgagtagctggggctacaggcgcccaccatcacgcccggctaattttgtttttgtatttttagtagagacggggtttcaccatgttagccaggatggtctcgatccctgacctcgtgatccgcccaccttggcctcccaaagtgttgggattacaggcatgagccaccgtgccttgcatgttcgttcttaaataatgtggtacactgaggcctactgggcgtgtaccaatgccgtatttgccttgagcactcccatgttacatgtgtaaacttctttggtctatcttttttgtagtgatattccacaataagctcctttagagaagtttgttaactatgttgtttgccaacgatattctattgcttcaatatagacagtacactgaatatctttgctgtgtgtaaaattatcctgaaaagttttccttttccaaatgagctaagaagtgtgcaatacttactagtggtcaggtttagaccctccagaaccacttagaaacaggccaccactttccttctctcacagttgtataaataatctgattgagaaatagagcagatctctgttcagaatgttcttggtcactggacacctcataactgaggctttatattaaccacgatcgttctagtttcaaggattgaggccatttcccaagttcagaaaaatcatgatcagtatttgtcaagtattagtcattgtgaagtgtagtgatggggagtagggacaataaatatattcatctccaattttgtataactgaaaagtgtaaaaataaagaagaaagagatgcctcttgagtgaatttaatacagctgtttttgctgttaataataaaacatcttactgaaaccaaaatttgttcaaagtttcattaagtgcccttttggagctgtgtcttaatcgactgccagaagttgaataaaccaatgaggaaacactgtaccctacttaaaagtagcagtaaatttttcttccatatccacttttgatacatcatgaaggtcagcaagatgttactgctgtgcaaaacagctacattcgtgtaatattattttccatatgtctgttttcttagttactagattattgttcccatgcgttcttcccgacaattttgcttttacaagtcccgacaattttgcttttacaagtcgtggtgagcagggcatacatgtccactagtctgctagttttagaaatggttttcctgactttgatttgttttgatcgcatcaggcatattgctgaacagtaagaaaagggttgaagaaaagagttctaatgaataaaagatgggatttcttctatatgcatttttgttatccttgattccacagaaattctattttgattccttcattcaataacaataataatgtttttatgactatcacagcttgaaacacacacacacacacacacacacacgcacacacacacacacacacacacactcaagc

SEQ ID NO: 41740 - DNA, 503 bp, Homo sapiens
tgtggggctaaattgtccaaaatctttgatttattcatatttatgatataaaatttaaaatctgatcattataaaaatcctcaattagtaacatgggaaaaattgtattctatgatagaaatccaagaatttaagggccatttggccacattacctcctccattcctctttctctctacattgcatcctgggatcttggcacaaaaccaaggtaatttccagaaattggcagtgccctgccaaatgcacagctgctgctgtctccaactcttgcctactaattttgcacaaaccacttcctcctcttggggccaagaaactcagaaggtagggaaagtgttcctcaagggcagatacgggagcacttcctgcaccctttgcggatcgggacctgttgtaagggcggcagtagcatcacctcacctacagaccttcccggagtactttctttttcttttttcttttcttttcttttctttttttgttttgttttgttttgtttg

SEQ ID NO: 41741 - DNA, 1096 bp, Homo sapiens
caatacatgtaatgcacttgaaccatcttgaaaccatcccccctgcctggtccgtggaagtagtgtcttccacaaaactggtccctggtgccaaagaggttggggactgctgctgtataggataaccaagagtcctggcagccaaggcagaccggaagtaactgctgagtcactggctaggtcagatagtatgaaatcagcagtcttaaaagagatgaggcagggcaaggtcagagaggccaaaggcaggagacagctcaaggttgtggcaggtgatcagccagaaagtataatgaggagatcagtaatgtcaaagctcagagatgagcacgaaaagaacaggggaggggaggctggagtgggtggaatggtgtctgtaacaaagggctccagtttttcttctttcttccccctgccccaaccttatattcccagggagcttctcaaggcctagatttctccataccctataatttaagtgcctcttaacctaaccccgtccagttaaagtgatctctctggtttgttaggagggaagaatcacctgcactgtatcgtaagctttcagagcccacgtgtggcagcaggagttacccttgctgcacactgctcccccacattagccactgctgtttctgggtcagcagccccatcacgcacgctctggtcattcccgcttccctgcctctgccagtgctcttgttcgcccctgatttccttccgtctgtcacacgccttacctttaaaggtccatctcaaatcctacctcttttagcattgttcccatctctcttggctctgtagaacggaatatggctcacttgtcatgggggatgatggcaggaggttattccttcagtgtaattattagttccgtaagtagtctgtgagcttcaacaggataggaaccatgtcttcagagattgcctggtacaggagagaatgtcatgattagggaaaataacccggtatttcatcccggctctgtgacctttagcatctacctctttgtaggccttcatttccttccatgaaaaatagggataatcattctgtgttctggattccttacctagggatcaaaaacttagatcaa

SEQ ID NO: 41742 - DNA, 1152 bp, Homo sapiens
gttttctagtcctgtctttttctaaatgtactgtttgtgccctgagagctgccttaataatctcagcatttgtcagaacttgagggaaaggaagactttccatgactgggtttcctgcagccacaaaaagcaggtaatggagaaagctagtttctgcgattcttgtatttgacacagccacgaaaggaaggggcaatcatcattttatttggtgacagcctcttcttgagtattctgtaaaagctagactggcactctgcttcttccctatgctttcctgctgcccatccggtagctactcctgttactactgaccccactatacagggagcagagagagaaaatgaagatgaaaatctggcttctgagaaattattttggtaagaagcattgagagtggaaagcttaaaacaccattttggactgtccaattttcagccaatcctaattcccactggcaaaggtagttgaaagttagcaacatgttcaaacaagcaccacacagaacacttacatccatttatttgggaaattgcttcacctgtaaactcacaactgataaggcacattattgcaaaactgtcggggtggagggagggaggcaactctaaggatcctgaaaaggggcaaagggcacacacttgcgatgatgtggaaaacatgtttctccttccctccccctactccagaacaccaaaggccacagtcttcaaagtctgctgcctccttcccccactctcgttatcaaggcttcttttaaagaaacacgttttaaacaatgaaatcctcggtgtgaaaggatcataccataaccaaaaaccatcacctggggatgcactcttcctatggaacgtgagtaattcccaagaattcatgtagaacaagaggcatagattaaagtcttggcaagactcttggccaaaccaaatcatcaacccagcagatgatgcccaaaagcagcagtctggtaagtcctgatgagttactcctgtggggtgcaggatcacagggctggtcagtttaggtgccaaggtccttctgtctttggaagcattaatccaggtctgtaacaattctgtactgcagctacaggaagtaatgacagctataggccattaagatacaacacaacaaagttatcagaagccaagg

SEQ ID NO: 41743 - DNA, 1378 bp, Homo sapiens
ggagttcgagaccagcctggccaacataatgagaccccccccccgcgtccctactaaaaatacaaaaattagccggccgtggtggcgcgcgcctgtagtcccaattacttgggaaactgaggcaggtgaatcgcttgaacccgggaggaggaggttaaagtgagccgagatcgcgccactgcactccagcctgggtgacagagcaagactccgtctcagaaaaaaaaaaaaaaaaggtaaaagtagagacaaccaggaagacgggcagagtcgataattaattcgtgaataatttaaagttgtctatgcaatatttctcctgaagatctaatgtctaaagtctcaagggcagacctgacgtaagtggggtggggaggaggagagacagttgaaagtggacttgaagaggctgggggcccgcacgggggcgaaggtgggctggaaatggggcccagggctgggactgggaaagcaacggcgcgggcaggctcagcgccgcgtctccctcggcaaatccacccaaccaaaggcaccgcggcgtgacgccctgcacaccctgcagccagcaccacacaggtcccagtcaggcccggagccgggctcccatccacccttctgtccgagaccgtgcggacgcgggcccggataccagacccggattccagtccgataagtgaacctcaattcccaacgcctccgataccggaacccgaatctccgaatctccgattcccagccccggtcctcggacccggctcccttcctctgacccgaacccggattcccgccacgcacctgcctccagcctcctcggtggagcccagtctccgcccgcggggcagtcgcgtcgacagcaagtacaaggcgaaggtgcagccggcgaagaccagaaggaggccgagaagcgggcgcatgtcggctccgcaccccggcccgcggggcagccgagaagctcacttgcactccgggacgcagcggcgggcggactgagcccgcggagcacgttcactgacggaccagggaggggtccgcgccgagacccgcctccgaaccaggccccacctcctgagccaggcccccgcccccgattctgactccgccctctctgtccttcggtggagactccgggaaaaacctgcctcccagtctgccctctctccgtctgtctgtgcttgtttttctacgtttatccctgtcgctttccccacttattctgcaggcatggcgcgcccccagtgccggcttggtgccagggctgggagatccgggggtgaatcgtgagcccggcccacagcgagcttgcagtctagagatcaaggcagtcttgtccacaacctgctgtcacataaagcaaatgtagctggtgtagcaccagggg

SEQ ID NO: 41744 - DNA, 468 bp, Homo sapiens
ctttgaaatccctcatcctagaaaacaggtggttaatgttgaacctcaaatgcgcgcgttcctccttttactctgcttcatcaagtagcctgtgtagcgaggcgtgctcgtgattaagtattttctccatcccttggcctctttcatttcctcttcctgtaagtcgcatgctcctgggaacatgcacttgcccagttgtttgtagagcaaaacccagagcaaagagttgcctgtgtaattagtcatcttcttattgaacaggaagtgtcttggggtagggctgagcctctccttcttagctatcagtaaggctgggttttgttcctggttgtgcaactgactccccaggtggcctggggaaattatgtcatctttcacttgccgcctatctgcccaagagaggaatcctggggagactaattctgaatgagatcatacttgagaagacagagattactttcccaagaa

SEQ ID NO: 41745 - DNA, 684 bp, Homo sapiens
aaaaaaaaaaaaagaacttttccacaattttaaaagatgagtcaactcataatcatttgaaataatttattcaaaagtattctaagaaaaagcatttcttcatttccaatcagttaattactattttctcaattctatgacctcctgattacaactcaagaataccacagttttcctagtttccaatctagaaacctatgggtttttcttcttctttattaaacctagaagtcacttgctacagagaacatatttaaaaggtacaggcaagcttccaaacgcatggacaggaaaaacaggtatgaagtgtaatggaactaaggggtggagattttataactctcatttgtttcaacagccaagaaaggtgacctacgtccccacccgcccaggtctagggctccaagctggtatatgactcactataacaccctttggtcttcccttccacatcagtgaccctgccatttctcacttgcagtccaagtttggaaagataagtgggtttcttcaattcatatcctgcaaagagataagggtaactttccccaattccatttatttgtttcatttcatcattccctcatttatggaacatttctggagctctcagtacaagaaataaggaagaaatagaacatgctccttccctcaagaagatagacacattaacaatgaaaatgg

SEQ ID NO: 41746 - DNA, 1404 bp, Homo sapiens
ccaagtagactgacctcaagggcgagggactggcgctggtactcagaccccgggttcaagttccagccacgtctctagctagttttgtgatcttagacaaataacttaatcgctctatgcctcaatttccttgacttataaaactggcttaagactctctgtcacacgccattgctgggcatattaaggtgacaatgcgtgaaaagtacgaggcaaaaggtaagtgcaaaataaagggcgcctaaaacggtaaacgtgtgttaattaacctgatctacctttacatgtgcattcagcaaacactgagcacctaatgtcctctgggaccccggaacgcctcctccggagtggagcagcctcacatgtggcctgtgggccttgtcccacgggccggctccggattggctccgccgaagagaaaaccctgccgacagcccttccgatctcgtcagcgattgggccgggaccgtcccacaattactcttgttgctgggctcggaaatagggagcggtgctaggttgcgcgtgcgcagattgagaatggagctttccggtcgggcgggaggaggtgacgtcaggagtggtggcgggcgggggcctctggtagccctggggacgctgtatctgtgggctcttgaatcgcgtcacaaatcagcgaccgaactctggcggtggtggttaagacggcgaaggcggcagcggcggcgacagctctggggtttgcgtctcggggtgtgtcggccgccgctgctgcttgggcctggtatgtacagatggctggttaggattctcggcaccattttccgtttctgcgaccggtcggtgccccctgcccgggccctcctgaagaggcggcgctcagacaggtgagacgagagggggctgagcgccagcctggccttaccccctcccccacagcgggctcctcggccgtgatagctttgattcagccaggctcacccgaaacaggtcgccgggatcctagtgacgtagtcgctcccgccaggctgtagggaggcagctcctgatgaaggaggagctggtcgtcttcgtagcggccggtgatggcagggtctttgacattcttgtcagaggccaagctggttgctgataacaaatggggctttgccgctcttaggctgaacactaacattgaaggaatactgtctttgttgtggctcactgtttacaaagcaccctcgcaagtgtcatctgcagacattaagtgcagttgaagtgagattcatagcttgcccaaagccgttttgactgcaagtactgtccttgcagcaagaaacagcacctgttttgttccaaaacagctgtcaaacagtctgtgtgtttggggccagaagggttttgtgctttagaattagtgaatgagtaaaaaggcttaggtgcctc

SEQ ID NO: 41747 - DNA, 1686 bp, Homo sapiens
atccctcctgggaccctgtgacaaaaggcagaggctcttgggcaaggctgccaggggtccttgcaagtggggtctgtgcaaatgacattctcatttgctagactttgttcaaagatctttggaaactctgctattcagtgccaacagcacgtgctcatctggccttctgcttgcccatctgcagcagttcctgcgacctgtgaggtgtgcgagcatccacaggtgcaacagcaacggcctaggcctctgcagaacctcaagagcactcgggtgctggggagtttggcgtgctcaggctttgaggtgtgtcactcccaggacaaaccagaaccacaggagacaagatctgcattgtgaacattcactggccaccaagggccaagtgggcctagccccaggagaagtggcaggtgcggctgaactgagggggcacttacagagtgatgatgcgggaacgggccaaactggtgatgggggtacaggctggagaagtatccggagtgggtctgcagcatgagagaaagagtcagtgggcgggtgctctcagggactgtcactggcctcagggaggccagattcccaacatgcgacacaggctctctgtggcatcagctggctccactgtcgtgtctacacgcctgtccctctgtgtctcagatctctgctccacttctcccactcagaccacggaatgcttggcaagatgtcccctggttgcagtagctctctgggctaaatgttcatcatttctaagctgagtcatgcctgaggcgtcctaggaacataccatgggtgtgaacacacacatacacacatacacccactggcacttgcacccatacactcttaacctgccctcgggtggagaggcggggccagtgccttccgttttctggagaatgatgagtcgtagatgaaaaagaacagagtgtgctggacaatacccaagagttattcagaacaagcaaatgtgttcctgggcagatagatcagtcagctccatcagagaattctagaaggaatggaaagaatcctgagaagggagaaatgtcaaaggagactgagctttgggaatctgaaatgggaggatcacttgggttcaggaacttgagactagcctgggtgacacagagagatcccatctgtataaaaaataaaaataaaaaattagctgggtgtggtagtgtgcactctggtcccagttactcaggaggctgaagtgggaggatcacttgagcctaggaatttgaggctgcagtgagctatgattgcaccactgcactggtgctatgcctgggcgacagagcaaggccctgtctccataagaaaaaaaaaagagagagagtgactgagagaggagagaaagaaaatgaatgtggagagagaggagcagggaacaggagggcagatatggacagaaaaaaagtagagctattaagaaaatagaaatttagaaagtagctgcttttattttatttctttatttttgagacggcatttcactctttcgcccaggctggagtgaagtggcgcgatctcggctcactgcaacctccgcccccgcaggttcaagcgattctcctgcctcagcctcccaagtggctgggattacaggcaccccccaccacgcctggttaattttttgtatttttagtagagatggggtttcaccatgttggccaggct

SEQ ID NO: 41748 - DNA, 632 bp, Homo sapiens
tgaactcccgagaggcagaggttgtagtgagcagagatcacaccactgcactccagcctgggtgacagagtgacattccgtctcaaaaaaaaaaaaaaaaaaaaaattccagggacaagaacaattcctgagctaggaaaaaaaaaaaaaaaaagagagagagactaaggtaatacaatagacaacaattttcctaccagcacatttatttgttaattgctttaggatgtccagagtgtagtacctgtatactctgagtcacggtttactctgagtcactgtgaacttctgtttactttgtagtagtcactataaaactatcaatgcacactgggctcagtatcaacagggcatacctgccaagaaaattttgctacaatagtttggttcaaacaatctttcagttactgagcaacataccgttgtcatcaagattcctgacaatgcattctgagtcaaaatgcacatcagattccaggtacgaaaccaacaacacactccaaaccccatccactctcaggcctcccaggaagatctgcaaagtgagaaacgcactgccccaccctgtttctccccacttccccagaactatttctgcttaggtatctaccaaaagcaggctttctactcca

SEQ ID NO: 41749 - DNA, 404 bp, Homo sapiens
gtacagaaatgcaaagtttacctgactctctacattttgaactcactgtacttctctcaggagagaatgccaagaaagtcactgtcatttattcctctgcctggggcagaaaaattagtgaacactcactcttggtaagtggcatgaaaggccatttgtaagcctggccctgctccaatggctgctgtgaagattcatgcactgagggtgatgagggcttggagctccccttggcctgagtcagcaacctgctggtgcctggtgtcagcagtttccggtcagggagtgactcactggacaccctcctactttctgctggatggaagtgagtgtctcagggaaattgattccagccctcagatccagactgcaccattaactctgtaaatctgattaatccctta

SEQ ID NO: 41750 - DNA, 2464 bp, Homo sapiens
aaaaagataacccatcagaaaatttcaaatttctcttgagccgagtctcaaactggaacctagtttcaattgtttcccttctcacgtaaaatatactaatgaactctgggcaattttccattctcaagcattcttcacgtgtattcaatcgagagctctagtcagaagccagtcatttagtatttttgaagagtagaaaggtacccaataattgaatttttctgtttaataacaaaagactttaaaatcgcttactttgcagtccaaacaccaatgactgttataacagattcaactgccaatgatcagaagtcacgactttttaacaacttttgagctcaatcccaactttcttacccaagaaagcaagaacttaaaaaaaaatctaaaacactcgtgacattggagtcaatcggcttcgggaaaaacatcaaaaactaaaaactctatgctcatccgagtatgtaaacgcaaggcttgattagttcaaaccaaattaagcagtttgggctccaaaattacgcaggaaactcacgcttcatcactgaaaatttcttcctaaaatactctgaggaatcatataaaatcttaatcaaaagtttgctaagacatttaatagtcttatttacctgataaatcatattcagatcttaaggtagctttaccaacaaggggaaacttaggtaacaaattgttttttttttttaaaaaagcacaaattattcccacagcctcaaaaatcaatttctatggtgcttttctatcacccttctaacagattcctcttaattctagcaagcctcgtatgttcgcatcattcaatgctttccgaatccaatacccagagccccacagaccagctacgtatgctgtttaaaccctagaactgtcttgttcccgcaattcaatcaaccctcactgaacacctttaagaggtggaaacttaagggaaagaaaactgtagccaacacacgctgtggttctaagtattagaacgcctcaaaacaaaggaaataacggcgccgtaaatggttgcccgccaatttctccttcacaatcccgtggaaatgcgatgtccacaaaatcatcttaacgactttgtggtctgtcctaatagaatactgatacagatttttgcctgggaagccctttcggcatcagagaaaagcgcttcatttaggccaaacacaaagccctcacgcaatcccctccacctaacgggcccagaacttagtcggccttggattagtttccatcttaagaggccccaaagacatcccagactccgtcctttccgtggaggcaaagacggtccttcgttaacctaaacaccggcccaaagacccaaaagaacgtcgtctgtccccttgcaccccaccacgcggccttacgaagcgcggcccgctgcgggtcgggtccgcgttgccgcgcggcttctccgccattttgtgcctctggcagctcgcccagcccgccagcccaagatggctgcggcggaccttcgcaggagagcaacgccgaaataagatatcgctcccctcccccaacaccgcggggacgcagcggccattttcatcttccccctcttataacgggaaaaacggccgtctcgggcagaagccacataaacccgccgggggcctccctccttcacgaccaaaggcactaaggcactatccacaaaggctttttttggttaaatgctgtctcccttgcctgccctcccggcttcagacttcggagcctaaaacgcccctgcctcctggcccgaggccgacgggcctagaaaaagatgcaaggagctaggaccacacagccaccccctaccgcagctctacgtacccgctcgccgtagttctgctcgccgctgtcgctcatgactcctggctgctgtcgccggtcgatgtgcttcaatcgaagctgccaacctcttgcaccttccttaaggaggctccgccgcagccccgcacgacgcgccggtcgcccagccgctcagagccgaaatgctccgcaccgcctccgcacgggctctaactctaccggatgtgacgcggcgctccttagccaggctcctcccctcccagaaacgcgcgctttcttggcctcgcccctcctcgctctgcctttcctctccagctgcagcgcgtcccgcacaggaagtgacgtgaccccgcccctcgcagggccccacccccattcacgagcctctatgaggcgggaaagctagcgtgtcgtttggctgctgtagtgggcgccacggagccacagtgatgtcaccagccacttctgaatcccttctagaactttccagggaacctgccgagtgtgcagggaggaaggagatgctgtttcccccaatctcaattcctttctccgccttattagtttcttgttttgtgtctttcctttgttagagaagtgaatgttcgtacattgggttcttacttaattttgtcttacttgt

SEQ ID NO: 41751 - DNA, 1642 bp, Homo sapiens
actgcaccccgactttgaagattctgaatcagcccgtgaactctagccggctgggcctgtcggaccagtggccggacgccccttccgatctcccccctgcccccgcaaagccccctcacctgaggcggcctctctcctccccttgcagcggccccggcggcgcaggcgcgctcacgcacgcgcgcagcgggcctgggcgcctgggcgaaaggctgggccgaaccgctccgaagacggtgaaccgctccgcgcaccagcggctggactctgcgccgcagctgccaaccaggctggagcgctggcccggccccccgcggctcgctgctccgcccgccgccattggcccgcggccctagcccagccttgttcccattggccagaggccgttcccgcggctgtccatcacctcttgtttaccctgtctgcgggcaaatccaaccaagccgccccatcaactccggcccccattggccagcggtgcatctctctccaccccctcaggggtctgttttacataatttatgcaccgggggccattggccaatcagcacaggcttgtttatataatgaatgtaaggacgtttttcattcataaaaaacgcgacctgagggggaagcttagctgagtcagtgaagcacttaaaggggccgaggccaggaggagccgccgttacttcccttctcgccgctctcccgacttttcaccgaggcacgactcttcccccttacccactcacccccacttctccatccagcaaagccccgaccagaattgggtctcttggcgccagacgttcgcagctgcagcaccaagcaaagttatcattttagaattcaggggagaggaattcgtcattccacacaaactcgctgaccgacctgggcgtttagcccacagaaacacagaaaacggaaaccgagccctctaatcttagttacctttaagagaggccttaatttcttttaaccaggtttccagtgggaagaataagcagcatctccttttaaaatctcagctctcaaacagatttttgttactattttgtactggcaaggcctaagacccaaccaaatcccgttttctctttaactgcggctcgtaacctccgccagagtgggttctgtagtcgaggtgagacagggttcgggctcaaagaaatcctctccggggacagcagcagccagtccaccgacctggaaacctaaatccctccgaaacgggcatgcagactcagactttttgcctccctccccgggctgcttgttttccatttaagtattgaatgcaagatggtgtatttgcgaattagatcccgtgcagctgggaacgacgagaagcggctctgcttgccaaacgatagggcactaactgcaattgctgagattcttaacagggtgttccaggaaacaaataaacaaacaatcctctcccctctccgcccccttaccccctcctgtgaaggccgtggggcggctctatcttctctccggggatgctgggggcctgtgacggagctctgttctcgtcctgctggagtgccctgccattcacgccgcgtgccagcggtggggaggaaagatgctaagtgacaggagagagcccctagcaatgggggtcccacggtggccaactctggggcag

SEQ ID NO: 41752 - DNA, 1433 bp, Homo sapiens
acaattctgtgggctaaataaaagtcaacacctttaggctcaaaaacaaagtccaaatcattatccattcttctcccaacctacctagggttggggtgggaacagtgtctgaaatagtggtcatcttgaaatagtacaacaaagaaaaagaaagaaagaatgaaaattgactaatgagaagatacagacaaagaaggaaagagggagaaaggggtagctatacgtcagtcacaactaagttctggcaaatttcatcctacaaggaagaagggtttgctttctcttgcaaatgatctggtttcctctttcctttcatttttgaacctaacttggtgacttcacagagtgcccaggctgaggctgggacttagtgggttccgggtctccagcctttgcaggtacctctctgctgctgccctctgctgtcgggggaggcaaaggagacacccttctggtcctcctggtccaagtcccggagctgccacctcctcccatttgagaccgacagaagctagggtctcttccagcctccctgctcttccccaaaagaatcatgaggggctggggttggaggcgctgtacttggaagcagcagagactcaggacgggggttccagttagacaagggcagacgccctcccacctcctcccctgcaaaagcaggcccttcatacccacctcctgccctccagccctgccctctgcacagatcctttgggagaggacaggcagttagcctgcgccaagtttctgacacttttttttttcttggaaatggaaaccctccttccggcaagtggcaggaaggccaagtccccagcggccctggctgggaaaatttccagagagcaggtgaaaggcctctgttccgccagggccacactgggtgggtggcagcgcagccgggcctgcagcttacctgctgttgaatttttcaggatgtttctctctcatcacatggaatctgtgtgcaatggaagcgtcctgaaagtgaaagagacaaagcagatccttggtgagtggtcatgacagtgcagtgcggagggaagggacgcacgcatgcactcgctgagtcatgccaaccctgggactctatctatcgcatggtggggctccaggtcacatccgcggagccaacagaggctcaacactgcctccagggggatgagctagcaccaccaatactcttacagcctatgccagttgactctggagtccttgctatttcactctagcccggacccgctgagaacagatagatagttcaggggtgagtgaaggggaaagcctttgccctctggggagactgagagtctgtgagcagttagagatcaggagcctgtgtctggggctgagcatgagtctctggaaatgactttccatactagttctttttaaaatagtttttattttggaatattttgactcacaat

SEQ ID NO: 41753 - DNA, 2049 bp, Homo sapiens
ccaccgtgcccagccaatacactatattttaaaataatgccatttattgtttaccctgtgccaggcaagagaacaagtgatttagacacacagtctcattgcatcctcacaatcaccttatcaggaaggttctatcattaaccctgttttaaagatgaagaaacgtactcctagagaagttgggtcacctgcaagcggcataaggcaggctgtgaacccaggtctgcctgattccaaaaaccacgtgctcttaaccactgtactccattaccatgtgtggagtgcctactgggtgccaaaatatagcataagacagaagcagccaaggccattcccggggaccccagaccccaagggaaatgccttccttccccccagcccctggagatgtccttggctgcctccttctcactgtgctcttgaccttggctactcttgggcagtacccaaaagacccagggaacacacttcccctattccatgtctctcaggacaaatgaggaattacaaataaaccgtattaattcatctgtgaactccaagcctctggcacagtacccggcaatattttacatggtatatagcacctaacaggctatattcaaaaaatatcagaagatagacgggaggagacggtcaccatgccaggcagggaatgtttccagggagaactgtagctgcagggagtgggacttatcctgactgccctgggagatcgctaatttagagcacaccagtgtgacagtacatttcttttgaaatgcaactcaaaatccgcttcctccaggaggaatgccaagtggcgtcccggaacaggacaagttgtacttcacaggagatgggaagctagaggggggaaatgccatcattaatccaccaagcagcagggggtgggggcgcttgcctccaacaggcatggctggaaaaataagcagctctggcttgtgctcctccctgtgtccctgccacgactgtgaagggctaagaacacagcagaaaaggttccagttcatttacaagcctcggctatttttagttcatcgatccctgggcgcggtgtgtgtgtgttgaggggggccgggggacggggcttgcagagctcacggtttgaggtggaagctggggaaagctttagaattcttttcatagaacaggtactctgttcactacgcaccatccagcctctggagacctaaccgcttttcttggggcaggaagaaggagcagtgtcaggggagggaggagactgaaatgagaaagggaacgaggcaagaggcggtgacgcccttgtgccaatgaccaaattgggtcagaaagaacaaccttttgaatgcaagtcaggaaatgtgaatcgctgcctcagcagggccaggtgcatgcctagtgggtgccggcccagcctgaccagggaactgtgactgtacctcctgccgctctagagaaccagaccgatgaccatctagaagtgcactgatctttattccttgcctggtgccctgtggccagttcaattcctattatcaacccctccttaaagctgtcagggaaaaggaaggagaagttcacatttaaagatggatctaaatggtgaaagaggtgaaaatcattgccttaaaagagatcacctgtggattttgtgagttattaattctatgatccctaccgtgtctgattctgattggctatatataaattaaaaaacggctcttttttcatatcacctctacagcccctgcaagttaaaaatatcattacccggcttttctccttctaagtgtaggctgcttgatttaagacattttgcaaacttgtctttgttccaaggatttttaagcaaaaaaggtgagtcatagtagcaactcaatagatgttgagctgatttgtgttactaagaagttgtgggtaaattgcagttttgaatttttggaaacggaatcatattgtaaatgtcctggacagttcaacagttgtgggactcctctggcgagtcctatgcagaaacctcctcttacttgagtcactcagcagcattcgatgcaatcacccatg

SEQ ID NO: 41754 - DNA, 904 bp, Homo sapiens
aatgcctggggtaagtctctgatggcactgaaaaatatgcagccctgtgaaagcagaaacagtaagtctggactacagagctccctctctacaattagccttactatcttcatccagccacctctctgagcttcagcttcctatttgaagactacagcagactggaagttctggctttaaaacaactctcagagcttttctggctgaaacaggagacagagttcctaggaactcccaaggattcaccaagcagttcctgaaaaccacgatgaaaactacaaatgagctacagagcttgtcccttgttattcaataattccacaatcttttcatcttttttttttttaagatggaatttcagatcaatgctaggttataaactgaaaccacaggtgtcatgcttcgaaccgttaattacctggcattatgccgccaccttgtggctgatttactttatggatttcacgggcgaaaactatgtgagtcatttcagatgaaaggagcagagccggatactgtcttgagaggatctttgagctgagcattgaaggataagtaggtgttttccagaggcaaatgaaaaggaacaaacatgtttaaaagaataaagtgaaagaacatggcccattatagggacaataagtagttcattaagtccagtacatattgaatatgtggtgaagtactagaaaataaagccagaaaaatgacaccagaatcatgctggaatccctttggtgattatgagtgagttggacttagtagtgtgtgcctagaaacggatggctgctgtgggccaggtgagagatgatgagggccaaccaaaaggcaactccaatgtgaatgatgatgagaaaacagtaaagaacttcaggatttggtgactaattagatggagggaatg

SEQ ID NO: 41755 - DNA, 2137 bp, Homo sapiens
ccgcctgccttggccttccaaagtgctgggattacaggcgtgacccaccgcacccggcctgccaactgtgcctctctcgagaatcatctgttcggaaaaataactgacatcaatcgagtgcttactatgtaccaggtatcatgctcatgattttgcatacttcacctcctttcatcctcacaaccacctggagatacagtacttaagactgtacacattttcgatgaaaaaaaaatgaggcttagcgaagttaagggatttccctaaggacacctacttagctggcacagctctagattaggattcaggtctgacttgagaactgcattactataaatgtactctaggaatccagttttgggagaatctcttaaaaacgggagtggatccagaagagaatttccagaataaagagtcttagacaggaagccaggtgaaagaaccagggagagtaaactcaaaagaagggcgtggaagggcaaaaggcagctgtcttccaatgtggagagactggagtcgttttgagtaaaaccagacgataaaagttaggcgaggaagacctcggttctctccaaaatgtaaagaggctgctctgtgaggtactgagcccctgtcaacagccagatcccagagatgagccctccattctaactccgagaatcgagagggctcaatccgtaaacaaacataaactggggctctgaccctggcggtgccctgaggttaaggtttttcaggtcgggagatcggcgtgggtccaaggcggctgtcctggggcttcgccgccaccttggacgcgatccggggtgggactctgcgtgggccgccccagcgtcgcgaccggacttcaggaacacagacgctcacgctgacagggtcggtagctgacccgagacgcggtaagcgcgaaggcagcctcctcgacccaagcctgaagcctgactaacccacaccgccctccccggcgcacccagtgcgcggttacctgctaatgcaggcgccgctccgccgcacttctccgcgcgccgccgcgcccggcgtccgctcgctgggcccgcccctcaccctcctccgcgcgccgctgccgtgcccactgcgcaagcgcgaggccccgcaccaccgagacctggcggaccccgttgctagagcggcagattgcggctcaagcgtctgagaaaatctaggctggggtcgagagtccgcaacagtggcacctggagccagacccaccgctttctggtgtcgcgcctttcaacccgggggggtaggaagctttctgttgctccgcataactgtggtcagctaatagctgctggtaagatcagcacgctttcatcagaaatgctactaatactaatggcagtttgcatttatagagcacttactatggtctcagcactgtgtaaagcaactttatgtgtatttcctaagtcttgtcaagagccctttaagtacattcgttttactgatgaagaaactagggcctagaaaggtgaaaataacacaaccctaaggtcacacaagagatggagccaagattcaagcccagggcgtctgaagcaagactggcactccctgccgcccctcggtgtcagctccttaactctgttagctttcctgccgtgtttccaccttcatgaagctttttcagattaccgggcagaagccatcactccttcctttaaacttccatttcagaatttctggacatttcctgctttttttagttcctttatggcctctctaggtgtgatagatacaaaggtaaattagaccgtaaaatgcaatttagttcctcttttgtgtggccattgtccctactgggtatcttcctgaaagcaggggcttcaaatttacacatacctgggttaggatccaggctgcaccacttattagctcagtgaccctgctgttacttgttgagtaccactgtgtgtctggcacagtggtacgcactagaatgacagaagtgaacaaaacagacaaggtccttgctttcttggagtgtataacagggagaatagacaatacatattaaggaataaaataagataatttcaaatagtgaaaaatgctatgaaaattggggcggggggtcagggaaggccactttgtggtgccaaatttgagctgaggc

SEQ ID NO: 41756 - DNA, 1866 bp, Homo sapiens
ggggaggggtggggggtctcaccactaagaagcggtggaagccgaatccgaacttaagtcggtctgtcatcactgtagcctttccgagacagttgtcttatggagttgcttggagaacgtaaaataagaggcctaagcaatgcgtctgatgtacacctgtcgtggaataactgttcccgctcattcggccgctgtacctctgctccctcattcggagcgtagctgggtatgaatgaaattccgggcttgtagcacagagaaaacttctctcccacaattggttggtgctggggaggaagctcctgattggtggaaagtccgaggaagtgggcaagccggagggatttcgtgtacctcaggtgccctcactctgaccggccccctatcattacgtaattttctacgactcgcggtagctcaggcagagcgggttcctgcagcggcgcgaccctctgacgtctccgcttctaattggtcaagagctgcgactgcagttctgaagcctaactggttgcccgtgccgcctcggaggtgaagtgtactgcgctgattggcttccaggcgccggccgcgtgtgatgtcccgggcaacgattggctctcgcctaccgggggcttctctcaccgggactcgggactcccgggaagtggaccggcagaagagggggctagctagctgtctctgcggaccaaggagacccccgcgcccccccggtgtgaggcggcctcacagggccgggtgggctggcgagccgacgcggcggcggaggaggctgtgaggagtgtgtggaacaggacccgggacagaggaaccatggctccgcagaacctgagcaccttttgcctgttgctgctatacctcatcggggcggtgattgccgggtgaggaacagacactcgcagacaacggggcctgtgggtcagcctttgctggggggtgggagggggtgggggaagtggcattgccagactgacggagtggagaggggcatcgctgtgggttggcggggtggcggaggaaggggtagtatgggccaggctagtggggtgagaggagaaccgtgggtgacaccagtgagagggccttaggtccagagagggtcttaggtagagctagatttgcccagaggagtgggagttggatgcattgccaaacggcatttgggggatgagggaaagaaggtggttgcgagctgaagcagtgtcacgtagagctggggaagaaagagggatgcctgactgtaaggaaagatagtgacagtgccaggctgaggttgaggggatggacgtttgtttgatcaaagaggtgagttgctgtgccccgctgaggtggagaagcggacgatgctctatgccaagccttcgaagagccattctggggctgacattaaagtgggtggatgatgccagcccgagttgggactgaacgaaattggatgcgggatgggaacaagaagatctttagacagcccttgtacttcccagcttcttgagctatttattatcttaagttgcttcatctttaacattctggcagtgctactgttaggacatttatgtggcataatctttttaaagaaggaaaatcatcctttgagagtgttatttgacttttagaaaagtcaaaatcatttggagccagtatagggaaaggggggaagagttaatttgattatatggttattgcctaaagataacatgagaccataaaataaggaagtggttttcttgaccgaaggtggttctgaaagaaaagtgccacagatgttttgaataatccgaaaagaagtatatagcctcttactgtgattacttcaatatataagattcattacaaattctggtgttctctctttagtcattcttt

SEQ ID NO: 41757 - DNA, 2851 bp, Homo sapiens
tcactcaacagaagttgactagtactttgggataaagggcctcatatttactcctattcagttacctccccctcactcagttggcccagtggtccagtctgttaccatgttttgggatcctccaattcaggcattcagtatgagcctctccacctgatgttatctgtgcactgtattgactgagacataagattttcatctaaacagtgaataaaagcactagccaaagaattgaagtcaactcttagttagattttgccactgaaagcttgctccaggttgacaatcatctgaacatcagggtaaagtcgtatcaacctccataagaataattgattttgcatctagccatatttctttatcttgtccacacaggtatgctgagagatcttgttgaaatccagttagacaacagcctgttaggaaatgaggtgtgtctgttatgacactcttcgtgagcccatactggggcctagggatcttcactttcacatttaggtgattttctcagtattctggaattgtctccagtccagaagacaggatttccttcaaagaaagtgtttcttatcatcaatcacctcttccctcttggacttccatttcctcttactgatgttcactttacccttttatattgaaaacatcattttttgacagaatatagaaacaaaacgggaggttttatgtaccatagtgttaccatgtgcatgctctagaatcacactgatcagattcaaattccagttctaccatttactagttgtgccttaatttctccctctgtaaaatggtgataataacagtacatgtttcatagagttgttggttgatttgacatttacaactggaatgcctctcttgggataggcagttcaaaaagaacaagttaataatatatgttgcacaactgaggtttgggaggcttatgattttttaaaattttccttccctctgcaatgcatgatgtttgtgtgaaggtggcgctaaaataatgccgtgagagctatcggctctggagccccagacctgtttttttttttttttttttaagccattttctagctcttgccactaaaaatcaggatattaagtaaaacaataataattataattttcaatgcaaactcaaataataatgcatttaactaccctcctcttttagtctcccttaatcttaacgtagacaaggcagatgccatacaggctggattttgatttggagcctgattctgccaaataataataataataaattaaaggatggtttccgagaattagtaacagttatggaagccactgcaaggggccaaattaggtgattaagaacaaggccgagcacggtggctcatgcctgtaatcccaacactttggaaggccgaggcaggcggatcccctgaggtcaggagttcgagacccgcctggccaacatgatgaaaccccatctctactaaagatacaaaaattagccaggtgtggtggcacatgcctgtaatctcagatacttgagaggctgaggcaggagaatcacttgaacgtgggaggcagaggttgcagtgagccaagattgcgccaccactgcattccagcctgggtaacacaccgagactccatctcaaaaaaaaaaaaaaaaaagcaatcatgtaattaagtcttctgtgttttctaccagttaggtaacattaaaccagaacaggaaatgtgataatgttttcagcaaggtgtttgatgattcatcttgtgatatcccctggagataaaatagaggcacatagttggattcataactcactagttactgttgaacatactgttgattaatggctcaatgtcaacctgtaaaggagagaagagagtctttgctggcacaaaacaaagctatgttttcagtcctgatctgttcaatagttttattgtcagtgagcatttcaggaagagcacttaaaacaccaggtgcctactgtgtgtaagtcacagagttttcacagctcttatatgtttgtcattgcaataagtcctaggaaggggcaggacgcattaaaactgaccagataagcttttggctgttgtacaatgtttcaagtgggaaaaagcaacttaacctgtaagaacagggttggggtacaccagcttcatcaacagcattgagagggaagcatgatttgacagtaatgctatcacggtgtcatttgaattgatgtcccccaacataatcacaaagggtcttgcactttgtgggcagagtaactgtaacaaaatagagtcagtagaacaaaaagtataaccaccagggccattataagaagctgtaagtcttcgaaatatgagttaaatgcctctgtgttttctggtaaagaaatgttgacattggtgggagcaaaggtcttcctctaattctcagcaactggtagagaagaaaagcaagggcatcacaagaagcaaggggagaacgtaatgataacacaagggtggtgtcctggttactcttgtcattgtcatataacaaattatcctagcatttactggcttaacgcagcaacatttgtttttttctcacaaatctgcaatatgagctagactgatggagacaactcctttgctctacttggtgtcagctgggacaacagcttgaaggctgggtctggagtcatttctactcacatgtctgacagttcattctgggaggtgggaggactcaagcagctgggaactggaaatggggagactcctcacgaatctttatctctgtgtggtttctgcagcatggtggctatacatagctggacttcttacatattggctcagggctcccaagacacgtttcccaaaaggaagtggaaatgggtagaag

SEQ ID NO: 41758 - DNA, 2246 bp, Homo sapiens
gacactattgatgtgatatttgaaggcactgaacttgaaactctagggaagaactcaaaccagctcatctgagcatgtatgtgcatacagagaatttgatcaaggaaggtaatgcaaaactgagctgtcacaaactatcacagtacgtggtttctaaaatttatttctatggtggcctttgaagcacaaaccttaggaattttcaagcccagacttttatcagcatggctcacttctgagaggaactggctgagctgagaagtagccataggctaccagccctgagtgtggtgtctctggaattctggtgatatgaatcccacatgaatatgaatcccagaatgataataaaattttggacactgtggccaaaccgtggataattcctggatccactcagtgcacagatatcatgttgtcttttatttaactcttgctatagaaactgagagccccctcaattacatagacctaggtccaggaaggaaacacacttaattgacacaccgcacagttgtccagaaagcagtatgtgaaactgcagtcttctcattggtttgctcaaacatgattgtgcttagctccgagtctacagttctaagtccaagtgctggctctgcggtgagactggatttaaatcccttctcttccaattattagctccatgaccttgaacaagtatgacaacctctctgagcctcctcacccaactcatattgtgaagattgaacaatatgatatatttaaagtacctggtatgtaacaagcactcattaaatattaggtattattactgttatataataaatgtgactaaactttttgaaccaatttgcatctctgttaagacatatttttgaaacactaacaaatttccccaatgtcaaacagtgtaaaacattcattgacctgcacaggtgtggatttctgaccccgtgacaccctttccttgggaaaaaaccaagaatgtctccgctgaagaatatctgcagagaatacatggaaaccaatcctacattctcagcctgctctaggcccagaaaaacagaaactgctatgagggctattactaaacatggaaagagggaaagataaaacagccacagagcctcgggagaaatgagagcagacatctcaggagctggcctgagacacgccacctggcagagtgtttgtatagcaggaagcctcagacctctgaccttcactgctagagatctggcagtccagagttacagcgcttggtgtgacccattgcctttccccaccagcactagggtaaccagatcatctctgtttgcctgggactttttctgttttagcactgaaagtcccatgtcccagaaacttctcagtcccagacaaacctggacagttgatccttctaagccccagcatgaaaggtgctgcttgcatggaagcccatgcagctcacgtcattcagaactgttatgagcaagtgcagagtgatggctgaaggcacaggaggggctagagctaggctgagttctgagactgtctcatgaaggaggaactcatgagagctgtgcatggagaccaggtcgggctgcaccatagcacaactgtcacccgggtgaacacgtgccaggggagggccagaccaaggcagagccttcccaagctggttcacagattggcacacactgaaaacaacattctacattgcacatttacgcaggggacagggagaaaataattttgtttggtacaagttgtatatgcaccctcttcctttatattaaagataaattattgcatgtgctgactatatgataaaaacataagcataactataattggctttcatttccattttctgtttattttaatgaataatgttaaacacttatacatactaagaagataggctacttacatggttatgggcttaaaggcctctggggaaaaatatatataatatatttataaataaatatatattatatataaaatataaatatgtaatataaaatttatatataaatatatataatataaacattgtatattatataaaatatatatcatataaacattgtatataatatatataatataaacatcatatgttatatataaatatatatattatatatacattttgacagagtctcactctgtcacccaggctggactgcagtggcacagtcatggctcactgcagccttgacctcccaagctcaagccatccacccatctcagcctcccaagtagctgggaccaca

SEQ ID NO: 41759 - DNA, 3363 bp, Homo sapiens
caaaacagagtttcactcttgttctccaggctaaagtgcagtggcgcgatctcagctcactgcaacctccgcctcccaggttcaaatgattctcttgcctcagcctcccaagtagctgggattacaggcgtgcgccaccatgcctgggtacttttttgtatttttagtagagacggggtttcaccatgttggccaggctggtctcaaactcctgaccttgagtgatctgccaacctcagcctcccaagctgctgagattacaggtgtgagccactgtgccccagcctggttttctttttttttttcttttgagaaagagtttccccttcgtcacccaagctggagtgcaatggcacgatctcggctcactgcaacctctgcctcctgtaatcccagctacttaggaggctgaggcatgagaattgctcaattgctgggattccaggcacacacctccacgcctggctaatttttgtattttttgtagagatgggggtttcatcatgttggccaggctggtctcgaactcctgaccttgtcatctgcccgtcttggcctcccaaagtgctgggattataggcatgagccacagcgcctgccctggttctggttttctccactcctgcagcatggttttcatcaccttctcccacctccccttcctcctccttcacacacattcttctttgaaaatgtcatcaccacctcctctatgtatggcacggaaccagaccctggccaccgctgtttatagcaagagaagcggaccatagtagaggagctgtgccaagcaggccctgtgctctcaggacagcagtaagttgtagctgctccagacctgacacgtgtgctctgaaaggtgacttcattccttgttgatgaatgcatctgaatggaaagtgttagaatgataggaactttaagtcacacacttattttagtatttaacaaaatgcctcggctaaggaaaaaactaaacaattgaggcaattgcaaaaaatcaaagtctgacaacctcatggttatagccctgtttccagagtagtaggccccctggctctgcccttgtgcaccccaaaacagcctggcctgtaagtggaaaagtacatgtggcatgtgtgtgtgtgtgtgtgtgtgtgtgtgtgtgtgttagagacaccatcagagagtggcagggcagagacagaacttaggctcgtagctgctggtgggttagaatttctacttgggtggagctcaggtagcctggccggtggtgaggtggactgacatgtcacaaagtggcgctcacatagcattttatgttcaactgagaaaacaccagtcattcatagcaaaggaagggaagtgctgacggaaattagggtgccctaggccccatccccatccactccaggtcaccctgtatgccccgattccctgctcgggttctctggtcaataatttttccctggacactgaataacaaaaggactttgaacttacacttcattacatcagaaagtcactgaaccttgacctgttagttttggattttctaccaagagataatgctgccgcccctctttacaatctcctctttacatgtcgtctctgttggtttaaactgtccttggtaaccatttcctatcccttcttaaatgtgacgttcccaaatttcttttggttaagggttgtattctctgttcacttttcagaatatgctgtgttttagtatacagtgagtggacattgttttttagcagtgatcaaatgacataggaactatgagaggaccactcccttcttcagggcgtgactgcctgccctgggcactgctgccttctcctagacactgcggcctgttgctgggcactgcttcctcgacccgggcactgcccggctactggaccctgccctctcctgccccagctgaggccacggagcacccagggccatccagagctctgtgcagactgtagaggaaggcctcttttctctgctgtgttacaagctgtcaacaggcatcaaaacagagatacctgaacttcctggggtcctctagggacagtctcttcagttcttatttgtaacagaacttggatatgagttcaaagtagggctgagccagaagccaaaactaagcaacactcttgttgttcccattgatcacggaggctctgttaccaggccaggcctgttggtcctgactctccagccctactgcaggtggtccgtcccactagttcccagagagcagcagcacagcttggaggaggctgaggctctgggactgcacaaaacatactagctatctatgcaactctgtcctgtttaattcaggagcgggagctgaaacttttagaagctatgggacacatattggaaaagaaaaatcaaagcttggcagggcgtggtggctcacgcctgtaatcccaccattttgggaggaggaggtgggcggatcacttgaggtcaggagatccagacaagcctggccaacacggtgaaaccccctcactactgaaaatacaaaaaattagctgggcatgctgccgggcacctgtaatcccagctacttgggaggctgaggcaggagaatcacttgaacccgggaggcggaggttgcagtgagacgagcttgcaccactgcactccagccttccactccaacaagagtgaaactccatctcaaaaaagaaagaaagaaaaaagaaaaatcaaagcttgttgagcaagtggcaaggttcaatatttatgcaaatctaaggaatacaacaacatgtacattggcacgtcattcacaatatgctgagttaatataagtgatgacagtcatatgttcatagacatacaatttcaaatgcaaattttaggatagtcagttgagggtagaaattgtgagatttttaaaagaaaaatgcctttttcattttatgttgtttctcatctgtgtcactatggtatgactctaggtgattttgtaagagccaacacttgcactgttttctgaacaactccaggcttctgtttggggaaacccaccctgagggagtgaagcaggagttgtcgcactgtggggcacacgacacagggcaggatttggatcctggtcagaattctgcctctacctcttgccagctgtgcaaatccctacacagaagttgtgatataaaagatcaagagagcaagatagatgatgagaattgtatattttttcttttctcttccttccttcgtttctctttccttccttccttccctcttccttcctttcttccctccctcactccctcccttccttacttccttccttccctcccttccttccttccttccttccttccttccttccttcctttctttttctttcttttctttctc

SEQ ID NO: 41760 - DNA, 2976 bp, Homo sapiens
gtcaaggcaggcagatcacctgacgttaggagttcgagaccagcctggccaacatggtgaaaccccatctctactaaaaatatcaaaaatcagccgagcgtagtggcgggcacctgtactgtaatcccagctactcgaggctgagacaggagaatcgcttgaacccaggaggtggcgagattgtgccactgtactccagcctgggtgagaagagcaaaactccgtctcaaaacaaaacaaaacaaaacaaaaacaaaagaatctaaattctggaggctcaatctgttgtttaacctaccaaatgatctcgctgcctgttgcataatcccagcacagacagaaaactgcccacattagctgccctgtccctgtgatctgcaccttctcaatttcaatttgtctccttttactattctaacaagagcatgagaggcaaagactgcccatatcctcaagtgtattcaagagatcagacaacaaagagtgaagaaatgctacagccaagagccatgccagatccaagcagagtaggaggcttagtcccctcttatgggtcttccattagcctcatatattttccctctcaacattcaagaagtctcatcaaggtagtctatggagaagaaggacttgtttgttggtttcattgttaatctttctgagggtccagatatgcctctgaaaaccaagagaacccctcctgtcctgccagtagcagctggctaatcttcatcctgtaattgttgaattgtccacatgtacacacatgtgcatgcaccagatcacacccactcagagagctaagaattaatttcactcctaatcacaggatgattcatcctattatttaatcattggtgctagtcttgcctggtcaataggatgatgatgtagtctcaaaactaattcacctgagaagtatgtaaaggaatagggatattggaggccagagaaggaaaacaagatacagcacagatgtctctaaatacctgaagcataatatagagaccagggatttagtctgtatagtgttttagttcgggtaactcccgagggcagaatctgggtttgttggtcaggttacaaggcaggcagggaaatctcttagtaatcagtgtgaagcaacaatggaatgggctgcaggagtgggagagaggccctcatatctccacatcctcaagcagacaccaaacactggaaggaagctctgcattgagtgatgggctggtccagagcaaccccgtcagtgatcaggtttggggcccaactgtgctgggcaggaggcaggtgctggaaatcaagggtaaataaggcatggacactgctgtcatctggagacccttccacctcagggactgtgctcctcaggctgagggcaagaaccacagcttacacttccctcgtgtgttcacaatagttgtatggcatcagacccaacagtgaacacccagaagacaagaattataccttccatttgtgtttccttagcacctagcacaatgtccaagaaacagttttgaagttaaggaatgtgtccagagaatacccaatatgtgtcaataaatggatccacagaatcttcaatattgactcattgttgaaaggacccattttaatcccaatagcctgcatgatggataaagaagtgcctaaatgtaataaggagcaatgaattacttgactccagtggcctctgtgtaaccttcactggtaaggccatggcttttctgaaaatctccgtgaccaaggacatcagcaagcatagcacagggctcattagaagaagatgatttcacctgccatcttccttcttgtctgaagagtgccactcactcgccttgctttgaagacatcaaagtctggtgacagaaaccagcaggaaagatggatgtgactatatgcattgactaccattttccctgaaaaacatctgactagaaacagtgtaatcatttaccctttatttaccttctaaacctgaaatagagataactttaagaccggctgagtcattgctaaagtcaacaagtcaaagtgttttttggaaaaactaagatccagatattttctactgactgaaattatgggcacaaactaacttttaaattatttaattgttgaccaaactcaatacatttttctattcctttcttttttatattttacatttttattttcatatcaacaagattgagtttgaatcagttttcttttctaatatagcaacatgcagccatgttttcttttttattattactatactttaagttctagggtacatgtgcacaaggtgcaggttagtaacatatgtatacatgtgccatgtcggtgtgctgcacccattaactcatcatctacattatgtatttctcctaatgctatccctcccccctccccccaccccacgacaggccccggtgcgtgatgttccccaccctgtgtccaagtgtcctcattgttcaattgttcaattcccacctatgagtgagaacatgcggtgtttggttttctgtccttgcaatagtttgctcagaattatggtttccagcttcatccgtgtccctacaaaggacatgaactcatccttttttaatgcagccatgttttctattctcaagaataatgatttactcaatttagtgtctagcaggagactggtgtctagcagccaacctcctcagcttttcttgggtcccttatacttttggtttggagttaatacagaaataaagtgattgggctaaatccaggcccttccattttcttggcgtgtgatgtggtcaagttccagaacctctcagccttttttccctctgtaaaggaggaaggataagaatagttcagctctcatgccttttatgaataagtcagtaacaggagctatgatgatgctgttttcctgagcaggtgctgttccaggcctggaaagctcaaatctccccatttctttaaccgtgaagtgattctcttataaga

SEQ ID NO: 41761 - DNA, 4074 bp, Homo sapiens
cccaccgtggtcctgccacgggaacccccttcttccacctccattccccactttaggcagaaacatctctcatcctttttcttttctccaagaatcttcccccaaaatcttggcatctcctatacacatctgtacctttgctatatctgtgggccttgttctccctgtaggactcctcttggaaagctaactccccctgacattggagaattttatcaaattgctgagtatcctcccttccctctcacagaccccatggcatgctcagatcacagtagaagacatttcctctgctgccaaacccatggcactctgaggctgactgtgtccacctcattccctcagctgtcttctctttgctgctattaccatgttccaagcagactttggagcatctcccccacagcagcatggactttggcagatttcttggggaccagcgatgtcctaacctgtttgcttttccagggctgatgtttgcagggtgtttttttttttcttttgaaccaaagcagaaatcatcctgtatccttatgcaattcttccggcaggctccaacagataaataaagcccaccaccctccatgggtctacctttcccagcagagcacctgggttggtcccgaagcctccaaccacctgcacgcctgccagggcctctctggggcagccatgaagtccctcgtcctgctcctttgtcttgctcagctctggggctgccactcagccccacatggcccagggctgatttatagacaaccgaactgcgatgatccagaaactgaggaagcagctctggtggctatagactacatcaatcaaaaccttccttggggatacaaacacaccttgaaccagattgatgaagtaaaggtgtggcctcaggtaagtggacctgctgtctatgagctgaaataatgtgtacatggagctcaatcaggtgcctcaaaaaatcaccatcacccagtgcaaatgaaaccacagaggagtaaattctctgatttcttcccaggagtgagggaaggggcaggcagagggcaggagaggagacattctgtatggcagtcatgggtgtcaggagggagctgggtggggtgtgaggtggtgtgcaggagaaaaagtgcttcaaatggtagtgtgcagatcacagacagaaagtgtaacttgctggaaaaactaggacccaagagaccagctcctagttgccaagttaccactggctgaaaatcacgtatctgtctttggtttggtttctctctaacaaagactgagaatgaataaaactagcatctggcagatgcctactatatgccaggcccattcacatagattatctcatttactctttcccggtcctgcctcctggtgctgtgtggtacatatattgttcttgtcttacccaagaggagaccaaggctctgttgtgtgtgtgtgtgcagtttttttgttttttgtttttgtctttttttttttggtccaaaatcatataattactaagtcttcaggctgggatttgattccatatctgtgttccttcttctacacaaactgcctcccaaagagagttacccacatcccagagagaagtcttggcataaacacaattcacctcctcacacactagacaggaaaccaacgcagcttgaagccagtgacaagaaaaatcaagctggaaatatgcctcggggatcagtcaagagatttggagaggtggaaagaagctgtctgcctactgcctgttttgaaattagatttatttctgattaaggacaattctttcagcaaatatgtattacaagccttccttggacaagaaccagagatattaggttgaaccatataaaactgccatttttctatatcaaaagcaaccaaatattggccgttttaatggttcaacctaatacagtggtgaaaaaggcacaatatgtgcccacaagagcttacaatctaggttggaaaataaggtcaacaacaggaagcctggaccgactgacgactgccatccgtctcacaaagagacaaaatatttgaaatcaggattgctccggatggattttaagagtgctgcagccatattaaagcacagtggtggttaggaggaaacgctgatcaagtcaggggaaatgaacacgcaacacgcacatctgagggaaaaggtaatcatgaatgggcattgtgacttttactaaaggcagagcttcagagttggttcccttgagaaacccaggtgtacccggttcctgttcgccagagctgtgaacgctttcaggcagtcactctgggcacacctggacatcataaaatgcggagcttctcccaggggaggggatgctgaggcttcaggtactagtgaatcaggcagaaccaatgagaggcaaacagagctgggctgagaggagaaaaggcatacttgtaccttctggatttttcaggcttcgaagacaagatacagaaacaggtgaactcacaagaatatctccaaggattgttgcaagctccctcgtgtctacactagtgacatccagtttcctgtcagagggagacatgcccttccccattatcgccagcagggggaagtagagagcagcatcgttgcatgccggcacctgctgcacaagccaagacaaaggaaaaaccaaggacaacagcagcaaaaacctctaggagggaaaagaaaacggaggaaggaaggaaagcaaataatgaaaaggaagaaagaaagaaggagagggagggatagaggagattaaaaaaagacagtaagatattaccctacaccaccttattttgcagcttgtctgagaaaaatccaaacttgcattttccaaagcactgcttgaagagtgaaatcttaaaaaattaaataaataataaatacaaataagtgttaacacccatttgtagttttcaaatagagctcagagtgagggctgtggctccatcgacttgttcaagcccaggaccccgtctgctttgcgagcatcatctggtgcttccttaatcaacagacgaagaccagacaagccctggtcattgtcctgcccacaggccagttcagagctagacggagttgcagactgacagtaagaatgacatttccctcacctctccaaaagcggggtgctctcaagcccaatgagggcgcataccgtggaccgcaccacaggatcaggggaataggttgctcacggcttcactctttgtctccacagcagccctccggagagctgtttgagattgaaatagacaccctggaaaccacctgccatgtgctggaccccacccctgtggcaagatgcagcgtgaggcagctgaaggagcatgtgagtacccttcttaggatgactgtaggtggcccttcggccagctccaccgattcacccagcgtctcagcctgccttcttggctagccagggtgcagtttctaaaattgccatttgtggccgagcgcagtggctcatgcctataatctcagcactttgggaggctgaggcaagtggatcgcctgaggtcaggagttcaagaccagcctggccagtatggtgaaaccccatctctactaaaaatacaaaaattagctggacgtggtgacgggcacctgtaaatcccagctcctcgggaggctgaggcaggagaatcgcttgaacccgggaggtggaggttgcagtgagccaagatcctgccattgcactccagcctgggcaacaacagtgaatctctatctcgaaataataataataataatcatcatcataaataaaattgccatttgatgccacttgccctggggctgatttttacaagcgtttaactatatcgttgtatccctgaaagcagagagtgccatgtttcagtattacccagcaaaggcgattttgcaagggtcacctttgacagccgtgcctggagggagcctgcccggggtgcgaaggggaagggcagccatcctcacgtgggtttctttctccaggctgtcgaaggagactgtgatttccagctgttgaaactagatggcaagttttccgtggtatacgcaaaatgtgattccagtccaggtacagatgactattc

SEQ ID NO: 41762 - DNA, 899 bp, Homo sapiens
ctgtaatccacccacccgaggcaggtggatcacctgaagtcagaagttcgagaccagcctggccaacatagtgaaacccccatctctactaaaaatacaaaaatgtggtggtgctcgcctgtaatcccagctactagggaggctgaggcaggagaatcgcttgaacctgggaggcagaggtggcagtgggccgagatcgcaccactgcactccagcctgagtgacacagagtgagaccctgtctcaaaaaaataagaagttattcttactggaagtgaaaattgcctcgtgatgataagagctcctgcagaaatgtcagcatagcaaaagccttttgaaggtttagtaagaagcagagaaagtgcctgaagctatctggggaatgccttagcccttgctaacgcagcagagctggggccatgccagggagaatggctgcccacatcctggtttcctctctccgagcagactcagccgaggacgtgcgcaaggtgtgccaagactgccccctgctggccccgctgaacgacaccagggtggtgcacgccgcgaaagctgccctggccgccttcaacgctcagaacaacggctccaattttcagctggaggaaatttcccgggctcagcttgtggtaaagactgagattcttttgacaggttgggcagttcggtggcacttcgggaatgtactgtacgtggtggagcgggaggcagggaagaacaggcgcaggggcagcgatgagaaagcaaggagagggttgtttggaaagggaagaaagcatcctaagggggtatgaggctcctgagtgtcatgaggaccccaacaccctcagcgcctcccccatgctgagccactgtaacgtccagcagccacagctgccggcaggtacatccccact

SEQ ID NO: 41763 - DNA, 530 bp, Homo sapiens
gtggtgcccaggctggtcttaaactcctggcctcaagtgacccacccaccttgggctcccaaagcaccggcatgaaccattgtaccaggcctaatatggcaaattatatcagaagctttatcattaattattgcccttgacccagtgattccatttgaggcatttgtactaagcaaattattaaggatatgaacaaagatctactcacaagaatgttaattgcaacattgtttataatagcagagaattggaaacaatctacctgtctatcaaagacagttggcttgaagaactgactcacctgtcaacagactattgtgcaataattaaaaattaaactgcagaagtgggttattttatatgtcaagatggtcaggatctattgttggattttaaaagcaagttactatatagtaagtatactactacagtatttttgtataaaaatgcatgtgacatatgcatacaggaaagtctggaaggacatccatcaactattaacagtatggtcagatatttttgtcttttta

SEQ ID NO: 41764 - DNA, 508 bp, Homo sapiens
tagttgtgcctgaagtcacacggctagtaacagatctcatctagcggatctacccaactataagctccagccctttccactacagcacacagcagagggctctcctgagagcacccacctctgaggccatggtcagcactgagaagggtgaaaataaatcagttcccagggtcattgtcctctgatgtaagcccaccagaggtcagggacctttgcgttagcagaagctgggtcgaagccacgggggtgtatattggcttgtagttaatggataacaatgtatttgtctgagtattgacccatgataaacaacagcaaccaatatcatgcactcactgtaaacacctggccagagagtcttgggctcaactcctggctggatgtgtggtcttaggcaggtaattcaatttctcaggattttggttacatcatttcaagaaagtagggtttggcctactgactccctagggactcttcaacctctaacactttatgattctttgatgag

SEQ ID NO: 41765 - DNA, 4805 bp, Homo sapiens
cagccaggaagtctgaattcaccaagcaccactgggacataagataactattagagtggccaaggagacctccacagcaaaggtgttaggggagagggggagaatgggacagtcctccatattcctattcaggaggggacctgcaaatcagaatctaatcataagagccttgaacaaatgttatgatttctcaggaaacagttgggaaacttaaattcatttgtatgtacaggtggatatgaggttgctcaagggtctaaggttagaatcattgggaaatgctatccaaagtactgacttaggaaaatccaagttcagaattcaaggtgaacttggttagcccttccagttgtaacaaaaccgctcaagtctgccttaaagagccttacaagccagccagtccctgcagctccacaaactgacccatcctgggccttgttctccacagaatgggtctgctccttcccctggcactctgcatcctagtcctgtgctgcggagcaatgtctccaccccagctggccctcaacccctcggctctgctctcccggggctgcaatgactcagatgtgctggcagttgcaggctttgccctgcgggatattaacaaagacagaaaggatggctatgtgctgagactcaaccgagtgaacgacgcccaggaatacagacgggcaagtagggacagttcccactctggggcagggatgtgggcaagctggagagactggccagggtgagggaacccagagacaccctggcaggtgttttctgtattggaagccctgccgagaactctctgttctcctctgccagggtcagcaacaacgcacttattgttagtaaaaacaagtgttaacagtgatcctactctgacacttgtgtcagatttaatggtttacggggaatcttcacaaatattctttggctttgccataaagcaggggtttttttgtgtggtctttctaggtttctacttcctgtgaaatgtattgcatttctctaccccttcccacagggtggcctgggatctctgttctatcttacactggatgtgctagagactgactgccatgtgctcagaaagaaggcatggcaagactgtggaatgaggatattttttgaatcagtgagtgcttgtttttataaaccattaagggccctagggaaagcaagtaggtacactctttctacagggtcaagggtgctcaatatctgtcatcttttaaatggcccactttataatctcctggcaggtgcccataagcttattctaatgctctagacagaacaaagtttaattcatgagaggggtttctgagaagtcccattggggtcatgcagaacagaatggaaaagttgccccaagttgtgtttttacctccaagaccttccgttaggctctgaaccagtgtttcaattgtgagaaaaagacctgaggtgtgaatattctggacgtggggttaatgtagactgcagaagtgatggaggtagagctttgtctatttgttttattttgctttgtttcaataaactccgatgccaggtttgaggggaggaaaatggatgacttgcagtatgaaagctctcaagggcgccgtgtaaggatttcctgaaaccacagagcataataaagggcctcagaattaatcttctaaagatgatcatagaagagacttgaaaatagataatccatttcatttcattcttaattatcctgggatgattttcagtaattgatataaaactttacagtgtgagtacagaatagtgatgtaagtgtttagaagaaaactatttgatcaagatattttcctaatcatgtagccaattggtcaaactgtacccaacttgattttgaaaagtgaatatcctgttgtgaattatatttgttatggtgacactagctactaaaacacagacacaaaaactgtatactcactctaacatgatagaagttcatttctcacgcatgtaaagttgaaagtagaagttcctgattagatgggtgctttgctccaggggtgatttgagacccaagtttattccacactctggctctagactctgcagcctcagctcacgacttccatggttacctgctcatctgcatcaagctgtgcacagagaaagagcatagaggacagtgagaacgtgggagacccttatgagccagatctggaaatggttacacctcacttctgctcaccttcctgtggttagaactcaattatacacagtcacacgtgttggggaggcttggaaacatattctagctgtgtcctagggaaaggttaaacagtttgatcatcaactgcagttcctcccagccaaaaccacagaatttgatcttaagtttctaactactttaaaagaaaatgtctgactttaattttggaggtattttaaaagctcatagttgcattcgctatgtcataaaatgcatttgttggtttcaggtttatggtcaatgcaaagcaatattttatatgaacaacccaagtagagttctctatttagctgcttataactgtactcttcgcccaggtaagaaatcactacgattttgttagttttaataaaggatggaaaagagtacttaaccaggtctttgccaagaatgtatagggtatctctcattcttattttctgtttattcttaatgccagtttcttaatatttccagtacttacctccttactgaaattcatactatactgctcctcttcccacaattaatcttactaaactacctctacatttatatgctgcatcagatcttacattttcagtctgacataaatggtataatttctatgactgttccctcaggcttcctttcttgctatctctgccattatttcccagactacaccaactcttcactccattctactggatgccaccctgttttctgaacatgcactgcaatttccagtctctgtgtcttgcttgtgcctctccctctgctgagcatgccctcccctgatgacctctgaccttgggacacacctattctttaaggaccaacaccacttcttccacagtgttctctattctagaaaggaatggtgcttttgtaatctgcattcctataaaattttgtctaaactactcagggaacacataatgcactgccttgatttgagggtcgcatatcttacatcatgtagaatagtttctcctttcctcctcctgctgcacccttcctcagttcccaccaagtagaaggtgtcaataatgttgttaagtaaataattggactagaaatgaggctgaaacttaatgacacttgaaatatgcacatgcattcatttgggaccttccttttttcaagggaaggtctttggaaagagagcatccacagtgcaggaaaacagaatttggtcccctgtcgaacaactacgtgcgtgtcgctcccctggtggatcctgtgcaagtgtagattctgattccacaggtcttggtcaggacctgagatcctgcatctctaataagctccaggagataagaatgctgctggttgctttgaataacaaggcaagcgagcaaacattttgttaggcacagtttaaggttcctggttgtgaaggcaagattcacagaacagcaagtagtaaacagtctcaggacttaaatggaagtcataagtatcagagctatgggaggtcaggaagtgacaggtggtgatgattcaggagtgacaagctgtagctggaagtcccccattatctccaccagtccccaagtgcatgcagataaacacaaaatttctaaaaacaatgtgtttgctctgcaaaagcagcttcaagataaattctgtaccttgactttcacactaggcttattgacctcagctcctcccaaacagaaatctgactgtacttaatgtgatcattctactcagtcacacagtgacttgacccattttgttttctggctcacttgcatttttcttcttaaaaaaatatttagtcttattttttattgataaataatagttatacctatttatggcatatatagtgatatttccatatatatactgtattgtgatcggattaggttattagtatatccatcatctcaaacctttatcacttccttgtgtcgggaacattcaatacccttctagctatttgaaattttatcttattgttaactgtagtcatcctacagtggtccagaacactagaatttatccccctatctagctgtaattttgtatcctttgacagatctcacttgcatttctaaccaaacggggtgcgcttctgccttctactatgccattcacttatccattcattctacaagcatttactaagcactgcctatgtatcagatatgatgttcggtgttaggaactgaaaggtaaataagatattgcggtaatgaaatcccaatctctgaagacagtctactttacagggtcaataatgagaaaagatagtgaactagttggaggaaaaggtcctattttaatatactatattatgtgtctttgaacaaaattctcagagtaaatgtgtgtgaggtgaaaactttgctttgttctggtctcttttttaattgtgaaagtaatacatggtcattacagaaaacactgctgacagctaacttctattccaggggtatattccagaggtaacttcctcaccccatccttgcctctttacagtcatatgatttattgaaaattaatagcatttaaaaacttatgttattggcatcaacagtttcaaaaaaaaagatttacatgacgtgccctgactgcccaagctccatacccactgactcttcca

SEQ ID NO: 41766 - DNA, 1363 bp, Homo sapiens
tgagaaattcagatttgacttcaaaacgacagcctcttcattgttctattttacctgaagtcattccttttataatggtacctgtttaacatgttcccccgcttagataatgcagctgccttctactgaggagttttagtgccatgatccatcagtccactgactgatgatggagatttccagctgagacaggcaggcagatggaggaaaattacccctagccccaccccctacaccaacataggcactgcttatattcaaagacgtactttagatctgctatctactagaaaaatccagatttgtgcagatcacagttccacccactcatcagcatttctcagctttctgcccccaggacccactaatcatttacagcttgttgatggttatttgaacccagggtcaaggtgaacaccctcagttacacaacaaaaatgtatcaaggttttgtttaatcaattgcgtgtgtttcagaaagtctgtataaaattctctgcagtggcagatcatagcaagggatggtttaacaaaatgaaggcactcattgcagcactgcttttgatcacattgcagtattcgtgtgccgtgagtcccactgactgcagtgctgttgagccggaggctgagaaagctctagacctgatcaataaaaggcgacgggatggctaccttttccaattgctgcggattgctgatgcccacttggacagagtggtgaggaattgccaatggcagagctgagttgggagattactcacgggggcaaatgtgactctaccccctaggcttactgctttgcacaatgaatggctttggtcagagttttttgtttggcttctgcggctgctctaaattgttcttttttccttcaaactaatatttgttattagtgtacccgcaactatgattcgatttgtgggtacatataagcatttatgctgagcccagttacatgctaaggactgccagagaaacattagaataagctatgggccttggcctccaggaaataataatacactggcacatacaggcaaacagtgtaagttactaggataaactagagagaaggaaaagttttctcaaccctcctaaggctcctaactgagcctgaaataaaactggtagacaaggccaggcgcggtggctcacgcctgtaatcccagcactttgggaggccaaggcggacggatcatgaggtcaggagttcaagaccagcctggccaacatggtgaaaccctgtctctactaaaaatacaaaaactagctgggcatggtggtgcacgcctgtaatcccagctactcagggggttgaggcagaagaatcgcttgaactcgggaggcagaggttgcagtgagt

SEQ ID NO: 41767 - DNA, 1034 bp, Homo sapiens
cttttgcagcctttttaatgtctttcagttcaaagtactcggcatgccaaagagccatatttggggctatctttttctgtgccaaaccaacaacaccaaaccagaaagaagcaagcatagggaatccagggcttcactcaacccatcccttcctatgcttttcctctatctccaccctgggagcaattttcttttacagaactaatgcaactgagcagagaaaggctggcctgtccagagagcagataggacgcccatattttattttcagttgtgccaatgtcctgcatgggactcctggaactcactggatgcccctgtgcatgagcttcttaggcatgtaatagaattaacagcagtctgcttctatgcaggtaggtatcctgcaaagaaactttgtatgaaatgtgtctgcacattgtactcattcttgcattgtttacccatgtagtgaccttcaaaaatggctttgcaaaagtcacaggggaataaccgagttagtaggcacttgtttcccctccttcatcagattctgctctgatttgctacataaagttgtataatcacctggaaatatgcactgtgctgccacgtgattttcaaatgcaaatgagcaggttaacaaccccagtgttgcaatgttctagctgtaaatatgtttggataacccagcagagccatttaacctttgggaacaaggcaactagcgtctggcagcaggaatccaaccagtgccctgagttctgaggcagagaggaggacagaagaaacaagaggctggagattgtcaaattcagtatcccagttggctcttgattcttggtgaaaccatccctcagctcctagagggagattgttagatcatgaaactaattaccatccttttcctctgctccaggctgctactaagtttaacccaggaatcacagtccgaggaaattgactgcaatgacaaggatttatttaaagctgtggatgctgctctgaagaaatataacagtcaaaaccaaagtaacaaccagtttgtattgtac

SEQ ID NO: 41768 - DNA, 4694 bp, Homo sapiens
accaccacccaccacccaccaccatcacccaccacccaccaccacccaccacccaccacccaccaccatcacccaccacctaccacccaccacccaccaccaccaccacccaccaccacccaccacccaccaccaccaccacccaccaccacccaccaccactaccacccctcaccacccaccaccaccgccacccaccacccaccaccatcacgcactaccaaatatgtgatcatcaaaggtagaagcttacaacttgtggaaagacagataccactctctggcctggggtgggaggacagagtatgactcgtcctcaggcaggttggcttcctggatgatcagagaagtagaatctagggtgaaatgaaacaaaagtagatggagaaatctcaacaggaccaagtagagagggagaatttaggaatttagttagactgcagcaaaagaattcactgggtctctggccctaggctaaaaactatagaactccaaacctttaatgggagggggtacttcatggggcatgtctaagaggagtgaggaatgaggttaatgtgattctacggaattagacagaagtctgtatggctgaatgtactgggtttaacagcaacgttttagttagtttttgatattattgcaatgatgcactccagcaggagacaaatcctggcaggatgcatggttcaaagaaataccaatctttcaagagtatgtttaaacaaatttcactataaaagactatatctctgggaatgtcaagcaattggttactttagcagaaaaaaaaaaactagccatgtgacaacatggggataaaggaaaataaacacagtggacatgttattttttctgaaagtaaaatcgagccattttctttcataatctagtacagtcatgtgagaaattctgcttcatggtgatctcaagcaacagtttattggtggtgtggtacccaatagattgtgggtatggttgtaaatatactaaaaaacattaaattgtatgcctttagtgggtaaattttatggcatgtaaattatatctcaataaagctgtttaaaaaagaaaaagtaggaaacaaaataaaccaaataaaagtactaaaatcacccataattaattccaccatacagagataactgttaacatttgtttaaggttttcttgtttgctttttctaatttgtaaaagtcatatacgttcattaggggaaaaagaccacttagaaatgtttgcttgggccgggcgcggtggctcatgcctgtaatcccagcactttgggaggccaaggcggggggatcacgaagtcaggagatcgagaccatggtgaaactcagtctctactaaaaaatacaaaaaagtagccaggcgtggtggagggcgcctgtagtcccagctactctggaggctgaggcaggagaatggcgtgaacccgggaggcagagcttgcagtgagccgagatcacgccactgcactccagcctgggcgacagagcgagactccatctcaaaaaaaaaaaaaagaaatgtttgcttgaagaagaaagtgaaagataattataatctcaccactgacagacaaacattttaacagcttgctgtgtatctttccagacttttaaaagacatagatttatatataaaccagttttgacaaaaatgggctaatactatgcatactgctttgtaacctttaaaagtacattgtgaatatattataaacattctttcacataaatgtttatgatagaaatataaatatattttaagtgaatgctttgctctcaagtcaaagatcaatattcctaactttaccggaacccactagaattatttgctgttgggtcagttggatgaaccctaagtatctttggctgcttttcaggttggctctgacacgttttattccttcaagtacgaaatcaaggagggggattgtcctgttcaaagtggcaaaacctggcaggactgtgagtacaaggatgctgcaaaagcagtaagtgtattggccattcttgggccttctgttttctccgttgaccctgccagatttttttactgatgcagaaatgatggctactggtgagcctgtttatgagaaatgcaaataaacattccaatgtgtagaaaagtcagatgctttatatctgtgttcttgtatagacagaaaaatcatggagaagccagcagttaaacatggagaaagcctttccatgagaagggggctctagtgtccagccagaacatgtggctcagactccagagagataacaaattgacatttgggccaagccaaagagctggcgaggggagggggtgggtgcttccattgcacaacgttaagtgcaaatcttgactctgccttccattagctgtgtgatagcgggggagctgtgacctctcagaactggcactttctgctgtatatgggagataatattgacctcatcaggttgttggaggatgaaatcagatgaattatgcaaataactttgataacaatggctatcttaaccaaatgcctaacatataggcctggcacaccatagctggttgttgttttgctttttttttttttttttttttttgagccagagtctcgctctgtcgctcaggctggagtgcagtggcgcgatctcggctcactgcaagctctgccttccaggttcacgccattgtcctgcctcagcctcctgagtagctgggactacaggcacccaccaccacgcctggctaattttttgtgtttttagtagagaccgggtttcaccgtgttagccaggatggtctcaatctcctgacctggtgatctgcctgcctcagcctctcaaagtgctgggattacaggcgtgagccaccacgcccagccatggttgttttgctttaattaagaaagatttcagacagtatctgcctcagaagcaagcctctcttttcatggattgattcccttcttttatgtcagaacataaaagatgactgccagtcatctgccattaccaaagagtactgaactccaagtcaggagtctaggattttgcagtgctggttctcccttctcagtcatctcatctgtaaggtggggataagtagctgctgtgctctgtactgcctgcttctaggggctgtgtggacaaagggaggtgtgctttatcctgatggaatagtatctgtcacttagaatccaatggatatgactgaagaatgaaaagacaaaacaaaacaaaaacactgttcaacaataacaattaaacagctgcctattattaagtgcctgctgtgtggcgggcctctagtaggcattttgtgtgtgtttgcacacatactgttcacaacaactctaagagatagatgtatcccatcttctacaagacgggtaaactgagactccaagagtcaaggggacatgacagagttaacagctagcaagtgacaaggctggaactgaataacattttgatgccaaggtccttgccctttctattaagttaaactgaagtttatgtgaacagtattaactcactgaagttgagtggtagataagaggagtgtttagcaggctggttctagacctctgcgtccatcttggttagaaagaaatagctccagagctcagccaggtgcagtggctcacacctgtaatcgtaacactttgggaggccgaggtgattggatcatttgaggtcaggagtttgagaccagcctgaccaacgtagtgaaaccctgtctctaccaaaaatacaaaattagctgggtgtggtggcacgtgcatgtaatcccagctacttgggaggctgaggcagcagaatcacttgaatctgggaggcagaggttgcagtgaaccgagagatcgcactgttgcactccagcctgggtaacaaaagcaacactctgtctcaaaaaaaaaaaaaaaaaaaaaaaataggaaacaaaagaaaaaagaaataccctccagggctcaaaacaaagactcaagctttaaaacctcatcatttacactgtctttcctccagcatctcatgaatatcagtggcttatataaagtaatcattaggctattaaaaaaatttattctcatgtctcaaaactcttttggtaaaatcttcacaagttttgttttgttttgctttttaaggaaagccacatttagcaacagtattaggtagactttcccatctgaaagattaagataaatgatctctttcttttctttttaggccactggagaatgcacggcaaccgtggggaagaggagcagtacgaaattctccgtggctacccagacctgccagattactccaggtggctggtttatcctctggcactgccctggtgggaaattaaccatttctgtgagccaggaacacaatcttgaccaggctctgcttgctcccagagggtggcagtagtaaagccatttgcagagttagggagcattgggtggagcggcagagcccggaggttgagccaggcttgtgaccatcatccccttaggactatcccaactcttcccgtgtgctgcattgtacccagtgtgtgcaagggctcaacagaaggaccagaagacataagacctgccctccattgcaggcagcatcccagattgaggagcgcataggctttgagggcagacctggcctggaatctttcagagctccttgccttcttgcctctccttttccttgtct

SEQ ID NO: 41769 - DNA, 4772 bp, Homo sapiens
ttctgactttcaggactctgatctcattgcaactatgatgcctcctatatcaccagctcccatacagagtgatgacgattggatccctgatatccagatagacccaaatggcctttcatttaacccaatatcagattttccagacacgacctccccaaaatgtcctggacgcccctggaagtcagttagtgaaattaatccaaccacacaaatgaaagaatcttattatttcgatctcactgatggcctttcttaatttaagtggctatgggtatttctttcatactttattaaagtatcaatatccctctctccattgtccagatgaaaatatcctgatataatgcaccaaaaaccatgcagcttcggaacagtctaaagagaagtggtgagactcccagtggagacaccatcagtctccacggactgcataaaattgtgtgccacaattctaactcttttctgaatcttcttcccaagttttctaaactagcacagtaaacagacaaactaatgtgccgtatggcctgctgcaattggcttctctgataacaaatatgtaccttacaacatatgtcatgaatttgcatacaaagattcttgtcattcttaataaactgtggcacttggtatttgaatgtgtgtgaaaataagggaagtcaagagattaaatgctgaacttattaatggaatagaaataataaggaggctgaggctggagaattgcttgaacccgggaggcggaggttgcagtgagccgagatcgtgccactgcgctccagcctgggcatcagagcaagattctgtctcagaaaaaaagaaaaaaaaagaaataataagaaaaacttccagatttcaaagtaacaagaaagaagacaggttggccaaagggaggaaaggggggacataaattaattgactttctattcccaaaatgggctagttatatcaaataaatactcccactgccctttctgagtgagagtgtttctcataagtcaaaaatttctgtttactcattaactactctttgcaacaggctttcatatagaagtattctgtttatttttgctgagcctagattgagtaattcttagtttacagaagctccgagcttaatgataaggatgaaaagcagagggagcaatatagaagcaggcttgctaataaaactttttaaataattgacaagggaatattatggaatgtgatgcaaagtttgttccgaaattttatgaggaaattactctctagtctcactttatagtctttttgctatgactttgaagaccattgatttttgagaagcagaataataggattgcctttcattgccctatagtgcaaagaaggtatatgctttataaccaatgttgtacttttgcctagaaaaacaagatatggctttaaatagctacaatcatctttggatgtatatgtcactgctgcttcaagttattggatgcatttgaacctctgagtttgtctttcattttaaatattgtctgttcttttaaataaacaaccacagatgtcaggaaaaagtcttaccttgtcaactggttgctccactttttaaaaatgattgaatgataacatcatattaactgcgttttactatacttacagagtcacctaaggtcctgcgagtacaagggtcgacccccaaaggcaggggcagagccagcatctgagagggaggtctcttgaccaatgggcagaatcttcactccaggcacatagccccaaccacctctgccagcaaccttgagaggaaggacaagaagaaagatgggatagaatttaaatagagaagaatgccattttatcactctgcctctgggtgaaataaagatcagtcttgatgttctaactctaattcacagtggtctcctttcagccctacccattctgcagcaaattccagctggtcagagagtcagtgctgtggctctgccatggaggctcataacccaacactggaacattccctagccaaggcagaagtccttaggcgggacttccttaccaccacgggtgctaaaagaagagttagtaggtcatgcttctaccagtaatctaaggactctctccttctcttcttcctctttctccagatttccaagccttagctaagagtaatttggcttgtttagtattgttttcttatggtccagttaattaccaaaaatatttttaaaatcatctctgttaatagaatgtctaccaacttctcactatcagaaaatactcaacctccaaacaatttgaaattatctttctgatccaggtaaagaagcaaattgaaaatcaataaagtaaaaagtgacggagattttaaattttctgtaataaaaacacttattgggttgggcatggtggctcacgcctgtaatcccagcactttgggaggccgaggtgggtggatgacctggcgtcaggagttcgagaccagcctggccacatggcgaaactccatgtctaataaaaatacaaaattagccgggcgtggtggcacgcacctgtaatcccagctactccagaggctgaggcaggagaatcacttgagcctgagaggtggaggttgcagtgagctgagattgcaccactgcattccaggctgggtgacaaaatgaaattcagtctcaaaagaaaaaaaacatttatcgaacacctattacagccatttgctatgctagataatttacttttggcatataacttaatcctcacaaccactctaaggcccccatgaacatcattcttttacaaggaaactgtagttcacagtgccctgcccagggtcatatagttaataagtggcagggctggcattcagacttagaccttttgaactccattacaccatgtcatctgaaggctttattattaatgttgtcattacaaaagacacaccaagtcactgactacagtcacagagacccaataaattaaaaaaaaaaaaaggcatgccaagacaatgtctgactctgagaggatccttgtctcaatccaaaatatccttattaaatacctaattgtggctggtgctgttctgtgtattggtcaggataaactgagttaagcagcagtcactaactatttaccatatgcttcgcatgaggtcctgagaggaaaagaaagaaattttaaaagacataaatcctttccctcaaagatcttgcaatcccattggcaagtcaagatgaaagcatacggaacaaagatttgatccaggctgcagtcttttgtgcaacagtgagtgaatgcaaccaatgtgactggaagaagttgactaggtagagggatcagctgtgaaaggtagtatgaagcccagctgggagtctaggctgaaatatgcagtagagttccttctacagtctttgccatactcagagggagtttgagatagatgattctgaaggttctgggtagggtggatcagaatgggaagagaatggagtcagggttctgttctgggtatttcctgacaatcatgttttagcagaaaaataagggctgatatataaagcctatacctctcagcttactcaacaacatgaagtatttccacttcaggcctttgttaggtaacataaacatgagtttcccgtgacccagaaactaactttcttattttttaaatatctataccagccgggcgcagtggcttcacgtctgtaatcccagcactttgggaggccaaggcaggcggatcacttgaggtcaggagtgcgagaccagcctggccaacatggcgaaaccccgtctctactaaaaaataattaaaaaaaaaattagcttggtgtggcggtgggagcctgtaatcccagctactggggaggctgagacacgagaatcgcttgaacccgggaggtggagattgcagggagccgagatcatgccactgcactccagcctgggcaacagagtaagactctgcctcaaataaaaaaaaaaaaaaaaaaaaaaaagacctaactaccaagccaaagtcacaccccaagtgtctggccctggctctggggccacacagctacatcgctccgtgcttctcttcagggcaggcatttcctgtcgtcgagtccaacgcacattcctcacattgtctacgcctagttcctcaaacaggaggcccctattggctttttactccactctccacttcctgcttctaagcctggttccaaaggagttaactcacagaaagacacatgcttttcggcctcaccccagtctgtctggcgcccatgctccccttctgctcatactctgtacattcacctcgcgggaaagcccagactcccaaggctcctctgagaagatttgagaggatccagcagctatattttaaaactcactcttccagaagcccagtgtctctctctctatattaagatagatgatcaaaagccaaaatgccacttcaacatcttgcaaaaatgctatgttaaattatttaaggttggctgggtgtagtggctcacacctgtaatcccagcactttgggaggctgaggcgggtggatctcctgagcttgggagttcgagaccagcctgactaacatggagaaacctcgtctctgctaaaaatataaaattatccgagtgtggtggcacatgcctgtaatcccagctactcggaggctgaggcaggagaattgcttgaacccgggaggcagagattgcggtgagccaagatcgcaccattgcgctccagcctggacaacaagagtgatactccatctcaaaaaacaacaacaaaaaattatt

SEQ ID NO: 41770 - DNA, 2142 bp, Homo sapiens
tcaaaaaaaaaaaaaaatttaaaaatttaaaaactaaattaaaaaaaaaaagaaattttggttatgactttccagaaatgttttctccaagtgtatgcatgtattccaaaaacagaatcaggctgtaaatacaatatgtaatctctatttttcacttgatatatattgtgatcttttttaagtctttagatttgactcttataaattattttataattataaatatgtgaatgccttttaataatgatgcactgccggaaaactgcagtgggtaagaaaagtcagtcagtatggtatttgtcattgctattattgtgctgtcctgtggctgccgtcatgaagtgtggatccataacataggtggagactcatctgtgagtcattagtagctgactcaagaggaaccaacagtgtttactctctgaataggtgtttctgcatttgagaggtgattcaacttacatttttaatcttgttcgagtgagtaaggattctttgtgaacttggagcgctggtagagtgcttttcctcattgctagtaaaataggaaatggagggactccacgcagaacccccttcccaagtttacctttcctcctttgcagggaactgctgcctcccagaggataaatgcgcaggtgaaggtcttaatgggaagcccatggccgctgggagaatgtgtttctcttcttaatgaatgcatttccctcctttctttttcttgttcttacagggtttctgtgtaatttcagtgtgtctaagagttttcttttctttccttttcttttttcagttggagtctcgctctgtcccccaggctggagtgcagtggcgctatcttggctcactgcaagctctgcctcctgggttcaagcgattctcctgcctcagcctcctgagtagctgagattagaggcgtgcgccaccacacccggctaattttgtatttttagtagagatggggtttctccatgttggtcaggctggtcttgaacgcccaacctcaggtgatctgcccaccttggactctcaaagcgttgggattacaggcgtggagccactgcgcctggcccaatttttcttttttgtgcagtatattattgttattttagggattcaattcttctatgtcttagtctttttttttttttaattgagatggggttttgctatattgctcaggctggtctcgaacttctgagctcaagaaatcctcctgcctcagcctcccaaagtgctgggattagaggcatgagccactgtgcccggcgtattttagtcattttaaatgtgttcctttcatgttctcttttagatagtctttccattatccgaaattcacaaccatgaacctggctgtttgttgttggtgctgactcgcaggcatggtaagtcgtttccatgtatgtctggagtataagttcatcggtagcagggcttggtttttcctgagagaattcactgtgagaaagagtcttggcacgtctgttctctgttgacacttgccgagagtcttggaacgtcactgggcttgtacacatttctgtaagttctcatattagagtttggggtaccacataggtaaaaaaaattcaaactctaaacccctaggagaaactaaactctgagatgttaacagtgagggaacatgggtgagaggaatatggagaaactctgtgtactacctggcaatttttctgcaaacttacagttattccaaaataaaaagtattttttaggccaggcatagtgactcatgcctgtaatcccagcactttgggaggccaaggagggtggatcacttgagatcaggagtttgagaccagcctggccaccatggtgaaaccccgtctctactaaaaatacaaaaattagccaggcgtgagggcgcatgcctgtaatctcagctactcgggaggttgaggcaggacaattgcttgaacctgcaaggcaaaggttgcagtgagccgagattgtgccactgcacttcagcttgggcgacaaagcgagactgtctcatatatttatgtatacataaatatatatgtataaatatatatatatacatatatatatatattttaatgaagcccctagattactaaagccaattcaacccttaggtagtttggaaggaaaata

SEQ ID NO: 41771 - DNA, 846 bp, Homo sapiens
gtcagcctccatgtgttcaggtctccaaaactccctgaaccctgtcctcttgggccttttatgaagacttcttggacaggcatgactgaagcatggacaaccatgttgaaatgtgattggacaaaaagggaatgatctaaacccagcaagtcctgtctgttcagattcttcttggctcttcagtgcagcattcttacctccaggtaatgaggcagaacttcctctggaatggagagttttatgagtcacaattagattagaatcctgcatcaggcaggtgaaagaagggcaagagaaggtcaaagagagagattctgtttactgtgacatgggctatgggagttatgagtcacgaaccatggatgaaaacacatatattggccaggtgctgtggctcatgactataatcccatagcactttgggaggctgaagtggtaggatcacttgagctcaggagttctagaccagcctgggtaacatagtgagccctcatctctaaaaataaataaataaaacacacacacacacacacacacacacacacacacacatataaaaaataatatcacaagttcctgggaaagcaaaatggaggtgttctttttttttttctttttttttttttttgagatggagttttgctcttgttgtccaggatggagtgcaatggcacaatctcggctgactgcaacctccgcctcccaggttcaaggttcaagcgattcagtctcccgagtagctgggatttacaggtgtgtctaacctaatggtctgcaacctggcctacagaggaagctggaagagttgaaggagagtattctggccgataaattcctgtctagtag

SEQ ID NO: 41772 - DNA, 1417 bp, Homo sapiens
tctgccgcgacgcccggctaatgtttatatttttattacagacgggatgtcaccatgctggccaggctggtctcgaactcccagcctcaggcaatctgcccgcctcggcctcccaaactgctgggattacaggcatgagccaccgcgcctggccaaaactgttgttttttactgttgagttttttgcgagtttttatctattctagataccagtactttgccagatacgtggtttgcacatattttctcctctatagcttatcttttcatccttatcttaacagggtctttcaaaagccgaggttttcctgtgcgctcggaggagccatagctgccagctgggctggcggcgggtgcccccagcccttgtgggcggcgggcagagctggcctgggggccgggtcccgtggggggtcgcgcagacagtgtgtccggagcgcccccggcgggagcgcaggctgcggggcgagagggaagaggaggcggcggataaggtgatggcgagaagatggaggaagagcagacgaaggaagagaaaggagatggaagagagaatgtcaccagaggagaccgaaggaacaaattttgactttgcaggagaagctgtgggccaggcagaaagaaaaggaccagctttttctgcagctgaagaaagtttccatgaggaagaaaaacggaggcgaaaggagcagagcgacctgaccttctgacatccgctgtgagccggcggagcccgattattcacgtggggactcgcttcctcctcggcatgcaggcagcgctggagggcacgatcgcccgggcattgtcatagcagctgacccagccaagcagatgttcaggccccacgtgcttacgacccggaagtccgtgggctcagcggcggcttttgcagggaccccagagcaggcagcctgggcggtgccgctgggactgctcagcccctacctcaatatgggcccacatagctagcctatggccctagtcggcagctcagagcagttcagtgctccctggggtgcattcatgtcccagccacaaccttatgttctgctgggccactttcagcacacccagacagggttcctcttctggtgctgctctgtctttgaaaccgcagatagaccatgctaaccagcacacaggtttccctggtccatcctccctgacccccatgcatgcccaggttctgcatccaggccctagactccttgcctaatcccagctccccgcgaagatgcagccagcaggaacgtctaggttttgcagctaccaaccaaccaggccctcagcaactcgtcatccaacacagccagaacctgtcatgctgcaagtgaccatcagatagcttcaatttcgtcctgcccccacacacacaccatgggtgtgggttccccccgagtgtcccagcccaagg

SEQ ID NO: 41773 - DNA, 3078 bp, Homo sapiens
tggactgagggcctggcccactttgccatcttggtattcttaatctttgtcctagttcctggcacgataagaattttcaaataaataaataatttttgtattaaaaaagtagtatttagaaccgaatatcttctataatatagaaaattgagtcagctttcccagtaatgattctttaagttggccttctgaaatatgagaaaatgttaccctgatagtctcgatgatattttgcaccatgggtagggttgtattttaaagttaaatgactacatatattgttttttgtttttgtcgagagacctgagatggggctaattgaaaacgtctggagcttaaagacccgtgcagtttacgcagcaaggatattattgctctgaatttcaataaatcaacatttcactatatatcggcaaagtctacagcctttaaaaaatgaccaatatagacggaatcaaaaccgatgtagtcccaaagcggcacagagctgtatctgccaaagcgtccatttaaattcgtgcgttccaaggaaaattactgcttagtttctatccatttgcaaaagtttatgatttttttcaggcattcctcacacctgttaggttaaaatcagtaacactcttaaaaagaaagcgagagaccggaaatgatatgagaatagaattggccactccagagacatctgcaaatgacactccatttttccttctcgcgctgcaaaatgtaccggtaaaccggacttcccgggactcgctgggtggccgacattttccctagcaggaattttacgtttccaagatctgaatggatgttaacggtcgggctaaatgccaggcaggtcttcattgtggaattaaacagcggtgggagcaagcggaataaccgagttcccctcccgcacctgagtgccggcagcgagccgcgagccgggacctgtcacccgcgggaagccccggccgcccgacgaacagcatctccggtttccgcctccggctccggcgcggctcccccggcccgcctctgcgtcagggacgcggaaaccccgtaggagcagggcgggcggggaaagcgaggtttaactaactccgcagctatattcttccgccgcgaggtaaagagtcccaacccaaccccgggccctaggatttccagcgaccctgtaatatcgagaaattaccacatttgggtttttctaccaacttgcttaggattttatccgaggtaacgaccccaggatcacaattttgtagctgaccgaagcacggcgagaaaattcctccgcaagaaacgggttccggccacgagcctataaaaaacgggtggttgggcgccgctgtcttttcagtcgggcgctgagtggtttttcggatcatgtctggtggctccgcggattataacaggtatgcagtctgttggcggtcgcggtctgtagtgaaggtcatagggcgccaggggagatgatagtggatggcacggaggcaaaaactctaaattaatggacgttttcttagggtacagcactcctgtgcccttccagaagcttccatgatgggtagggcccggattgtggggagataggacggtggtgcgaaagcagtggctaaagggcgtttttcctctctaagacattacgaaacttcggctgctttccttcccagtgtagagcacgggaaacatggagtaaaaagccgtggcgcagtccgagttcggtacactgtaaccaggacccgaagctttattttcggtcatccacacgagttgggggagggtcctaggctttacttggggaagggttggaggcagcggtctccactcggccacggcgcggaggcgacgggacaggaccggtgccggtgaaccgttggcatcgccctcgccaggccgctccgcccgcgtcaatcacccggcttgcgcattgttgggggcggagttcggcgctccgagctctcgcgagacgctccgcagttgaaacgggatcgccatgcgctcgggcctggggggctgcctttccgggcatccgcaggccccaacctttagggaaggcgcacagtgtggatattcgccctgaggctgctgctttagcttgtgcaggggaggctaacgtgctgagacgggttgcaaagggctatgcgcttaaggtgcagttgaggtggcctggaaggggtgtctgactgcagtattcttgtcagcagagaacatggcggcccagagggaatggaccccgatggtgtcatcgaggtaagaaacggttgtggatcttgaagctttggaaaggtgagtgtgttcatctcatttatgcgtgcattattttttctaacttacagagcaactggaatgagattgttgataactttgatgatatgaatttaaaggagtctctccttcgtggcatctatgcttacggttttgagaagccttccgctattcagcagagagctattattccctgtattaaaggtaaaagaaactggcatttttaggaaattgttctacatagacatgaaccataaaagggaaagtaacctctgggggactagcacctgtttgtattccttaaagtgaaatgatggcaatcatctttcgggactgacctgaaatgaagagaatactcattgctgatcacttgattatttgggcataatgttccaaatggaatacatggtgtgaagtagaagtgacaatttgatgtgggatcggtaaatgtgtatcctactttttttagggtatgatgtgattgctcaagctcagtcaggtactggcaagacagccacatttgctatttccatcctgcaacagttggagattgagttcaaggagacccaagcactagtattggcccccaccagagaactggctcaacaggtattgatagtgtagttcaaaaaaactgcttgcgtgttgcataggtttcaggtttcacaactgtgaagaatttaaaacttagtataaattggtcctaccagatccctccttttaattgtccatgcatgcagggagtttttgttgaaagttttaaaagaactgggtatgcaggtatggtttgtagggttgtatactaatagattgagaatccgaagc

SEQ ID NO: 41774 - DNA, 413 bp, Homo sapiens
tttcaaagctcactgctatattggctttgaagtaaaccttcctaataaagctgtaggctttattgaggtcaggattatataaggcacaataccctctgggggaaaaaaatcatttgccctagctgtaattacagaacataaatttcactacgtactccctacctacagtgaagaataatgtaggaaacgttattcttggattgtctagctgatgcgtggagcagcagcatcccaagtttgacaaggcataagaaagacattaagggaattttaccttgcagcagttaggtcgtctgcattttaagcttggaagtagttttgtgctgtgcatgcataaaagctgttggcagaccagattatatttgcctttatgctttaaaaattagtcattgatcctggagttctgcggaata

SEQ ID NO: 41775 - DNA, 1806 bp, Homo sapiens
ttaatccccagtaaaattgccatattgcacatgtcttaatgaagtttgaatgttaaataaattgtatattcactttaaaggtgcttttggtcattttatttttattacaacttcattatttacaaaaccccccatccagatatattcacgttaacaattctgagataactgctgcatcacagttgcacaaaggctgatgagttgcaaatgttcatcagcaccatctgctaggcatttgtcaacttcctacgagaaaaatttaagaaattagcatccttcaggtagttaaatgttccattgacatgtgcaaagtacctacttacggcaagtttttctgtgataatagacttctgtttatcagataagttattttctacaaccacatcatggagttgattgacgagctgagttgctgcatgaccctcatctattaaatcctataataaaaaaaacttttggtatgatgacttaatattcctttccccaaagttagtaagctgactttaccttgaccacagcttctagtttgtcaaaagagccactctgacaggcagcaaatactccatcaattttctcagctggtattacctaggtaattgaatgttcggtattaaagatgtttctaggtgagactagacatacactctgccaactggcccccgtgcccccagtcatttctgttccacacctaagttccatactttcctgggaaggctttgggagaacggaaagggccagagtaactccagtcaccactaagcaaccaaggtgctaacaactgtgcttttaaagccctttaatggctttgtgaacttccaagtttgggcacacatggattatagcttgttctggtcagtggatgaagattaagttttcccctagcggctataacgattcctcagaacagtggccaagatcaatcaaaaagactgatttctttaaaggggaagtgccctttctctcaatgtctccatgtaaagatgccactaatgagattggtttaaaaagtccacaatatccagaaaattaaagaggattagtggtaccagtcttgtcatatggaaggcctaccgtgaaggtgaaaaacgtcatagaaacaaagaggattagtggtaccagtcttgtcatatggaaggcctaccgtgcaggtgaaaaatgtcacagaaacaaaagttgttaagtagtagtgattctgaagtgagtttttacatgggagtatccaaagacaagtggggtactccattctctttaataaatgattactgtaagttggatatgccttttgtttatatacaactggcaaaatagttttcatgtataagaacatctgctaaaattgatttaactgccaaaggcatctcttataaaatctaaaaactgaaggctgggtgcggtggctcccacctataatcccagcactttggaaggctaagcggggggcggatcacctgaggtcaggagttccataccagcctggtcaaccaacatcgtgaaaccccgtctctactaaaaatatacaaattagctgggcatggtggcaggtgcctgtaatcccagctaattgggagggtgaggcgggaggtggaggttgcagtgagtcggtattgcgtcactgcactccagcctgggcgacacagcaagactctgtctcaaaaaaaaaaaaacaaaaaaactaacaactgaaagtgtccttttctttcctgaaatgtctgttacatgcctgacaaactgaaaagtcagtgctatctcctcacctcaaacactctgatactcccaggttattcccttatacttcctagtgcagta

SEQ ID NO: 41776 - DNA, 1766 bp, Homo sapiens
ctatttctaacatgcaggtaaacattcttccaggctgttttcagggataaaaagcatcattagctcgcctgaaaagtccccggttaattctatttttttcactgctacatgccctggtgcctagaacagtgcctggtacatggtagatgctccgtaatatttggtgaatgaattaccatctatgatacccggtttccttttctgttaaaggagctaaggcctattccacaggacaactgagttaaataaaagaatgtatgcaaatacatagttccttgcttggcatatggggatatgctcaataaaataaatttttaatatctgttagcagccaaggtttttataacgttactggattagtccatccctgcctcgggctgttaaacattaatacagcccaaagccggggcctgcaagatgctgtccggaaccaccatttcaccaaagggcgcggccagggcatgaaagggccactaggctggggccccgaaggaggtggaagacctcacaaggggcatcaagggcaggagtggggaaggcgaagcgggcttgcagttcctccagcaggttaccagttagcctggcttctcgtgcaggtcaccgccgccggctcgttcctcaggtttccgcgatacaaaaaggacgagatggtctcgaagtcttagctccgtcacctaatctgagaataacgggcccaggagacttacgatcactgatgtccccacagtcgcctcagttcccgccacggaacggcgggcgaaaagcagggcgggaatacgccggtaggaatacgcgggcacgtaacgcgtcacttccggtgctggggcgcgctgcttgcggagggagtttgcccgtatacggttttatttaggcaggtgatgagccagccggactttcaggcagaactggactggaacaggcatggcctaggaggtgtccctgtcccggtgcattgctcccacttcagacgtgagcgcgaccctcccggaaggagtagaggtcgcgcgggcacggcgctggggctgcttacctggcaggctcagcaatgagggcggggcggcggcgcgcgggcctctggaaccctgccggtccaccgaaggtcccgagcccgctatcttcgtaggtgcgggcctccggaggtgcaggtccctgtcctccttgtcctgcttcgtcgcagagcagaacgcgtgtgctttaagggcagagacatctgaagatgctttgccttgccctcttgaggacacgtggcttttacttctaatagtgtctgcgtgttgtggagagagaagaccatgcagctgtggacatctattataattcctgagccccacttagaaatctggaagtgaaggcgttcaataaaagttaaaggactgataatcatgtttagccccaccaagcttcatgcacagtgggctaggctggtgcctgagcccactgcttttatctcttccaagtacttggtttagctctgaaatgctccttaatcctattgaaacctgacccttctcaaaggccaccttctctactggtctttactaattactaacccataaggttgttccgggtcttcttcaaatgactgttttgtttggcacaaactcagcatgatatccattgttaactttgtacgtttttttcatttatcttgcaacaaatgcttacagaatgtccacgcactgtgttagatgcctgcagatacagcagggaaaacgctcgagatgccctcaagtagctttacagactaggagagtgacagacaatgt

SEQ ID NO: 41777 - DNA, 1949 bp, Homo sapiens
agtgggggcggagaccgacccagtcttcgcaactctatttgcatacggaggcgactcgcttccttcccgcccctccgccgcgctcttcttccttccttctccagtcccttccactgtgcgtcttctgtcccccgttcttccccagcggacccctctttcgagactccctagtggggtccccagctcccgggcgatcctgcccttgccgagcgcgttttctggagtcacctgggggaggggagtcctgggcagggccgggctggggaagacgcctggggcactgcccggcgttaacaaagggagccgataccgaccggcgtgggcgcggagcgggcggccgccaccgagcgtgctgagcaaccgcagcctccgcggccgagagtgcagcgagtgagtagggggtgcggtgggcggcggcgcggcccgggctatcccgggaggagtgtgatgcaaaggggcgcgggaggatagcggaggcgcggggcccgcggcgcgcgtagggcgcagggaatctctctccagctccgcctcagctgccttggctccggggctggccgccttttggttgggggtgtgtgcatttttgtcagggccaaagggccaccctggcttctctctggctccgcgagcctgcggatccacaacaaacccacgtgcgcacagccccggggaacacggatttctccacggcaccgtcagtatggggtggggtggcgtgggggcattgcgccttgcagagtctgggtttacggatcgacaaattgaggcccgcggcagcggagggggcacaggcaccataacaaacgcacgtgcgccctgcccggagagctggacgcactgcatacccttaggggccgccctgcggtgccgggccattgtctcagcctcgggggagggagtggctctagaggcgccacttgctggaagagggcgagagagacatttaaaaggtaccgcttgggcatcagactaaactgccagacttaaaaagggaaaccaaaacaagaaagcagctacaaaaaggttactccaggctgagtcggtccccggccgtggcgcattcttttgggtgaagtggaccacccctcaccttcacctcctggaggtctcttagagatgtgggttgggttaagggtctaagggtgcccctcaaaaaaagagagtgctgggtgcactattgtccccgcactccggcgattgcctctgtggggatattttggtcgcctcctcagcctgcgggaagaatgtacgagtcgcccagtgcggtcttgctctttgcctctgaggcccgtgtccgtgtgcccagacaccccagatgtcactagccccttttggcttgttaatgcattttcgcaagcaaggccagccgagacctcgtattctagctggggacgtacaattttcagttctgagtttatttgaaagaaattccgaggtccggaaaaagagaactcttgtttgttttgctttttctttgcttacatatgctcagctcagctttgcagatgttaatcggacacgatctgcagcggggagatggtttcgcggtgaattggtctctgaggcgatggtgttggtgcaggttgtgggcgtgcagtgtgagcaggaatggaggcgccgccgccccagtgtgtgcctgctgagcgggcgggctgctgcctcaccttggctagtgtggctgaagattaacctgtccccggggggggaactggagagcctccaatcctattccgctgttattgaaaaggtctagagagcatctagggagccttctcattttacaggcaggaagctgaggccggagagttcagccacttgtccaagtttaaaccgggtgaaacgggccacagagagaacacttgagtgtgggtctcccaactcccactgcatcgctcagcgggcaactaaaggcaaaaccgggattctgtgattggcctaaaaggcagtgg

SEQ ID NO: 41778 - DNA, 511 bp, Homo sapiens
cccttgctctgctgagagcatacatctgttcaagcacccacaggtgtctgtgaaaatgttcacagtcatagacacagcccctacagggttgacacaaacaacctggtcaacaggcaagaaactgcttccctgactcagttaaccagctggaggctgtaatgaaaggcagcagagagtgagggagggaggaggcagggagtgtgtctggctctctccctgcctgggtgagaatccgctcttgcctgccttcctggttgctggggaatttctgggccagagttgcgtcgggatggctgtcaacagcttggtgagggtggaggaggctgttccagacgtgccaagctacaggaatgaatgttggagctgccacgccggcaggccctgccatgtctggtagacgccagtggtctgaaagagggaccaggaaggatagggttgtcaggggacttcggtggccagctttattctccagaagtaccgatgaggacaaagcaaggccctgacctcaaag

SEQ ID NO: 41779 - DNA, 687 bp, Homo sapiens
gctcccagcaggaagatctcattaattaattaattaattcaattagtatttactgagagcctggttggggggggggcgcccacagcagggttgggtgcaaagggaaataaataaataaacaagtggtgggggctgcttcactgtggctgatgagcttccactgtcaagtgtagcctaacttgcctgctcaggtggggttcatggcagctgcagggcaggtttctgctttctaccctgtaactcttattggaaggcaaggcaaaggccttcttttgcaatacctggtattgcagtgaattattgactgagcagacagagagacgtgtcctcgccaacatctacaaatagctctgggctttggcaggcctggatgcaggatcttggaaaagaggagcgtgggtctgctgtttacagtgcaaagatttgacaggtgaaattggggcgagggtgcgctgagggaggaaaggagtgcaggcaacgtcagggccggtggccagggtgaatccagggaagcgggtgcctgtgtgcacggtgggtgttgcttggaggctggggagtgagtgggagtatggccttgtatactagactgagaggcatttgcacttaatggagtaaacatggaagatgcaatttcagtgtctgaggaggagcttaatgattcagagctggacttcaggagattaatct

SEQ ID NO: 41780 - DNA, 1303 bp, Homo sapiens
taattcttataagaccctttcaaagtaggtgtcattaccctattttcctgatgaagaaatagaggctcctagagactgaatggcttgcttacctttgtatagttactaactggtgctgctggtttatattctctccccacgcatgtatttcttcagtcactcatatttacctagtgctttaatgccaggcactgttttaggtgctgataccatatgaataaaggacacaaaaatcctgccaagaccttctccatttgtggcttgcttgccagaggagatcggcttgttctttataaagtctcctgtgctagatgtctcagggctgggtatagcagctgctgtgtttattggctattgctgagatgaaattcatgacccgatttgctcctcagccagcaaggcatgtggacttctttctgtctgcttccgggggtctctgaagccttctgctgaaactgcccctaggcgagatagtttattctgtaaggagtgtgactgtggctccctcccccacggcttctcccccatttctttgcttttatcaccagcggtttcccttagccaccaccgctagcagaaccctgatttagttccacgatttagccctgataaaggcgagctattttggcttcctctgccctaagccccagggagaatttggactcagtgttttcacttgtcattttagactgttggccagagtttgcggaagaaggcctgtattattaatgcccttgccgggaacagctgcaccctgccaggttgtcatgtgagacctctgaaaagctcagagctacaaggcccacagctctcctgggcccactgggtcaggtgggaaatatgatcctacagaaactgcaggcagccaaggagggcggaaggcaacttggaaggaactgatcagtctcacgcaggagacacagccgtcctctgagcgcctcaggagggctaattccatcccgtgcctccaggggcctgctgtatttgaagatcttttagcctgagggattttatcacatcatataaaagacacataaaataaaaatgaagatattaataatcagtttaataatatttagagagccattattccttgtagtggtcactatcctcatcacttgaaatagttttaattttcagtacaagcctttgaagtgaatgggacttgttattgccatttaatagataagaaaacagtctcggccgggcgtggtggctcatgcctgtaatcccagcactttgggaggccaaggtgggaggatcacctgaggtcaggagttcgagaccagcctggccatggtga

SEQ ID NO: 41781 - DNA, 1776 bp, Homo sapiens
catgttcagtccatggtgttaatatttgtgatgataggcatagactattgatagacttgatgactatattcagtcatctgtgggtagctacttggtgtgaagaattccttggctggggctgaggagagttctctacctcacctcaaccccagccgccttctcccatccctccctcttagaccaatcccttcctacaggatgttctttttttttttttttttgatttcctctaaaaaatttcaataaagaaaataaagcaggaggtagaaagcaggagaatcgcttgaacccgggaggcagaggttgcagtgagccgagatcgtaccattgcgctccggcctggtcaacaagagcaaaacttcatctcaaaaaagaaaaaaaaaaaggatataaaccagcttctggcattacccaggagcagctgacctagatgcttgttccagtaagttctcctcactccctctcatgcttgtccgcctccccacctcctccacccctgcttccaggctgtctgcagaccgctgggccgggtttcacagtattggcgtgaatcagcttgccaggcttctaccctttgtgcttggtggtagctaactgacttttttctttttctcatgtggtcaggatttttccactgaagcatttcttttatgatgtgggagagacagatagcacctggctagttgccttcttttggacttgctgtgatttgacttttcagccaggccaggtatttattttcccttgggtggagtgtggttctcccagagatgcctcattcatgattcatttgttcagggcatacaaaaggcatttcttaggacctaacctgggcctagcggtgtggtaggtgcctgggcttcagagaaggctaggatggttgctaattctctgaaaggtcatgccctaatagaggaaacggacatagaaactgtgaggggcgctgtcttggggtctgtacagggtgctgtgggagcacagggaagggttcctaactcacactggggatcagggaggctttggctcctgatactaaatgacctcttatttgatacactttttatgtcagacttgctggttctttccacacattgagtcaaagggtgtctctggttcctccctggatggactgatacaggccatttcactcactctcccaagggtttatctcctctggcctctccgagtctcacctggaggtgtgtgttcctgtggcgtgggttccttgggagcgtgggtgattcaccggctggcctcatcccatactgatcctctggggtgatccctattcaccttgtctcctttgctgtcataactccactgctgggggcagaggtggagatgttgagcttgtgggcaggaataagttccactgagccacagagcttgactctgctcaccttcccacaatagaactcagagttggaatcctttccccagccacctcccctcccatctgaggacagagggtaacctgcccgtcatctctggggttatctccaattttcagtctccctcatctccagctgacctcccatatggccaaatcgatcctgaggttgggaatccagttcttcaaactgagcccttcagactctgctgtggtacgtgaaaacagtttcagtatcccgccataaataccttccaaaattctaaatgtagtacatgaccattgatatggtttggctgtgtcccacccagaatctcatcttgaattgtaatccccatatgtcaagggagagaccaggtggagggaattgaatcatgggggctgtt

SEQ ID NO: 41782 - DNA, 853 bp, Homo sapiens
accttaaaaaataaataaataaataaataaaacatggccgggcgcggtggctcccgcctgtaatcccagcactttgggaggccaaggcgggtggatcatctgaggtcaggagttcaagaccagcctggccaacatggtgaaaccccgtctctactaaaaatacaaaaaaaattagctgcatgtggtggcgggcacccataatctcagctactcggaggctgaggcaggagaatcgcttgaacctgggaggcagaggttgcagtgagctgagatctcaccactgtacgctagcttgggcaacagagtgagactctgtctcaaaaacaacaacaacaaatatttgaggcctacttttttgagaacagaaaagcaaattagacgtggtccttgcccctaaggtgctcacagtccactatctatctaggtcagatattttccactgctggtcagtgtttatgaggcaaactgtttactaacttgcctaacactgcctgtcccgtgcagttcttcctggattgacggcagctagatcctgtgacagaggacagctgttccccgctccctcccatcactcccctcctctgtctcctggccatagctgtgggctgcaactctgacttgagtgtttgtgtccctagtgcgtttagcttcgggtgggggctgcctttgcaggtactcgataaacacctgcatggggagttgaaataacaagttcttaaaggaatctaattcgagggcacactgctggtgggccctgtttggtggcccttgggctgagcacatgctttgatagttcactctcagaaacatccagtctggttcttaagtggccagaatgacccgatggagttaa

SEQ ID NO: 41783 - DNA, 6856 bp, Homo sapiens
tgttagccaagatggtcttgatctcctgtcctcatgatcctgatccgcctgcctcggcctcccaaagtgctgggattacaggtgtgagccaccacacccggctagtgtcaagtctatttctaggctatctgtgctgttcacagatccagagcattgcacctttaataggcttttctctctctctttttcctgagccctggaggcttcctggattgagacctagcctaggtctgcataagcacctttccatcttgttaatgtttaacactgcctctgctggaaaacagctctcacctcctctctttctgtctcttattttttgcctttgcagatgagttttgatcatcctgagaaaaatgggccttggcctgcagacccaataaaccttccctcccatggataatagtgctaattcctgaggacctgaagggcctgccgcccctgggggattagccagaagcaggtaaggaacacacagaggcatgggctagcaaaggggtacattcctgagtaaaagctggtgtggcagatgtcctggcagggaatctcaggatctcagtatctggctccagctttgctgttttctttttgtatgtattttttagtcctctttaactgctgattcaatgtgggtttcattggggggtgtagagaaatggcttgtccatttctattaactatataagatttaagttattctgtatttcagtcaaccattctgagtacctactacctgccacgaatgcaactggtactgagtatgtcatgacgggtgggtcgggacaggatttccttgctttgagcattgatttctgccggttcagtgttggccagttctttgaaggtgatgatgcaagtcgctgtgttcttcctctagaagcctcgtgatgattgtaaagattctctgatacaattgcatcagttcaataatctttcattgagtatccgctctggtccaggcactgtgctgggtactagggtttcagaaaggataccaggaggagttttccttgagcagcaaagtcaggcatgaaaagcaagcattacaaagcactggctggcagcaaaggggagcagggatagtgcggaaggggaggtggcctccactgaccttcagaagcagaaaggtgatgctgtcagagctggcaggcacatggacaaggagaaagagtgcagcagtgcagacacctggaggcttaacacagtctggtgtaattggaaaattcaaagcttagtgtgtttttccaaaacatttgtagagaaaagtttgctactcttttccctcggttgcgccatttagagaaagtttcttcagcctctgccttcttcagacaatttgagagatgagaaagggtcttgcagttataagtgcctgtgaccagaaactccagccacctggtggacttggagcctcaaccaagggtggtgtcaagggaccacatgagcccttatgtgagatttcagatgagtgccctgaggccatgacagagcacaggctgtgaaggctgaggctgtctgatggttgcaagactgtcgctagacccagctgtttggaggaactcttctttcctgggaaaccacaccttggagagtaggtactgggcagctgctgcctgagcctccactcctgtgacagtgaatcaggcccttcctgccatcttgtttcattcagacatgtgaaagtcaggttctaagtccactatttccaaatcactcatgcaactttgaaaattatttgtatttccaaacctcactatactcagctataaatggagctcataaaatctgctgtgcttatctcacgggagtataataggtctgtaaaaccttaccaatacggaaagtacctgagtgttaccactcagtgcacagcagggatggcaggtgcagcactgatggtgaaggtggcttgtctgcgactgtctgacagacgaagttgcctctctagtgaccttgagtccgacttgatcacactgacttctcactgtcccttatcacagatgcatgtccttgggtggaaagatgatgaacttttagagtcagacagacctgggctggaattctggttctagaactgacttgctgttgacattggagaaaccctataaccttgctaagtctcagttttttccatttcctaaaataggattgtcaatatctctatcatagtgttgtagtaaaggttcaatgagatattgcaaggaaagtgactaccacgtagtaggccctccttaaatgctactttccttcttttctctagttcttcttcagttgtcatatggtcatgtgattacctgtgttgggtgtctgcggaaattgaattccttagtttctggtaatacaacaagcttccacccttcacttcatgatcttctatctgaattcttcttccactgtgtacatttaatcatttccacaacttcagcagcccaagataggagcccatcgttcccagagtcactggttcctgaggtctgggatggtggaagcactgctttggttggtactgccaatggattccaggaatgagctggatgtcagttcatggagaattcccagggaagagcctggagctcagggctgctgagtcatggctgtggcttcacactgctgtcttcactacccgtatcacctccacatggcccccaggctgagctgctgctctcctgtctctgttcagaataccttctgtgcctttttgcttatctagttcaaatccaatgaataccatgctcttgttttgccctcccaacactctgcaaatcacatagggcagagataattattctgaaaaactcaggggcagaaatattaagtgacctgcccaaggtcaccaagaatggggataagaacccaggttttgtgaacacccagtccagtactcctactaccttttcctgatatccttaggagcgggatccatgggaagggacctcagacccctagtgggttagcaaaaccccggaggtgattgctttgatttattattgtaaataaacccagtgattggggaaagaatgtaatgttttccaaaagatacagacattatttgagttcaaagtgcttccagtttccattcagttacacaataaattctgagaaaacaaagtaggtgtttactcagaaataaagagactattcagtctctatttgctcagtgaaatctattttccagagcttcttgcagttctgtgcatgttgtactggaaaggacatgggttatggaatcaaatccacttcgatttgaacctcagtgcaaccatttcctcagctctgtgagcttgggcacttcccttgacttcttagagcctcaggttgctaatccataaaatggagattataacacctttgaagtgaaccctgtacaggttaggagatgcccttcgtattagactatgctatgcgtggtgcccccagagttgtgtctcatggtggccctggttatggtgaagttaagtgaaataacatctagcgtgcttaatgaatttttgtttccatttccttagttggctacatgtctgctatcttacccagaattcctagcctctatcatgaggtgagtcagcttcctgtctcagcagtgctcttcttgcagggcactgcacaaaactgtggtggagataaccctcgatcttctcatgcaggagtccagcatcgcagcccttagagagatacatcagaaatctatggcatcatctataacgagaagtctttttctggccattttgaaggggtgttgggccacttactattttaggaagtttaggtctggtgatgtaaaacagtcagcctgcttttttttattctatttttttttcaagcatgcatggcttcatttaacaaatgttacaaggccctaggaactgagtgatttgcaagatgtggtttctgacttcaagaaactcagagtgcagtcagagaggtagaccaaggcaaccagaaactaatattcagcatagaaaaagtaatgatgggaggacatataaagtgttcatggctcaagaggaagaagggagtggaagagtggaagaggaagagggactgctgtccacgttcaaagcccaaattgagtctgacttttgtcgagaattgcttaacaggctgcagaggtggccaggaggtagaccagggctggaattcaagtcacctcatttcaaatctattgctcagtccatcgctccgcctcatgccacattgggtttttctttacatcatttgtttttccttgtctcactttttttaggcttgttttcctgctcagaacaaagtgacttccctgaacacatcttcattatgattcacaccaacctgaagaaaaagttcagctgctgcgtcctggtctttcttctgtttgcagtcatctgtgtgtggaaggaaaagaagaaagggagttactatgattcctttaaattgcaaaccaaggaattccaggtgttaaagagtctggggaaattggccatggggtctgattcccagtctgtatcctcaagcagcacccaggacccccacaggggccgccagaccctcggcagtctcagaggcctagccaaggccaaaccagaggcctccttccaggtgtggaacaaggacagctcttccaaaaaccttatccctaggctgcaaaagatctggaagaattacctaagcatgaacaagtacaaagtgtcctacaaggggccaggaccaggcatcaagttcagtgcagaggccctgcgctgccacctccgggaccatgtgaatgtatccatggtagaggtcacagattttcccttcaatacctctgaatgggagggttatctgcccaaggagagcattaggaccaaggctgggccttggggcaggtgtgctgttgtgtcgtcagcgggatctctgaagtcctcccaactaggcagagaaatcggtatgttctggggttgttctgtgaatggcagtgcttattgggactggctgggcatattgatggtatgggagacaagtggcccaagtgtggctcagcggaccagtggagtgggcccagggcagtgtttttttcagagtcacaagtgacacagagggagttgaacagatggcgctctaggcccccgcatcttttatcaattagaagagcttcattattgtttcctaatatttttagttgatatataataattagatatatttatggggatattttgatacgtgtattcaatgtgtaatgatccaatcagggtaattagaatatctatcaccttgaacatttattgtttctttgtgttgggaacagaatagttttattttcatctgttttaaatattggaattgtgtagaagatttcatttgaaaaagagagttccgctgctaccaataatcaaaagcctacaattgacctttgaaaagacttgaagcatagatctgcacatcatttccaggttctgaaattctgttgtttttcctgattagtggaggactctattggcctcaacaacctgggtaattttcagcttttctctttgaaaagatttaattgggtcagtaattcttaactgggggctatggaccaacttcagagggtcatgaatccctgcaattgcgtgcaaaactgtctgtggattaggtgtgtagaatgtatgtgtatgcgtataagtgtgtccgtgcatttttccaggaagggagtttgtagactgcagtttattctctaagggatctgtgacccaaaaaagtttcagagtcactggtcacaacatattaatttgcttttcttgaaaccctttgtagtgaatcaagatagaaagtctgtctatatttgtaaacctgtgtaacagagagccttatttctcttatgctgaatgtgttttccattatttgaaatgaatcagctaaagaaagcaaagcacaggaagctttgctcctctgtcagcctggaggtactggagcaggtgaggtcatacgtctccttttttatttccttcatttgactgccaggaaaaatggtctgaaacccagcacaggctctcaaagaaaagtaggcccaaactggattctctagagcagaaagaaatggtgagatcacagtttctacctccccaaataggcagctgccccgctggccggccccacctcaacttctgcttttgtatttttggtttttcttggactttgttttcaagaaactaaatgtgattggtttttgttcatccataatggagctaagtttctttcttctccatttttgctgcttatgtagcaaatgtttgggatatcctaggtattagctgatccttcttcttcatgtcaagttaatattgcgtgcctggctgaaattgtactgaagtttgagacagggcctgatagctctgttaattagaactacagctttaattttatgcactccttaaagatttggggtgatttaagtaaacattaatacaaataatatttttctatagattgcagtttcaacttcaaaataaggatttccacagaaggactttgatcctgagatgtaatcaaaattgcatgttagacttcgaatgttctgctgttatggggtatatatcctcttggcattttgtctaacaaatattttaagacattcatatattcttttatttattcatggattcatcaacaatacaaaggggaaagggaagggaaaggccctttgttgaagcccgagttgcaggcagcgtgccaggcccatacacttcctcctgcatctggaatttgttgagtctcttcccaactactggatggatcagattatttcaaatggttttcttttacaaataacattgctgacaaggtttttgtgcagataacttaggtaaccactattgacattcaacagggaaatatcctcagaagtgaggctagaaga

SEQ ID NO: 41784 - DNA, 2582 bp, Homo sapiens
aacccaagtgtctgttgatgttgaatggatacacaaaagctggtttatacatacaataaaatattattctaaaaaaggaagaaaataccgagattggctacaacatggatgaaccctgaagacattatgccaagtgaaataagccagtcacacacacacacacacacacacacacacacaaaatactatatgaatgtggttgccagggaatgtgaggtgggagggggaatggggagttactgtttaatgagtatagagtttcaattttgcaagactgaaaaagttttggagatggtttgtggtgatagttgcacaacaatacaaatgtacttaatatcactgaactgtacacttaaaaatggttaagatagtcaatgttatgttatatgtattttaatacaatttttaaattggaaaaaatgtcagtaggggagacagtcacagaagtacaaacactgtatgattccactttatatggaacacctggagtagaaacaaagtagaatgatgtttgccaagggctaggaggagaaaggaatgtggaattgttgtttaatgaatactgtgattcattttgggaagctgaaaaagttctggagatggtggtgatagttacacaacaataggaatgtactaagctgaatacttaaagttgctaaaatggtcaattttatgttatgtatattttaaaagctttcttttaaatcaacagggagaaaccagttgatagagggagaaagtgaatatactaaaaagaggagaaaatgattagttacccacaacatgatggtggtggagccaaagcgtagtggaggatgaaccccagcaggcgggagtcagagggaagaaggtgcgagtggtgtagctggaggcagtcagtattagaaggatgagagggcttctattttctctgcaaagtggcatgcaaggccaagtcagaaggaggctgagggggaaagaggttttagtagagaaggtttgaacaaagagatttataattgtcattgaggtgagtgggaccgtcagtaaacctgatgaatggagtaggatttccaggccatgctgggctactttgaggttgaagagaatgaatttagagagaaaccaatctctgtttgatacatggatggtaggatctggaggtgagcaggcagcagcaaagaggagaggggagaggggaggagccctccctgagcactctcttggactgcggaggctacctactctctgagcacttcttcgtgatgattcagtcttcctcactgtgaagaacgaaaccccagtcctgcaaagatttgaaactgtatttaaggccaaagtaaggttgcctgggaattaagagtactggagtcaggcaggctttgatcagatccctcccccaacacttcctgtgtgagtgacttcagcaagttgctttactttacctttctgagcctcatttcccttacttgtaacacagaaatatgaatagttactatccagggtttttttttaggatcaaaggagttactatgtgtggagcatgtcacccagaggctggtatgcagcaagtgctttgtaaatagtagcgatgggcactactgaaacctgaatgtctgcctctgcctgtttgcgaatgactccaccttcccaaatcccaacagggaaggtgagtcagcttgagaccacttgagaggcatctagcagaagggaggcaaaacttctgttaaaggataatttttagggaaaaaaaggtaagatgatgactctcatacagatattaaaaatgaattcatcatgaagattttattttactcgtatgatggaaccaggcagatattacaactggttcaaaggaaaagtcaaagcaacacaaatttggagtaaaggagttgaactagtttttctgtgagataaggcagggggaggggagaaatcaattgaaactctcctgggcagcatcctgcccagtaggcacatgtattagttgcctacaattcacaaagggttgcgaaatagctcccgtggaatcagaatctgacagggaggaagagtgtgctcagaaaatgcatggctttctactgaagcagatttttttcccattacacttctagatctctgtgcaccattgtgccagggctgcgaggaaggtggcccacttcccgggatacactacccaccctcaagagagcctttcctgctgcttcttaggcaagtcagctctcttttctcacctcctgtaagcaacactaagtatctggctgttcctttcgtactcgagtcctggccgctccatgacagcacttgtggtggtactgaactgtgatggacactttctatcattgccctttcttaccttgatatcctaaaaagctggtggtctgtcttctctatcttttgtcctggtcagttatcctaactattttgtgtctgtttctgtggattagtaaacggggtccccacccccactccacaaggagaacatctggcacccagaagtcactgagagaatagctgttgctttggtagaattctgcctctgagtggcttgttcttttcccagacggagaggtctcctgacagcagctctcttctttttcttt

SEQ ID NO: 41785 - DNA, 991 bp, Homo sapiens
tcaaggagggtaacaggactggctgtggaagctggccaggtacctgaatttgagagaccagttgactgtgcttagtccagagcagcgctgttggctagcttctctggtggtgcacctccactggcctgaatgcaggacagctgccaagattcctgcactagttgatgtgagccccacatctgttctttatctccaagtgatctcagatgtctagctctgctgatactcccagtgcttcctgtgtgatgagacaagagaacacttcctctgaagggtcccagaatggtggcaaagctgaatgttcacctccaactctctcctccctgtgtaacaaccatgggtcccagagaatcctctatgtgtggcacgttgccagcttgggggaggagcaatgtggccaaagtgaaactactcctcttattcttggcatgcggctgttctcagttctgcggtataagggggtgtcttagcttcactctcaagttctggaatattcacaagggtgtttttgtctgtgagtagttgccagtggatttgtgtatgtatgtgtggtgggggaggagaaatggagctggaaaattcctattctgtcttcttgctgatgtcattctcaatgtcttttttttactgcttttaagattttttaatctttatcagtagttttaagtaatgggagtatgatatgccttcttgtagttttctttgtgggttttttttttttctgcttagggttatttgagctgtttggaactatgtttacagttttaatcagatttgaaaaatctgttttttttttttttctgagacagagtcttctcctgttacccaggctggagtgcagtggtgtgatcatagctcactgcagcttcagtctgctgggctcaagcaatcctccaacctcagcctcctgagtagctgggaccacaggtgcatgctaccatgcctggctccctcaacatagaagaccctgtctcgtcaaagaaaattttta

SEQ ID NO: 41786 - DNA, 1247 bp, Homo sapiens
tgtatcatctaggtcacccagtaggtatagagaggacattagtgatttcccttgggctaggctaaaatacttcatctcatacatagttttaatatactttgttataataatcagttggcttaaaaaacccatcatagaactctcaaagcatcctactccttcaagacagcccttgccaaatgctttgaatattcttgttgactgtcctgtctttcctatgtatcctcttacaagaaccagtcttgggatttgtgagatattctagtcatttgtgaatctactttgcttcacatgagttgataacatccacgatgtcaccttcaaagcaaagttctttgtactttccattcattggttttattctctgacgtattaaatcacaattacttttgcaccaatctaatagtttggatatttgtccccacccaaatctcatgttgaattgtaatccccaatgctggaggtggggcctagtgggaggtgtttgggtcgtaggaatggatcctttgtggcttggtgctgccgtcgtgacagtgagttcttgtgagtctggtcatttaaaagtgtgtggtacttccctttccccaactctctctctcactcttgcttttgccatgtgacgtgcctgctcccacttcaccttctgccatgagtaaaagctccctgaggcctcctcagaagcagagcagatgctagtgctatgcttcctgtacagtctgtagaaacataagccaattaaacctcttctttataaattacccagtctcagatatttccttacagcaatgtaagaatggcctaacacattctcaatcatttgacaaaaattttcatcctaaatatcttctgtatggcaggtggtttctgagcaatctttaattttgaaactgaaagtactcaagtattttatatgcagaggtagggctgttcttacaagtttttttctttttgtagcacttccgctgttactgagtcatctgcatcacatgacatttgtatcagatgggcacaactgtctctgtatttcatgctgtttgttgacttatgagcccagggcatcactataccacttgctaacttactttccttagcatgtcctctttcagctttctctacatccttggttggcacatgacctaaaatcaaagtggtatttaaaaggcttttttcacatatacaactctcactttctctacatcatcctgcaagttgaaatattttatctcttctgtatttgcgaccactgt

SEQ ID NO: 41787 - DNA, 759 bp, Homo sapiens
aaatctcgatctgcaagggcctggggcgcgggcggaaaaggcgggcccagctccctcaggtctgcgtgtcaccgacccgaacccgctccgtcgtcctgacgcccccggcctagctgcagccaccttgtcgcaggggccttggtgtctctgagactccgagacgcctcgcccccacctggcgttcggaggcggttgcctcgctgggcgcagcaattcaaccgccgcgcgccggatgctaagaccgcgatttccccggatgctagggcggtgatttcccccgtgacaggccccgccccggccccgcccaggcccgggcggtcccgccccactgagctgtggctcggggagccgtgggtccgactcctgcgtgtgatgtgtcaccaagttgactttggggtcccccattcttccttagttctctattttacctcagcgcgttgtctagctgctgcctggccacggtacttagcacacagcgtgacttaatactggataaacgaggaaaggattcgtacgccctggcggggccagaggctcacagcttgggttcccgcgagcacacgagccaggaaccgccaatgcctccagggggcgctctccctcccatcgagccaccgccgggccattggagaccaggaggacctctcagctccatccctgcgtctctaacaattgtctcatttccctgcctggagtcagtattaccactcccataacacagatttttaaaatgcaactaaattttaaacgagtcacttt

SEQ ID NO: 41788 - DNA, 1087 bp, Homo sapiens
acatcttaatgcttgagtccaagtcttctggcataaaattatatagatcacaggcaaaatatctaaaaaagaagaaaaaaacccatagcaacagaaagtaaaatctgattgttagcaaagccaatgcattagctaaacagaatagtccggggcatcaaaatgttagcaagcatggctgccctctaaggagaaactgaggtcaggttgccccagatcaaagcccgaggagaagacagatcctgccgtgcacagaattcattcactggaaagaagccttctgggccaagtccctgatggcgttgagagctgactggaaatgcattccctgagagaagggttttgtaatccttgatttagtttatttcagtctgtggaaaaccttgttgctgaattcaggattctttcttccagagaagatttgggcttgtgtttgcaacagccttggacagctacagacctgcaattcctttaatccctttccttgtgtcaggcataatccgggaacctgagttgattctgctctccctctgctcaaagtccagctctggattgttgtgttgatattagcatttgccctgagggcagctccctcttttcctgctcactgctgtggtttcacctcaaggttttaagagtaaatgtaaaatttccatatatttatctcctttatcctcataagaaccctgggagatagcaataattacctgcctccctccagcagccaaaagagggaataaggcgttagaggataccaactccttgaaagttacaggcccagttaagtggtggagtcagctttgtctgcctcactccaaagtgaaagtttttgttttttttttttgacagagtcttgctctgttgccttggctggagtgcagtggcgcgatcttggctcactgcaacctccacctgccgggttcaagccattctcctgcctcagttatggccttcaaaaagccactttactgtttctcctcatttcagtccagactccgggctgccaaccgtctctttttaaaacatgggaatgtaccatcattctaaccatccttgatattccatctctacttcccaccgaaatgcgtaa

SEQ ID NO: 41789 - DNA, 570 bp, Homo sapiens
tgagtttcatatttacgcctgagacagacctgcatagatatacaggggtataggtcaccattttatcacaccagatgtcagctgctttcagaagcatgggtccaagatgcctgaaataccagtcagtcaaacaacggcaagaagttaaaatagtaaaggtagtgctaaaccaaaaaggctacggatgccaaagcccttagactagccagccttgttagctgccatgtaaggcaacaccagggtcagtatgactcatgagtttattctggtgcagacttggccggttctgggctggagtgtttatttgagggccttctgaatctgttccccatgggtttacagataaggagctttaggccccttggcctcctacttggtatgaaagtcatctctcttcctgagcagggcttggctcctggaagctgagagaggtgcacctcctggagctgctgcctcagacagcctgcaataagactgacctcacacctgccctgctggccagcctctcggtcctgggacattgcccattctagcctcagggctcacctttcctacttctctttcaggctg

SEQ ID NO: 41790 - DNA, 1568 bp, Homo sapiens
atgatagctagttggtatatttatttgagtataaattcttgacgtatctattcgattatcttatacctaatccaattcttttaagttgtatttgtgtttgcaacctctggaccaaattttagccaagatgcatgaaaaaaatctcttaccaagaatgattcctgctgcctttcaaagtcattagagaaaagttctcaaaggcggctatctctagtagcttctaatgaattcattgttttgttcgttagcttagcatgtcagaaatatcttgacatttgacactcctgttttgaaactaatggtttatttatttaaaataagtgggagtttcaaagaaaaacaatttgccctggcaacaaaacgcaagtacaattaatcactaactttgggaattgaagtgtaaacagaagatgagatcatggctttgctatttattcctcttctctgcagataccagccgaactcacaccagtcttgttactatagaatgtgcctatctgcacacagctgaaatgtcacttccttgaacctcccagctgctgttttattttatctgactcagttttccagatagccaaagctttacctaactataactaaaaattttctttttggtgtaacacttaaaaaaaaaaaagtactttaaagaagtacccactttctcaagtgaaacatgctaaccctttcttggtgatccagggacattgttatgaatgtcaaccattgtgatactatattaaagtgataatcttggggatattgagttgtgtaatgtcgcttgacctggcgttaaacattgccggactataaagccttgaacttctgaagtcttctttatgtcatgttttatttcctgtctttttatcagcctattcactgtacttttctgtctgcttatttttaatatgttgtgaattagaaaccagttaactgcttttgctagaacttaataaaaaaaagctaaatagatttagaatgagggcctgggaaagggattcttctgtgagtaactgcatgaactagagtacaccatcttggtgacctctgctttggagtaatacgatatacaggaacctggcagttggaggtcctgggtcctgttcctgacactgccgtattctgcattttgggccatctcctttctagctctcagttatccacttgtaaaaacaggggtttggactagctgagctctagattcctttccaattccagacatagcagtcatcatagtctaacacagttctaacaaatcatcatagtcatatattatataaaccaaccagaagatggtaagcaggagttttaacatatgcaggattactgcttgcggatgaacttgaatttgttaataatgaatagtcatgccttgggcattaatagttccagctacacaggcttctttctggaacttggtatccccagtgcctcttgggttctgcagtgactgggacatgaacattttcaagtgaacacactggtcatttggattagggagatactactgagggtctgtgataaatgacctccctccttgtaacgtctgggctgaaggaccttttcataat

SEQ ID NO: 41791 - DNA, 4651 bp, Homo sapiens
atgctttctaatgcctcaactttggacataattatggttctctttccatgattactgcttactctgaggtctctgcccttttctgcttgttgaattaaaggtgatcttggaacagaggctggtagaaacactaaaggctttgagaacaggaagaaagaagggatgttgtgttgggctgagtcatactctatcaatcagcttcagtttccttcatggacctttctagttctacccatcagcttgcacttagctttccaccttgacctgaattcataccattgtgatgttgtgtgtctctcttactatatgccaccctggaagggtctaatttcatattgccttgtctaaatcccagaagagagcctggcccagttaggggacatcaggagtctcaccttcacatagtcatattcacaaaggtaggaggattccaagttgaagtgcatgaagtaaagcttgatccgaaacccatctgggacagtgatattccaagtcacctctgaatcactgggataggagtctggataaccaggcgactggatctggccaaacatattgtttagctccacggtgtgggctgaagcctttgacagggagaagcacagagcataatagagaagcagccacctgaaagacatgaatgtaggtctacttacatttataaacacaggcccctgccattcatctcaatcacagccaggagaacaagatctcagcatgtctctgtctctggcctgccgtaattagctttccccttctgaccttgcctcctcagtctgtattatgggaatatagtaactagataatttctaagatttcttctggttttgctcattcaaagctctgataatagtgttaacttaaactcctagaaagtatcacatttgggagtctgacatttccattttactgttgaaaatgtaattttcataattaagtaaaagttgatatttctttagctcagcttcatttaactcttgattctctttttgaaaaagtaaatgttatcatactgggtgaggcttaaatgcattgatggaatctgtagtaccttaaacagatttaacgttgaaaatggtatttcaccacaaactcagtcaaagtatgcaaaatctttaataaagaaagaataagcaaagcaagttttcttcctcttggtaaaaggatcaaaaacctacaacttattcctgtaggaatcagaaataatagactaataaagagttgcaaaagagacaaggaaaattcaataaaacttacagagcacgtcaccatggctgacgcaataacgaggcagaatgactaaggctggtcaaagcccttctggtcagtctgtactcaccacaccaggcttctgtctaacagaccgattcccctgtgaggtccagtaaccttgaacttaatgggcccaaacttgcctcatcactcctctcctaatcttttcctgctctcatttctgatttctgttcatggtactaccatcaaccagttccctggcctgaactttaaccattcatcttttcatttaccccagagtcaagagtcaccacatcctacttattctgcttcctgtgttttggaaatccatctctcctcctctccagttaattacatagtttacattctcctatatggcttattgctatagcatcctaactgatatccccaacccacccaccagcagtcttctgccaaagctgattttctcaaacacagataggaccacactgttctactgtgtctgcagggtaaagcgtctgctcctgggatggctgttgaggcccttttgatctggctgatctgtccttcccacctcatctcagtagccagccctgtgagccccctgttattctgggagcacaccatgcccttccattccagcctcattgcatgtgccctgctcactcctcacctacttatcctccactgtcttgcttatcctccaccatccagctcagagcttcccagctatggagtatcctttcactcctccacaagccactgctccctgcacatttctctattattgtgggtatcacattgcactacgttagacacaccctttggagtgaaatgtacttggatttaagtcccaattctttcacttactgactgtgaaaacttgggcaactagtctccctgagccccagtttcctcagaagtaaaatggagattataatatctaattcataaggctcctatgagcactaaaggtgatgtatataaaggtcccagtacagagtctgatatataacagattataaatgaatgaatccatgaaagtggggcctgagtcttagatagcctaaaaagtcaatgctgggaaaccataccagcatcttcagattaacaatgatatatttgctaatcaggacgttgtttctctccaatacccagtctgcccatgtattcagatgcatatatctgtgtaatgcatacatttgagtttttgggtatgtaaacagagcaagttaactacatacatagattatgtagctatgtcatgttaatatttacataaagtgtaaataggtaagtacaaaatgtctgaaaggatatacaccaaggtattgacagtagttatctctgaaatgggaatataagtatttccatttttgtgcatataaaatgtttacatttgtcaagaaggaccatgtactattttttcaataaaaagaaaatacatttatttaatttttttcaaggtccctacaatagcaatatgtgagattctattaagaaaacaaaatgtcttaatcccatagccaatgtcaatattttcttaaaccaatctgtggaaggagggcctcagaggcagaaggaagggaaggcatatgtccaagttaacctgtgaattagttggaaagctgagtcaaaaaaccaggtggcagggcccaggcatcccattttcaagtgaggaaatgaaccagtgttaacagggctgggagttcaggttcagccctgctgaggaggggagggcactggccctgggtcaaaagagctagattcagctccagctttgactttatttatcctttccattttaggaggtcatgggaggtcttgtttcctcatccattaagtagtaataataacgacttcccacagcactgctatcagcgtaaaggaggatggggaagtattttgttaactgtccagccctagccaaacattagttataattattccatcctgccagttcccaaaaagcaagagtcaggaatgagctttggctcctaaaccggacttccctataatagcgacacccaaattatgcaaggccgaaaggtcaacttcctccatgactgctttttccagaccacatcgaggagacactgagcctcctgaggccggttctgtcaaggactggcagcagacagccctgtgtagcccagaagcccggtgccatgtgtggtaggcaactggtcagcgtgggaggaaggcccaggaagctttcccttctactttgtttgcatctcaaaacggtttcaaacatatgaaacaaatatctcccttcatgtaatgggcttgagcatatgcttgcctgcttgcgttaggggctgtaaattgaagaatataagtggcagctttcattcctcgtcacactctctgaatgtttttggcttcttgtatacgaggcaccggctgtatagttcccaacacctgctatctatcctccggctaatcaaaaagtttagctacattgcagaaatgtcaaaagtaatatatagagctgagatttcagaggccccccgtaggaacaggctagcaggactctgtaaaaatgcctgcatatatctatgattgcggcatgaacggcacttgctatcttttccatacactgtccgtacacgccccttgtttcaacccactccacaccaagactccatttttgaattgaagagttggaagggactgcatggatcctttacagagcaccctaatttgacagacgatgaaaaggataccccaagagatgtcacatcatgctcaataccatatggtgaattaacttcaacagaagaagggaataaaaagagctcacagaagaagctgggtccatgcccatatcatgcccaggcatctggccaaagcaattaatcctgtgaaaaataattgaaaaacccatggctttacgtaaaaaatttaaaaatattaatgccaaagtccctcctcaggaggttctggtttaattgctctggggtgaggcctgagcactggcatgtttcaaggcagcacagatcattccgacgtacagtcagaattatgagccgtcagtttagaataatacacttggctgaaagtctagtggaatatagtagaaaaaatcctgaacttggagcccgaagacccaaatttgaatctggaccttttcatgatcatcagtgtggtttgggcaagttgcttaactgcttttatacccactacttatccataaatccttacttcatccagaatctgaaacccccatgagacagtgctcttgaaagtgctctgcaaacactgaaatactgtatccatgtgagacaagacctgctggagacttttctagcagagcacctttctcgtagttgcttggctattcaaaaattgaattcaattcaacaaataggtattgaatggctggtaggaaatagacattatgctaggtgct

SEQ ID NO: 41792 - DNA, 1882 bp, Homo sapiens
aataaaaataactagggtggttgggttttcagacttgcaggatagaacttgtatgaaaggtctggtaaggagtgtcaagtataatgaggaataagaaaggttaaagagtttaaaaccaattagaatttgaagttcttgatttcagaactctaaaatcctttttttttttttaagtatgatatctctttaagagccatttggtgtacttcatagcctgattcatgccaccagctgcctctgatttcaatgagaaatgcagaaaatttatagggaactgtaaaatggggacagatttttagttttctaaattgaggtttaactggcaaacttgtaaaggttgaagaaaccacagagccaagctatgggaagctggtttcttttctggtcagaaggaatgaacacacaaacacatatctaactcacaaagtgctggaagagagaaagcaatgctctttccagaggaggaacacggaaaaatcagccttgtgggtgaacaggaggagagtcacattcgccagcaggcagcaccctgtgcaggcagtgggagaaatctgagcttcagcagcgtccggagcaggatttgcacgaagtctcccgtttcaagttttatgtctcctggagtcctggggaaggcacccagcccacccacagctcccttctcagagccctaagaattgatgagaaagcccctcactaccacatgcaggacacgcaggtgagtctgtcagtgacaaggtcagaccttccctgctatttgacactggtccccaaaagggaaccgtgccctctcctcccctggcacgtacctcattttcctgccttgggtgctcccggctgcccggccttggtcctcccagcttgacttgcctgtgagctcgtgcccggtgtggtgtccgtgatgccttatctttgttctgaggtccctgtgtgtctctggaattggctggcattctccattcaggtcacgccttcccctgcctgcaacagatcccctctccccctctctccctctggcttttcctctctcctctctctctcctttgacttgctcttgcactcccaggaacctgacaacaaaatctgtcttcctaccgaaaagatctgctccttcccttccctcctttatcctgtgtggctgacttcagcccttgagagaaaataactgaggggctcaagcaggtatttgtatcactctgtgtgtgtgtgtgtgtgtgtgtgtgtgtgtgtagagagagagagagagagagagtgaaaggggacaaagtctaatttctctttagtcttttttgccagatgactataattttctgcttttcttcaggacacccatgaaagaaaagcaattaaatagaaacaaccaactaagaaggcaattctagcacctacactagaagaaaaaaaaaaggtctaaatcccagagcgtctgtctgcaaataactacaggtttccttgtgagcagagccccaaataactacaggttttctcgtgatcagagtcacacacaacgacaggttttcctgtgaacagagccacgggcccggaactggggaagcaccaagtcctgaagttggctggttgttcctccccatgagcaatacctgtggcactgtttacttgctcggagtgtgtgcggctctactccagcccagaaagggcccatcgcagcaagaaatctcacctccccaggggtgtagaaagacctgggcctgtatatatgtctatacccatggcttccggagaaatcaacactagatctaagatgagctgaataataagaaaattaccccctccacaacaacaacaaccaacactgaatagggagaggtgtatctgggtgtaaaagttaagtttgactgtgcaccttttctgtgttagacacagt

SEQ ID NO: 41793 - DNA, 1750 bp, Homo sapiens
atggggctctcctccttacaaacagacgctaagctccatatcctggcataaaggacctttggtgatttggcccctgtgcagctcttgggtcgcccccaactctcaaatctgctctgtgccccggagatatccttaacacacctgcttgctcccaccctgagcctggcagttcctgctctccaccatgtttcacttgcacccaccttcaaatctcagagtgggaaacagctcccgaacaagaggaaaggcctaagccccagtgttggctctgccattgataagtcacatgacatattgattatacaatccttgagccccaactcatatgtaagcaaagagaggactttaaactgatttcagttttggaatacttaaaaaaaatcagaaatacaaacttcgtacaaatgtgttgtgaaaggtgcagtaacaagtcgtagccaccagagagcactagaggatctcattcagcacaagcgcggggctttgtctccatgacttagacttcattctgggggtggtctactcgaatttggggctgatgggtgccatcagctccatgcctaacctttatgtaagaatattatgagacagaggagcagaatctgtcacttaaaaacttcactttgggggaggcaatgaaactagtcgttagttgtctttaaatgcacaaatttcaaaagcagccctttccgtgctggctggtgcattttgaaggctgtcccagtactcccaccctacagctcatttttggacctcatatgccggacacatggagggagttgttttgttcgggttctagtggaaccatctgtacattcctcactctctgtggggagcaggaattgatcacaggaaatgacctcagctgccttgggaaagacggacttcccatccctgcggctttgagcaaatctgcttagttgaggggctgaggaggtaattctagaccctcctgtggctgggtttgaatctgagacgcctctgaggatctgatgaaagtcatggacaatcccctccagaatactcataatatgcagattatttcagcagcttcgcagaccttttatctaggaacccaggctatggactatttagggttcctctcagctttaagaacccaatgtcttatagttgtacttcataacgagctatgcacattagcagctttctaatttgtagtaagactaaactcttggttatttcctctggagaagtgggggtgatgcatcccactgtttaggaatacctcaatagtggatcatccatcagatctgggctttcctatgagcacttcagccccttagagagggtgcattctgaaactctcctgcaggggaggctaaagagccacacatatccccaatgagtccctgctcgctggggatgtgtcctggccacgcagggaggaagtgaagcttcttgccatgtcggtgtccacatctcagtcctgagctttctttgtaaatctttctgtgttctgggaagctccagggactctgcctgcttttctctgcgctgtacagctcctccatatgctcctacctttggagttctttgcatcctgaagcttgtgacctagaagcttcataagacaaaatagctagcaatgaccttgggattaagatgctcagtcttgtcttgactctgccgtttattaactgtgggactctcggcctcaattataaaataggaataataactcctatttcttatcttattgggttcttttatttttatttaacaaatatgc

SEQ ID NO: 41794 - DNA, 11732 bp, Homo sapiens
agggccaatatctttatccttatttcactggcgatgaaactgagacttaggggttcaagtggcttgctcaagacaaacagctaggcagtatttcctgcccatctgaaacattaagactgaatatagactctgcagaacacagcctgagatgtcatgtctacgtattccttgaaaacctttgtcttctttttcaaagtgttctctcccttccctactgggtctaagaccagacagaatgccattgcttctaagtttgtgcttctccctgctggtaaaagacttaactatgtgatttagctgagaactggccagggagcactaaaccttgaagagatttaatgaaatatgtacctccttccaaaccggcttctctaaaacaaaatcattaaaagcacaggtgtaagaccctcatttatgatcaaatgtgggctgcaaaataaaacaatatttgaactgtcttcccccctttaaaaaaaaaaaagcagaaccttttagagctattttctgggtaaagaggcctgaggccaacaaggtcatgttgggccatgtacatggttggtgacccggccctaggtcttctggctcaaattcctgtcccctttccaaatcagcctacgtgctgtagaacatgcaagacagcaccctgatgtgggtgaatctcatttttaagttccttcccccacacaaacactttgccccattccaggctgctgagtcttaccaaatgagcactctaaaatgagaggtttccttgagtctgtaaccaaacactctgacatttctctgtggtcccaagtgccagtcactcaatcccatcggctccaaggttagtgtgtgcatgtgagtgagtggggactggagggaaggaagtggggaagggagaagacagaaaaagacaaaagaacctatctcctcctctccccagcccaactcgagataggcaaagagagatagactaactcggtctttaccaaacttcaaggattttctcctttgcaaaagaaagctgaagacacatgggagtgggaggtttacttaaaaactttcctctcttccttcatggaagggatcctcaaacacttctggaatacctaggctgttctttaaccagcttcaaccaccagctcgcttgtggatttccagtcgcaggcttctggaaccacaggaagcccagatttgccatttcaccatgacaagtggcaatgactcactccagatgcggattgaaacaaacaaacaaattcccctgtgtccactgtcagctgggccttgggcttttcaccgtaagcctctgcctggccaaaaacaaatgtacatacacgaggcgcaggtccttctcaagttcactcctttgcaagccaactcgtcttaagaaccagccccccccaactcctgagtgtgtgggttgagtgtgggcaatgttgtcaccacccccaccccaaatgccgcaggtgtggaagcaccaccagcatttggtttgtatttttacagagctcttagtcctttcccaccccctcaagattgcatcttatccttataacagccctgctttattagggagggaactgaggctccgggtgagaggccttgcccaaaatctcaaaaccaatttccagcaagttctggacacgccgcgtctcctagattcagccattccaccaatgccacacacaagactacccacaaaaacaatctccaaggagcagggctgtcaatgagaaactgacaactgctggctgcccccagacctggacttcccatcccaatctccccgcacccacgctgggtcagtaaccaccatgggagagttaaatgttttctcttcccttcctccctttagctcttttggcgctttccttgtgcatagccaactaggctccttgagaagacagatcctttaaaagagctttccattgaagaagaaaacaggaaccaaaaaaaaaaaaaagcaaagagagagagaagacagcagaaacgacagagagagagagagagagagagagagagagagagagagagagagagagaaaatgagagaagagggagaggcgaggttaagagccagagagcaagccaatacaaaagaccccatccttttcctccctcctcccctgggctggcaccagaaagccccattttctcgctcacacataagagcacaaacaccagccctgcgcgccggggcaagcctaggcagacttcgctaccccaccccgaccactccgtacctgtcttccagggactgcccgcccctgggcgatccacctcgaagccccccgcaaggcgcgacggaggctttgtggtatgaccgtggcggcccttaatttagttacattcaaataaaacttttggtgcacctcggtagctaacattgtgtgtatgcctttttttttttttttttttttttcctgttacgccgtcaatgcagcaggcaatgaggggaatgacacagccctctcattcccggaacgtagtcaatctcggctctgcggatttcacagaacacactttgcctattgccggctccaacaagaagtaactttccaggaagctgccggccccggcagccgccaggatcgctgcctgcgctgcgctggccgccggggattcacccagggaggcggggccgctggggaaggctcgcggggaatacagcacactttcccctaaatccctcgtccgcgccgagtgcagggctctcagagttcacctagtcccacctctcacccacaacagtttataaatggggaaggtcagacaagttagtagcagagctgggtctagaacccaggagttcgaatacaatccgaggctcatatcgagactttaagttgtccgattccgaagtttatttgcttttttccctctttttgccttccattctccctcacccccgttcttttaggggaatgtttgagcgagacttcaaggtcaaaagatggagtccctaggggctgagggtctccatcataggcgccccaggcaaggttggagaaaaactaaacagaaagccccttccgcctacgttggcaagaacgggaacccagctccacttggtttccgcccaaagtctttagaacaggagctgccaagccgtaaggatttccgaatccgatttccccgaaaccgtagagacacagcttggactcggcaaaggccggggccccgacccctgcgcgcgcactggcactctccaaagttgcctcgccttcctgtggccctcccgggaattataacccccgggtgccatgtcctaattggtctcggtagcaggctccggggtgcgctttcgggggctaggggacagcgaaagactcagccacaaaggccgcagtctggtcctaaaactagccagtggcgtcacactgcgccgctcatcccttctgcggcaagcggaagggtcagagtcggtctgcaaagaacgagcctttggcctcaaaatcctacattgaggctttctcaccccttcgcccggtgggataaaggtgaaagagacggttgggatttaataaggggtagggatgagaatctgggaagttaaaatgaagtaagtgcatttattggaaattaggagtcccgtggttccgggagctcaaaccgaatggtgtttttaccgctgcctaacgctagagagagccctccatcaaggtttgaaaccgtcaacccctttctcgcccctcccctccttcccattgacctagtttggccagagcctcccgatttggagaatgccttccgcccttcccccctcctctccagccagagaggctacagaggctgttggattattggtaatctaataactccaataacccgctgaaaaatccaaagggaaatctgaaagtgtaaagcactgtttagggacaaggacaaggaattttaataaggctgcaactgccgtagtgaaccccgcatcaggggccctgccgtggggctcccggtctcagcagtgtttcagccaactagctgcacggctgcagacaccaccgtggtccggcggcagggggtgaggtcaaatcgcggagctgtttttattcttgggggaaaacactcttcgccctcttggctggggaacgggagggtgcaggagacgacagtaaataaaagcgaatttgataacgcgatggcctcgacagccgctttggataaccgaggtgttcggggacattgtgtcctgactttcatttctatcacgtttcctgccaacagtgctcttgcaagcctgcaagcttctaggaaatgcaataaaacagagggatgtgttttatcatcaagatctgaagaggagttgcagaagggacgttccccatacgctcagcgcgagacagccttccagaagggcccgaagacaatgccagcaaatcgcgtcccggagcagagatccctcggccgtcctggctggactgggctcagcctttgcaaaaaggctggcgggggaggggagaagcatgatctcctcaagcaaacaatgcctttaaaaatccgatctggaaagaagtcagccaaggtccttattcacgttaatgaagatggaaggcactaactgtccttggaaagcgatgagtcaaacttgaccgcgcttcaaactcgttcccagattcgtttccagtccgaacagaggcgcgtttctccgacgcggcctccgacggctcccgcagtgggaggggccgaactcgatccccgccgacccgggcgggggcgacggcgctgtctccccctgcagagcgcgcctgctgccgctaggggccgccagcatgcggacgcgcgtttgccatcttaagtcacgagctcggagaaagaaaactttacggaggaactgttgtggcacaaattctggcctatccacatgacccccaccccctcacacacacacacccggtttctcgccaggctactatgcagaggatgttaggaaggggaagagagcgatttcagaatcgaggctcgccctgcaagtctttggtccaggccttaacccccctcttaacacgcaaacccccgagctccgagacccacacccttcagcaccatctgggcttttcgtgtcattaccgaaaatcttaggccatattttctttaaaaaaaatcctccaagactgctggggagcggtttccaatgaacactggcaacaaaggtgacctaagaggttaaactcatggttctggcagccgctcctttctcataaatacttctaaggagctgagataaacccgcctttggctttcagtcactgacatgaaattcagaagcttaaaatctggtcctggttaagtcactaactcaccactaacaagcctcctcgtcgggcctgtttcctcaactgcaaaacagagttgtacgtcccaaagcccctgagctcctaggtggcatccttccactaccgacttcccctaagaggggccacagggacaggaagatggtgtgttcgaagcgggttatttgtggtttttcttagtgcaaatagatgctcatcgctgagtgatgggcaagcagcgaggcctttctgattttcatccctcttgccaaaactttggaggttgtatgccatccccattggagggtgccctccttctgtcagtcctagcatctggtcagggtaccgccgcccgggaggtggaacggcgagcccaccgcccatggccgcgaactcgatctcagcccaccgctaggtggcaggccagcccgtccgagaatcgccgcgcggccgcagcttccacaccgatccctacccgcccctctttattttctgtctggtgggggcgagggttgggggtgtgattgcctctaaaagcaaagctagaaaacatttaatttagtgtatgtaattccgttcctcccgatgctcccgcctctagcaaccacaacgcggtatctggagctggtttcatgtatcataagttgatttctcccccagcctccgaaaagctttatgtactgggaagggaaagaaggtgcacttgtcttcaaaaggcagaatggcactcgacagtattggcagagattcttgccaaacactggtcatccagcaaagaaagtcgggaataaactcctgatcttctcggaggaaaggggcgctgggggccgagtgctggatcccactcaggctcactgcgcctggcaaagcgggggagtggggagtcgggtatggtcttttggtgaagttgtgggtctcggagtggacatcgggagggttgggaggggccgttcctggtttccactggggcaaagagaaaccagccagttctgccaccacgctgcaccctcgctgtgctcgcggcggcagcggcggtcccacttgttgcgcagtgctggaaaccggcacgcgccattcgatgttgattcacagagggctacagaccagcctaccattgctccacgccatccacaaacctcctcaacacaccccctacacatacgtcctgccaccgccggcaaaactacagcatttccagccactatggtgttttacaccaaaacatccctcactatctcggtatcagacaggcagcagaattaagatgccctgagaagtcaatccaaggggaaggccgggctacctccgcctggagaactcttctacttaaaatcaaccaggcaccctccccccaccaaaaaaaaaaaccttagaaccacgttgcctattataacaccatcctagttggaaagcaacatttttcttccctacttgataaacttcaaagtcctttttatccgttagttttatctcccctattttttttaaatctctgggggaaaaatgtttcataagttcacttcccaatatttttcaaaaattgacttttgccaatagtttcacccaccgaggggtggcgctgctgcaccgcctcctctatatctcttaagtttttcacaacaaagtgggttgtgagtgtcattaccctgtaggggatagagggaaggaagggttttgacatctagccgtggctaccatttactcaaccaataactggaactcttcaagggctcagcaaacgacaacttaagcatttagagtcccatccctatccaccaaacccagaataagttagtcttttcaagaaagcattggtataaaacccttcaaaactgaaaagaagaaaggggcaattggagaattcccactttttctggctgtctccttcaagtcgcccagtttttatgaacagcatctagccttactgtcactatcaacaacccttaaaactagccaatgcttcggcctctagtattggaaagtcttccaaataggatactggaaacttctatttataagcttggggtggcgggcggggcggggaggtggagagagagttgccatctacaggtttctattttggcctgaagactcaactgcagtcattagagtaagggaatgcccatctcctggtacttgttcgccatttcctcctcccccagagacaaatatcttttcgtcttttttaaaaaagtatatattttaaagcaagaatgtgatttcatctctcttctttgagctcatgtttgctacctccaggaatagcgtgtggactagggccagatgaacttcaacttgggctgcagatttacgaggttctgttctagtgccaaaggctcttggtagtaaatagtgagcaaaatagatacctgtctcctgatggatcttgccgccccctctttttttttttaagttatttattaaaaccacacacaccttgcaaagaaaaagggaaactggcagtctctgtagaggaagccggtggcatcgctcagagccacaaactgtatttctaaacagccctttccctggttccctctctcctgccccactttttttaaaatccagactgtaaaaaacacatctactgacactcactttactttaaaaaaagaagagaaaaagtaaagcgttacaagactttcctcctggaaactataaactgaaaaaaaaatccataaaagattaaatcctggcgggttgtggggtggcgggggccggcggggagggggcgcggagtggagattggctctctgaggtggtcaggggccctgtgacagcttgggactttcagcacctggtttggggtcatttatctgctcaactgtcaggaccccccacccccaaaccccagccaccaacacaaccatcgtagaagggaacacaacacagagggtcttttttcatttttttaaaaaatcggtttggttgtgtttttgttttccatgggggagctttaaaactcattattgcaacactagttccatttttcgccagggttccaataacacggcatcataaaggcaacgcaacccacagttctcaagacatttaccacggtcactacatccggcagcggggtggcccctagctcctgctgcccccccgccctttctccccgcccgcccccggagctcagccgatttctgaggctccaactctacccactccctccccgggccgccgccgccgcgccttcccccattcttactccctcgaggagagccacaggttgcaaatccaaccaacctcgcaatctatttttgcaaaatcactcacaaagatctccctttcgcgcccgcgcccgctcctcccgcgccgggtcccctcagccacggccacaaagtgcccttctctcctcctgagtcttgcacataaggaacgcgggctggggctctgttcgtctttctcctcgcccaaggtaaggacctcgggaatctgaagcctggcgtccactacgctcaggcccgcagttccctttttacagagcttgcaccatgggaaaaaataaaataaaatttaggaaagggaggcaacagccattgggagccaacacagagtcacgcagcgcccaaaatacaaacaccgcagcggccagaaatcccgccacctttctcgttctcccaggctgtcctgtcgaggttccctgagtccccccgcacactgaaaggcatcgcaggtgcagtgcgcacccctttcccacccaccccaagaagccctgtcccgccatcagtctctctcctcgggatgagcagggagagcgcgcggaggttcccgactccctcgactacaaccaagaaagaataattttcaaagtgttcaacatccccgcccccaagctccccaaaacacaggggcagggaacaccaaaacactcggctctcattaggaagatcacggctctgaaaggaaatagtagacacgatacttcatctcatctggatttatgaccaaaaaaacaaaaacaaaaacccaaagagttcgcttgcattttttccttccaaatctcggttcggctcgaaggcagggaatctaaaagaccgaggccgatggaagagagccagcggggcgagcgagcgggcagcctccctttttgcctcccggagttacccagaaggacaggggaagggaaggaagaagaggcgaggaaaaagaggagggagggaagcggaggccaggagcgacggagcaaggaaagcagtttgcaagcgagaaaagagggaaaaaacacagccgcacgaatccagagagatcacaagccgtacgcaagcagcagcagaaagagcgagagcgcgagcgcgcgtcctctccgcggtctggggccagacagcccccagactagcccgaatcaccccccaagcactgtctcgtcctctctgctccggccgccccctaattcccctccttcctctcctccacctcctttccaaaaaccaaaacaacacaagggagggtggcaaaagcctccccaaaccggccgattcactcaaagacaacaataataataataaatacataacaatctatatcctatggtgggagagacgtgggactaatcttcggcatttattttaacacctgacagctagaataaataaatatatacatttatatcaatagatacacatagaaaacttggagccaaagcatttggcaagagcggaaaaaaaaagaattaaaaggtaaaataatgatcatgagcagcggcggcggcagcggcaccagcggcaacagcggcggcggcggcagtagcagcagcagcggcggcagcaacagcaataatcacctggtgtccggcctttcctagaaacttcttgcatcaccacttctaagaaccccagttctaagaatcaacagagctcaattctcggaatttgagcttcggactttaccactgctacgtggcaggggaggacttggtgtcagctctccgagatttttactgcccctggccaaccaaaagccctcaaagccacaagattttttcactggccggcatatttcgaggtcctcataagcagagcgtctcggatttggaggttccggttcgaggctcgaggggcctgaaggtggctctccctccccgggcccaagacgatggtatggcctgctccgccaccatcacgtgggctcctcctctgtgacgtcggcgccttcgctgtagcaaagctcggcctctggaattctgagaactaatttgctattcggtgacataagagggggagtgcgctttgctttcccggggtctggggctaattccttctttcttacccataaactcagcagatcgagctaaatgcacaaaagggagcgagaggtttgaaccactgggaaaagtatgttatatatatagtagggttagagaggcgagtaagagaaaaataaaataaaataaacatcacagctctttccaactagaatattaggcaccacgagaaaaatatttgccaagcagttttcggtgggttcatttgctttatttttatttaggacaggggtttttgctgttgttctgggtttttttctttctggtgtggtggcttgggatttttggtttctgtattttgatggtttatggatttttgcttctgattttttgccttttgcaagtttgtggtgttacgtaaatcacaggatcggcatcggttggatttttttgtacgtgccttttctttccctatctaatccctcaagcgttttaaagatgtattatttcaatactaatactattgaaagaagcttaaatttttggccatatgtaacaatcccagcccccactttttttttttttttttcctttggtgcaattttctttttcccccttggacttttgctgaagtgtgtctctcctgcacttcagagaaatgttcaaaggatttgttttggtttggtttgtttctttccaggacagcaagtggtgggtttaatctgttattgttgactcttgggaaatttcttgttgcaagaaacgtgtgtgtgggggggagggtgggggtggcggggtggtatgtgtgtgttttctacaaaattctgtgagccaaatacctgtttgtgttttgttttctcttaaggtcttgagatttttgttttcgaggctcgtttcaaggtcgttgtaaaaaaatctcttcagtctgtgtttaagagatcagccggagggaattctaaaggcctgccgtgccagtatcacagatactgcctgtatttagaacagactgccacaactacaatgcactacacgcagcacagtcttcttagctttgaagctgagttggggggtggggtggggggggggtagagaagaaggagaaattctttccttctctttttctctattactttctttttaaaggcaattgcagtgcagaatcatttcattgtgggtcctagtttgtttgttcagagctgctagtttccttatttaaatgttggttcgggttttttcccctcctactcatccctgaataagggagactcttg

SEQ ID NO: 41795 - DNA, 1358 bp, Homo sapiens
ttccagctactgccttctgaaaaggaagtatcagtgtttaattttcatccatatgctgcctgcttttagcctttattgttctgagatttttttttcctttagaaaccttttcagcctggctcagagtttacccccaaacactaattttccacacttttctcacttatttaaaatgggaataaatatcagaagcttaaaatagagaagtgatgggggttagggggtgtgtaatgatttgtttattgcgttcgatcgctgttttgaatagcagagttttcacttcctatgaaaccttagcatgaaggaaagcagcagctggactctgagagggatgagggaaggaaagcacttgagtgtttgtaaactcagggtggctggtccacccgctgccgttgccgggctgctggctgctgtacttagctgtctctactacctaaggctagaagtggaaaaacttgatttgcgtgttgtgcctgcattttttttttcttctccccaccgccctcttgtacacctgaccatgcagaagcctatctgaagccagctcgatggcagggagagctggagagcggaagaatgtgcggagggagggagggctcggtacttttccattcacatctccacagtggcttttcttgtttatttcaacctccaccggcagaaacctttcagctgcctgaaattcaagtcattatactgttacctgaggtcagaagacagacactttggtgcacgtttcctacatgtcagtgtctgtgtaacttatgtacgtacagagacacagacacacaaatgtgactccacgggggcacagtgtagggagaaaaaaaaaaacactgtatttgttgcaaacacacacacacacacacacacacacacgcgcgcacacacacacaaacccttggtttctaattacagctgtgcctgaaactctttatgggacattgagcaaagccacttgtgaggactccgtttcctcagctgtgtgaaggaatagccccgatgatttgagggatgccggtctgcgcttagttctgtacctttacatttcaaaacatatttacagaactgtgcgagaggagtggaaaggagctgtgtgtatatgtgtacctggggctagggaaggagttaaaatgtaaacttctaagtaaagaaggcagtcccagaatcctcactctatcaatttttaaccaattgtagaccaaagtctgggattttgctgagtgggttcaaaagccaattgaagattttaaacgttaagaggtggaggaagtaggttctaagaccttgcacctttgatctccagcattcataatcaaatgtgacagttcccaagtgtcttttctgccctatatttc

SEQ ID NO: 41796 - DNA, 909 bp, Homo sapiens
aaatttctgaaatattggtgaaagattggagaaagagggagaatctggagtgagggtactggaataaggaagacagagacgaaaaagacagaacaaataaacatgggaaggaagagggaggaggtaaggaggaagggaggaaggaaagaagaaagaaaggaagaagagaaggagggagggaggaaggcagggaaggagtaagggagggagggagaaaaagggaaggaaggaagggaggaaggaaagaaggaagggagggaagatggaaaggagggagggagagaaaagagaaggaaagaaggaaaggaggaggaaggtcagtcatttaaaatgagaaaagagaacaaaatcagctagggagcgggtgagagaaaagtttggagagaaaaaagagaagtggagagccatgaggacaagactcaggacaacttgaaatgtgccagacctgctcagctccggaaacttccttttgtaagcctggcacggggaagatctgtgcacagaggaaaatgtgccaactcctgcccagggcctgtcagaggatagaaacagatcaattaacctgggtggggctctcctgccagtgctcagggcctggccaggccagaccaagccaaggactctcacgtgatcattaggctattaaaggccatgagctgcaggctagagtcagccttttatcctgagaaaaatcctcttcctgtaccaacatcattctgctggcccggccaccacctctctgccaggcccagctagggacacagttagaccaggcacttggccttggaaaacagacacgtgggccactctgtggccagcacagcctgatgtaaccaattggtgggataatcttggggcatatttgtggatcgaacaacaggcatttggagcagaatgtttccatagttc

SEQ ID NO: 41797 - DNA, 857 bp, Homo sapiens
atttgaccaagaaaaaaaggtaaggatattctagtaagagaataaaatttgagctcagtcttccatagagtgtaagggatttttttttaaggggtagatgagaactatttactgattaatttccccagtcagactgtcagcaatagagggaagaaagcatctgggtcttgctcagggctgtttctctgttgcctatggcagagcctaatacagagcacatgttggataaatattttgtcaaaattaacctattcaataaatactatctaagcaattcttgcatgcatatcttttaaattcactcttggcctggaatgctaaaccctaattgtcttaatgaaggctttaaaagcccaaaccaaaacttttagaccctgaaagtgaaacctccagtccctagaaagttcactgaccaacccagtttcactgactggctgagtgaaaaacaaacattaaaccaacagaacaagctatgaaaatcaaataagaaaaaaaagaaaaagattgaagttccaagaaacttagatattttcagtaatgtgccttctgcaaggaaacttgagggcttcaatgacgtcagtttcatttccagtagagagcttttaccttttatctcttcaaaaagagactaaaagcccctctgtccagcagctagctgtgtcgtgggtgtgggtctaaagacatcaagggaactgaggcagaatcaacgaggttcttctcacattgcattgggttttttcacatgtcttcgtatttttttttttcacatctcctcatttttgtgtgagaataagctgtaagcaagtctgtgtcagtgagcatattcagatcacaacatttattgaatcagtgagtca

SEQ ID NO: 41798 - DNA, 662 bp, Homo sapiens
cagttcttcacaggggttcagcctttaccagcctggagacactcctctctgtgcttgagcgcctctctctgtaaataaatccaggctgctcttacagtgcaggatgtcccacataccgtacatctgaggtggggtgaaatacaaatatgccttttcataatagctttacacctggtgcagcagaggactggtttattaccttggtaaacaaaagttagaattcaagcaaagtacaaactttgccgaaggcacttctgacagtgcaccttgtgtttgtgaagtgaactcgatatatatacgatgtgaagcaatggaaggctgggctttttctttctttctttctttctttctttttttttttcacttgtctgatttgcaaggtttaaaagttcacgtgtgtgtgtgtgtgtgtgtgagagagagagagagagagagagagaaaggttgggggaatttactttggctctggctttttccagcattttgaaatcatgctgtttagcgtggaaaaaaatatgtgagccaatttatattgttttccagagagaatgtacttcttgctgctctcagagtgacaatgagaatttttgggttggagacagggtaaaccagtttggggaacacacaaaggaaccaggatttgcattaaatctaacttaaat

SEQ ID NO: 41799 - DNA, 400 bp, Homo sapiens
cagcacgtagtaagaagtcaataaatgttagatggcattgtttttagtaaaatttctaaaggcagcaaaggaaagcaagggtgttccaagcagagggaacagcctgagccaggtcttgtggtaagaaagtttccagagaagatgactagccctatgtgtttgtacagttgagtgtgtgggtcatcacggaatggggcaggtacggtgatgattggaggtgtggctaaagaagtaggtcactgatattggaagcctaagaaatcctatctcggtagatcaaagatttccaaagtgcagtgtgcgctctcagaagggtgtgcaaatcataatgaattttcattcaggtttacttttattttttaaaagggaaaagtttaaaagtactattatttcatataca

SEQ ID NO: 41800 - DNA, 1097 bp, Homo sapiens
tctccgggactccagagtcctttaacctccccaagactcattttccttctctggaaaatgggaacaaaatggggaaatactgctgcatgcagaggtttattgtgaagcctatataaaaccatgtacaggaaggattttctaaactctaaagtgccacatacacatgtctatgactcatataaggtctcctagcacagacccagtacttagatactggcatcctgacttctagttaaatattctttccattaccgcacagtgctagagatcctttgctttgcttcagggagctgcagccactgcactgtcatgcaggacagactctcaaccacttcacaaaggagtagatgagtgtgcactttttcctttaaggcaaggctgtctaatggtatgcactttcataaacaaagaaaatggagcaagcagctcatggtctattaccaccccaagatgctccctggaggaggaaagcacaccacattacaaacagcattgagtgcctgtagtgagccgggcactgtactgaggccagtaaagtccaaggtccctgccctccaggagcaagcccaggcacagggagtttctgaagagaagtgaatcattcagggatggtccctttggtatgacatgcaccagggccaagtttaaattactaaaacttcaaacctgtaaacagtgggaacgtctagttcccccacccccaccgcacccgaccccaccccccacatttctccccaggccttcccttctgaatctacaaggagagtgccatgtgcagaacactctgcacagacaggccagacatcccacaaggcccctggtttctctgggctctcagtctcctaagttccctcagtataaacctgccattacctcaccagtccccagaggaggaatgtgaaaaccactcacccacttatggtataactggagaaactgaagcccaggaaagagaccaatctgattcaaagtctgcctgtgaatcagcattataaaacaccagaacccaggaatctcagctcctgccttccctgctcagccaccaggcacctacaactggatatttagtgggttccttgtcaggagaggtcccattt

SEQ ID NO: 41801 - DNA, 783 bp, Homo sapiens
aaacccatggtttgtggatttctctgcattttcgtggataatttacagactccaaagaatgaagagcgattgatggaattgtaagcagtctgattggaatatagatatatttaggggtagaaatcatcattccataccatcatgcctggtaaattttattaacatcaaggccaccccacccttctctaatcctacttgtggtcaacaatatcattggaatggaatttaaagaatcagctctttctacgagataatccaaattgcccaatacagaattttgagaccggtaaatttagttctcagttctcctcaactgtttccctttcatttccttcttggttcatccataatgaaataacatgtcaagagatgtacattctggacaccagggcaaataaagacattattttgtaggtggtgaagcacctcttggaaaaggaaagcaactgctcaaagcctcatggtaatagtgtttggtctgtaaaagctcctgaaggattatgtttattttgctcaataaatattgaatgaataaatagaggctgagctggatctagaataagtttcttttcccctcacccttggtcctactctcttgccaagagactgcactctctttggccttgtattagtgtgtatgcatctgtgtcctctattttactctaacttctgggagaaggaatcatgttttactcattattgtctttctcctaatacctggtgaatatctggcttttagaagattttcagtaaaggtatattcaataaatatgaaaacaaata

SEQ ID NO: 41802 - DNA, 500 bp, Homo sapiens
ttatttataatggcagcaaactgagatgctgagaagacgttgctgcaggccgccaagcactccctctggaaatcctgaaagcctgctactgcagggctgtgcccagatgccagctggaagcaggcttatctcttctcagttcccggtgcttcttccgatcctgccaggatgttcctcacaaaacaaacactaatctccctgcatagttccacctacagaggaggaagctctgcacccttctgccctccccctttagaaaaccaagctgagttctaaactcccaggtcgtgacaagttcccattttgtgtcatcattgcctcaccaggtagcactctcaaggctagacctttggaggcgggaatggcatggcctaggaaacaatctaatgtctcgttagtctcctaagacagcccttcacttctggagccgcctcatccttgtgccaagcttgtgttgggcacaaagcactcaggcatccaaggaggtaatgtgcaaggca

SEQ ID NO: 41803 - DNA, 2178 bp, Homo sapiens
gtctagctcatgtcatctcttccatgaagccttctctgatcttcaatctgagtgtgattcctccttcttttgaagtcaccctatacttgtagggccatccccatatgctacagggtatcacagtgacttctccacttatcctgtctccttctttatctgcctgtgggtcatttgcctcatctaaaactgaatcctggcacttggtaaagctttatttcatgtggatgtttctctggattctgcaggcagggccagaaaatgtcaatggtgattgtgaactgttctggaagaatagggtttcccttcagaaataaaagagtacctcactgtggtacctctctgcctgtgtggacacacaacacaacccagcccagtctgggccaccagaggaaccagctggtcgagctttgtgaactttgtcttcatgccccgacaccctacttcccaaagcctggaccggtaaagttcttttcaccagaaaggacaagggcaagtgagtgcaagagagaaagtggcacatttatcactgagaacctgcttgggaaatgggggaaaggggaagggaagagatcttattttctaagacttgagaagggaaaatggaagtgggagggaaatcatctgtggcttatgttctctaaagttcaaagggaacttgctgccccatacatgatgttgattagggaaagtatcatctagttacactgaaccccacagattggtaagcatgaactcagaagggtcccagctttctgattcatctgatccacaagccttggtcagcaagcacgcagttgcttttgctttaagatgaccttatttgaaattccttatgtagctgtcactgccagcactaaagcctggtcatttacagtagctgtcctttctgaatttaaatctgataaaacaggctgcgcctgccccacacctcctaggggtctagatctgaaaggagccccagggatcatcccatctagtctaaccctggcccagagaggaagggtcacaccaccaggcagtgctgaagccaggcctgcaacacactttccactaccccaagatgcccccactggctgttcaatttaaggacataacccgtgaagaaaggagattgtgaaatgcttccactagaagcccaagggtggctgaaagcccagatgcttctctcttaaccctcctaacctagtcccagttcagcagtttgcttcccactgtttcatgttaaccctttttctccatgaggccaaggcttgtcttccaatgagcagctccttacaataactaagccggcttctgcttgtaccttcccagacacctccactggcaaaacctttccattgagcaatcttcttgtgaaaactgactcttctttgccctttacaattactcagcaactctgcaaaacagtaacccaactgtttattttgatttcaagcttggggttaaagggctagctttgtcatttttttttttttattccccttgaggaagttactagagacctcagggatttcttgtctttgactcttgactaccagcttgacatgcctccatcttccactagcccccagtctgtgccaggtgacacagaagtttccaggaaggaaaggggatactcctccagaggaaagatacttcctaaatggagagctggcattcactcaaccttccctccaaccacccatccccaaggcaccaacctgcccatgttttcaatgcatctgccaggctgcatcactatctcccatgtttgttctgtagtttcagagtttacaaagcactctaacctccctcaattcaggggatgttcaggacctcctgaagggtaggccacacaggtttgcatattagagaggagataatcatatatgtttatgcttatatctgggactaacctaatcaaggttagaaattatagtcagcctcttgactccacgttcagtgttccttataatctttcttctgccagctactcccgttattttccatcttgcatacccagctaaaaagagttttctagaataccattcttcttcgcctgctctcccattcacaaactttcagcaactcctaaatgcccataggataaaattccaatgactctgcttgtcttttaaggccctccacagtatgactccataatatctccctaacattatttccaccatgtcagcatgg

SEQ ID NO: 41804 - DNA, 1571 bp, Homo sapiens
aaatgtcagctaatataggtcaccatggcttataagcaatttgccttaaaattagaaacttatgaaatgctcaagatgaaaggcagtacatttcaaaacagaggcaatgggaagcaaatttctctcttttttgtgcaacatcctatgaacccacggttctcacaggcccaggatattgctgcagttggcagcctggtgtattttgaacagcacagtgctgatccctgggtaactctgtaatcctgagtgagtcactttacctttggaggcctcaatcgccttctctgtaaggtgggaagaattgtactccctcctgttccacttacagggtatcaagaagatcatattatttttaaaggaaaaaaagaactgagaaatactcttggttactctgcaaagaggttggtgtaaatgtgaagtgtcactattattaagtgtgaggcaatctttcccacccgcatcatgtcccagcattacaatgtgagctgtgtgacaggctatttttaaattcccatctctggaagcatatggtcctgcacagtgccaaaaagagaaaaatgacctgcttcagtttgtttgcttgtttgttttgatctgatggaacattttctatgatcctgttaaaggttgttctttctactttaaacttttaaggtgagtgctaaagattttctatagcatagtctgaaacacaccgtggcactacaacttgcttagacaatgataagaggtcatcccagggcgatggtgtatttatacaaatctgcattttttgtgtatcatctaagacttttcaaaaatatagtttttttatttgttaacaatttttatgcttttgttctctaattttgggtagttttgtttgttcagtagcagcatttttaggtaaatttttttttgcaaatagtagtgcatttattttataaaataaagcgattccttttctttaattttctttaatgttacctacataaaaagaagttgtttcaaagttatcctgattgtttattgtcatttcttttatgttttattaatatcaattgctattgactgaagccctttcccatgacaaatatacagtatatctgttataaacttcatttttgctgcccccttgacctgacctaactttacctcctctcttgtgctatttggcaagactatcctgaatcttgtcaaacttcccactcattgaatttgatttctgacaccaaattcctggaaagatatctatctgatcagttggaaaagaaaagagataaaaacacctatttcacaagtttcacgggacctgacctttgcgcaagagcaaaaaatttccccagttgaggtaaataaggttcccacaagctttttttccttttttctttttctttaaggtccaggattcaactctcttgtctttgggtcaagtgatagctaaaactagaattgatgaagtttcatggcatttaaccaatgaaaaaggtaatttaaaaggagggtgctaaggaaaactcagaaagaaagacagggcctgcatcttcagctaaatgatgaaatcaagaacacgtaagaggagtttgaagtgt

SEQ ID NO: 41805 - DNA, 2016 bp, Homo sapiens
taccaaaaaaagctcacacactgttattgtctccattttacaggtgagaaaactgagatgctagcaggcccagcaccctgtcagaagattcaaatcacagttggcaacgttgagagttaacccagatccccttgcctccgggtctggaactctctgctactgtgctctaaggcattcttccacactgctccacagagggcttttcttggcctcaggcagagagatgagtaattatctgtaaaccggaatcagggtttatctctctgctgtctaaagtactaatgtacaatcacagactgtcagagcagtaaagttccctagatatcatttaagtgtttttcctcagctgagtacctcagtggtactctctggtgcttttgaacaagttagtggcaaaatcagcactgaaatcccttaactcccactttatactatttatgagacttggtattaaaaaacaaagtgaagccaggcatggtggctcacgcctataatcccagcactttgggaggctgaggcaggtggattgcttgaggccagttcaagaccagcctggccaacatggcaaaactccatctctactaaaaatacaaaattttctgggtatggtggcacacacctgtagtcccagctacttggggggctgaggcaggagaaacacttgaaccgggaggcagaggttgcggtgagctgagatcatgccactgcactccagcctgggtgacaaagcaagactgtctcaaaaaaatcaatcaatcaaacaacaacaacaaaacaaactgatttagaagatcaatcactaaataaatagagtatcaggaattatttttttcaagttacttaataatcctgctggccaggattggacagagttaacttttgcctcaatttcttcaatgactttcattaccaacctcaccaatatcatgtagagggactgaggcagaaggaactgttactgcctatgagtcatccattcttgaccttcagcatgttttgaaaatgtgttgtgaaatgcttaacaatcaataattccatcaccaggcagtatgaggctgggagttatgcaacaggcggaacagggcattactgctacatcattcaggagactccaaatatctgttgtgctcagaaccctcagcaggacctaaagacacaaagtacccataaaagttattttttttttaaaaaaaaaaacaaagagaagatggaagacagaggagaagtgaaagtagacttctttccttgcattggatcagtaaagtgggactagcagttaagtgtggatactctcaagctagcatgtctgttcttttctgtcaatggctaagtcacactccaatgttacactgctgctaggcaactcttctctgcgccctagacagtggcttcatctccagacattgcaagtgtcctaggtgaaggtagctagtacaaaggaaaggagcacagaacaaggaggtgaagacccagttcaagtccctggctgccacttacaggcctatgacactgagagtggtcacattacctgtcagatctccaggcccttctgtcctaccaagggtagatgacatctgcccaatagattatacccagttcagaagtgatgagggatgtgaaaacacgttacaaactacacaaatgcaagggactattagtagaaacccatgaatctgattttgcaagctcagataaaaggagtctcccatttaaagatgggcactggggtatgacttgtggttagaggcaaaatcaacgcctgtgccacgcaggtgacagaggagaattttcagactctaatttgtgcagtcaccatgagctataagctggaaaatgtttaactggttctacagtggtgagaaagccctgaattataggttttgctgatttctgtggtataaatacttgcaccatggcacattcaagctctcaatgtgacatcaataaccatggagtgaggaaaagatgcccaccactgtctctcccttttatgcaagtcaacatactactggaaac

SEQ ID NO: 41806 - DNA, 1337 bp, Homo sapiens
atcctcgtccaaccttcatgccttacactgtgcacggctataccatagtctcaactctgctttggaatgatgttgggtcataagcagtttattcagcatagttttccattttcaaactcgtttccgtaggctgtattacagctctgtaggactgtagacccctattgatataaaacatagatatccatagttatcctatatagggtatttcctcagaagtcccaactgcatccacaaggacttggtcactgataccttgcgtggttgacactgcaagagttctcaacttaattctctgctccactccaggattgagggcttttattgtcttcagtgagaggacatttagcagtcaggtgacccagcatcaagtttgtccctttctgaccttgcaccctgggtccagtgactcatcttatctctgatttcataatccacccagggtcctcattcctacaaaactgttggaattaaagtctaccaccaacagctccatagcctgcctgtctaggaacaggacttattcccagcctccccctagcttgatggtagagtggaaacaaacagcaggtttgcactcttacctaaccacttcttacatgactagttgctttatctctctaggcctcaatttcctcatttgttaaataggaataaaattacccttgcagagatactgtgagaatacatcacaaagcagactgaattcttgacacatagcattgctcagtgaatagtagctgtctttcttaggatgaccatttattatggctggcttgatgctggctgccgctcagcctgtccacctcttgcttatcttcgtgtgctgctgacactcccacattcaccatcacacctacctaacctcctcatctgagttccaactcctcctctcctccaagtgtgttctcgttgtgtctgttctgactgctggctagcggtgtacgggagccaacaggtaccagctcacaagagctgaccctggcatctcttcctagctccacattcagtgagcatcgtattggtagcttgaaatcaggcacagtgggagtatttacacagcagaaatcagcaaatactacaaacagggcttccccttcaccccacagagccatttgttaaacatttacaggcacataagtgcagactcttcatttcttctgtaccttctctgggccttattatctgacctgaacactcaaatatagcccttttaaaggaagatcttagggcttttttttgtacactgactggcactgcatttcagtgagaatgcagctaaatccatgccgaagtttacagagtaactcagcttagggatggaaatatttcaccag

SEQ ID NO: 41807 - DNA, 1640 bp, Homo sapiens
ataagacgtggctttaaatagttctaagactgaaagaagggagaacggatgagcacgaaggtacctttgcaggtgacagagtaaaggtgagggaggccccaattaagggaatttactccagtgcctcaattttctagaaattaaaagtaatattaactgctggaactaaagggttgggagttgggtagagaacttgaggaaaaaatacgctaattaatataatcaaatgtagcccctgaagaaaatgaagaggaagcagcctaagaataaataaaagaaggaagttggcatttgctaagactctctttgcatggcatctggccctcaggcacagtttgttctcttttttattcagcacctcagtaatctccacaagagccctaagaagacagtactgccaggaaactgttcaaacagacatatctgtaggggacctccgggctgcacatgacccatttttcaacatcactggccaaagtgcaacaaggtcacgtactgcaaatatttgtgattagaaagattctttcctctaaaagttgccatgagatagttctgtgaaatataaatattggctcagggtgattgacagcaactgaaaattcaaacaaaggcaatacagcccagggatcctctgtggtcccagcagtaggggaatcatgcaccatcaagacaacatcacagacctccctacctagggctcagagggttgggcagggtaaattctgctcagtgcccctgttagctcactactggaaaagcagaaagcttggcttcagccacctctacagcccagaggactcctcccctgcaccagccggtaagacaactaatgtaatgttgaggaacactcagaactgtttctaagcctgtttaaggacacactgatgtctccaggcaaattagcctattatcaagcatagcaagttgaataatggccacccaaatatatcaagttctaatccctggaatttgtcaatattacctttttggaatgaaagggtcactgctgatgtaattaaattaattattttgagatgtgctttctgtgggttaaatgtgaggatcctcaatgccattccaagtgttcttatcagataaaggcaaagcaagataatgagagcacacataggaggaaagcgaagggaagactgttggcaagtcagattgctgacaacccccacaagcaggaagaggcagagaataaattttcctctggagcctccagagggagcatggtcctgccgacaccttgatttaggacctgtagcctccagaactttgagagaatagtctcttccttttaaaccaccctaggaaactcatacgcatggcaacagtattttctttactctcatgagcctaaaaatgcacatttgatgttgaacctgcggaaagtgaaagtttgggatagaaagacaggaagtggagcccatgggactatcatctcaattcatccacctcctgcgggagatttttctatgtcctttctagtgattcctgcacaccctcacacccaccccaccccacccctaaatactgcctttacaggagcagatatagttccttggttgtataactcttgatggaaacttaaattcaagtgtaaggaaaacagcaaatttggagccagaacgcagact

SEQ ID NO: 41808 - DNA, 651 bp, Homo sapiens
cttcaatattacttaacaaaaggcatttgtcatcttacaaaaaggtttaccctaatctccatttcagttgccaactactcttctacatttaaaatgtgatcatgtttataaaaacttgatgggcacacttttcaggaacatctagtttctaagctgcactgtccttacatgcccttgggcataggtgtatgctgattagcaggtttaatttgacacagataaagaacacgaagaatttgcccagaggcccattgaccccccctgctggctccatatctgaaggaaggatctgttccatacctcagagaagacccacttaggacaggaagtgagtcatctatgttccacagaggacctatcacaggttggactatactaaatgtgaaacagattaaactggaacaaaatcatgacatatttgttccctcccacagtgtgagacgtttcataacctcttgatactttaccctgataactttgagagctggagaggtcttcaaaaatcacttgtatgtctctctcttgttctgtagatggggaaactgaggccagaaaggctggtgccttatccaagttcacacagcaggggtagcaggagatccctgtcctgaagcccagacaaatattccatagaagcatacatatacaagc

SEQ ID NO: 41809 - DNA, 691 bp, Homo sapiens
tttgtaaatgttaaaattggagacccaactgttacagcttggctggtgaaggagccccttcctagcctctggctcctctagacagtggatcttctgattctttccaatcccctaaaactatgacctgccctggccaaggcttctcctacatataattatccaaccttccttttggataaattttggaatttatccaaaaattccttactgggctccagtgtgctcaccaggccctcgctaaggtcaaagactttcacaaatgcctcattgcttctgtatctcaactctggacctttgctttgaaggcccctggagccttgcattttcaggtccatcaagttactcaactgtatttcttcatcttccttcaaaacttatacttccatacactttgtcaggtgtagagggtaaagctactgaccagaacacaaaatatatggcagaaagggagggtccacaaggggaaaaacacatattgccaaagacttgcaattcttgaagtacaatggaatgcttcttggccgaaagccgcctaccatgtagggaagtgtcaataatctttggctgagaaagcacagtcaagtttattcagctgtcattggctgagaatatacactagccctccaatctcagatgaaactatttaccatatgatattatgatatgatatatgtttcaaagaaaaaagtgt

SEQ ID NO: 41810 - DNA, 3390 bp, Homo sapiens
aaagatgaagggattagtcaggagacctggatgggaggaggggaagacaggtgcttggtcagtcagttgttttgtgttgggcgagtaacgtttcttaagtttttgtctgaggtgtaaaggggggactacgctctgtcctatctaactcacctgaagatgcaatagccgggtgagagactgctttcattatgtgctaacgtgagggattactttagatattaataggagagaagtgcaaggaaaggaagtctcagggtatggaatgctttcctggccatggctgctgcgcgtcataatcccctaacacagttaagtggtggttctcatcgtcgttcacccttacagatgtcagaggggaaagaaaaatccaactcaaaacttccaatgacaggcttgtctgtattcaaaccagttcatctcgttcgcagacttttttgaagctataagcacagagcaagctttctgggcggggctcagaagtaaacgttaaactccagggattcatttatttgagcacaggacagaggaagttgccctgaagcaactgattgtcattgatattcagggctcgctgtcaaccaggaccttccaggaactggctctgggccaagagcagtagaaatcactgggtggtccgcacagctcgcgggcatctaacctgcttcaaggctcagggctaaaagggagccagggcccttcctggaggcgggaacccaagtgggaggcagagcgcctgggcccgctcctcgatctgctgagtgacgaccctgtacaagtcatttctcttccgagagcttcagtttcctcacgtgccaagcggacgggttggaagttggtctttgccagctctgacaccttgtaagttttgagtcttgctgggaatccagggcggggctcacgaggaaaatcttggaaggggatttcatggctggatctcttccactcaagctcagtgccctaatttgacgccttaatagtagacgcaggcttttccattttccaggagccccctgacgcggccgcttcctcctacgtctccttcctcttcctctagcaggggcaaagtctccacatctccctctttctcttcctcctttgcaagctccctgcattcccgcgtctcctcctcttcctcccaggaaatgcaatgccctcagtgcgcccaccttttggcaaagccactgccggctgcgggtttcccctcccccgccaggcgagctctgcgcggcggcttcgcgggcacacgccttcccataccttacatggacaaatgcgtgcaggcaaagtcaggaattcaggcccctgacgtcagcctccagcgctcagggcaccgcacgggagaccaaggggagggggtggggacggtggggaggaaggagggggaaaggcaccaaccagcagccgctccagccctgccgaagtttcactttttgtctgtgggttcgttcccgggtcccgcgcgagctttcccgggataagtagctttagcgatcgggagacagccgggcgctgcaaggtaagggctggctgcacggcccggggcgcggggcgtggggcgctgggcgcgggcggcgcgctcgaggaggccagtgtggggcgcggggccgggcctgtccggggctggggacaatgggagggggagtgcccgggcacctcctcctctgcctctgcctccgcctccagccgccgccgccgccgccgccgccgccaccaccaccgccgctgccccggctgcctcctccctgaggtattgttgcaaatccttccttcccctcaccctccacccgcgggcgcctcgggaacccccagccctcccccggcgcgagcgcctccggggtggcaagagcgcagggcgcgcgccctgctctggcctggcccgctgtgcggaagtgccggccgcggcccaatcacggggtgcacgccatgggggagggggacccagagtttttccaaaagcgtcgaccccaggctaggcggggttggagccttgcgcgccccctgcccggacttttctgggcgcccagggggcggggccacgcccatccgcttagagctttcgcggaatcacagttgtcacagcggaaagggcctagacccagtcctccaagtcctcccattttacagttggggcagctgaggcccagagagaaggagggtcgcccggaagttatttactagaggccagaccataattcaaatagttggctccggacttaagttccctttctctaagcatttctctagcaccctgtgtgtggcagaccctgtgctgggtgtattggacgttgccctcaaggaactcagttgaacctgggagtcaaacctggcctagggtagaaaatgctaagtgctggagcaaaggcgtggacaaagttaaaggaagttccagggagggggtttgattttctggtccctgggacggccttttggagagtcctgcactgaatggggtttttggaggttgaggagtttcctgaagccagctagcggcttggaggaagacatctcttcgagggaaccgtgggccagagaagactaagtagtgtgggaaatggagatgaaagtataaatattctttagttggaggcaaggggttggggatgggggaggttgtgatatgagatgagctaatcagtggaattgtgcctgggtgcttggacagggcagagtctttggaacctcggagtcgtaggagaactgaaaaatctctctggcttcccttcccttagaagggatccactgctttccctcccccaacacaaaacaactagcgagaactcagggtcttctctggggcttttgctagtaccaaactcacttaactgtgtttccagtcccctttctctttccattccttccccttttactaaatctcttgcctttcctgtaaaattcactctcactaaggtgttgatgacttaatggcttacctttccctgcacatgtgcattttaagaaagcctaaagtgaagaaggggaaagtgtggctaggcacctttacaaagcatctagctccctctcccatcctcccccttcctcaactcttatagatagaagaataggtaaaggtccacgaaggtgggtgctagacctagagcctatggtcaataatggtggacagtggggggttaggacatccaatatggttttctccacttcgtcaccagtttttctgcttgcacagttcctgccagcaccagggggcagttaaaggaaaaagtgtgtgggccaggcacggtggctcacgcctgtaatcccagcactttgggaggccaaggcgggcggattgcctgagctcaggagttagaaaccagcctgggcaacatggcaaaaccctgtctctactaaaaatacaaaaaattagctgggtgtggtggcggggaactgtag

SEQ ID NO: 41811 - DNA, 1090 bp, Homo sapiens
tggtccctgcctttgaggagcacacaagtgtgtggtgtgtgtgagggggagggaaaaaggtggagtggggcatgtccgtgtattaagtgcttttacagggtaagttttggctgctcttcactgagaaggctcaccctcagggaaaccactatagagaggggggtgtctgagctgaacctctaggaatgagtaggagttgtccaggtggaagaaggacaggtgagagaaggacctattagcaagatagtagcagatgcagaagcagggagaagctgctttattctccaggctgtgttttgaaaggccagccatgaagaggaccatggaaaatggagaaagaagagggcctttactttttaataagtaaggtttaaattaatctcgataggggccgttaagtggttctgtagagattcacaggagaataaggctgggtagggtctctagcgtcatctctgtgggagtagttatttggatggtaatgcaggaggcatagtaccacttttagtctgagtgaacctgggactttgaccctgggccgcgattagaggatccaagctgagtatgttcattggtgggtgggacttttcctggaatctggctttggagggctgtgctttgctagaagaaacttagtagagtgaggaaggggaagatataatcatgttgatgcatgcaggaagctagtatctgggtgaaaatctgttggcttgagggaacatatgaggcggagaacctgagggcaaggggaagggtggaaggatttcaagtgtgttgtggaagtctgctgtaggctgcctggaggcttggagaaaaaggctggtgcattctaaatgttggtcacatcagtgagattggtaggtggataggtagctgtaggtagtgtagggattaatgtttggaagcaggtaaaccacagagttgaggctggaaaatgtttcctttcctatcattcttttttaatagtaatataattttgaaatattttcaaatgcttaccacctgttatgtaattatcatattgattcattaaagtaggttttttgattaccagtctcattttgcagatgagaaaatgaatttggtgaaa

SEQ ID NO: 41812 - DNA, 730 bp, Homo sapiens
atgtgaaggactgatggacttgtgaattgctggagccttttggaagtgctgagccttcagttagacattgaaggatgggaaggcttagaccaggattcagcaggcagctgaattgctctggctactgagagttaaggaataagattggttctctgttcatgtgtgtactttagctgggtccctgaatctattattttccatccagtggcccatcttgataatgatctctagctgtaaccgtggaagcctaatgctctactaaactctgtgccaagaggtcacagtggaaattcatttccattatgcagagtcatctgcacttgtacttcctagtgaatttccactgaagatggttcttgtttagttcaaggaagaaaataacttggttggcacctggagcttctgtcttgtttggtatgaaaacgaatcattttcaggaagtgcaataaagagttgccacccacagggctgggtgtgccctgactcatgggaaaggcaaactctgccctggccaggcaggtaagtgacaccttttcttagaatgaggtgaaagataggtcagtgttccagtaggtggtcattgtcaccctggaagtctctcttcttggtcatagtttaatagctttacctggagaatatctagggttccagtagtgacagctggacaggaccctaaagataacattctttccataaatttgatacatttgtgtattcatttgacatcgtg

SEQ ID NO: 41813 - DNA, 1068 bp, Homo sapiens
accacgttggccaggctggtctcaaacttccaaccttgtgatctgcccgcctcgatctcacaaagtgctgagattacaggtgtgagccaccatgcccagccgagggagtctcagcttcttcatcaacagcatcattctagtcagtctagtttccgtttaccttgtcatctaccacttcctccaacttaccttccccccagcttctcttattctggtgaatcacctgtgtcttcatttttcattcttattcatctgaatcatcttcttcatctaaggcaaggtacccttttatatcttcctggaaagacatctacttcatttaaaataatgctaccaatttcctcccctctggtagcaaccagcagatggaacatgctagatgaggtagaggataatctacaaatctggtctgccatatcatgggagatttcacgtaacagtgaattctttcagagcctctcagcaataccttccttgtttttcatatctgtatcaaaaggaacactggcaaacctgggttgtatttctcattccattttgggcttgaatttttctgagtctgagtctcagtttatctgtgtatgaaacgttagggttacgctatgtgtactctcagggccttttaactagaaaatgttgaatttgaatgtttactaagtcaacacaagctgcagtcaccctggattgcttgatcctccatgtacttttgagcctggcagtatgaggaaactcctgcagtgagcatagttcatgcctacacaaagtaggcattccatgaatattggttctcttccatcctgactgcttctggattcattttctttttattgccattgctttttagtcacccaagcttatctctttcttgtctacaccctcaatgctgtaaatcttcctttctcattctccatctggatagcttcctctctcctcacctttttcccttcaggctatgcctatggatgctgtccactctgaaacctcccaaagacaaatgattgcaatggaggcacagattgccgggtggtggtcctggccagctacaaatctttccaagagattagcacc

SEQ ID NO: 41814 - DNA, 912 bp, Homo sapiens
gttaaaaaaccactgtgtctacccttccttttgctaacactgagaggcagagtggttcagcacaaggggacacaaagtggcttagcacgagtcacgagatgtgacgggtctgagacctctcagcctagagctcccttacccctgggccactttgttagacacacctcctttaattcaaatccccgtctcagtgggacatggctttttcattttttcaaggaaaggtttaatctgtccagatccctgtgaagatcttggctcttggcgcacctgctggaggttcgaggtcctgcaaccacagagtagctgcaggaccttcaggatgtcccgagccacaaggtctttgacctgcattttgcaacctggttgtgtctcccctttggactctgggaaccttgctgagattggtacaatatctgtgctaaaaaggtttgaaattatagctagtattgtgttaccttcctggtccaaccttcacagacattgtctgactaagtatatataactcttgagtgttcactgtgtacaccggctcacaagaaaggcaaggttcctgatcccaaggatctaatggagagacagaaacaaatataaacttttgtcaactatttcagagacagttatttttgttatacaagattgttatgcatgctagttatgtggagaggatttcatctcttagaaatgagacggggagaatctgggcgatgagaaagaagaccagaactggggagtacagtctagaattgcaaggggttgagtttgctatgtgaagcagttagttttggactgttgcacttactatttctgagatttgagcatctgacttttcctttaagcttttgttttctcatttgtaatatgggagtgagagtgcctagttcacagggtcattgctggggttaaatgaga

SEQ ID NO: 41815 - DNA, 1581 bp, Homo sapiens
agacttggggctgttctttttctttttttttttttgagaagaagtttcactcttattgcccaggctgacatggagtttcactcttattgcccaggctggagtgcaatggcacagtcatggctcactgcaacctccgcctcccgggttcaagtgatactcctgcctcagcctcccaagtagctgggattacaggcacacaccaccatgcctggctaatttttgtatttttagtagagaccagttttcaccatgttggccaggctggtcttgaactcctgacctcaggtgatcctcccgccttggtctcccaaagtgctgggattacaggtgtgagccactgtgcccggccgagaggagttgttttgagactcacctgccatcataggaaccatagcttaaattcttgtgaccttttcaggtgcatctcccaaaatatctcccctccaccaaattaatgatttatttcataaatttagttgcattctggatggtctcattcttaagatgagcttaaagcctttcagaccagtcacttccttgtttggggtggaggaggttttttcctggaataggacagtgtatggaagggttgagaatccacttctttagcggttaataatttactccgagtaaggaattctttgttaaagtggggcatgttcttcaagtgccagagaagagagaagggtgatttttctgacatcctccagcctgcttctccatatttggaaatgtttacccaccaggctgatctattggaagagagggaggtgactcagggtttaggagaagcaggatttgaattcttgtttccagaaacaaagtcgtccccccaccctgcccccacccttcccccttcattcctctgtcccttgttctggaagctgaggcgagaatgtctcagttctgttcccttcaggcttcgagaccaccgccttgctgtgtcccgtagtggactgagggcctgcaagagggagtgagggctagtggagggccagctgcctgtgggggctggacatcgtgtgagtacatcattactgccatttctgctcacagacctggggcttacagcctgtgggctggctcacttgcatggtgatgggacacgttgctgggagtgctggtcacttttatttgggggtgtggacagctgctttcccaggggagtacttcttacagtgggatttcaagacaagatcggcctgaagaaaaattatatttgtatattttttaaaaagtaggtatttcctctcatctgaggcctaacttgagttgggtagaaagacaatttgggagtgctgttgtctgatgattaaggctaaagcaacaagctggaagggatgtcgggatgtctgtggacatgtagggaggggtagttttagcttgaaaacagttatggtgggatttaagagtatgcaaaatgttgatgtgtagcatttgcacagcatccacggtctggaataccttgtgtgcaggtcactgtgtagatttgatgagttgtcagagttggaagagtcctgcagagttttcagcacatctgtctaatttcacagtgtgagataatgggcagcagagacccag

SEQ ID NO: 41816 - DNA, 2925 bp, Homo sapiens
tgtgaaacatttattacttttctagtacttaacagtattaagtaaaaactcctgcccctggtatccaggacctgtcataaatggacaccaacatcggtccactgtgggtccatgtgggtccttgatgctcctgcttacatatctttaaatcaaacacatttcctaccaacccccagatatatcttgcactttctcaccttcatgccttagcacatgcctttcctttagcctgagataacctctccaatcttcattcatagaactcccaatcctcctgtaaacttctgcacagacgccatcttgggaagggaataatccttgatcaccacctgctctcccatccattagaagtgatctctgtgttctctgttctgctaactcaaccacagttagctgtgaggcaatagagtacaaatgtatgctgcatatgagcatgggatatggatttgaatcccggctgtgatacttcctcactgtcagttaacttgcttgagcctgagttttcccatctgccagatgggtgtgatacaataggtgctccccctgaaacccaccatgttgacaggagtagtataaaaatggtctgattctcccggtgaggtcacgtaaatctggaatcgtcaacaattttcctttcctttgttgtcatgacttttttttatgacatcacctcatgtcatgtcaccgtgtggtatgaaaatttgcattgttacctgtgcttcttctgtggcacttgtcctcccttacttgatgtcttatctctccttctagactgggagctcttcaagggcagggagggcattgcatctttgaaggccttgacatatggatactgctacaaagtttcctttaagggaaaggaggattccatacaacctaagtggtgacatcagcacaggctcattactaatctcatgtcacgaggtttcaggcctggctgagaactctgtgagctctgtgatgttgagcttcaggcacatagagtacaagctgggtaggcctctggctcctgcttaagagacagcagaaaggctggatggagcctgtctccagaccagcttcttctgattcaaggagttgggtgggactggcagttcactgaaggcagagtggtagtcctgcttggaacgtgaaactttgtttctttcctgggccttccagtgggtctgttatgttggtgagagtttcagacctagaggaaagggtcactgaaggtatgggttaagagcaactctgaaagccacctgccccccgacttctctgtgagtggggccacagggagaagatcccttcataggtagctcccctacccttgctatgcttggaaactgaccatggaaagggattcatttcttaaagggatagggctaccatttaactttctattgtgtcacttcccgaaacgcaacacctatggcttaagatccaagtgctttagaacatgagatacaaggtcttccaggctctggctgccacatccctttccaggcgtgtgtcccaccacattcctctgcatcctctgtcactggcctcaccagattagtcactttctctgagaacaccctgaactcatccttctcaaggcctttgcacattgtgttccctgagcctatttttctcctcctcatccgtggaaatcctcttgggtgttcaggcatcgtttagaagtcacatcatctgcagagaacttttagaccctcaaaaggacgttgcatgtactcgtgcttttctacacttttcattctgtcttttgtgttccagtgtgtcccccattgaggctcttcgacacccctaggcatgtccaactcagcacctacacctgctaggtccacacactgtgttatccaagacagaaggtgttagcaaacctctctttggtgcgcccctgaatgcagaacatgtgacattctgttaactaacagttgtgccagagtggtttccatagcccatactggggttcccatgatttgtttgatcatgagcccggccattcgaattgtttttgaattggtctgatatcagctagttaattgttaacccttttcaggtttgtttcccacataccagtagatgtctgcttagtgccagggttctgagctttttatttcacttaagaatataatagcaaggtagaattcaggaaagatttacttgctgttaatgtgaacttttaaaaaaatagtttgaaatgtaggctttgtttttatcccaaagctccatgaaatatgaaaatagcaggagttttaaaggtatatttccacctctagaggaagaactgtccatattatagttgtaattataaattaataaagcctgtgtcatgaaacttgattttgaacgcctgtgttcaaatcctggctttaccacttactagcctagagatattggatgagtgtctaacttctccgttcctcagtttcttcagtgttcaattgggaaatttttcttatggttgatggaaagtttaaataaggtcttggatatgaaactgggattttattagtgtgtgtgtttcaaaatgtggatttggaggccatttaaaaatagcatttccaaaaagtttgcttttaaagcaaagtacttagatatataaatttttatgaattttttttcaaatgataaaataaatgagtttacagtcaggagacatacagtatctaacaaacttagggaatatgcttggcttacaagacgtggttttagtccacataaattagaatcacagaactataggctttgagaaattataaaagccttggaaggggtgaacgtgaattagtgcatattgtgtgcaggctttgtgccatacgtgctagatatgggatcccaggaaatggttgcatacaccttgttgggtagatgatattaaccctgttttgcagacagagaaacctgagctttgagaaaatcctttacacaagtcca

SEQ ID NO: 41817 - DNA, 1079 bp, Homo sapiens
tccactgtgtttcatggggaaggcttattgggcatcactactggaaagtaagtgttgattttaatggcaagactagtccaggggtgaattctactcaggtgccattagcaacctcttcatctgtaaatggaagtgtctctgggacctgctcagctctgacctgctttgggtcctttttggacttcttcaggatgagatcacctcaccgtggttcaatgccaactggtttgagttatatcagttattaaaaatgatctaatgttttccttttaaatctgaggccctggctcattctatgattaagccagtgatttatttataatatagtgtgagatggctgcagccactctatgatgtaatctaagaatgacatgaaaacaaaataggtttttacataatgaaagtattcctgtaatacagtttatagcaaggctttttccccccattgagaatggagatatattctttacttttccttctactcctgtttaaatcttcttttaccatttattacacttaaggcctttaagtcaatttttaaaaatcagcatttacaactccacaaagtctctggttactcttttaatcttgtcattttcttcgctcccaatccccactgccaccctccatggcctctgtgtgtagccgctgctcaccccctgctcagcactccagagtcctcaccattcctctgcttatgctgtttcttctgctggaatgctcaccccaatcctaacttttcttctgctaaaggcatacttcactggttcccacaaatagcatccttctgtagcctgctcaaatgcacatcttcctttaagcctcctgtgttgctccttccccttgttagaaacccgttatctgtactcttatggaacttagtgtaatagcaaacccccacccctgctccaagggctattcacagactgtcagagttagggaggagaaatgacttagaggaatggggtaaggggttttgatagttcccggtctgctcctaatagtgagacccgggcagtcagtcatggctcatctttgtggttcagtttttctcagctgaggaatgagtggtttggatt

SEQ ID NO: 41818 - DNA, 5227 bp, Homo sapiens
taataataaaatagatattgaaaatagtgtttttttttttaacagtgaaagtaatatgtactcatgtataggttttcaatatacaggaaactataaaatgaaaaggattgtacctgtaatcccaccccttacagctaactactgtgacattttatttgtagaagtccattttgctatcagacctcaagttttaaaatcttaactcaccctctgtaacctagttctcagctctattttatgtaacgtttttaaaggattcaagatttaaaataaacttatctcaccccaaatgcacttgtatatttttgacaccccctcatctctctctctctcttgtctctctctcttctctgtctctcactctatctcagttctctttctcctcttctttctctctctcctctctcctctctctgtctttctctctctgtctcacacacacacacggggaaaaaaaatcactcgagttaagaatcagtctctcattttacagataggaaaactgaaatctagaacttgtctgaaatcatgttaaaaaaaaaaaagtggtaatctgtgctcgaacccaggtctcctgaattttcgttcagtgctttttccattctacagtgatgcctccttactaggtcatagaaacagtggcagagggagaaaaggaaaaatacgtcagctccaaagagtgcagtttttttttttctgtgtcctttagctgagctatttttgtgactattcagtacatgtacaatgctgcctcttggagtgttccggctagactaagaggccattcactgctgactgcagccatgccatccctccatggaatcctcggcccggaaatcagatgggaacaaactattccaatatacaaatcaaatttcagagtctgagtgtacacagaaaaattactggatatcctgttggactatgtacataacaatgacacagtgatttatgagggtatgatggggcagagggtagcgggtgatgttggagttgattcatcacttaagcgctaatccattcaccagctccagtcagacttcaacacaaatgccaaattattcatcttccctaaatccaaccctattattttctctctcaaaaccttcagttgcttccttttgcatatggaagagagcgtggactcctccatctggcatttaaggctttctatgatctgtcctcccagacattgataggctgtggagatacagtaaggtagttgttatgagccacaccttgcagccaggctgctccagcaccaagcaacactttccccgggaggttgctgcacctccctgctcctcactttcctcatttgtggaataggaatagggtcattgtgagaattaaataagttaatatttgtaaagggtttaacagtgactagctcataatccgtcacgtagaaagttttttcttagctcatttaataagtacctttctaacccatcactgatagcatttttcttttgcaccagacttctttctagtcattgctgggagcgtcctctcattttcctgcctccctgtagctgtcactctcactcctaaactgttggcgttctcattttggcttgcccaaatcttacgcattcttttaagtccatgttcaagtgaatcctcactgattttgttcttcattcatccccttaacagacttttatggagggtctactgtgtgcaaggtgtattatgtaggaagccttccacagttcccagagctaggtgagctctgtcatgtaggcctgtcttgtacatatcaccttcgacattgctgagcagtttgtgttggacatgtttgatctcctcccctagaatataaacagctggagagtaggatgcttattagtaggtgcttattaagctttctttaaaatgagtaagtgcacatgctaccttttatagatctgttaccttctaatgaaggcaagaacaataggaacaaacattagttttgtgtgtgtgtgtgagagagagagagacagagagggagagagaaagagagagagagattttgaatgggaataattatgaggccacatctgagggcaaataaccacttccaagttgaagaaaggcaaggagaagacaggaatgagaggagagctgtagcagtcaaaggaaacgggatgagaatatgttattctctgaatcataaagcatttgctctgagaaatgtttttccttaagtggtataaaatgtaaaatgaattgggtcttagtttttcttttcctctttaggaggttggagctgatttttaaaatgaggtaggggagggaggtggggtttggagaaagaaagtgaaaattgttttctgaaactctgtttgtcaaataactctctggagagaaagttcagagggtgagggcctgccaaagctgaccagcagcacacaggccaaatcgttctttcgtcattgtcctggtcacttccccacccctgttcgccacccccaaacaccttttttcttctctctctctctctctgtgtgtgtctctctctctttcttttctttccttttttttctttttataacatatgaatattataagtaagtagctggagaaaataaaaaagcaaaacaaaacacaaagtaagcagatgatttcaacctgcaattatttgtcaggtcataaaaatgatgtgtcttagatttatttacctgatctcctcatctgttttccactggaagccttctgctcgcgtcacccttcttcatttagttccccaaacttccacccactttctgactcaaagcaggagagaagcattgaacaaaaccactggatttggagaagagagaaaagcagcttttaagaactgactttagaggtttagcacgaattaaattcctggtcttttctttctgcagatttttcagctattgttgttgtttgttttgttttgttttgttttatgtttcttgagtttatcgctaaagatgcttttccgtggatggcacaaaagttcagctatggccatgtgcttactgaaggcctgtatatggaggcatcacagtggctggccttgaagaaattaagatagtgaaagaggacccctgtctgcgaagaaagagctcatgtttgtgtgtgtgctcatgctttgggtgctacaaggagactggtgtctggggaagggaggaagggtgatggttacaggtataggtaaataagttttccaacagttaacaatacttggagacaagctacagagtgatcaatgctagagttaggaacgctgtgagaaggcaaggtgttctgtttgtgccattggggagggctttgctgtggggattgggggaaggatattgttttaggctttgctagatggctaggactttaacaaataagaaagaaagagctgagtctttaagacagagggaatagcagagacatgaaaatatctagagagattgggagtgggaggctgagtctggaggtgagatatctgtatccaatcagagaagtttcctatgccttcctgtaatgttggaggcttcttttttttttggtaatcagtaaggagctgtcatgggctttgtaaaagggctgtgataggattactctggtgtgtgtgtgtgtgtgtgtgtgtgtgtgtgtgtatgtgttttgcttttactttatacatttcagagtctttttaggaactcttaggcaaccttaactctggggagtgtgcattgcctgtctttatatgtctttacttctctgttgctgcctggttctgctccttctcatgcttctgtaacaaagtgcggcaatgcaggcttctagaaggtgatgtgagatctctgagcagaccatgtgtgtgttcttcccatccttttttcccctccctttctcttcctcctcctctttctatatcaccaccctcaccagcagcagcagcagcactcccctccctaaaataaataaaccagtcactccaaaggttccaagcacattagtcacatatcccagaagtttaatacagaattattttgacagcgagaacaagaagtgttttctagttgaacgcacagaacttgcttattccaactgggctttctgccgcacagacagatgatacgttttttagatggattggccgcacagcgcaggagactgtcgcttcccttggatacacagcaaactgctcactaccaaaagtggctggggagaagatgtgaaaggagagagagagagcgcgagagagacagaagagaagaggagaggggaggggaggggaggagaggagagacggggaagacagagagagagagagagagagaaaggaaatcaagttcttattatgtacataactttctcattaatggcttccataagtcactgagagatttctttgtgtttatttatttatttggctgctttggagccatgagtccttttttaaacccgggtttatgtctgttctaaaaaatgaggacagatcgagttattgccatgcgggtggctctccaagcattccagttgcatagctcttccagaaatatttcttgacgcacttatttagcactttctattgccgttactgagcagattacagaatcctcccggccctttcaccaaacccgtctagagctggtatggatctacttgtgcctatctggcagatagaaagatagaggaatgggaaggtgaagtccattgttactcatgaaggattttgaccagtaacctcagaagagtcagaagaagagaaaaagcatgtgctctcctctttcctgctttgcttttctgcttccaagtccctcctccaagcaggaagatctttcctgagcagcagcgtacctgggtgtgagaacccagagggagtgtggtggagagacgtgaaggggtcagttcctggaacattctgttccctctagctcccatgatcattgacttcttgcctctcaagtccttctagggatctccaggcttttgagaggctcagctgacctcgctcactgctgtgcatgctctctggagctttcttgtcctcttttggttgtttcttactagcccctcattcccaggactttttctgaggaatctctgttagttcaggtaataactggctgtgaaacctacaatagtaagttctttggatgtcggtgttttcagatgtttcttcttcatggaaactctttataaatccctcacaaaatgggatgtcaaatctcaatatgtaaaataatcaaagtgcagttaaatggtggtgctgttgttaaaaggtggaaga

SEQ ID NO: 41819 - DNA, 1079 bp, Homo sapiens
cgcaggaaagaggtggtatgagattgcctgagaataggcaaaagagaacttttcagagtgacaaaagtattctgcatctttgataggagcacggattacttagatgctttcctttttctcaactggcctaagtttctttttctttctaatgcttgtataagaacaaccttcgttcccaaacacacagacgtgtgtgtgtggacacacacacacacacaaacaattcttcagaaagaaagcctcttacgtgtgttaaacttgccacttttttctcaaaatgtgctttgtatttctttgggtgagcaaaagaagaatcttcctcttctcaagttcagagtttgaatcaattcttcctgtcttttgcatttcagtaaatgtttcctagatggattcatcggttttccagtaaagacaaacagctcagaagccagattacattcatacccaaggcctgagttctgtgacccaggcatcagagctcagtgccatatatggcgaaaagaggaacaggagcaggagtggagggagaatgccagacatgcaatgcattcctcagaaatgtgcattcataactggcaaaacaggacccttgctggtttccatcttatgcagaacatgaactgtgaagttttgagaaagaagctaatgttccaagcatctgccacagggaacagtttattttcccttttctttttggtcacatgtcggtttaatttggagtcagtgtttaagtcaatgctggcatggggtgaagactaagaaattgttcttgcagtcagcagacatgggttctcagcccaactccactgccacccagctgcaaaactctccttggcttgtttttaatcaatggcaaagtagcagggttgaatttgatgatcttcgagatttctactatttctgttttctttggttctaattttgcccgagattttccagttcctgtggaattccccagtgaaagcattttctaattcttccaaatactttttgtggcttgaacttaaaaagacaaaaacaaaaatcccagtcttgaatttttctttgtgatttcctgaagtatgttttggatgcattat

SEQ ID NO: 41820 - DNA, 1487 bp, Homo sapiens
gtttctatatatgtgaagcgttagagagaggtggtaaattgtttctctcccgtgggttgtgcacatctctgatattatggtaatccccatatcttctccttttgcagggtggggtgtcttggatagtatggttactgaatgtagaatctactaactcctcttttttatttcctgagactgggtctcactgtgctgtccagggtggagtgcagtggtgtgatcatggctcactgcagtcttgaactcctgggctcaatcctgagtagctgggattacaggtatgtgccatcatgccagctaattagaaaagtttttctttgttgagatggggtctcactatgttgcctaggctggctttgaattcctaagctcaagtggtcagcctgactcgacctcccaaagtgctgggattacaggcatgagccactgtttctggcctcctttttaatattctgccctgtgcaaagcaccagcaccaacagcctccctcccacaacccccaacagctgtgcattaagtatcactttggtttgaggatttcctagcttgctgtttatcctgggagaatttctgagtttcttggtctttgtttctttacccaaaagttggggatagttcagctttgtctgcattgtggacactacctccagaaagcaatgggaagaccctttgtaagctgtaccgaactctttgtatttttggagcacattttgtcttttttctcccttcttctggtggctgaggtacctctttggtcttgaaaagacccacttatatggaggcggaaatgggcttatagagggaagtgactttccaagggccctggaatgaattggattctgagatctgtgcccgtccttgtcacaacgtgtcagattccattatttagtgtgggcctgatttgtccatgcctgggactttcccagaggaagtcatactttctggaaactctctgaggtcttgaaggggtgggagaagtctctgacacaagtgctgctgtggtcatggaggcttccattcctctctccttgtgttgagcagggaattgctccttggatattttaggtttgagtgactcaacatgcttatgacccagaggatgctgtggtgtgtttggcagcatgctggaattagtcagaaggcaaaactgcttgtcctgaccccagaacccacttactctaggtggatgagaaagtcctctcggatcctctatttcctaattcatggcaacttctggagaacagtattttctctgttactgctttatggggtttagtgtggaaattaaagaagagaacttcttattttttgtaaataataatacaatattcagatactgttagtttctgaaatttaaaatgggcatctcacttctgtgttccctccccaaataaatgtattgatactaaaaaggaaagccagctaactttatgaggatggctggtaaatgagccattctgtttttgcttgctgtccaaggcctctaa

SEQ ID NO: 41821 - DNA, 1076 bp, Homo sapiens
tgcagttttgtgtactgtttagggacagatgccgaagccacattgcttgggtttggatccatcctaccacataatatcatgtgaccttggacaaacaacttcacttctagtgctgtactttcttcatctataaaatgggcttacatcatagggtccttgtgaggattaacaaagttagaatgcgtagagcatgtagaacaatgcttggcacacagcatgccgtgcttcagtggtagcacttactattccattatactacagccaccgagaaggacaggtacacagtgaatagtttaggactgttcatgttcccggcctcttcactccaagagcatcagcaagtttagtttagaacataggagttgtatttacacagctactaatgaccttggaaaagttcttggcttctctgtccttgacctttgtttatctgaacgagtaaacttcagatgacagagtgtgtggggaatggaatgcatccgcatccttgataagctgccctagtggaatgttgccatgtggctactgagggtcaattcactggtcaaaggtggcctgctggttggtattttttctgtgtcttccgggcaagttctgtctttcctcagtctgcacatgcctgggtctgtcctcagagctctctcccatttccctcttctctagaaagcattgatataatggggccacctcttccttggactgtttctgtagcatcagaaggaggtgggtgggaatttggcataccactttttgaaaggtaatacattctaacatatgtatttcacccaccttcaaagagtaagaatacactgaatgatacttaattttaaagatgtgttgctgaggtgaactctaagacgaacaattcttcagaatcttttactttcttgggcttcttgtcccaaacaacaattatctttataaagcctgtgtgtgtatgtgtgcgtgtgtgtttgtgaaacttcctggaattggtagtgttgattttgagatgtttctttggcttattcaaaatataaacagaaaggctaaagtgtttttcatgtcattaagaatgtctttataagaaaggacat

SEQ ID NO: 41822 - DNA, 4718 bp, Homo sapiens
ggcaggagaatggcttgaacccgggaggtggaggttgcagtgagccgagatctgccctccagcctgggtgacagagccaaactctgtcaaaaaaaaaaaaaaaaaaaaaaaaaaagccagttatgaaagaccacatattatatgattccatttatgtgaaaagcccacaataggcaaatctatagagtctgtagcgatagaaagtagtggttgccggcagggttggggtagaggataggtagtgattgctaataactgtgagtttctttttgggatgctgaaaatgctctttatatggtggtgatgattgcacaacactgtgaaatactaaaaacagaaccgtaaactttaaatgggtgaattgtatgtaaattatatctcaataaacctgttttaaaaagtggatttccctttaatctattctctgaggattgcttcagggattcaaaatagtgcatagtgccaagttttaaactcatattgatttgtttttggtaaataagtcatgcatgcttaacaatggtgaacacacttaaggaaaaagtggtaacacaactagagccaccaaaccgaagcaagtatatttccacctaacttcatgcacgtttttttctcagaagctttaaaaatttatactttctcaaatgttgattaatgagatatctgataagaaataacagggtactgacagtcctgattgtataaataggcattagggattgtgttcatggtttgcttgtcagcacaagagaaatgtgtgattatgttgaatgatagttaattttcttatccacccattttaaaaataaagatgtacagctagaaaacaggtgcccagggaatagaggagacctgcagctttgataatgagccccagaaagaaactagaaggaacaagctcccgcttaggaggtgccgttcgagtcctggccagtgtctgactgtagctgatgggtttagagaactgtggctggcttctcacaaaggattttttcatttactcttgttttgtgtttgagtatagacagcttttcccatcctccatcagggtcattgtcccaccttctctgactcacttattgtgtcaacagaattaaaagagcagccggtggacgtgtgtagaggctgaaggagagctgtgttgctagctttgtatttgaacggttcgtacacaaacagttctctttgattaagtatccggtgaaaccaattcacatgaactccaattaaactttaatgaacaagtgggtgtattaatatcagctgagtaatgcaggcagcacagattccagtaagtgactcacttctctgagcagctcattccccatgcacggttagagttactagaaagcttccagctatatttgagtggatctggtctgggccttgtaattctaacaatcctcagggctcgctattcatctagtgacaaaaccacagtcatccagacctctgttttcagagcaaagattggggatgaagagttttgttcacattgagcaattaggcccttcgttgagcagtgaccatttggacttttattttcctcatcttcccatttttgtttttttgttattttattttttagagacagggtctcactctgtagcccaggctggagtgcagtggtgtgatcacagctcactgcagcctcagcctcttgggctcaagcaatcctcccgcctcagcctcccgagtaacctggaacaacaggcatgcaccactgtgcccacctacaaaatttctgtagagatggggtcttgctatgtcgcccagcttggtgttgaactcctgagctgaagtgagcctcagcctcccaaagcgcttggattatagatatgagccccgtgcccagcctttattttgtttttaagtgagaattatttttttcttaaacccaggggcagtgtaggtgaaggttaaggcagtgaagatagaacagtcagttttgaaatgcacatagccttcctgagcctcactttcaccacatctgccagtctgcctcaagtctttaagtttccctacaccagaggcagcaaggtgtgcctggaatgatgaattcctttgagcacagaccctgttccatctagagactgatgactgtacctatttcctaggaaaggttaagcaagatcgtgaatataatgctcttcgtttcatgccggcacataataagttcccactaaatgtttaacttggtccactgggggaaggatgagaaggaggatttggagataaatgagacttggcccttgacaattcaggagcttggagtcttatagagatttgacttaaaaatgtctgtgtaactccagagtgataaagacaaaaatgcttgaaaaagataagtgaggattcgggggatggaggaatcccagaggttggccccgtctgagaaggctggaggttagggtaggaagaggtaagggtttgggaaggtagttctaggctgactgaagagtgtgagcaaaagcagaggcagggatgtatccaggtatcagatagtgcacatttagtgtggttacagtaggtgataatttaggaggctgattgaaactgaatttagcctctgccttagtcaccaagtcctttcccagctccacttgctgttctctctctcattctctcctacctatattgaaaccagttgaaaataatggagtcacacagaggcagatggcaataatgtccaggttgtggaacattagctcattgggcttgctaatgcagcacccatgaatgaaatttaccctcttcctctcagatagctcctgcactcaataactcccatttagggcacactgtgcataaagctcccaaccatgaagagcagggaggatctgcctctaacagtcaggtaactcacaaagactggaaggaagtgactgggttacacatggccagtttcttctccaaactcaataattgggtaactctctgcctcctcatctgagaacaagggagtgggagggaggcaaacaagaaaagagaagaagcagtggagaaaggagacgttctgcagtgccaggcttcttgccccacactcttcccaaatgtcaacatagttcctttaggggaaaaaagtgggaggctagaatggtaggacagggccacaatatggaagtgaaaaaccaggggcagtttcctgagcagggaatgatgtcattcgatctataattcagtctggttaatctacttatgcaacaccaattgaaggacacacttagataactcagccttgagtcaacaaatcttgtgtaacactgccaaggtccatagtgcaagaatcagcccccacttcggaaataacaaccacccctcagtgccaaattttggacattgcttgtaaatttcagactccttccctccaagatactgttttagagaatgtcgtagggtaaaaaattccaaggggtaaagacataaattccgtaatactacaatagatgggaggctctaatcaagtagataaattctatttttggaattgtgaataaagcagaaaagattcttggaaatcaggaattgaatagattgatggtacaaatgagagactatatgttgcttaaagaaaacaaaagattgcctatcaggttttaaaatgtgagtcagtagtttatatagtgattcaagctgaacagctatcttggttattaactaaaatcttttctttccccttccattttatatatgaagaaactattaatacaaaagtcattatcaaaggacactggggctaggtttcattacccagcttaatccttaatttcatattgagcatttcatattgaagtgaaacaataaggatatgtttctagagactgatgagacaactgaattggacttggttttgacattcaaagggatcaggtagaggtacttagttgagctcactacttcattttggcaaaagacatatgtcatagaaatgtagtagccatgatggattatgtatctttgaattgggagcctatgacaaattttctccaatgggaagtttcttcagagcctatcattgtttcaacaataattaaagtaatttacagagaatgtgctcatctacttttacctactgttatcttttttccaagttaataaactgaatatattgtatagattggttgatagccttcctgaaatgaacatcctttgcaaacctatctctccaaacccaaatcctgcccaaatttcccaattgtggtagcaagcccaatgagctcctgatacgatcctaataggatcctcttctctggaaatcctcgacagatcacacttctcttttcttgggaacagctttctgtttccttgtccagaatggatgccgttctgttatcctggtcactctctgggccccctccctttgtccaccatgagcacaggctactggccactgatcctcctgggggcactagcctggctaccccattgcttattttacctttgcttctcttaaataccattgttggtgattgctccacacagcaattgttctcacctaagtctgtggataagactcacttagggaggttttaccagaattcagctcatctccctaaatgtttgggtctggactagggcacacacttctcgtgaggcgcttctcatgagtaccccttctcaaactttacgggtatcaatttacttatggcctgcagtgcataaagtgaaagctttctgaaaagacatttaatccatcggtatgaggatgaaaaagacac

SEQ ID NO: 41823 - DNA, 589 bp, Homo sapiens
aaaagattagcccaatctatttctagctacttgggaggttgaggcaggaggatcacttgagcctagaagtttgaggttacagtgtgctatgatcatgctacttcactccagcctgggtgactgaccaagaccctactggaagaaaaaaaaaataagaattgctcaagaaaaaatacagttgagtagaattagaatgctagcagtgttgcaatagcagagatcacatgatgcccatgatgtttgtgaccttggacactttaggctaaattttgcacagaagcccaagtccaggatagaaatgataacgatgaacctgctgtagtgcagggaaagatgcagagctggggggaagcccaaacccctactgatggccactttttcttctgacctcttcctatgtctcatttaaaaaccagtagctttacttcgaaaactcaattttcagatgagaatcaaaacaaaaatgcaaagaaggcaaatgattcataaaagttgctgagtgaattagaactataatgtgggacaaacactccgcctttctgtctctgcagctagtggtatttccaggttcccagggaacctcctgtcc

SEQ ID NO: 41824 - DNA, 2333 bp, Homo sapiens
gtctgtaatagaaaccataccctttttcttttctttctttcttttttttttgagatggagttttgctcttattgctcaggctggagtgcaccggcatgaccttggctcactgcaacctctgcctcctgggttcaagcgattctcctgcttcagcctctgtagtagctgggattacaggcatgagccaccacgcccagctaattttttgtatttttagtagagacaaggtttcaccatgttggccaggctggtctcaaactcctgacctcaggtgatccacctgcctcagcctcccaaattgctgggattacaggcatgagccaccgtgcgtggctgaaaccatacccttttaacaggactataccagtgtactgttcaatatacagaaatactatcacccatctgattaataatccttatcacagcccaatgagacaggcacagatgttctgcttttcaagattctatttcctaacttcatcttgacagttgtaagtctcttgcttctcaaagtttggtctgaggaccggaagcatcagcattacatgggagcttgttagaaatgcaaatctcagatcatactctagaacttctgaatgagaatctctactttaacaagagccccaggtagttcatatgctcattagtgtttgagaaacattcacttcggccctcgccctatttcaaggctattgctgtggtgtgctgacaatgcctggcatgctgccagcattcttggggcatgctgtaccatgccttgagatagcggggtccggggggcggggatgctgtgaagtcactccttgggaataatggaagactgggttgaagggatccagcaggctttatctttttaacacccttcatttccttagaagttactattcagaaggggtcaaactgggattggattctaagtctttctgatccaaagtccatgttcttttcattaaaccacgatgtctcagtcaagaggaatgctgggttgtgggtgataactgttcattccctgtagtgtgaatatttccacactggctgctttaccctattactcaattcctagaggggaagaatttttttaaaaaaatttaaaaagcctgagttgaaagccaggatcctgcagcttaatcagttatttttgctttttaatgagggtgactattgtgaaataagtaattattaattactcaaaactaatgaaatattttagtttccttgctcaaaaagcatatggatgctaaaagaaagcatatgggtgctttctgggaagcatattggtgaatggacaaattacagtggtgccaatatgcctttgctgtctggctggggccatcaaaacgtgtgctggcatctgagtcctcgtgtgtttaaagggattttttaaaattcccatttgataagtgcctggggttgcctctggagttacacagcgctgtctcatcaatctttctgccatgctttcactcagacattactggctgagtataaactcggtataaacctttgctgtaagtagcttctgtggctctttctttccagatgcctcctatcctctgcaataggttcagtgggcctgccccatggatggcacgtatggagactttgtctatacaacattttaccacagtggtaaaagcagtagccgaaaaggtggcagcactgagacctgtttgctccatcagggactctgtctgaggccctcggccagctgttgaattgctgcactgcaaatttcttacttgtaaaactggaatgataataccagtgctcctgagctcacaagcatgctgttcatccaatttgcagtccatgccctttgctcttcctctcctttccttcatgcctcttctcctttgctgcacgttcagctggtctagtaaaaagcttgatggatttggaggtggctgaaaccattttgcttgctctggggattgcacacttctgagcttgtcagaggcaggcaacatggcatgttttagaagatacttggctgagtgtccacgaactgtggctctcagaccaacgtgacttagtaatcatttactcaacacctacaagcaaggtagcttgctaagaaattgaaggagggagctggcgggtctgtggaggtgagtttgattcagggccagtcaagacttggtgtgatgtgtgagctcagtaattatactttgagagagacagaatttggagaactctttcctattggaggtttcttatagaactagggacaagagctggctttgaaagattattaattggactttgataagatattacaaggatttgaagagtaagtctctgtcaggcaaaaaccagcttgcagtgggactcgg

SEQ ID NO: 41825 - DNA, 485 bp, Homo sapiens
ccgcttcctttctggaattttctttcctggccattagcctctctctcctacaccgttgccttactctcactgccatactcctttggacatcctccttctcttgtttcctgatacttttacatccccttccatcctttactccttagcttttgtttttatttgcagtgttaaagatagcctctttttatttccctgtagtgattagatcgacgtgtttacaatatgaacacacacgttttctcttcttcaggctctgagtcatcgagttcacaatgccatgtctagtcagtacttctatgtgtgtatagtgcccattgtggccgagtagagataaggtcactgcggaagaaaataaatcgctaaaatctgttagaatacgtcagcttccaggtttgtctgaggatgcagtggaaaccacgttctgtggccagcatgtcagtagcttttgatgatcagagccttccattttgatactttaaaataat

SEQ ID NO: 41826 - DNA, 1738 bp, Homo sapiens
agaagaaacctgctaaggagcccgtttttttgccagcactgcacactccacagactagccataacattgtggatcataagaagttgtgggaggagattttgaaggtcatcattagttgcttattattttaaatctgcagaaactgaggtccagagagaattcacattttcttggttactttgccacgtggaacaattgttatcaaatgtgacctggaatgcaaggttggggccatttatcttctgtgctaattttcagtgccatggttgcgaactttcttggcagagaaattgtttacttctgtgccctattccattgccttttacctaccccatctagttataatctagcaatagagttataagcttgtgtaatcaaactttcccactgcagatgctctttggagacagaatatttgggtttaaacccagcctctgatatgttctagctgctctattacattggataagtttctttagcttctctaaatctcggtatttgaatactcaaattagaagacgtaaattatttcctaagatttctcctagctggggttctctatgaccttttagctcttaagtagtctgtcctggctattgtcaaccatgtctttttttccttgactgatagaaactgtggcaaactaaaggccacttagtcagtatttgttccgtccttaaccttctctcctgagagtcctgatctttcagtgctgttgtttccctgtcagggttgattgtttccttttcgagtgccgttctgaatctgaagtgaaagtgcagcgtggaggcatgtcactgttgtgtctcacttctttttcttttttttttttgagatggagtttcaccctgtctcccaggctggagtgcagtggcgcgatctcggctcactgcaacctctgcctcctgggttcaagtgattctcctgccttagcctcccaagtagctgggactacaggtgtgcacctctgtgctcggctaatttttgtatttgtagttgagaaggggtttcaacatgttggccatgctgatcttgaactcctgacctcaaacgatctgccttcctcggcctcccaaagtgctgggattacaggtctgagccactgggcccggccgtgtctcacttctttatctgagacaatgtttactggtctagacctgatgcttctctcccttgctgcttcgtagtttatttggatcctgaaatgccgctgagtttttcttgtcacctgcagcattgccaagaacaaggagtgcaccattagtgttaatttattttttctggtactctgtgcaaggcagatgggcatttaatgtgctgattccaaccctaccttccctcatctacactccctggtctcataggagttaaaacatagttttgtaagaaaccttagctccttgaacttgtggacttgtgggagaatcatggaaacatgagagttagagggaatggtagtggatatctaatctttagtgtacagataggaagggtcactgaggttcaaagaggttaagaacgaaagtcatagacccaattagtgactgagctagatagaaagtacgcccaagtcctctgcatctaagtctagtgccttttccagtttttccaaatgtctctcagatagcctatataaaggtttggcatttctgtagcgttgttctctcgttacctcttctgagcaatgccagctgtccatgcagagagtggggcacttagccagtgctgggccaaagct

SEQ ID NO: 41827 - DNA, 1314 bp, Homo sapiens
gacctctttattctgttctaattcctgtctaatatgattattctgtcagtttataacattgtgccgtgtcagttaagccaaggaagtgccagtaagacctgaagaaggaactcaagtgattggatgggtctgtttataagaagaagcataatattggagactcaagtgccaggaaggggactgtcaccatgtccttggcaaatggacctgggacaaattctctttaggatgagacataaggagatccttgaatgccaaagctgagctcgctgaacttgaaactcagtgaactggaactactgctggaggaataaaagggagcaataaatcctttgcactccagaatgaaagaccttctgaggcagctggccaaatgaagcaggaggagggaacaagttcctcactcagctaaattatgtctttgggctggccgacctggtctgctaaaataacaaggtggctgaacttctgctcagaacacgtcaccaaattttgcaatttgggactgtcttctatcccatgacttcctaatctgaggaagtgaagaaagcagagtgaatgaaacccaaggattgacttttttatggagggcctccttagagacaaaagttgatttttcaagagaaccctttatattgtgaactctgtattctaattcaaaaaccgttaagttcttggatgaagaacatccaatagattttggaggtcttgtaaactttgctattgatctgggacttaacctttgcagatgtgggactgtgtgtttatacatcaaagtgggtaaagaagagcccatccagagctaggcagacggaattgggatatgtttgtttgtctgattgcccggttgtggtggttgtggtggtggcggttgttttgacttggttacatcatcgcatttttgaggacaaaactaccctctttgattggtatgttacaatagcttgtttatgtcttgcaaattgttcgagaacagtttgtccattaaagaaaaaagtgacctagtaatactcccctacccaggggaatgtcgggttaatcagttgcacaagggcttgatatgccaagtcagtactaccccgaggctccgtatgcagttcctttccaagatttttaaacattctggggagaacacaatatttgtttatttggcttctaggactttgttttgttatcgttttagttacggtcttatgcttttctctcactccctgtctttcttttacccctaactctttggagccctggtgtgctaagagccatgttaacagtaaagcatctattcaataaacacttaactatattttatatttg

SEQ ID NO: 41828 - DNA, 1059 bp, Homo sapiens
atgtaaacacaatgtaatttttgtattattagcctcttaggttttactaaattaagacagttttatattcctaagttatcagggaaagcttttctaattaatcacaaaaggaagctcaagcttgggtagggtctgggaacctctttgttttccatatgggatcagtggtaagacattccttgagctctgtgaagcacagttgaaaaaaataggattatgtggttactttctcaggtctgtaattgagcagtcacattcaaattccggctttttgaactcacaatctataatgtgtcagtatggttgtctacctcagagattctgaaggttgttgaagattagttcatggtcatgtatgttttgagtatgacgctgggcattggatctaattctagtatataaacatccaagggtggagactgtttcttaattaaatagaccattccccttggccttttgtttcctttaatatcctggataagattttcctatgtaacagtttttacttgatgattaagtttctgatttttttttcatagcacaggacttttcagttagtcctgctcccctaccttgaaaccgaaatgaatactgaacaaataaatcgttaacgtattaggcaagatatgtttattttcatcccgtttcacaatcattaaggccatagttagttcaggcaaagatcatctatggacactaaaaccactgggtgggtgaaaggtttttgactagtagaatactcacagtgccccaaaatatcacctcacagattatttttaatttaaaaatcatgcagtcatgcttaaaatggtgaaatctggtacacactaccttaatcgagtcatcaaactcagcatcaccaagcatgggccaaactgacccttgagcttcctgatgggatgcagcagaagggatgtggcctcacgcatgtgatattcctgcctgacttatttaatctgaatccagtcatcaagaaaaaccagattggttggactttttataagacacctgaccagaattattttaaaagttggctttataaaaatcaaaaatcagcta

SEQ ID NO: 41829 - DNA, 403 bp, Homo sapiens
gggggtagtgggagactaaaaataaacttatgataattcacatacacttaacctttactgactaataccaaaaagggaatgaagcaggctctgctgaccagcacttgcagatggattccaggaacgtggctagagctgccaaagccatcgctgaatcctgccaaaagcatcccaggggattttactaagggtggggagagcagggaacatggaggtgtgtgtgtgaatttgttttaaaactctcttactcaacactgagcagtgggaagaacactgggaaaaaaggtcggaaagtgacattctagactgggttccacccaatctctatgacactggaaaagtaatgtgtcctctttggaacttcaggtatcatgtgaacaataagggtgtcatattaaggtct

SEQ ID NO: 41830 - DNA, 2481 bp, Homo sapiens
tcatttctgctgcggtacgtgatttcagatcagcatcatctttcatggaccattggtgatatccccctaacgggtttccttgtatccatttccccaccatcgccccaatctatccaccaaggctttcctaaaatgcaagtctgactgtattactttcctgtctaatatgttatctccttattcctgtagtataagacagtgattaggaaaacaggctctgaagtcaaatagaaatgagtttgaatctcatataactatgtgatcttggacaaaataaccttttttggtttgttttccacgtgcgaaataggaacagtaattgaacttttctttttagatgttgcatacctctctggtatacatgaagaagatgtgtagtatctcattcccaccccgcttatgcaccatgctatagtcacacactgcctttgctctgatccccagagacattgagccaccactggagagtcacatgatattgtttttagcctggaacattgttcactacctcagtcttttattgccttgtctcaacatagacgccatttcccttaagacattttcagcacactcctctggtataatttagtttaaatgtccttgctgtgttctcctgtgtttttctccttgaacttcctaatccttacaccttccaccctgcaaatgatcattatctcactgcctctcccaaatgataacctctttccacccattttaagttccatgaggacgatgaccattgacccggaccgcgttgttaaacttcttagtctcagctgccaagagcttagcacagtgtctagcagagatcggacactcagtaaatatttgatgaatgtttatagtgtgactgtctcgccagtgcacatacaacaaagtgatcccatctttccttctgtatcataaaatagaattttcttacctctgtaatttctccctaggaaccagactgcttctagagagcttcttcacaaaatcaaattaattggtattttacaaggagggaaagccccaggacaagtcccttctcttgaccacaaagttctgtgtttctcatctttcctcttgatgtcttggtttcagcaaagcaacatttctatccctgccccctgctcccccataatcctacaaatgtactatagatatgtgtaagtactacatccccaatcaagtacagcgtttggcctcgggtgggagtcaaacagcaagctgatttttaacattacttggaagaaattttctaggtatataactgacaaacattcatggagagctacttcatttttctgtcaagcttttgggggattttttttaatagttctgcactttgaaagaaagttcacaatttttaaaaggaaatgtggcccttttcattagctccttttacctcatgctgagtcatggatgagagagaatttgtaggcgggtgagctgcaggaaaagtaatactgtcatttacacttgcaggctgttatgctttccagaaaactttttccgtaggttgcgaaagtgattaatctgctgttaaaactgacaaagaaggttctctgataagagaaagaattaaatgaggaatttttctttaaaaagtaagcgcttctttcccattttagattagaaaaataagtttaaatgtttcttttaattttagtcgtgtgtgtgtgtgtgtgtgtgtgtgtgtgtgtgtgaagttggccatgacttaatacaatctcaagccattttctatttaaattatgtttttttacttattggcatggcttattcctcatgctgtatatctaaattattcatttctacatcctgttcccttgcttgtctctctttcttcttctttttttttcctttcattttctttatttgggtcttttcaatactttcaacatcatcttacttcggagccccagatctcttcttttctaccaaccttttttgaaacattaaaactggtgaagatggcctgagttctctctgtgatataaatttatccctccctgaaaaattccattcatgtaacatttttataacactttttaaaactaggatgaaagttttttcatgtagttgaaatgaagcatcactgcctaaagcgtttagaaatttttttactgttggttttaagaaattactctaggatttccactgaggactggcaagtattggtgaagtttgatctctcagagctcatgtttcagatggcaacttaaagggacaaataaataagtcaatcacacggcataatctaactttaatatgattctgcagagaaccagtgactcatttagagaaatcagagtcctcagaaaggtggaaaacatgttagaacttattaagcttgttgcctttagcatgtcaatgccttgtttttataagaagattcaatgggttgttaaaatgcactgtcttaaccctctcccctttgtatttttctactcttaagatgcatcattttatgttgggatctatcagtttattttactt

SEQ ID NO: 41831 - DNA, 831 bp, Homo sapiens
gacctccttagctccattgttctgcatcagcacaatatgtcctagtgagaaggaaagacatagcaaaactaaaaatgacctgtttttcaagagcaatgtcttttcacccaaacttgtgaactgcttgccaaaagtcaggactaacattgttttgtacatttgcattaaaagaaattatatcaccgttgaagagctgatcagagaaagggtataggaaaaaggaaatgttaaaataagctgtaaaatccagcccatttatatctggagtttagaggcagtctaacaaaatgaatgttccatttactaatcacatttgccatttattcaaaacaaacacggcttgagagaggattaaataaacatccaaaaactgtcgttcttgaaacctttggatagaacattgagttgcattcctgcaggagaaatgccaagtgagtgagcctagtccaagtttgtttagaaagccatatttgggagaaccatggaagtgcgaacctgatcatgtgaaaagcccaggactgttcagccttctgtggcagttctgtgagttctagtaccagactattaatagggagtcaagtagaaatatccttccttcccctccctccctccttcccttcccttccttccttttccctttccctttccctttccctttccctttcccttcccttcccttctccttctccttctccttccttccttttccttccttccttccttccttccttccttctctctctttctctcttctttggtgtgctgagaataatctgcagacagtgactctacagataagattgcaaatattttcccttccttcattccttc

SEQ ID NO: 41832 - DNA, 1696 bp, Homo sapiens
agaaattactgacttttcaatccaatggtaacacagattgtgtgatttttaggaggaagagcctttcttttccatctcttgcgtttattagcatatgtgtcagtgcacacacatctacaccgtgcagctctcaccttgtacttttccagtctgaattcgttttgtaggctgtccctgccctgactatcccaggtgcctatcagggctgtgtcttggtcaggctaaggccaagcaacaggcaccagcatttgttatggttaccttggcaagtgaatggggtttgagggaagctggagagcaggcatttcaggagtagaactaggccagtctgtttttgtaaaaagttgatattcaccctaattgtagctcatgttggcaagcggagtaaacacccatgcaaattactaagttgtactgaatgtccaaggatgtcaataatcatcttgaaatccaaataaatatattttttactgaaacggaagccaggcaccacatgcagtttctctctgtcactggagacagatttggcacatatgcatgagacagagaagggcaactcttcaggccctaatgcacacaggaaactagggatgtgtatatcatacttggcagcaaaatagaggtggggcagccatcactttctgttctcaagcacctctcttttttcctatattttaaaacaggatgaccacaaagaagaataaggtatacagtagcataggatcctaaattaaagcatgagggaaagctagcattagtttttcatctaaagtccatttgggtaggaatgagtcagtgcaaaactgtacaaaggtgatcttaagtcacatgttatgttaccgactctgtggcaatggctgtgagtagtccaggaactctccaaggcctatttttaaattcacttagaccaagcataatgaggtaaagggatgtctatacacattctcaagtttagttctctgaccgtgagtcagactgtgggccatggacctgggcgtctcagtggtagcaggactcattttttccccttttctttctcataaatgacttaggagacacattggagaaccctatgtgctccttttactggaattatcttttaaggaagtactgatttcacctcctgtacatggtttgctgagatggcctattggggtttcccaccagtccacaactggaagtttctatttgcacattttgactgctagttctatatttagtcaaaagcctgccttttgcctggtttcttagggaaatagtctgtaggagttgctgtgtccatttgccttgttcacttgggtatttatttgactgtataccctgattatttcctaaattaacaaaaaggcacagggccccaaatgaaggaagaccccttgtaatttgttaaaaaataagtttatgaaaatgtgtcgtcaggaaatcagagttgtgttgcggggtggggagcatgatatacatttgtgtttgtatgtttctaattgtctacagatttatggcctactgtaacaaagccattgtaagtgtacagtgggagggtcaagaaaccttattctatggattcaaacacattatgcatacaatttacacgtaggcacaaaaatatcccttcaaagaccctccaataagctatggtatagttgaggaaacactagacttgaagtcgggaaaccggagtgttgtcattttaatctca

SEQ ID NO: 41833 - DNA, 761 bp, Homo sapiens
aacaagagaactttgtgttatttttcatattcgaactctttgtgctgaagattctgcagtcaaactgcaagacacatacgcattggctgatcagaaatgacataaccattcttactgcactgagttgatattcagtcaataaacagtctaatctcggttaaatgtttgcatatttttagacttttaaaaatttgaaatcagcctctcaagttccattagacagttttatcacggacacatcaagttccatgtacaacaggctgagaaccattaagctacaaaatttctaaaattttctccaggttctcagttgctaaattctctcttgaacatttttggggataaaaaactggcagagaaaaagaagaaagtacacctttttacattatgaaacacctatgttcaccttatccatggagttatgccagtgacctaatgcctattaagttcttccatgttccaaaggtctttctgtacttgaaaactcataggtgagtcaggtccttcactgatagcttatagctaaaaaccacttgggagaggggctgtccaggtcttatgtcaaaactttgtcccatacgctgttagtgttagaaatggagccgtcagcaaatagaatctgttgtttcatttaattacttttcaatatgccattaccagaaatttttatgtaaatacatattttattccctgaggcttgtcaatctgagaccaaaattatacaacactgaaaaaaaaaaaaacaaaattttctttttact

SEQ ID NO: 41834 - DNA, 1056 bp, Homo sapiens
cagatgagtaatataattaggtttgtattttatgaagggcaacatctaaatatggcttgtctattcagcaagcacttattaagtgccttttgcatggtagacaacatgcttgatgctgaagatacaagaaaaaatttaaaatggtccttgccctcaaggagctcacagtctattgagttacctttctgactttcccactagattgtgagctcctggagggcaggcactttcgttcatctgaaaaagagcttaaatttcagtgttaatcctagattacaatcccgcctctattattttaactttgttcacatctgttaactgctctgaaaatcagagctaatactgcctacctcatcagggaaagattaaacgagaaaagaatgagatgtgattgacacagcaggagctctgtgtatgctatttcctcctctatctctgtgcctggtacatggtaaacattcaggacacttctgctgcctgcttggctggagagcctgtctatgcagcctcagtgttgggaggatttgagcctggggtcggcctggcacccagctatggtagttagcaaatctatcctcagctcagtcagtgatcaaatcactggctctaggctgtaaactaacagggccagaattgggttctggactctgaagcccaggcatgcatattgcaaaagtcagaatcgaagtcataggaaaatgatgaaatttcctttctggccagaatgctattatttcaccaagggcaacaaatcttcttggcaggaaaagttgacttgcttgtgctttgtgtaatcaattgtatttgcaagtgatggagtccttctcacagtggcttagaggaggtgttaaccactattctactctctacttccatgagatcaacttttttagattccacacttgagtgagatcatgcaatatttatctttctgtgcctggcttatttcactcaacataatgtcctccaggtttgtttgacatttcattgttttcggagaattttcacagttcattatctcacttcacagttcctaatagtctctctgaggtccat

SEQ ID NO: 41835 - DNA, 802 bp, Homo sapiens
gtggatagtggttaaaaacatgcactccagagccaggatgcacttcttaccagcaagatgaaatcaagaggcaaaggactagtgaaaagaactgtcctttattgttccgtgctttaaacatttctcaagcaccttctctgtgcctgctactgtgctgggtgttcaggacacccaaatgcagaggctctgccctcatggggctcacgggttcctaggaaggacaagagagtcacagatgtcaaggattttagtgcagatattagcactgtgttgggtgtgactgagctgctatgtgagagtccataagtctgcctgaggatgagcggaaagaatacatagcagtgtgtttgcatcagcagggcctgacccaagagcgataaagtcttctcttcctttctgtcagagttttacctttggcctattctggactgcaaatagcattgccaagcacttcccttaaataacttctcttttttgcaggactatcctctcagccctgccaaaaccccatcacctactctttctttactactttgcctatttaatgctggaatttttatttaaactgtagctgatttactgaaggtaattaagtgctttcatgctgtagatctcctgctagactacaggctgtacttgggagtgagagtgaacaaaatgtaaataaatgatgtcaacagagtaggttcctttgtggtcatgttgctttgcttccaagacactcttttttttttcataagtagaatgattcatgaatatgttattatagttcttgtttctttgcggagcccctcatcactct

SEQ ID NO: 41836 - DNA, 1967 bp, Homo sapiens
ttgttgttttgttttgtctgagacgtagtcttgctccgtcgcccaggttggaatgcagtggcgtgatcttggctcactgcaacctccacctcccaggttcaagctgtgctcctgcctcagcctcccaagtagatgggactacaggcacgtgccaccacgcccagctaatttttgtatttttagtagctatggggttttaccatattgatcaggctgatcttgaactcctaaccttgtgatctgccagccttggcctcccaaagtgttgagattacaggcgtgagccactgcacctggccctgttgtatttttaattgaccgattctttcctctacaaatatttattgagtgcctactactcaccaattattgtagtgtatactatgggagataatggaaatgatataatggccaaggagagaaagcatttgtcaaatcctctagggccaagggctttgatagagaacagatttcacaactggcagtggaaaatgtattcttttccatcccggttcagaggattttgccactgtacttgtgccatataaaatgctgaaatagttcatgagaagaggtacaggcatacatcttcctggtgtgtgaagatgagtggcaatgcactgtctctggttagagttcccaccaaaaattgtaaaatacttaaaaagaaaaagcaaaaaatatccgaggcaattaaaaaaaaaaaaaaaaagggaaatcacagaagcaggtccaagttaatgaccttatcccaattctgttcctaagtctgactctgatgttagtcatgttgtatttaattcttccagatttcctatagtactgtacagctctgatctcagtcctcacttggttctaaggtttgaccatcaaactttgagcttgcatgagccttgaacttggctctactcctatctggcagtgagcatcatttgttaaaattcaacaagagcaaacagaaacagtgtacactagtgacttgctgaaagagcctaagaagatacagtaggcaggagtaatggaaatgagtttttaacctccactgactcaccctttctttcctagtcacccttagggtcatggcaaagttacagaggcatttagaaatcatcttgcttgaaagcttccctttcttcagtcattagtgagcatcttcataattttttttaccatatatgtaaactatccatagtattatttgcctaatatttttatttaaatcaattaactttttatccgactttgtcttccttcatgtcaataacatctataatttgattctgtgggttgaagtactaagttgcttctttcctgtaaaagatattaaactgaatactatatttaaattttaaaaatacggctggaattacagatcacatctgtaatcccaacactttgggaggccgaggctggagaattgcttgagtccaaaagtttgagaccaacccaggcaacagagtgagacccccatctctacaaaaaatgaaaaaaatattactaggtatagtgatgcacatctgtggttccagctactcatgaggctgagataggaggatcacttaagcactggaggtcaacggtgcagtgagccgtgattgcaccaccgcactccagcctgagtgacagagtaacagtctgtctcaacaaaacaaaacaaaacaaaaaacaaagttcatttcatgcaccagctaatgtttgaaatattgagaaatgtggatatcattcaacaagaagaaaaattgataggataccatggtgaaagaaatggtgtcctcaagcttacccattaagtgtataaagcataattttttcttttttcttttgcatgcggagtcatcatgttcttgtgaaggatcgtgttgtgttgttagatattgttccaggcatccagcactgagaggcattgccggcctgatactgtcccactgactcactgtgacatcttaggccggtttctcttccatagg

SEQ ID NO: 41837 - DNA, 762 bp, Homo sapiens
actgagaatactgccattttataataatctctgaaagttacttccttggtctactgaatctcatattttgtgaagttaaatgaccaatgactgtcattcattggccatgattgtcttgagtttgttgatactaaggtgttatttataatgtgccttttgtttctcaagaatatgttcgcagaaatcaccagtagtgttatccatgtgtatggaaggccagactgtatccccttatgtactaacagactgtatggcaagaagggagccaggttgtcaatgtgagagctaatgttgatatcaacacaggcatcagaaagtcaattactctgtttccctagtttactaaatggtgcttttgcaatagggaccatgttgcctaatgggctgtgaactttaatttgttcataacagtgccaatgagtaaatggatctacctgtggactttagagtgtacttctaacattttaggactgcaagaaagtagtgtgttttatcctctgatacattcatattctctattggagcatacctatccaagcccaatatcctacatcagttttaataaagagaaattacatttaattgtgtctctatcctttcatattaatccattatgaatattttattccacaatgttagaaaaattacattaacttattagtgaagaacattcttttataagaagtgctttatacttcagaacctcataacttactttaaatatttcaggcacaataactggtaagagatgaaaaataagcc

SEQ ID NO: 41838 - DNA, 2128 bp, Homo sapiens
aatggttttatttattgcatttagattatacctcaacaaaggtggttttaataaataaacaagaaaaagtgtttttcaccaattggtttgaaattcggccaaggcatatttgagcgagggctgtcagccttgtatttgttgcaagtcacagtgagtatgtcctaatggatcctctacaaggtccaggttaggtttctttaaaggatggcaagaacctgaaacagtgtgagtgcagagaacagtgaaacagtgtgtgtacatagtgctttgatttttgtgcattttttggtcctaatattttaaagtttgctgaaccatacctcatagaacatttacctgctttttctgagggaaatatctttatagaacttttccaaagcattctgcatagattttattttaagaaattaaaacattttatttgtattaatttacataataattggttaactcacataattacaatgacaagatcatacagtaggagcagacttgggatcaaatgcagctgactctaatagcaggtgtagcaggaggcacacagctgaggggacatttgagacgaaattgaggccaggttccacttcacattgtactagggttaagcgtgtccacccagaggaagagaatccttaggcctaaaagagcaaaagtgtacagacatactcaagagtaagagagtagccaggaacaccagccaagccataaactccagtctgtgtgtgttaacagataaaattaagagggtaatctagggagtctattgctaaatgaagggcacattaagtctcaacagtattcctatgatcaatcaagcaaccaatgaagtgtacaagcagaagtgatttgtcatggaatttcagagccagaaagatccttaaaaaggcagtgtactccaacttcctctgaagcttgtgtcctacctacagaattcccaaccactctgcttgaatgtctccaaagaggaaaaaatttagaagagaagacaaggaaaattaatcacaagataggcaatgaataggcaagtggtaagaggccagttttcccatcctcatttactctaaatttgattcatagattattgagcctcagatatctgtttgccatctggtctggtcagtctggtttggcatgcgtcttctttctctttagagtttgatgacgttttaggctgtgaggggcatttgcattgtagtagaaattggatgatgtcagacttgctttatcacactttctcaataatctcttttggtgagtttgatattctacttacagctgctaaagctccttataaccatacgcacaaacatacacttccatatagtcatacatactcacaaacatatatacacagccatttacttacacacgtgtacacaaaggtgtatatccacacacttacatgcacaatgagagatgcatagtaagaatttttccactacccctagtttaactggaagctgtagaaaatctgaactttattatattgatctctgggatcatccacaaaattgcccaaaatgggaatgcggaagctgtttcttacctttcattttctccacatccaatgtgtcctcttcaactgtgtattttgaaacaacctttgaatctgtccccttcccgcaactgcactgccaactgctgatatcattttttgcaaacaagtgtaatgaaaagagcatattctttaacatcaagcaaactaaggtgcaaattttagctctgcatgtattcattgtgctatcttggacaagttatttaactatcctgagcctccttgtcttaatgtgcagatagaagaagataatgcctacctgataggtggcataggaaaaggtcaaaaacattattttctactcccattgctccccttgcctgaaacattataatggccaaacaactggcctcccaacctcctttcccctcttcagtttttcctctacattatagctagagattttgctaaaatgtatatatggtcatcccattttttacttgaaactggtatcttcctgcctataaaacacattttgtttcttagtctcacataggaaatcctttttagtctgtcttgggcccaggactccagtccgattttcctcccattcctacctgccctcttggtttt

SEQ ID NO: 41839 - DNA, 1673 bp, Homo sapiens
cctcagaaattattctgaggaagctgatgggatagaaatgaaacagactaaggggctccaggcaatcaccactccccttcgttctccttcctctgttggtggggatcaatagagcaggatcctcaaaactgtggagttctttggagcatactttgaaagcctctaattctattccacgctctaatttccaaaagagggaactgaggcccgtggtggttaaatgccctttccgaggttacacagctatacatggtagagccgacccatgtcttctgactctcatcccgttgcacttacaactagcctgcatgttccccttttcccatatcgcatggatagcatcttacgcatctaagtttttttctttaataatgatcttctcttttctttaagagacaccatcactccgagttgtaccacttgcaccaggctaaattattcctcagtgtttacccctttcagatatttatagaccatcattatggcactccctagtcacctgtcagcttcctaatatgtacatatatggtttctttaatctttctgtacagtcggcttctctagtcccttaatcatttgtaccattctctctctaatgcctataagggaactgtttaaatatagtccatatgggaaaagtaacctcaacatgttgtaacagggggcagaaaaacacgctgaatagatgaaaggaacaatctacaggttaattagtagtatggccacaaatatgtgcacagttttgtttcagaaataaagcaagctgtatttgttgtaactatctcttctttgaacttaacagaatgctgataatgccaagctgtgtttacagtccaaatttttgctgaagaccttcaactttgcactctccctgtgtggtatctcttgcccaagacagaacttcaaataaaatcacatagctgatgcaagaaaccgttactgagcgtatccatttttatgcagtttctgtggacttacatggtttctgggagctccctataagccttagtaagggaaagctcttgacttatctcactagttattagggatttggatatatgtttactaaatgtgataatctaagtatggaaactacattagtacaagaggaatcacccagaaatactctactggcataaataaaacattacctattgcccagttttctcatttgtttcattttgtaacttttataatgtgtcaataagtttgaagtcttgaagggctgcccagaaaccaccacagagtggattttccttaccctcaatctgccttcatcaaaatttagtttgtgtgtttatcctataaaatttatctcataataaaaactgaagactaggacggtccttagaaaaacacttgattcggtgtatttattttataaaagggagtcacagagagaaaatgtggccagctcaggtacatggcttcctaggcaatgttccatttcgcaaaactttcattggtccagaaagtgtaccttcattcccaaccaaatccttcctataatgctttccatgcctttcttctgtggctctctctgatgatctcacaggtctataagctcttacaggtagaaatatgatttcttgctgtgttcttattataaagcattgccatgcaactgagaagtaatgagagccagtggattttattagaatggaattttaact

SEQ ID NO: 41840 - DNA, 667 bp, Homo sapiens
cataataggtgaacctattgctgctctgatagtgagggggatttggggggagcctgtgtcactctagcactatgtctccccacagtcattgactcacataccctttgcttgccccttcgtgcacctaggacctgagactatgtatgtataagaaggaaggaggagaacttggctctgagagactatgaacagagtcattgctgaaatgtaaatatcaaagattgaagggaaagatgtgagagtgaagccagctgtctagcttccagccgtagaatgatcataagagctactacactcaaggtcaaacacactgactcacccatgaaaattgccaaggagtttgagtggaagttctctgatattccaatgactttgaatgggacacggtaattccttcccacagccagggcttacttaaaataagtaaatgaataaataaagtctactccctggatcttttttttgctcttgtccctgcagagtaaggggatgccagccaaggctgacatcatcattatagcaagacaggtgctttttttgaatacttcacaaggacaagggcctggtattatgtaggtcttcaaagaatatatatatatataaatttttttaattcagtctcctacatttatagtatggggaaataagacaagagcgaggaatgcct

SEQ ID NO: 41841 - DNA, 811 bp, Homo sapiens
ttctgtaatgatgtctgtgaggtcagaattggagcagcaaatggaattcctttaagggcttcccatcaatggacagctgattccagaaatggaggaggcacagtttgtatccaaattcataagcacaagtgggagaaattaggctttggtaaagagggtgacattcccaaaggaatcatctgtgaagttggggaaggaattcaagctcagggctgctgttctctaccaggttcttcagccagctggacatgctccccaggtttctactcagtctggaatgttagtaaaagtccacttcctctccttgtttctcccttctagtgaaaacgttcctcttctctaccttcctgacctcaagaccattgttccacacatcccccctcaggatcccaccccgccattctcattctcattacattgtttctggatccatgtctttatcagatgcagcccactgtccctttcagaagatgccagaaaatttacatatgtgatcaaatgttcccatcacaacagttctttccagtaatcccagtgctgggcagctgattccagtaatggaggagacactttcagctattaggcaatggatcacactttcaaaggagattgagcaatctcctcatcaagttgtacttagagcacaaatctggtgccaaaaggcactaccggattcagactgacagcactgagagttttgagtgaaagggaagttagactggtgttatgtgtattcactgggaggaactcaccgggagaaataaagagggtttccagtttattcattgtgtaaagcggctataatagtatt

SEQ ID NO: 41842 - DNA, 2781 bp, Homo sapiens
cctcggcctcccaaagtgctgggattacaggcgtgagccaccgtgccccgcgtgtttttttctttagctgattgacaggtccccttcaaagttacaaaaaaaagtgctaatttttgctgttaaattctggttgttatttaattgacagaagtctcttgatgcacgaataaatatctctacatctagcctttgttaaaaataaaaattaatattctacaaacacctacatatactagagaggggtgaaacactgcagctaattcctttataatactttcagatgattgcattaagcctttcatgttatgtggcattgttaatttttcctagatacccatccacttaagggccagagaaatccttattcatttaactctggtgggcatttatgtaacatacccaaataaaaacgttattaaacagccacaatcgcattcagtcaacttggcactgaatgtagcttctaaaatcagttctctaccctacgaatggaatgttctaccaagaaagagaagcatcaccatgtcatcttgtgttctacaccactatagagagttacagttgcccccaaacacgaatgctattcccaaataaaatagaatcatgctttgggaggccaaggcgggccgatcacgaggtcaggagatcgagaccatcctggctaacacggtgaaaccccgtctctactaaaaaaaaaaaaaaatacaaaaaattagcctggctcagtggcgggcgcctgtagtcccagctactcaggaggctgaggcaggagaatggcgtgaacccgggaagcggagctttcagtgagccgagatagcgccactgcagtccggcctgggcgaaagagcgagactccgtctcaaaaaaaaaaaaaaaaaaataggatcatggcccttttaaagatctgaatcttctctgttattttcctgatgaatcaccatcccatatcttcttagtcctggccagtatgtagttgcgctcacatacgtctattctagctctgtagctccacaaaacaagtcttaagtccaaatctttgcctcttcatgtctgatatcaccaactcattcagcttttcttcacttattgacatagtgtcatgtcctatcactctctgctgcttctttaaacagtggacacaaacatattttctaattttcagtgtactcagtgaaacttggcagttcaccatgagtcaggctaggttgaaaggctttctttagggttgaaagtaaacgaaattggaatcacccaaagagaatttccccaaaaaacctcagacccagaagtgtaaaagctacagaaggatagaactcccatgtctacagacagttctgttactttttgttctgtactattttggatgttgccaaaatcaaattcatcctgaaaacaggaagcaagctaatgcatatgccatccatgagattcccacttctgggtcagttcatattccattcaaccttttccttttatccttgtcttcttcagaataagacatttttcctccatattttcatattaaatattaacactttataggttctactttaatatatggacactttacaggttatacataaatatttgctggttgattgatttcgagattcattcattctgtgctcaaatatttgtacctagagacgttacatgttagaaaaagtgagcagcttctttctctaatcatttaggagtccatatttttcttttctttttgttctcccaacatccttatctcttactcagctcttcaatttataattaccaaataatcactgttagagaatcagcccctaagtaactttgattctggccaactgtaataagatccaaccacttaaatctgtacttactcaataggaaggaatgtgacatcaggaagagtcattccagtgacattagtaagactttatggagtacataaaatttgataagaaatcttgagctgattctttgacttgatttagaagttgagaaaagagtatttaaggcacaacagggaaacatgggctatactcagagaagaccctctgcattggccaaaatatcatggattctggaaattccttcttaacagaaaaaaaaggcttccaaataatcaggctgaatgggaagaaaaaggcatagaggaagcctgaggaagtatttacttgcttttcccatctctttataattggaagagaagatgatctgccaaaatataacccagcatgcacagtatggacaggaagcagccctccatgaactttattatcacagaatatgagcattcttattgatccacagctacatcttctattcttgcagcaagggtacatgtcctttgaccctccacaaaagaacaagcaggacatctctattttcctattgagtctgagtccattattagaaaggacttcccagccatcttttctacttggtattaaaattcccttacagattcattgctaagtgccaattctttttttttcttttgagacggagtcttgctctgtcgcccaggctggagtgcagtggcgcaatctcggctcactgcaagctccgcttctcgggttcacgccattctcctgcctcagcctcccgagtagctgggactacagacgcccgccaccgcgcccagctaattttttttgtacttttagtagagacggggtttcaccgtggtctcgatctcctgacctcgtgatccgcccgcctcggcctcccaaagtgccaattctgactctacttaaacatcacctgtatcagggagctcattattccttgaggtcttacatt

SEQ ID NO: 41843 - DNA, 1167 bp, Homo sapiens
ggaaatttgctgctttctttcctatgagaagggttcttcccttgtcctgttcttatcagtctgactaagtcaccatttcaaagctgacaattaaagctcaatttccttgcactttgtcctaaagcagatgtcctagagctggggaccataatcatgaagcgtgtgatgcattctcagagttggagagcagtgtttccagagagtctgaagattaggcatttcctctcatttttcatttttgtcagcttcttcatgttttccttgctaagtaagaaaaggcctcggtttcagtctgtcattgtatgaccctaaatgagtcacttctgtattgggttgtcttaggttcctcaactgcaagtgtctagtcttccactcacatgcagcagagcagctccacatttacttatgttactcagagggttacttcacataagactttataaaataagttccattgttaatttctctaaaccagttggactacatcttttcatgtaaaacctagatgatctctgatactcttggtttttacatgtagattccacgatcccttcctgggaaagtcatgtaaccaactataacataggagcattaaacatttttaggtaatagaattaggaaataatggctgtgtaagtatccatgtgaattcctgtcaatagttctcatatcatgtgcttagaatgatttcaatctgactgaatcttgccaagaaactcatagctctgctttccctgcaaatatgaagatgtgtcaacctcaaagagttggttaaactttctgtttcactcatacaagtctggcatcaaattcatttagctttgtggtgcttacccattacccatttggcagatttcactagccatgtgacaaaggcatagtccagctcagagcatgcagaatttggaataataaatagtgaccctcctattggggctcacacccaagaaacgtcttatcttctgggggaaaaccaagattaagacattggtggccaggcacagtggctcatgcctgtaattctaacactttgttgtgttgtttcttgtttttctttttttaactttaagttcagaggtacaagtacaggtttgttacacaggtaaatttgtgtcatggaggtttgttgtatagattatttcatcaaccaggtattaagcctagtac

SEQ ID NO: 41844 - DNA, 654 bp, Homo sapiens
caattcttgctcgaggttttgctgtgattatgtccacaagtggagattgttaatattactattaatggtttttaataatatgattattatgattattaatattatttcttattttatttactttactcaacagcaaatacatattgagcaccttctatgtgccaagtcctattctaggcactgaggaacttatattgtcaattcatcccttactaaaatagataaggatttaactcagttaaaatagttttccctccaagtacagttatatccttaatttctttctttcttttctttttctttctttctttttttttttttttttttttaaggtggagtcttgctctaatgcccaggttgcaatggtgtgatcttgcctcactgcaacctctgcctcccgggttcaagcgattctcctgccttagtctcccaagtagctggcattacaggcttgcgccaacatgcccgggtcatttttgtattttcagtagagacagggttttgctgtgttggccaggctgctcttgaactcctgaccccgggtgattcacccgccttggcctcccaaagtgctaggattacgggcatgagccaccacccccggcctatctccctaatttctttctcttttttttttttttttgagacagagtc

SEQ ID NO: 41845 - DNA, 7553 bp, Homo sapiens
gtaggaacaaccttcttggagaaacctttgtccacgtttggatcactgtggtggtcctcttggccttggggtcaaagaagcattcacttgctcatcaagtctttatcgagctcctactatggatgtcactgtggtaagccctgggacaagtaagaaaggaaaggctcctgttcccatctctcatggagtttataggccaacgtaaaagatgaaacacaagtaaatacacaaatacaacatctaggaggtgctacaaaggagctatgaagctaccctagcttctgctgcctcataactggccccagagcaaaatttctccactcattatcatcctgagactgtagcacatctgccctccatgtcatcagagagactcacctggccctgctgagcttgccctggctccctgggacacctggtctccttgcttagctcccagtgtgctttctcattctgcccctgctcattctccgccggcactatgttctctgaatgctggcaagcttgctgttctctaaatcctccctttcttttcctgcttttgggtctttgctcttgctgatccctttatcaggaacttccctcacctctacctccacttgtccaaatgctaccaattcttccaggatctgttcatgctcctttaccctcactgcagccatcctgaacccttctccccaccttggggagtatctgcttgttcttccctggtgctcatggcatttggtttattgtgctaatcagagcgctcatcatccactgactggtattacacagttacttgtgtatctgtcctaggcccttacctacttatctccaacctaaaggcatgtctattatttctgcatctcaaatagaagcagacacagttaatgcaaaaccatattattgaataagtgctcagtaatgatgactattatgcacttgagactggagacctaggacagagacaggagcatatctggatttaaatcccagttctactgtatgttagctgtgtaaccctgggcaactttatttattaataataaagtatgtgagcaatcttatatcactgtacagagtgctcatatatgttatccagcttaattcctagaacaaccctgtgtgagaagaactactgagtgctgacactagtcatagtgctagactcatagctgaattcagattccaaattaagtagcctgattgtagatacaaccattcacatgcgaacattttgcttttttcctggctcagcactgccagtactgcttctttgaggtacaattatgcccattttacagatgagaaaactgagacttagaaagcttaaataatttgtcagtattgtaaaactacctatctttgttatcagagaaacatgactgtgaccaacctaggtatatacaattttccacagccatgtgaaagttttatgactctttaacatttctggttgtctgctatgctcggtgcattgggctggctggaccttgtatatgttgggaagaaggaggacttacaaagactaagatacagtctttgcttccaagaggtaaataaaaaacaactaaaatattctatcatccacacctattccctctcccttcttttttcagcatgttactggatgctgcctctttatccatctgccctggtggagatcttgaggttacaggaatagccaagagagacacaggcagagttaagtccaaagcagtcagcaaaggtggggagacatagatgggtccaggtggtaagtaggattggccttgttattggaagctgaatgtagttactggacttggagatttcggtttctagagaagacagcagctctccatgcccagtttaatactgtggattagcgtgggagtggccccagacccacaggcagaaaaggccaatggtcagagtggagatcctcaggacactccaggtgtctgagggaacgtaggtttatccctctttattactaagtggattgctgctcccccttgcaggccaaagcatgaatactggacatagcccacatcgagggtagagaacttggttttggctctcaagtcgaccactcatcagcagatgactgtgagcaagtcacttcctccctccaagactccatttctacagggattccataaaatgggcataagaattttcactgtgctcgtatggactggattaggccatcatgtgcattaacacacttggctgtgagcactaggtgcagccaagatgctgatgggaaagaaaagtctaggttttgccccctgcgtcgttcctcgtgacaggattatgctgagggagggcacattagattgactcacacatactgaaatggtcatagttattgaggttacccagtttccaggcctgaactagtaaacccagcaatgagaatcagccagcattagcaagttttccgtgtgggagtggggtgggggtggggactggagggagcaggcgctgaaccaggaaaggaggaggatgctcatcattggctaaagatccatgcctggaaattaacggcgttaaagtgagacttgcttcaggttccaacccggtaaggcaaatggagaggctgtcaggagaccagaagtttacctcagctattgcaccgacgcaccacgtgctctggtgcacatccaccgcctcttcctgcctcagtttctccttttgtaaaacaacagcttgtaaaggcctggggatcttctcatccacgggagttttctaaggatgcaggcgaaagaggtaggaaaagtactctgtctctgtcctgggtgttcgggatcaaggccttttgaaccaattccggaatccgccaccgggcggtggtaggagagagccagaggattcgtcagtaagtgtgcgtgcgtgacagagggcttttaaatagatcgctttgtatctagcacggtagcacctgcttctaagcttccaacggcagctcgagcaacgcgatcattcagaagcggccgctttccattcacgtctataattagcgcgcaggctgcagctcaggctcgagctgcaaagcggggcggcggccttgtgggcggggccaccacctcctagccccgcccccttcgaattccaccttcccagcccttcccagccaggagcctcctgcagcctcctccccacccccactgtctgtcctcgccctggttctgggcttcgctctcggcgctccaggattcctggacgacagggcccaatcgtaccctcactctgggatcactcttgtgcagtaaataagcaccttgaaagatgcattccaggagggcagctatatttagagtggcatcctcctctcctccccgcacgctcctgcgtcccgccctctcccctccccgccccgctccccgatgcccctcccagccacctctccctctttgtcgcattacatagtaatctgagatgcactggatgtgctccagggaacagaatgtacttggcagagacgcggggcttgatgtctgcaaaatgtcggaaacgcagccaagagctgctaactgggtcattaacctccaaaagcaaagcgaggactgtaaggcccgctctgcctcccttcatctcgccaataaaagtgcctcagtgtgagggggaagaaaaagcccaaggttgactgctttgatttctaggcaccaaaggcaggcccgtcctctcgtcctggcccaggccccagcccctccgggccagcccctgcgccacatcagagtttacaagtgacctttgaaaggctcagcaaccccgcagggccatgcttgcgcctcagcaaagaagttacccagcagccgttccctaccgcacagccttggacacattttcttgggtccaggaggagttaagggagtgggggtgagtaggggtgaaaggagaaggttccaggtccttcacctacagtgaagggctctgctgtctctcccctcctctgcttctctccctctttttcctccccctcctctttcttctttcttgtcttcctcctctccctcttccacttctttctgagagcaggctttgaggtaggttcatgaatacatggcctgggtccaggggatttgcattcaagccgcttgcagctctgttacttgctatgtgaccttgggtgagtcactcatttctctgcttttaaattcccttcttctccattgttcaccacaataacaccttcctgacatacatcacaaaacagtgaggccaaatgagaaagtctttccctgaccgccttgtctttcacccctctgaaagccctgaggtccaaagtgcctctggccttgtgtgtactcctggaaaataggaatacaagtggtctcaccagaaagattcaaacgtttgaatgttttcaaggggatagcccctaaaatccaccctcttcaagttttctagccctgtgaggttgccaaacagacacttccccctaatgctccaacccacttctccagtggctagagagagaaagtgaccggtacagaaaccagaagaggttgtgcagttcctcaaatgagactcccttccttgttggagggaagacagtcagcctggtaagactagcagcagcccacgagatgtgggtctgagcagtctcaacaaaagtccaggatgaggagaatggagatttgtgcagccatgctgataagaggaggaaagctcgctcctggtgctctctaggaaattagaaccaagcccagcctggcatcagcacccttcctgcctcatctctcgttggtcttaccactccttccatggcagccacatcagatgggttctggctggtcgcggtgctccatggacgcctcctgctttcctgccacttgggccttggctgagatgtcttaaaaaattttttaaactcatcagaatttgatggcctctatttggcctatctctgccacacattcaaatctttcacatccctcaaaacccagcttcaatgccatctcctctatttagatgtcacttctttctctttcagtctcagtacacccagccagccttgggttatgccatttttgtgcttgctagatccctcttatgccatagagatttctctgtggatacaaactctgctgttgatctcaatactgatggctaaggtatatcataatacatcataaatacatcctggtttgccatctcagtttatgactttgtcttggtataatataaaatgtaccttatggctaaggtacatcataaggtacatcataatacatcctgatttgccatctcagtttatgactctgtcttggtataattagttattaataggtccctccttcaccttgaagtttttgggtttggatgataaattatacagtcaccttactgagggtctctatccaagtacatggtacattagcaggggctcagtaaatgtggcaaagtaccttaaagggcatttaaaggatcttttatacccaggtcactggggctctcagccctacccttttcactccttttctggaggcaggctaccatttgttcctcttctctcaaggactgcagaatgacctatgaccactttctttttgacaagcctttccaggatttcaaaatgctctgacccaacaagagaaatcacttaccacaatcctaccccttcttctcagcccctaaacagtagaacagccactggatattggaaataggtatcagacactagagaaggtcagaacacagctggtgcgatatatcatttccagcctcaactggacttttggccttgcccaatttctttttttgtttgtttgtttgtttgtttttgtttttgagatagagtcttgctctgtcacccaggctggagtgcagtggcatgacctcggctcactgcaacctctgcctcctgggttcaagtgattcccctgcctcagcctcccgagtagctggtacaggtgcccaccaccatgcttggctaatttttgtatttttagtagagatggggtttcaccatgttggccaggctggtctcgaactcctgacctcaggtgatctgcctgcctcaacctcccaaagtgctgggattataggcatgagccactgcgcccagccagacttgcccaatttctttgacagtccaagttttcagaattgcctctatttacacagttgccttaggagaggatcacaacttggaaagcttgaagcttctttattataaactatgtagttaacattctaggttctgttcagaggtcagaaaagataaggtctcttgtgctttttcatcataataaaaaacttactcaaaagtcagcctgttggggtgagtgtttgttgactttttaaacaagatatcaagcatttggaagtaacagaggcaatacgcccagccgtgtgaatggagctctagcttcagcatcaggaagcctgggtcgacgtctcctcctctgactcattgcttgctgaaacatgaatcatatgccctttctcagcactgggtctcacttccttcatctcccctataaaatgggcgtatttgccattcctaccacacaggagggggctgaggctttcagagtccttgctaattacacacaaaaatattattaaaagtaaaaataagccatagtgtgattttgacgctctgaagaggcacacgtggagggtatgcgaagccattttatgaccttgcttcgtttctggacatcccagttcactgagaacaggctctcagaacgtgggaatgggcaggagaatccatgttgagatggagatgcgaatgagtctggtctgtttacgtgggagcaggagacctttgaggagatcactcgccagcaatcaagaagaagaacatggagactgggatggaaacccaaataaggctattctgtggagggctctgatgccaaggctggggtgtttggactcccttgagggttatgggagatcagtggaggtgactgagcaggagcatggcacgacccacagtgtgtttcagtgagacactgtttcatggaggggcagaaatgggagctggggtctgtcaccttgtaagcaaatggcagctcccctctgtctgagcttcagtttctcatctgttaaatagatgggttaaacagcaaattggtctaatatgctgtgattctatactaaagaacatgaggaaacagcttgtcatattgacgtgtgtgtgtggagggtgtgtgtgtgtttgggtcaggggaagaggtgggaatgcggtaactgctttgttagacacaaagccaagtccagagaccttgttctttagggaggaagcctgagcagcctcacgatctctagcaggtctgaagaactttctgggtatctttctttaggccacagcacagcacatctgcactttagggcctggccagcgacctctgtctagacgtgtctgctgtctacttcctagttcagctgagagagctaatatttgaaaagactggccaggcgcagtggctcacggctgtaatcccagcactttgggaggccgaggctggcggatcacctgaagtcagtagtttgagatcagcctggccaacatggcgaaaccctgaatctactaaaaatacaaaaatgagctgggcgtagtggcaggcacc

SEQ ID NO: 41846 - DNA, 1229 bp, Homo sapiens
taaattactcaaaggtctctttaccaagctggatgaagaagcgctggtttggatggtttatgatcttttgtggccccaaaactttatgattcttgcatagaagtagagcccgcattctgattctaaactaatttccaagccttgtggtttcaccatcattgcctttgaccctgagcaaaattcaacatgaagtctctggccttataacaatttgtttttccctatgtagaaaaaaattaatgaaacaacaatccctgagagtcctgaacccttgtcaccctgcagtgtctggcaggtagaacaggtggaaaatcagaatctttgggagccacccagcccagctgctgccccaaacaagctgcaagcaaacagagacggctttaccctgcgtgctacagccgcagctcctctggtcccagcttgttgacttggtcccagagaaggaacaaagctgtccaagtccaatgaatggccggcagtggaaaaccagtgttgctgtctgttggcaggcagggcggccgacaccacacttggtcagctccccacaagcggcgctcccctacccccaccatggctagctttggcaggcgttgccaggcctgagaacgcaggaagttttgggtcacggtgacctctagttgttgatgccagatgaaatatgccctggaggttctccagtgtcacatggtgtgtggagcaagaaaaggcagggttgctcttgcgctgacgaagtggattttggttcccaaatggcaccccttggggaataggaggggttgtgggtgggaaggggggcaggcaggccgagcggtggtgtgagagtgggcaagggaggattagttttgcatttttcatctccttcagccttccaggaagccgcttcctcctggaggtggaagcatacccccagatttgtggcgtgggaatttggggaaaagtttctgcggtgttttagttgtttatgtggtggtgggggtggatttctagccctatacatgctgggtctcatagctggataaaagctatgtaacatgtggggcctgacctacagccccgccggtagctcaattgcttaaaatggaaaggacgtcaaccatggttgctcaggggagggggtgccacctccagacccagattgctttcagctactacccgggaaaacgatactgtccctttccatcctgctgaaatctctcttcatcttgtttacacatgttgagttatctagt

SEQ ID NO: 41847 - DNA, 852 bp, Homo sapiens
tttactgaagagaaatagcccctttaaagaatttatcctgtaaagcatgcaaaacattttagatgcagcaataaaaagagggctttagagagttatataattttatgtgctcaagagaatatggagaaacatcagtacatgttccctttctctccagctttgagatttatgattggtctgttacaataataatagctgaatattggtgcaagaaatatatttgattcagtgggtaacatttgacagccttaacttgtgaaatgtagaaaagttcttgcaggaagctccggcagaatgtgtaatgtacaagaaggtattcagggaacagaaaaataaaatgaaaggaacctgctacccaatctgtttcattaaatatgaaaattaaaatgccttaacaaaatgctttctcttcctctctcctcccaacaaacaaaagctttggtaggcagcctgaaattgctcatcaaggaaaaagaccagactcggattttaaatggcttcttctgaatgaagcaattaatgctaaaaggaacatgttgtcttatcagcatttataaggtacaacattcattgtacttgctggcactctatcaagtctctccttggcctaagcgagtagagaaatgctttgctgcgtgtgctcttgacctctggtaatcgggaggatttggctgataaacttgacaggagtgattctccctgggactggaaatgtgcccgggaaatgtgctctggagtctctctcgctcagaccctggccagccagccgtggcaggcccatcaaggctggcaactcacctatttgccaattagaggtggtactgctgtatgattgtttaggatttgaaatgc

SEQ ID NO: 41848 - DNA, 859 bp, Homo sapiens
cttatagagctctccgatttcctatctgataaaaaaagcccaaacaaagctgcggaagctggcagagccagcagatattttgtaaggcagcttcacctctgctggcattttgtggggcaggagagggggagggcaaaggtattaaatttaggcttaaaagctcctcagaaattctttacacacaagagaccaagttggagaaaagaagatgacttgtgccaaggggaagaaagagagagactaatgcctgtggttttcaaaggttaacaacaacataaaaaagccaaggtatttgcacagggatgaatgctcattggctcttggccaacaattatacaagggcttgtgcccacatcctgtagctgtggtttagggacgctgctcatgagtgacttcttatgcttagtggcaggaaactttagtcactgatgtgtaaactcacctttggtctgcacctcccacaacgtgctccgaaagcagttaggggactaggcctcttgatttccttgtagataccagttccccagaagctaaggaaaaactctgaggccttggagttactgagagtggaccaatacttgtcttattctacctgattttggcaactgcttagggttcttctgtatccacaaaaaggaattatgatatcctctgctaaaccctctctttagcctcaaagcccaagaccaaaaaaaatgagccatatttcattgcaggcctgctgccaatgtgaaatataaggaataaagtcatgagactgcttctcaacctagaccttgtatctcgtgtgctattttatattcgattttaaaaagctcttagtaaatatctcagtccccttttcagtgaagccaaatgg

SEQ ID NO: 41849 - DNA, 765 bp, Homo sapiens
ataaaagaaggccttcgtttctggcttccctgtcacctaaagtcctgttgcatcaggcggtctcccatctcagctacagtattaagttaactacaagctacccagaaagctacatctatttcaaggttgtagccctggctgtgccttttatttttttaaatctgaagtgttgggaggagagggggttcagcagggtggggagatagaagtcagaggggaaggggggttatttcaggccttgcttctctaagccttcaatgtctgagctccaggacagaccttcctgttgtgaaatactggaccagttgttgccctctgaagataaacaacattccagcagctcccctagagctacccgaggccttgtgctttttaacatttccctggccctacagtgatccaggagctgaggattactgcactacctgctgcagcacacacagcattagctttgtggtctctgtgctcttaagctgggttatggtaatgaatccagggtgaaatctgggtgcctctgcctgcttgttaaactgatgaaacactaacatcttttgtgtagttttggaagcccaagctgtgctgattggaggtggtaaggacagggctctctgccctaatgtgtaaggtttctgtcttcattaaagtttgaggctgaatcaagactcactggggtcacgtaagggcaattttgcaaacccaaggcaagctgttaacaaaatcaacctgggccaatcatcaaagggttggacctaaggttgctatact

SEQ ID NO: 41850 - DNA, 577 bp, Homo sapiens
agcaacagaataatgtactaactaaccaaagacagtgaaggttagttgtgttttcagactgaggctattcctgcaaggtagcactttaaatttacctcgtagaaacttgacacagagatgttgctgtaaacaagacctactcaggggtcaccccgtggggattcccctgtaaagatgccctgagaatcatgtccatcccacagaagcatttgatcagtgcatccacccccacatgcttaaacggtgcgcacgccccagatttcaaaataagcagagttaacattcttgactcctggcccaaatgtggatgcccgccatgagctcatgccttcctttgtgggctggcattcgcagggcttatgttatcctgctaactggaccaggaaagagacactgagggacatgtgctggaaaccatgcatacgtaggactctgagatttttgactgcgcacaaatgtattatgaatctttttgagagtcaaaagcaaaaatgtggtcataaatgtcagggaaatgggttaatttgagatcagatcctggctctaccactatctggctgaatgattaatgcagagt

SEQ ID NO: 41851 - DNA, 1823 bp, Homo sapiens
ttaatttaaaatatttagaagagttcttcctcatttcctagagacgtcgaattgtaaatatcagagctagaaggaacactagggctcgccactccaaagtgtggtccaaggaccagcagcatcaagtaacctgggaacgtgttagaaatgcagagtcttaggcctcaccccagacctactgaaccagaatctgcattaacaagatttctaggtgcctcacgggcacattaaaacttgagaagctctgcactagaaatcttcactccacctttcattataaatggaatcacttggctgtggtcacaggaaattgattatttttaatttcagaaccttctatttaggtcatctatatttgctaatagcagggaagaaagccaaactctttaactgcaattaacaaatctataattaattagttaagcaatcttccctttaagttttacattttgtggagcaagctgtttgatttggctggggctcaggctggcctgtttgtgaatttcacaattcacagatgttagccgctctcgggctaagtaaaggaagagaatgtcaagttttaaatagcttctcccttccatcctggctgaagcaacaaataaaatatttttatgaaacacattttgagttagatttacttacagggaaatgtcaaatttctctgaaagggctttagattgtctcacaactttgacatctactgatgtcacctatttacaggtgtgtcctgtgactagggggtgaagggaagatgtgaactcaccatgttagtgaccgttagatacacagagtggttttttttccccctgttggagtctatcctaactgagcttctgaatcatatttcattcaatttccaaatccacaaaaccaggataagtttacagcccatattcagaaaggaaataaattattttgtgtgtagactttcctgatattacactgatttgggaatatatgaacaattttatggtttcctttcgaagtaggtcaagtcaaagcaaaaccaaaaacagcaaaaactgtaagacataaagaatagagtggagccgactgagagattaaaataaactagaatatttttattaacaggcaatttgaaataatttgtgcacttcagaatattctacaataatatattatttccaattttaatatctttaagaaaattactatattatatgtaagtacatgtgcatgtgtttgaggtaggatatttaactcaataaaggttattttcttttattcgggtcaggcaaagcttctaaggggatgtgaaagggatatctctttctcttagctgagaggaagagtgagttctaagttaaatataatcaaggaatttccctgtctttgctatttgagattgtgaccacaacaggcggttggctgaaagggaaactgaagggcggggagggagggaaatagatgaaaaaacaaaacaaaacaaaacttccctaagcagctctacaaaacattttagccccagaaatagtcacagaaatcctcaaatcaaaccagtatccagatacaaggaagtgttatgtagctggagcagggtggacactcatcagctcagttcagttacaaaagtccaggctgctgaaattaaactctgatgccattcatgccagcatccaatcacgacagagatcagaagttcagagatgcctccagctccaaattgccaacaacaagtgtggctactatacgtcaaggactctgaagccgtgagagagggggaagaacaacagtagagaggatgcccagctggtaagaatcgagtgtttatgaagttttagtcaattgatgaatctcat

SEQ ID NO: 41852 - DNA, 899 bp, Homo sapiens
tcaggacgtctatttctttatctgaaacttgagctggttaaaacaagtaattccttctttctttctagctctaaaattctgtggtctctccagctgtcactgaggtctcatgtggatctgctgaaatcattgtcattctatgattgccccacagctacattttgaagaacttcctatagacacatttatttgaattggtcctgggtgatacctggcagctcaagaactgagtggctcaagaaggaaaacccaaaccccggtagaataaggagaaatgaggaatgatgattttggcctgttatttacatgcttagctgttttgttcctcattcaatgtgggtatcactcatttttatagaatccttctattaatgcaatttctgatcattactggattattttagaggcacattaccttctttgtgacctttgccttttcagttagacttggaacatatttccacatgtttggagtttgtcctgaagatgcttttttgactggactcctgaacccaatgtgttacataatagaaaactggagttgtcactctcaggaactgctccaccagaacaagcacgatatagagtgatttaaattattcacagtatatttaaccttcttcactactgccagagatttagaaaggtaattgattgtggctcggtgcagtggctcacacctgtaatcccagcactttgcaaaggctgaggctggttgatcacctgagatcagggagtttgagaccatcctggccaacatggtgaaaccctgtctctattaaaaatacaaaaattagccgggcgtggtggtgcacgcctgtaatcccagctactcgggaggctgacacaggagaatctcttcaacccgggaggtggaggttacagtgagctgagatcat

SEQ ID NO: 41853 - DNA, 3972 bp, Homo sapiens
ttttaaagaattacaattgtgccactgtactccagcctgggcaacagagcaagactccgtctcaaaaaataataataataaaaaagaattacaggtgctttttacatttatgctgtcctcaataaatgttcttcagatcatttgtcctgttctctgatttataattcctaagaggacactttaggaggcatacatgggaggcaatgtaatatggataagctacagttagggatgatataactcaggattgtagttttcctttgaaggtgggtcatacaacttaacctttgctcactttttctccatccataagatggacatgcattaccttgtttatactttttaggaatattttataaatgaataaacatatttatcaataaatgctttgagttatttaaagacactgtaaccatatcatttacttagtaatagcaaaaatagggggttgtgtaatgtcaagtacttatttgaatttgttatgttttcaaaaatggtccatgtttcactagacttagactatactattaaatcatagaagtctgtgtatatgttagggaaaggcgtggggagagaaaaggaaaagagaaaacataccttcactgtgtcccttgtaagtatagtttgtcaggtaaccctcctaacaggcctaggggatagatattattacctccctgttgtagaggagaaaaatatagctgaaagaggcaaaataacttgcctgaacttataatcaatatgtgactgagctaggatttgaactcagctacaaaactcagctttacaggtcaccactcagtttctcagctttcagattcctgctttggaaacatgttagcaattaaaatagaaaagggcagggataatttaattaaaatacttaatttataatgttagccaaatagattttttttttagcttccctcaatatttccattactgctttagttgcagttttggattatttcttattttatcttgctgatttgtccaactctagttcctggactcacaaaaatatacttgctaaagatgcgttaaagtgcatgacctatactgcaatttctctacatagttatttatgtgcttaaaatggccatcttggagagtgcctgaaggttgagctagaggagggtgatggaaggaggggtgattcaacagagtcagggaaattccagatgacatgggttgccagatttcctgctggcctttcactgccaaactccacctcctgctcttcttacacagctgtgtgcttcattaaatagtgatgtctacaaatcacagcagtgttaaaaaatgcagagcagggggaattcctgtgcactgactgctgccaagttcctagagttttaacagcacactcatcaaactgcctctctcttctccaaaaactataaataagttcaatatcaagagtgttttcatcaattataatgcctctctgttctcttggagagttgggaatagtatatagacacattggttacagtgcccatgtctaaggcaatatggtaggggtcatctgttgtcagagataagacttttgaccttgatgttgccactgttcttccagttgagccaggaaccattacttaatcatttacagcatagattttcccatctacaatttgcttttcagaaaccagccttgtggaatttaggccaagaacctggttgctactgctcagagtaggtataggagaggtatgcatttaattcaacaattcctcttgagggtttctgtgtacaaggtcctgtgctgggtgaggttctacctcatctttagcaagtatatttttgtgtttacaatgacaacattagtaagacaaggctgctaatacattcatagtacccgtgtgaggtgagtgctgatgagtggtccactagagttgttaaaaagtgccacaggaacgtggggaaaaaaatagaaattttacctggaggattggagacatttcaaggaggaagtaacattggctccaggctttaaagaagagaggggtttaatagataaatctggaagtactccagatagagggaagaatgcaaacaaacgggtagagaacggagaaattcagtgaattgtcagaatagtgtcttgccttgtgttgtagcagtaccataatgactgacagcctacagtactctgacaatttaaaaaatataacctgttttctttcatgtgggtataatgtctccagttaggcctatccactttttatgatcttataccagctggatccttacactgatgtatgggcttgagcaaagaatataaggcggagataggtaggctgatggaacttccgtgataggaagctgtcatgttggtttggtggatggacagaggaagagcaaaagcatgaaggagaaaagtggaagaagtgtggaggccacttgaagaaaagtagtagctaaatggtaggcaggactcgagtcaactttcttctggaaagtttcaggactgaatctggaaaaggaaaacacagaacaattaaaattgatgtgcatttattgagcacataccttgcacaaacactacaataggcaccgtggtagacactgagatacaataatgcatttccctgtcctcacttacgaggacaggaaacagacacgtaaacaactaactactgcacaaggtagaattcagtcacagaggtcagtttgtcacagaaatatggaagaagacatttttgattggagaggaataagaaagttttctgaaatattctgaggtaagaagtgaagattagctaggttattaataagtcttagtccactaggagtgctgtaacaaaataccataaactgggtaacttacaaacaatagaaattctcatggtcctggaggctggaaagtcttagatcaaggcactggtggattccgtctgatgagcaccagctttttcataggtggcaccttcttgttttgtcctcacatggtggaaagggcacacagcagctctttgaggccttttttacaagagcactaatcccattcatgaggagaggcagtaatgatttaatcacctcctcaaaaccccacctcttactatcattaccttgggggttaggtttcaacatatagatttggtggggtgagggtggggacacaattattcagatcacagcaataagaagacaaatatggaaaggtgtttcagattgaaagacagagtaggcaaagagaaaggttataaaatgcaaggactatttcagaaatgaaggtaggattatgaattatgttttattatgagatgagtttaagctcagatcattaggtgtcttcagaaccatgccattgagtttgggctttgatcttgagagggagccattgaaaatatctgagatgtcaagtgacatggggacatctgtttttggacttaggggtgctgggaaattccactattgccacatcttaaacctctaagaaagagctaggtttgcctgggaattctcccagaccaccacagcacagacagagaggtcagattggatttcctgattatttggcttatggtcagatagattgagatgcaaaaacctcaaaataggctttatggccacttcatctccatttgtacccctgcctttgggctttatagcattctgtttattctgtgtatttctgacacttaacacactgcctggcaagtaactactcagtaaatgtttactgaatgaatggacaaactactaacttgtttcaacagtggggaagaggccaattatcagagcttgagtaaacaatctacacatgagcatctggttttgagctgacagacaactagcctttgataccatcctctggtccttgagtttttggataaatacttcattttcctgagctgagttcttttcatttgaaacgagttcatcttattccaaacgtttagggggtaatctcaaatgtacttcatctccaatgaactgatccagttttaacttcagaaagtcaagcttcac

SEQ ID NO: 41854 - DNA, 540 bp, Homo sapiens
ataatattgtagtaaaagcattatcttcatagaactaaggaaatctgagttcacttcttcattacccaaatttagttgtgcaacctttagaaatcattttatcagggatgcactcctgaccctctgtgatatcatgaaatacgtatttggactttgtccaagtttcttggcatataactcctaaaatccttggaatttccaaaatgctgccttttttgtatgctaatgctggctcatgggttcagaatgggggtctggtcactggaaaggcaaaggcacaattagagagtcagccccaccccccagcctccaggaaggagagagaggctgaaggttaagttgatcaccacttgccaatggtttaatcaatcatggctagataatgaaaccttcataaaaacccaaaaggacaggtttcagcaaggttcaagatagtaaaacatgtggagagttttagaggttgaagcccagggagggcatggaaactctgcacctctccccccataccactccctagatgtctcttcatcttcatcctct

SEQ ID NO: 41855 - DNA, 869 bp, Homo sapiens
gaataaattaggccttagaatgaaaagaatctcaagtcaatgttgaggagcaatttagacgtgaattttttaaattccacagagaaagaaagatagtaaaataagccatgtgtgttcaaatttacaatttctgctgacttgaatcatcagggtattttaaaatcttgctgtaaatcagattcccatgttccaatcttgcagaagccgggaaaattggagatgatggtgctattttgtaagggatacggaagtgggcaagtctaaggacttgtttatacacatagaccagggagactgaacttagtactgggtaaaaaaaataaaggtcatcatggaacagatttgcaaacaatgaagtaaacagaatagcagagatttggctttgtaaaaagaaaaaaaagcgattgtgccagaccacttcagcgcctctagttgctgaattgcaggactggtagttgaaccaaaagcaataaacataatgcatcttggctgtggtcagatattttgatttagtcaaatatgaagccctcaccactaaaattggaaaatatggtttgcagtacagatacagtactagctgaaaagtgatatctgaattgtcctggcatgacgtggagagcagaggaaaaagagaagtgtaccacactgggaatatcacttttgttgttgtagttgttgttgcttgcttgttgcttttaatttttttaggtttcagattcagtaggtacatgttcagtattgttacatgaatatattgtataatggtgaggtttgggtttctagtgtacctgtcacccaaacagtgaacattgtacccaataggtattttttaacccgcatcccctcctaccttcctcatttttggagtc

SEQ ID NO: 41856 - DNA, 695 bp, Homo sapiens
aaaacaagttctgtgtaagtctttagttaaaagcactagagcaaaaatacccatctagatttcattcagtgtttcccaagtagaattttatttttgtggttgaagtttggcatgtttcctatttcttcaagctatataaaacccttttgctgcgtctaatccatggcctgcggacatggaggactgattttgcaatacttttctagcattgggaaacttctaactaaaaattttgtgtgctggaatacttggaagaaaaggaaaggtcatttaaacaaatactatattttaaaatgaagaaataaagcaacattttaaatgtgtgatttttgttaagatacttgccattagtgagagttagggtgggacatatcagtaacgaatccgattgccactatggctctgcccccccaccatctttcctctgggaggatgttggggccaacttacgattgcaacctgtgtgtgtgtttatcctttgtttggatacatgttactaggtgccccactcttggccagcaattccagtgcctgggtggtttgcctgagcaaagtgcctgagtggctaggaatgtagagatagggctttgacccagagcacagggatgataaggtttactatagtgtaaggattagaatgaaggttctcttctgcttcagaagtgggaagaggaagcaacacaggatgggatctc

SEQ ID NO: 41857 - DNA, 443 bp, Homo sapiens
tgcaaaatacacattagacttcagggactcaaaaatataaaataactccttgataattgtttaaattagatgttgaaaataaatattttgggttaaatatactggaattaattttacccgttcctttatatgcttactacaaaatttaaaattatgtaaatggatttcattgtagttctattgggcaattagctagaaagatgatgtaataagaagcctgttaggatgatgaaatgaagttactatttactattgtgtaattatccaggttttttggttttttactgggttgctcattagtattgcatcagttttcaacaaagtatagaataggagacaatatctttgtagttaggatttttcattttctccccataatggtaaagatattaaaactgacagagaaaagcatttcaaaattgttacatcagaatatgaataca

SEQ ID NO: 41858 - DNA, 570 bp, Homo sapiens
aggttcccagaaaacattccatcctacaacccattagccacttcgtcctagacaattctgtggaaatggtagatttgtgtagcccaattaatcatgatccttctctatcacacgtagtcttctgttctgctcttctattaaccttctagtcagttgctggacaccagattccctggtagccaggggaaaaaaatgctttgaaatttggcaactgtcctggagtttcccaaacatttacagcaatgtgttggcttattggcatgaacttcctgggtgatttctcagcctaaaaggcaacatgaactctggctgaccatgaagctctctggcatttgtaaaacagcttgggctttgtggctgcaaactgaggtccaggtcagattagatgagcatattatcctgtttactggttcaaaactgacttggaagctaaggaaggaaagggatgggaaatgtgagagctgtagagagccaaaagttttcaaatcagaggaatgtgctgacaagatctcctggggaaagaagtactgtacagcttcccaatgcagcactttgaaagcctcttgtctt

SEQ ID NO: 41859 - DNA, 1630 bp, Homo sapiens
tgcccactgagaataattagaatgcaaacatgctcatgatatactctcgaatgaaaaaagcagattgtatgacattctggataatatgattctactcatgtaacataaattcactagaaaaatgttatacatcaaatgttaatggtcatgatatccacatggagaaatgagacttaataattgactacttctaatttttttcttgttttctaattttaaaaacaaacatatgtgtggtatatgaagaaacaggaatggaagtagaatgagaaaggaagcaaaggtagagcttagtcatgatttcctaaataaatatttcaagcatgaaagggcttcatcttgaaattgggacaaattatgccaccagtcaatttaatttatatagtttatataagacaagtgaaatttcaaaaaggtgtgtgcctgtgtgtaggtaaaggtgtgtgtgtgtgtgtgtgtgtgtgtgtgtgtgtagtggggggcgggggacatatttaaatgtacaaaggaaaacagctgtaggaaattttcttgtgaattcctgctgtccttaatctatttaccacactgcagccagagtgatctttctaaaatgcaaatctgatcttatccctctctgatttaaaacttccaaaggctccccactggtctaaggataaagttcaaattcctaaacatgactcacaagctcttgcctgactgctcgtggtttacctgctcagacttaaatctcattattctctgctgttttctaaaatacggtcctgatgaattttgtctcagttccactcagtctcccctctgggtttctagtgttcctcttcttgggcaattctccttccaaatctttgactgattatttctcactcatctgtagtgactagcttaaacatcatttcctctgctacgtcttccatgaacaactaaatcccatatgatcccatccacttctggacttcccctcgtggtgcctctctggtagtattataatcatccactgttatgtctgtattccccccagtggctctctgggggcagagttctgaagacactgtttaccagtatacagaagattaagagattttgtaagtcaaaataaaaactcatctgtataaaaaacagaactagtttctctctttaaacttgaaagtccgcttagctcataaaaagctgtgtctctatgtgcctccgattgatcgttgtattcccagtgactaactcttcttggcacaccttgggctctcaataaggactgtaagaaaagctgttcatatggttgttcacgcatcaaacactgactgagagccctggatgggctactgtggactagttaccaactatgcgtgataggcacacagggcatggatgtgctcttcgatatatattgatatgaatataataagagattatagcattgggagggctacacagtaaatacacatgacaatgatcaggtgatgagtcaagtgcaaaggagaatgatgtgagaacacatagaaaggacacctaactcaatttattataccaccaagttttaaaaattatggcagctggttacaaactatagcagtctcctgatagctgtttttcaaaagaactttagttaaactggaactagtaagttattcta

SEQ ID NO: 41860 - DNA, 2175 bp, Homo sapiens
atcaggttgaaagataggtcgggtcagatcttgaaagccttgattttcagatgaagacagtcacatctgtgtctacagaggactcactacaggttgtattttagaggaataatgtgattgaatttttacattagaaatgtattaacttcccacaactaacacttttttctgcagatgtatcaactacctttcagaaaactcctccaggaaatttgagcatggctttgtcttgtactcctcatggtaacacaaatggtcactcttagacctgaattgggcagatttcatttcgtctatttagttcatatattggacaaatttgggcttgtttctcctgggctgaaccttcaatgtcagcagtggtgatttccagccatattaagatatgaaaaaaaaaaaccaccaaacacacatgcacacacacacacacatacacacacacagaaacaattaaacacaagtgtccttaattttgagatatttatgtgctttggcaggagcacactctggattttcagggccaagtgctccctgcttcctggaaacttgacaaaaaagagaatgtgtttgaccaaaaactatcaaaagccagaacattccctgaagttctttgctggctctaggaaatggaacactgggcaattcttcagtacagtgccaggctaccttaatcatggaaagatgggaaagatgaggcagctattactacagctgcagcaaagtgagaatgcctgctcactcattcacatatccacctccctaggtctatcttgtgatcccagcatccatgtgctttagaattaatataagcagatctgggttattgacatttgcctgtggtcccagaaccaaataaagctgaatattttataaggtattataacccacaattctagcctcactcatctgagaaaagggagactcctagagaaagatgacatgtccaagcccacatggctgcttggtggaaacagggattagtaatgagttcttccaagtccaggtaaggacacaccacagccttctcttataaacactgcaaaaagtctagactctaactcagtaatgatgattcattttatcaataattttgactacctcaaagtaactctgatgacaagcaagttaaaactcctccagcttagtcttttggaggaaagggtttttcattctaaatgctggtttacacacagtaccatctgcctcagggtgttactaaaaacttttaagcatcacctatctactgctgagcctttcattaggcatttgtaactgaaaagaaaaaaaatttaagggaaaaaccaaaaagaggtagaaaaactttcctgactgtttttagcttcagttgattctgacttaatcctactggcatgcatgattcaatagtttatgtcaaacacaaattccagcccagtgccctccatccgacatgttctcattcctgagcctgacagcagacctggtctcctagcaacactgaacattttctctgcctagtcatctgtagcaattggttctttttcatggctgtgctcttgtcttcagtccagacaaaccaaaaaccttccctgtaatcaaaggggtctgatgtctaaagtcagacctggaaaatcagttgaaattgaacttattttcttccttcctaggtctccacctccctttctctccttctttctcttttttacacacaaacatttgtatgcacatggacacacacacaaaccagcaaaagaatggcctgaaatctgtcctggagatgggaatactatctagtacaacaagcatagaattgttcttgtctattgaagaaatcagacaagtcccagtgcctctttggttacctcatcatgtagaagggagatgataaatactcaattcaaagtgtcattgtgagactcaaaagatacaatgaaggatgaaaggttttgtaacaataatggctatacagattaatacagttattacattataagcagaggaaatgtttttagacatgtatttaggaagagatgcaactacgcaagcctgtgaaaaagtcactactcacttaagaacaaagctcttatcaagatatgaatggaatttattctctttaatcatccaaatttcaacttgtaccagagccttcctgggacccatagagagtaatgattgcaactgatgaggcatataaga

SEQ ID NO: 41861 - DNA, 462 bp, Homo sapiens
tatagtctcagatattctgttctaggaacacagatggactaagacaaggtggtaatcatactttcagatttaatagaattcttattggtgaaatatttttttccacatggaaccaggaccttctttaatctatcaaagccagaagttacagttattgggaaacataaattccgcagttgggtcactatgagtcatgagatgtgagttaggccaagctaattctacttcctgttttattacctggaattgtgcattttaagtattgaggatatagcaccatatattaaactttggctcagagcatagatataacatcctggggaaaaaatgccccaacctgtcaggacgttatttcagagctagtaccctagctgaacatttaataggccattccttcgtcctgctaagccagctgcttcccagtgatgcaatgtggggtataatcaatggataccttggctt

SEQ ID NO: 41862 - DNA, 4653 bp, Homo sapiens
cagataaatcctggtcctctccaatccacagaaagactttaaacaatgtacttagattcttggggtcttggtttctataacactgggacaagaataaacttcttgtcagatgtagatcaatattaccaatatgtatatcaatattaccaatatgtatatcaatattaccaatacaatcaaaattaccaatacagctgctgacactccatagttattcaacatgtgacagctattgttatgtgtgtgatggtggctcatttatagtaagagagaggagagaaaagctatggaatggtctcaagaccaagaatgggaagcatctgatgtggtacccacagaaagtgggtaagtaggaagggatgggtgagtttgggtttttagaatcacttccagaggaggtggtaggcatgtatgttctccttatattgggattctcagtctgagaaatgaatcatttttattctttcggggtattaacttaagatttctgaggaatattgagaatttaaaaggaaaattcttaggccaaaacctaaatcctagtatctgactttcatgcacctagtgttgacagcttgtagtgaacattttcagcatctggattatatcttattgcagcatattctagaacttttatcttttccacattgagaaaatcagtttttaatagtattgtttcatgtgtctatatttctttgtatagcagaacatagaaatgcaaattgcttttgaggggagaaaatacatttatgactgatgctacaagcagactcctctcatttaatgtacattatttttaaaataaatacaaataccttctttacacagatacagctcttatgagtttgcaaaataatttcacgcatatttcattcacttttcataacagtactgtgatgtaggtactactattctcattttctagatgaggcaacaaaagctcagagtttaagtggtttgggtaacatggctaacaagtagttgatccagatcatctgactccaaatgaaatgtactttttactctgcatctttttttttctcatttcaatcattcaatgtaaaatgaaactgaaacatgtttgctcctgtccacaaggaattcccaatttcataggtcatgaaacacacacacacacacagtcgagtgaaacatgaacagggaactagattgagatcactatgagtggaagtggtcagggacatattgtagagtacggaagaagaaaggtaagaatatttttagagagtagaaaatcagccacccattttggatgattgtaataatcaagttgcgctccacctccaggctctaactctcatctgtaaacatgccaaagggaataggacattgaattcttggctggaaatgaaacaaacaaatgaatcatctaaaaattcaaggttagagtaggttttcatctgatgagaatgagagatatctacattaatgggctccctgctgatgcagtatcccacagtaactgaatctgggatatctgccaccttttaccttcttctactggcagcctcactcataaccagagtttgagaaaccaaaccataactttttctgagccactatggaaatcatggtgaaggaggagacaaagaaaagggcagtggattagaattcagaactggattttgtctttgtgttgtggcaactggatgagtataactttgagcaactcacttcatctccccacattccagtttcatcacctgtgaaatggggctaatgacacctgcctagcctacctttttcttaaagaatgaatgaagagccatatgtgaaaatgccctgaaaatcataaaatatataaaacattacacagatgtacaaatatacctgatacatttttcatgatatatgatttccaagggattcttcttataaaaccccttccattctcgcttgcaattcagcaagcactcctttaaaaatatctttgcctcagcataattcccaaatttctgatatacacagagataattgtgaaagtattgtatgcaaaaactgttgaaaaagagtcactttcttcaaagcctactcttctacgaaattgttggttgttgtttttagtagggctcactatgctaggtgagcatgagcattcttaccagatatatggtttaatgtggagggttagggtagaagtcagtgaaggagggggaaaattaaaacataaaggctaaagaatattgtttcctgaaaacctgttaaaataagcaaataataaccaattctgtgtgacattttactctctaccaccatgctattcaaaacgtgctttgtgcatgggccaccattgggagcttgttagaagttcacattaccgggccctactccagaccaaccaaattacaatctgtattttaacatgatcttcatgtaatttgtatgcctagcctgttcaagtttgagattcgctggcctatgaggtacatccagctacataacgccacctacttcttaagactattttattaaaaacaatattgttaataccttgccctccacatggccatgtgtggtagctgagggatttaaaagtagactttctgccgggtgtggtggcttacatctataatcccagcaccttgggagggcaaagtgggcagatacatgaggtcaggagttcgagaccagctcggccaatatggtgaaaccccatctctactaaaaatacaaaaattatttgggtgtggtggcacgtgtctgtaatctcagctactcaggaggctaaggcacgagaatcacttgaacctaggaggcagaggttgcagtgagctgagtgagattgcaccactgcactccagcctgggtgacagagcaagtcactgtctcaaaaaaaaaaaaaaaaaaaaaaaagacactttctgactctaaagcctatgtttttcccactacagatgtcttctgttccattcatctctcttggatattacattatgaggacctaccttgaaaccagatgtgacctccagtaatcccttctgactttaagatccactaatttatttaaaataccctacttatataaccctatctcatgactcagtaaaaaattacagaagcagaggaagaagtgcttccttttgtgggacattcagacgctttgggtttgtgccaagatgtcaggggaagttcccatttcacattcttcttcttttgcttggataattgaggatctcaaatgatgtcagactttctgaggtctttctgtgaattcattcttggctgatctcatcatcagaatgccactattataaggtaccgcccctggaattgctcaaactcagcagctgactagacttcttcaggatgcctcaaggcatccacttgaagggccacttggagcaaagagtctatttctgttcttaggtgaaggcctgattcagttgcttactacaagtgcttgaaatttgctactggatgtccttcatctttctctttcttaacagattcccaacttatcacagaaaatatgtttgtgatagcagtaaacagacagtggttgacaaaactgtatcatcagtgatttcttacagcagagaactatgggattaaccacacctcacttagtgtaaaatacacactgtatatgggcagaaaaaagaatcatacgaaccaaaaaatgaaacatccaggggataataaaaatactatgattatatcctgaagcttcctggcttaccagatgtgccaaccttagttttatttagtgatgaggtacatatcatgtcccttaaaatcctcatgagttagctcaattggctttccagatggagaccaatggtcccaaaatatctcacctccttcctctccatccctaggatgtagcacagaagacacccacaaattcaagagagctttaaggtaaaatacctgtggaaaccctcaatgagtagatagactcagagtcactcacaaaatgagaacaagtccccagatgattgtctctgtttagtgcattacagtgagaaacgtgattttattccccactaagtctttctagccatccctggagccccagccaccttataaaatgcatttaactgttgcactgtcattcttcctatctacagatgcccacagatctttgcttatgggattctttcagcctgaatgttcttcacaaactctgcctttctaaatcccaggaacatttcaatgcaattcttctctgaagccttccttggttactaatattaaatctaacaccaaattcacagcttatgtgtttcctagagcacttggatgttctgcctgttttagagtttttttgtcattgttagtctgtcttgctcgccacatatcaatctgttttactagattgttttacttgtttgtatgattttacaagctcctataataccaatctatcacacattctaaaacagatgggtgcaataataaatcgccatttgactggggaacgtttctcttaaagttaagaaaaaaatatcaggccttgctcctccaaaaatgtcaggtggatcacctgaggtcaggagttcgagaccactcctccactgtggagtagacaacccatggttataaccctcaaaccctgtggtcctttgaggttgccactgtatccagggggtgtaaccaaagcagtaggatttgctctctggcctccatgaa

SEQ ID NO: 41863 - DNA, 792 bp, Homo sapiens
aaaaatcatcaaggaaggaaacaatcaggtgactttccagagatagaaaactgaagagcaagatgtaaatgtcttgagagaaactgtataaagggcaagttgaccaaactgttgaaattgtgatctttgattttgtggaggtaattaacatccaactttaattctacattacagaaacaatagaatcacattggcagacaatggaaagccttagagataaaaccaggcccttgcctaagatacttgatacctacttttagggtctaatcagaaattttggcatcctaaacaagaaagaagcagggactcaaattgaaagaatttattttgcagtgagacaggatctgagggaaaaaggaaatggtagggttactgagcacactgagagtattgtgcaattctccctcactgaacagttccctgaccttgaccttgagttttcagcttcattcaactccatagactgccaagggaaggcatctgttctggagctttgctcatctggttgatagagggcataagaatggcacaaaggaagttgtggagtatttactggtttgggagaggactctttaaaaatcattgtttgggaagttggagctctgtaatttccggtgttagatcaaagcctggtacgtctgataggaattaatcttctacttactttgtgttgaagagtggcttcctgtgcccagaaataagttggagtcatggacgactgagtggtatttcaaactgtagtaaagcatgacaacaaaatcaacttagttgcactgagtactggccatgtgg

SEQ ID NO: 41864 - DNA, 2560 bp, Homo sapiens
gcctcccaagtagctggaattacaggcatgtgccaccacgcccagctaattttgtatttttagtagaaacagggtttctccatgtttctcccgacctcaggtgatccgcgcgccttggcctcccaaagtgctgggattacaggtgtgagcctgggagttgcttttttcactcaaaattgtttctaagaaaatattcattttacatataactgcatctatttatttttttcatttttactgctataaaatgtttcaatgtgtaaacacaccacaaattatttatcattaaaccagtgaaaattttaaaggtttccagttttcttactgtagctataattgtcattcttatacatgtaccctgatatacatataagagtttctcaaaaatatatgcttattaatgcattttaatatgaagttggatgtttaaatttacagtataatgttagtattcctttcaaaatttattagatcaattggtgaccatcattaatccacatatgctacaacacttggatgcatatcagacatcttatattttgtcaatcttgtggacatgagtctggtttaaaattacatttttcattaattttattaaggttttattattaaagttattaataagattgagcatattttcacattttaataagcttatatcatttatcttttgcaaaatgcctttgcatgaatttagcttttttttccatttgattgtatttgttataattgatctattggtttttaaaagtgttctcaatattaagtctttgtttattatatactatgtggtggttattcttcctaattttggattgccccttctgatgtttctattatgtatttgatgaacagagtcctttactttaacatagttgtatgtaactattttttaaggttttgtttttgtgtcttatttaattagaaaaattctttaatttatggtaagaaatttattcttctgtattttttctgaattttttttatatttaagtctttaacctatgtaaaagtaatttttgtgtatggtatgggttagagaccatgtttgtttgtttgtttcccctgtaaatatccacttgccccacagcatgtattgaagcatccctcatttctctgttgatctgtaatactatcatgtcttatatcacaattccatacatgcttaggtctatttgtactctctattctatcccactattcagttttccacccactgaggatttatgaaaaagttttgattttctgatatataggtaccactcatttctcctttttgccttatccttcttttgcgtcttcatcttcttgacttgcataaggtggtaagagtgagggtagagtaaccttcctggaaccaaaataaccatgagaacggaagccatacactaagaatgacaaggagagaagatgactgagcaatgattttacaaattcatcaaggcatctgtctactacctaccttgggacaacttggaatgtgagaaaaccaaagctctattggctaattctctgtactttcatgtgacattcaggaggtatgctgctcttcaagtaagaatcttccacggagtgggagttgaggggtcgtgggggcgggcagtttgctgacagcttttcgctgcagtgctgttggcagctgctgcaactttctagttaaagccacacttttaacagctcacagataatgagtaaatacagagggggcattaggaagtgatcattgctgcccaatgcaggactactttatggacatcctttaaacaagaactccccatgggctggccacaaggctttataagaacactcaacagcctgaagtttttctgacacaattctcctgctttcctattatccattcacaggtgtcagaccaggctgtatttgttaactatagcccgtaggctaaagctggtccacagcctgttttttgtatggccgacaaactaagaatgatttacatatttcgaagaacgatacaagcgactgaatattaggaatatatgatagacaatttatgtgacccacaaagtctgaaatatttgctctctggtcatttacagaaaaaagtttgctgatccctccgatccctggcaaagacttttgctatctactcctgctgccttttcctattttttttctccacaggcattagccatcatgcttttgcaagtctaactctgtcttggcatcctccttcccagaacacttaaactgacacgtttggtttctatcacattaaattataaagatgcaattattaaaagggcagattcagggtcagaatccagggctggtctgtgaccctaacacaccagatttctttgatgatactctcacagtgaaaaaaagaatgaaaaatttgagagagaataaaagatggatccggtaatgagaaaaataaatttggtttctgccattattaaccagctagcctagtgatatgtaacaatcaatccaaatatccaaagactggggcatattttcaacttgactcaatcctgtgaaactgaagtttcattactctcttttcttgaaatccttttctccattctagttc

SEQ ID NO: 41865 - DNA, 8512 bp, Homo sapiens
tcatcatgtccaaaatgaaatttctgactttttttcaaacctgctctctctcagtctttccacttttggtttatgtctgctccatcctatgaatttcttaggcaaaaagctttggaatcatttttgacaagtcttttgctttcatacctcacatctagtcaatcagcaaaagcagttgactctactttaaagtaaataatatccagattctaaccacttcctcctatgacagactgcaatcatcaagccgtctcttgcctggattattgtaataaccttctatatgaactcattgcttccctccttatctacttacggtctatttttcaacacaacaggaagaatactcttactacgtctcaatttagatctatgtttcctttgatcaagacttattatcttttgctttcattcaaagtaaaagaggaagtctttagaatggtctgtcatatcctatatattttaaatctctttccctttatgccttcattttaaaatactatcttcctagcttacttcattgcagctgcgttggcccctttgctcttttctgaacatgttgtacgtgattctaccttggggaacttgcatatgttatttccggaatactttcctaccaggtaccacttgatttgtttcatctcttttaaattatttcttaaacttcaccttctcattgaagacttccattgccacattattataaactgttaccttcctccaaccttctcaatagttcttggctatttagtttaggattatcactgtttaataagctatataattagtatatccattttattatctgcattccttacctagaatgtaacttcctggaagaaaggaatttttgtctattttattcatggctgctgggttgcacaactccaggggcaccatttccattattgcagaaaatatactgcgaatgttagattcttaaaaatattatgtgaggccagtgtggtggctcacgcccataatcctgcagtttgggaggctgaggtgggtggaacacttgagctcaagagtttgagaccagcctaggcaatatggagaaacctcatctctagaaaaaaatacaaaaattagctgggcgtggtggcatgtgtgggtaatcacagctacttgagaggcttaggcaggagaattgcttgagtctgggaggtggaggttgcagtgaaatgagatcatgtcactggaatccagcctgagcaacaggagtgaaaccctgtctcaaaaaaaaatatatatatatatatatatgaatcaaacaatcaatctatgtttagaaagtatgtctggtaagagtatattaccatatactgaaatggaaaataaagcacaagtcaaaattatttttacatgatgctctgtaaaaaaataaaaaataagaataaaccccaaagcctatctctgggaaaggaaaaagggctagagaaatcacatcaaattatttgaaagttctacctttgggtaatatgactattataatatttaaaatatttatttccacttttctgtatttttctactttcttcattaataagttttaattttattatcaaataaatacatattgtggtaaaaaattatcacaaaaaataattttaaaaccactgcccttgctgcattgaagcttatatatctttgctgtatttcactctcatcttccagcaagtattctctgctattcctcacccttgatctagatgtctgcttgacccagatcacctataggctgttggattttttaaatagagtcaagcagcagcaatagacacttagaaaaagcacagcattaatagaaacaggaaacttaattgacaaaaatgatttccaaaaagaagtaaaagcctcttcagcatagcaatgtgttctatcccaggtcagctcagttaagagatctgagcacagttttcaaactttatctttcctaaattggtgtgtgggggggtttgggtgtgtgttcacttttttttctattttggaaaaggggaacaaagcaataaattacaaaaataatgaaataagtgaactaaaatcacagaaatgctattcaattaaaaataaatgaagcaagcttaaggtttagctaaggactctcctgaaaattgcacattaaagagaataactcagactccactttataaataacaacttaccctcctgaactcacatggtttgataaaaagaaacctgttcttttaaacagtatttactttgtattattgactattctttggaggtaaattaaaaataatagagaaaggcaagaaagaagatcatttgccaaagaaacatgacaaaagcatctgaaggaccacctgcttttaactcctccttttccccacaaaacacaaaaaaaagccccaatcctgaaccagaaaataaagcaacaacattagggaaagggtgaactgacagcaaatctattaagtgcctggatgggtgttactcagaaaatgtttgggacaaggttggtcctgagagatgacataggcctgtggtttgcaatccacacagtatgttgaaatcctctgggaagctcctgctaggactctcctctcagaggttctgattcctttgatttgggtgaggccttagaattgggaagtttcaaaagctcccaggtgattctaacatgctgttatggctaagagccactgcatgggtctaaggccttcattttatgaatgaagaaactgggtggagatctccgtggctcacctggctcatcagtggcagaacgagtgctatgtttcaagtttacttctctttccacctaacatcctttgtactgcttcagcccaggacaaggtcttactcatctcatagctactttaccctgcctgcatttaatgaggctggccctgtgataggtgtcccgtaaatattaattaaataaattcatatctagttttcaattgctgataatgaccatattggaaaacttatcaatagaagtggagtgtgccaactgccaagggatttccagagtttccagaggttcagcattgagaaactctctgattgcctatttttaggactcaacaagccatccccacataaccctagaagctgcaatgacttctatcaaagttgcatgataccagctaaatgaagagattttagggcaggctgggggtaaatggggtttttgggaaatgaggaaagaaggaaattcagagacattacacgtgagccacatgtaaaatgaaggaaatatacacaaccagatcatactaggaataatgacaggctgaaaaaggtgggaatatggggacaaagtgaagttttctcttgatctgggcaaatatagaaagtgttaaacaagaggaggaaaggtttgaagaacaatggcattcagataaggatgagctcacacagaggtgatatctacttggtatgattcacaatccaagttttcctttagttattttcaggagcaccaagatactttattgcctttcaaacttctgctggccttggccttaccttcagatatttaaattctgtagaaacagagtgagaattctgatgcatctgcttaatttaaggagaattcaagtcaaattgactggcaatgatctttgcacctcacccatcatgctaatgtctgagactccacattagagctgcaagcctttacttataagcctggtctcaatatgaacattgtccaggaacaggccacacttaaggttgtgtcagttattgatactttaagataatgagtgaatgagttccatcacatccttatggagtagttttgatcatcatcattacagaaacaataatgggtttccagcagctgtctttcactcttccacctttgtgaggaacaaagccacttaagtttgcacagtgctttatagttcacaaaatatcttcatatcttatcatttattattgtatgtcccctttttatagatgagaaaaagtattaagtaacatctcctggcatcctcttctattaccacccttgatgaggaactcaatttgagagaaatagggcattctagtgggtggagccactcaaatttgatagatgggccagaggcatcatagttctttcccaggatcatggtgagtcagatcctgtcccaagccacctcctctaccaagaatggcaatcttgcaataaatgattagaaaacaagccaataatcctttttttaaattaaaaaacaatttattgaaaaagagtaatgctttatacaaattcctattataaaaccccaaaatgtctattggtctgtttccaggtgtggtagaagaatataaaaagatcaaaattggataaattctattgtaacaatttcgttggtcattttgggccataaaatttttttgtaatgtttggtaactgatatccacatggaattacactcacacatcatgaagatctatgtatgtggcaaaagccatttaaattttaacttccaaaagcatatattctcaggtttggaaggcacactaaaatttattaggtccaattcctcataagacacagtggctgactttccttgtgtagtttattatgaagtaccatttccaaactaactatcctagcagcgtcagctgccagctaacagcaagagctctgagggcatcactgaacagatagcaccttatgagttattatgattcaaaaatctcccttgctgttggatttaccaacacgtaggcttttatttcttcccattacatctgtttagccacagaaagcatcgggccatactcactgcagaagataagacttcctcagaatcttatttgtttagtgcactcaattttacttcactgtctcatcacttgagagactggttaaggcaagaaacccatttcttaacattttttttgttttcaaacatttgaaaagcaacaccaaaacgtatgcagttaattcctcaattctttcccttagtatagcactttttaaattacaaaaccacacttacatgtattctatctcactggatccccacaacatcactgtgaggtgggaagatcaggaattacaaaccaccgcttacagatgaagcaataagcttacagcagccaaatgccttgctcaaacacagacggtgattgatagcaccaagactcaaatccaggtctccagacaccaatgccaacaccctttccattacatcatcttgctcaagtgaaatagcattctgtacagactggaaaagtaagagcagttgttaaaatggaacagagcacaaacatgtcagacacagctgaaagaatggaaatagactggtagagagaggaaggcactgagccacatgaaggtatgtgcgtaggttttgttcagtggaaatagactggtagagagaggaaggcactgaaccacatgaaggtatgtgtgtaggttttgttcagtggaaatagactggtagagagaggaaggcagtgaatcacatgaaggtacgtgtgtaggttttgttcagtgacttcttcagtgtctcagccagctgagcaaataaagacactacataggcatagttcatgttcaaagaatgagagtaatataaactaattaatattcacactacctcttctaactggttaagtatcattatctcaatttggcagatagaaaaaagaggtagaaagattaagtgacttgcttacagctacagagagaatatttgtcaccagattatcactccagaaagtctagcactttgttcagacaaacagaccacaccttattaggaagatataaaacgcatgataattacacttgggaaaacaatacaattaaggaatggggaacaaaaaggtagtttagggggatataaaactatgaataagtagcttaaaaattcaatcaataaagttgtgttacaacacctgggggaacagcatgcagctactcaattggacaaatattttcaaagcaaacaagagtgctatgggtcagagtacagggattgtgtgggaaggtcaacaggaatttatcactttggtcatgcagaaagatttgcctccaaagttctgatttgtaataaattcttcttggctttagaaactaaaatgtaggctatgaaatgtgttagattcaggagatagagaccaatgaaacacaaaacaaataagggcttaataacgatgcaagtgctataagattatggtaaaaaataaaataagtatatgaaaagggcacgcatgaagaattgaaagaattcatccttggtaaattaggctaggtcttgtggcaaaggcacccaaagctaatgaagaagagtaaatgatatttgactgttacatatgtatatatagacgaaaaagaaaatataccaataaacatcttcatcaatatggaattaaatacatttacctattttagagatattttaagtatgctagtatcaacataatgagaatagtattttactgtctatttttaatagaaaaacatgtatatatacatatctatatatatttaaggagcaccccttcccccagttgagtatgattactcaatgggaagcagtaatacaaatggaaaaatcttccctcctatattgaggaaagaagataaaataagattaagccatgtttagcactgagtattttaacacatgggttttttgtttgtttgtttgttttgtaataccatacttcagattacaatacccaaaattctaaggtcctaatgttaatgatagtatctcaatgtccattttcggtttgtttcaacatgattttctccttttgcctctgtgtcacacgtagtctttcccgctggaaggtgcaggttttggatagggccttggtgttgggtaagaggttgtttttcggggacaggaacagcaaagtagggcacctcccagaaggcagagagaagcagcagcccagccagtgaagagagcctgaccaaattcgtacctaaaaggaaaaacccatgtgcttgttaatcagtgaattattggcaacttttctaatataataaaaggaaaaaaaatcaatactcattgtatttttttcattgaaaataacccctgaatatcccttgggaagtactttaagatttctgaacatacacgccaaagaatgtttatattgcaattggtgacaatttgcaatagtagatcaggaaataacacatgtaataccaggttaattacacaaataattccaaggacttttccatatataggatacttgtaaagcatgtttatatgttttagaagtagggtttggatcatggttcctaggctgaaacttagcaaaggaagctttatcactaagtagtaatcatattctataaagaaactgatagagcataatggagataatcagagctttgaacagatgatccattggtcccaggcacctatacaatctgaaatccaaatcttatggttttgtaaagaaaagttctaagcagcccatgaaccattctggattaagctgatccaggcagatgtattaaagcagacacttagggtggggtatctgtgagtgattatggacaatacggaagagtagagaagggttggttctataagttataaggccaagtctaaatcctgatgcagactctcaactgctgcaattctgggatagcaacttcacctctcagcctcagtttctcctactctcaaagcaggataatcccacctgcctcaatagactgcttttaggatcacatgcaataatgtaaataacaattgcaaaatggctggcaatttataaagtgctttcctgtgcattactggtgttattaccttggcgaaattttagcctactgacctctagcagtttctattcttacactgtaaatcttatgggatgggctccaacacaaccattgcagtatgtgttctcccatatgtgggtgattatataaaaagaaacacatcttatctctccaaacactgaggtttttcatccattcatctaagcactcaacaaacaataattatattttaacatcctgactgaatgtagttattaggcattaaagatgtgaagacagtgagatgaagagcctcgtctctgattaaagaatgttgttacacgagagctaagaatcagctcaacttgcacaacctgcagtattaagaaagatgacctttgtaaagccaattttacagttgtgaaagaacaaaaaatttcaaggtggtatctgaacatactaaaaacatacataatagctttacgtgtaaaaatgaactgttgggaatgaagtattattcattaacccctatagtagtataatttttctcaatcaatcataaactgtgcattagttacaaataatcttaggtaggtgttgtaaacatcagaatacacttcaaaaaggaaatttcaaatatattaacatctttattaatatttgaaaaaacaaacaaaagaaagcccagttatacagttgaaaagcacagagcttgaaacttttctactttggaaggtattttgtcatcaatacagggtgttaaagcaattatcaaactcattttgacataagtcagagatcatttaaattgtt

SEQ ID NO: 41866 - DNA, 7278 bp, Homo sapiens
ttattctcttgtgtttagcttaatttttgaaataatactgagaaatacctcccttgagagcctggtatgctaaaatcttgctactaaaagccagacttagcttaggtcactgataactagaaactcatgcagataatacaaattgtactttttgcttattttgatctattttttaaagtatgtatctaatgagcttcaaagcttaagttttgtttctttttgccctaatggaatgatgagtggcagagcagagaagttaaaaaggatgtttgaaagctataaaacaacaatttggatgagatagatgttgtatagccttgcaatattaactttgaattggtctgattagaacaaacctaggaacaaacatattccttttctcacctcttaaatttgcagctaaatctacaatattatgaccactgactaaagttgtctatggagaacctggttagcaaacattaaaaaaattacactattttttctcatcattattcagcagtaaacacagaaggcagtcttttaattatatttagctagactgacaatcttgagattaaagaccccctaaggagttctcatcattttccacctgaaagtagaattaaaagtaaatacttacaaagatctctacttataagacaagaagtgagttggaagttactgatctactacacttaggttaatcaacaaatgtgtagaaagacagacatatatgtaatttttctaaagcttgaaagtcttgctacacaagtagtagaatctactatcaataccagacattgtttatgctattttctagccatattaccttaggttctatatatcataaacaaaatatagtcatctcttggtatataagggtgattggttccaggaccacccacaggtaactaaatctgcacatgctcaagtcctacagttgatcctgtggaagccttgtatacagaaagtcaaccctccctacatgcaggctttggactctcagatactgtattcttgatcggtattggttgaaagaaatccacctataagtggacacttgctgttcaaacctgtgttgttcaaatgttgactgcagattccaattctccctttgcatctgtagttgcttaataagtattaagtgaataaatgaactgatgattgggtgactagaacaaaaatattgtgcttccttctcccctgcaattaaatgagctcaacacagacagtcacagaagtgtactcccctggcttttctccatattaaatcttttacttttacggaagttcaaagtttcataaaagtcctaatcattagcatttccctcttattggtgcatgaggtgatggtcaccagatgtgaactcagaacataagcaaaatcaggagtgaaaatgatcctggatgaggcaggatgtaccacttttcaggatgtcctcagaagttttgctacctttcttgtttgtgtgtttcttcaagaaattttctcagaattaagttgatgcttctatattacctccattatatttccttaatcactccaattaaggaaacctaagctatgtgacttgcctcttccccttcaatcactgaagtaataacaaagaattctggcactggaaggaatcttagaactcatcttagctgcaccatccttagcagcaagaatagggcctagcttgcatctgttgaatggataaacgaatcatagattcatctccccattcctcccactctgccctattttataagtggggtaactacttgaaaccagggagatcaagtggctcaccattatacacttggctacttagtgccaaaccacagtaagaacagagaatttctgatctcaagcctggatttttgcttcaacttccattattctaagagtcagaactaatttatgaagtatatctgaacaccaatggcccttcgagtaccctcggttcagcaggcacaacgcatctggagaagcataaataggtgccctcctctccacttaggcttcaaagactgtccacgtcagtgattttgtctctctgattgagcctgacatcatggtgagagtgctggggaagctcacagccaccaatactcattaagcacacctacacacatgtggattcatgcaaagcaagttaaacaggctagaggagcttataaacaaattacagaatctcagggttcggtgagattgagagagagtctagcctaacctcccatttgtctggtgcttggatcttccctacaacattccttcaaaatgcttatttattctctgcttgcacacctcccaccatgcagcctcctacagcaactcaatctttggacagctctagctattaaagtcaagtaagaagaagcatttaagcaagcacataaaattggcgcgagcttcctaaaagtttgagaattagatgaaaacaaggcgagaggtacaggtgaatcaagaaaagtctactacaactgtatctggcactttttgtatattccaactttcagctacaagaatccccagggtcaataaaatcacatactttggatgaaatggaaattgtatcagccattataaaactacaatacacaatgtgacatttgtttccccaggaagtgcctcagttacattttcataaaccgcttggcaagaactacctaaaagaagaagccttgctctatctcattttgtatttactgtatacactattagcacactgtattccttcagatactttatgaaggtcatatgctttttatgacctaccctacataaagcagggaaacaacagattttaatacttcccgtgctaaagccctgcatctggccgggaagacaagtgtgctctactgggaaagacggcaaggtacaatttcgggaaacccacagctaagcttttcacctaaacacacttaatgaaatgcagcttttttctgagtgatactgcttaaatatacacacataacccttttcatctctacatgtaacaaaactgtaccaaaaccagccaatgaatcaccatcccagatctctacagctggtgggcgtaaacaccactgctcaggcagagaaatgaagtaaggtttcctgggttctatccaaaagcatcccgtgagtcacggcaggtgagaggagaacacctgtgagtcaagggtccctcttctgagaatgggttttgagagaaaggcctaagccacaccttggataaactatggctttaagtaaaataaaagtggattctgatctggagttttaaaaaaataggaagacatctctaaagtgtgtgtgggggggtaggtatttagtcctttcaccctagttttaaaaactgtaataactacattaaccaaaaaatgaaagtaaaacattttaacacattatcatgtgtaaggatgatccatttgagtatttacaacatagatcaatctgatttcatttggtcatttcaggaagttaaaagaaaacctatttaaagatgttgaaaaggaactattttgatcagaggaataaaactgacagtgagacctctctggaattgtccttagaaacctccacctgccaattccttaacgtggtacctaaaatgcctgacaccgtttccttaaatatatttatctttccatggagaaattcaataattattaccaaatttttcattttataagtacaaatataacccctgagggcaatgagcaacacataattactaaacttatggattggttttggtgtaaagaagtcctgatatgagaaccttcaaaagctgaaataataacactcaaaacaaccatgcacattgactgagcaaatgccacaggtattcaaggtgttcaaacagatttggaacaggtttaataactctaaactatatggcttttgatatacactattaaaagttgtcccttgataggaggtagacaaaacaagttaagtaaacttgaacaatgccaacacttttcacccttagcatgcaatgggggccagtgggcagtcacgttcatctaggcaaagactaagggatcttttcttcaagtgagttaaagggcataacagacacatgatataagacaattaatgtgatttctcaaggaagatactccagccgtgaatcattattatctaagtaaatgggaatttaatgacttttcggacaaggaactcgaaacctttaatttaaaaaacaaagtaaaacaattatcctattatccttcttcccaccatccttagaaatatgtctctctatacaatcctttccagttttacagggggtcactgaacatccattacacagaaatttctttgtggaagatggaaacctaaggaagacccacctcttctttctctctcactgccttccactcccagctgacctctgatttcatcagctatgactattttgctgcatttcccttcagtgcctttacttttttctttgtattatgttgcgcaggttatttagaacctttcttgtcagcctttccccacctgccaccaaccttctctttccaagatagcactacaccgtcagcctctacagaagaccttgggtctgaaaattaaaacttcgggggaatctcaagcagcttctccaaagagtcttgcaaggggcctccctgcactaactggatcttataaattaaaagaatcaacctcaagcataagcagaagacacttagataggacatttccagtaggaatgtaacttttactatgaaaaaatcatattaaaggttaaaaagttatatctaatacttgaggattatttatttaagcgtgcacacttgagaagttaccaggcttcaaactttttcagtcatcccattttcttgtctgaactctaccaatcctcaatttaccccaaatctcggaatgcctaggagaggtctaagagctcaagttcaagtttggccttcactccctcaactcgaaccaccagcataggaatttaggatgaagccacacctagagtggcagaagtgtcacccagggagttagaggcaaaactagagcttatgcctgggcgtcgctttcctcaaaccaggattctcttcatttccttatgacagagcacatgatcagaagacttgatcaactgaagactgataaccatggaatcacacaacagaatgagcccataagggagctgcagggggactggggcctctggacggccgctgtgaggtgggggtgcactcactgctcagattcagcaaggagtcaaagactttgcactggatctgcccggtgctctgcgacacgcaggacatccacagcccctcgtacatggcctgggcggtcacgatgttgtcgccggcataggagtaaatcctccactggggcagggcagtgctgacgatggcgccgatccatcccaggaaggcgagaatgaagcccaacagctgcagccccgcgttggccatgactcgctcgggcgcccgcgctggctcaggggtggcaggtgcagaaggcggagagtttgcaggtgggcaacccggactcccgaaggtggctgggccccgcggaggaagttaaggcggggagccctgctcgctgcgccgccgctggagaagctctgggtcggggttggggtccgcgcccggggcggcgctggagtctggatactagaagctgcggttgctcccaggctcgggaactgagacgcagaaccgctgggcgccgcgatttaaagcagctccgcccgcctcagccccggcagccggggagcgccccctggcggtttcagggcggctcaccgagagggcgccgggagcgcccggttggggaacgcgcggctggcggcgtggggaccacccggcaggaccaggcaccagagctgcgtccctgctcgctttctctcgtggatcttctcgctcctgtaaggcgtttcacgcttttcattcattcactccaattatccaaaaattactatgcactgtacttgtaaatcctaacacaaagatgaaaaaatgatccttcaagagctgcagttttaggtttaatacttttttcccaatatcttattaaaaggcatttctacccaactccgcgtctcctcccccatcacaccatttctctctcctttgcttggcttcctcccccttctttcctctctctgctctcttctgtcaaggtcgttccatcacttgtctctgcaaggagcctcagagacttttacactctacagattgggaaacagacccagagagcaacatgatttacacacacacacacacacacacacagacacactcacgcacggagcatatccagtacttggctcccctcccaatctgctttccactacatatcaagttgacccaaaatatcccctttgatctatgattgtcctttttgatgtattattgtccttatgaaactgcaggctagcagcccttccccgccaaacaccaacctcctccccacagcagttatgtcttagagcagcaattcattatcagagggacctggccagtgccccgctctccctgaaaggtgttaattttgtgagttatcaaatgttgttcgtcgcaggtgaggacatgtaaacagcgtttccccagtggcaaaaggactgggctggagttgaggaagtctgggctctggttccagcttttactgtgactggctatctcacccctccggtttcggtctcgctgggactgtagtttccctctatgtttctccaaagcttccttctttgtagttagtcagaagtgctgttgtggttaggaatcattgaaatgtttttccaactgctttttgtgtgtggtgcgagtgtggtgggaggggaagcttctatggttttagtaaaaacagaagcatcttggaagcagaaataaacatattaaggataaaataagatatacccttatataccatggcaactgctagttggtgacagagaaggaaaggtgcaaattctcaaggtgggaatgggaagaaaggccaagccccaccaccttcatttccacctggctctccctggatgcctttcatgtaggcttaaaactaaaggacttggccgtgctaggatttagggacaagcaatgaagaatgtaagacaggagctagatgaagacaattaatttggactgagattaacacagtgaatactgtctttctcctatcagctgtttaggacaagaccatgttcgtgttgtatcccagggttagggcctgcagtcagtactactgtctaggtctcagtggatgttctgtgggtgcctgtcagtgtggatgaagatgtatcaatcacatttgattttgtaaaaattccctgatcagagaaggcactggaa

SEQ ID NO: 41867 - DNA, 1766 bp, Homo sapiens
tatgcaatttcaggttcgctagctagaaatgtttccaaaattgagaatatagtacctaatattctgagttccaactgtatgctcactattctaagcattctgcctgagattctagaggcagaaacttgaacgaccttttgtttactgaaaaactattgtttcattgtgaaatattggttctaaggaataaactattaaaatactcaattatgctgttttataataatagtaactagttgtgatccatgttctaactgaggctcactctctgtgtgtcataatgaagttgtttaagtcaatatggtaaaaatggcaagaagcatgagctgtagcttcagattgatgcattccaatcttggctttgctggttgctcgctgtgtgatattagataagttacttatcatcctctggatgcttcatttttttatttgcaaaataagaatactagtactactttcatcatccggtggtggtgaagggtgggttattacatataacttatttagaaaagagcccggcacatgttagctgctcaagaaatgttatctcttgtaataactggtataggaggaagatgtgagaatcggaacaagtacatgaccctaaggatggagaatggggtgaagtgagagattttacaatggaacaagttgccttattgtgtcataagatgaattataaataattaacatgccataaccactaggaaaataatcaaaagtaaaattaattttccaaagacatgcatgtgtctatgtaacttttaaccttcaaatttaaaactaaagtcttaaaataaatctgctactctttcagccttatcctgttctctctcctacctaagaaagcctcagaaacaactgcttattctatgacatttgcacaaggtagaggttaaaccagggagaaccagaatcaatgagtaaacatgagaaatagaaagaggacagagtgcaacattgcaaaagtcccacagttaggaatgaatttgaaactgattttctgttactctgacctttgctaccatacctatgtgaggttagggtcaatagatgagcatgatctgctgtctgattatgcctgcccttagtgctgcagagaccatcctggctggaatttgaatgcaaacagtgatgtcttctcccaagcaactttcttcctctaccgttgacattaatggtggctgccaccatattcccacaagctttatcaaatatttactgagtacacagtttactaaacacagctccaggatttagaacagccaaaggcttgtttattatttgctacagtattatttggtaaaaattgtctttggaatcctaggcaggatatagaaagtagcatttagttataatctaggccctaactgcattgtccaacttgatagccactagtcacacatggctatttaaattttaattaatgaaaattaaaaattcagttcctctgttgtacttgacaatttcaagtaactacatactggcaatgcagatatagagcattctgccacctcacgtacttatgttgttcatcactactagagtgttcttgtcacagttctaaaatgtatttgactacacggatagtctctgttgaaatttttaaaatatctctctaaaaattagtctattagttttctgtggttactgtaatgaattaccacaaatttagtggcttaaaacagcaaatttgttatttgcagttctgtagttgagaaaactgaaagggatctcactgggctataattaaaatgtccacaagc

SEQ ID NO: 41868 - DNA, 1268 bp, Homo sapiens
cccagcttggtagtaaggatgaccccaaacctagtggtaagtagagtatttatagtttcttgaatgttctaacagtacaattgctaaagtgttggagatgccgtagcttttacagtgtctttggcatttgagagaagtaggggaaataataagattatggaacgtggaatttggtgttagttgttgtgtgccttttggttactcaggagaaaaaaaaatgactaatcattaatttaaaactaagtgcaaaagtcagaggttatttctggaagtctttaaagagacttttctcacttgcagcttgggagcatgttgagccggtgaaccataggccttagttgtgacaagagcaaaacttcagaaaagcctaaattcatgcctaggtaagactctggatgccataataaggcagatgtgcttcagagagtgggagttaagccatgcagattcagtggcttgccacatatacgatgcttttagggatccagtggtctggtgcatactcgaacatcccttccaaggtaaagggcaaagttatggcatcttttgtatactaccattaaaaaagaagtaaaacacagcacatacaacacttgggaatactacaatgaatgatttagcaagtgctgtggaaagttccccgttttcagtgaggccctgagcaagaaagggcatgttcaggccatatagcacaagctgtcctaccacatggcttatgtggcccaacagatcctatagttgcataaaagttatctctaggagataaaggttttgtgtggagtctctgacaagccccaacagaagggtttcataacaggctgctgagattgtggagcaaggccatgccatctgcagcagagcatgtgatttaaaatgcagttgcatcaagacatgagacaaaagctgttcgccaagaactggacgctggcagtccaagtaataaactacagcagccccaacagcaattatttataaaatagaagtgttacagaatggatcacccttaaaatatccaaagggcatatgtaagctggatgaacaaatattccagacttctttgtcaccagcacagtctcacctgacaccactcaatcagctcacacttgtaacctcatgggagaatccttatgagcagctaatagaggaagaaaacaacacaggcttggtccatggattgttcatctcagtatgttggtgtggacaatggactgctgttgtaatatagccccacttggtaagtcctggaagacagtattcatgggaaaata

SEQ ID NO: 41869 - DNA, 3571 bp, Homo sapiens
tatgaagaatagccatcattataaaacacagagcttccaaatttctgtaactaaataacaccttcagagaaattgcttatattacctaaacatctctgaataacttcttaaaattcccagaaaagccatatgtggatttttatgcatgcacctccaagaagctttaattatcttaatcatattcactactggtattaaaagtactacagataaattgctattaaatattatttaaacagtcattaatatttgatagatttaatgtgtatataaactgttcttaattttcatataagtattatagagtagtgaataatgtatattatatataattcataattatacatagtacatactgtattacatactatgtattctgtaaatgcatttgtataaatgtgaaaatatattaaatgttaaaattatatatgtatgtatacttttagtcgacacttttattttggcaaaacattaagaattaaatcactaaattttccttgtcttccataaaaaagtagcataaggaaagctgtggaaataaaaaaaaaaactaaggattccagataatcatgtgattaggttatagaataaaggaggataaatgtctggagaaagagttgcaaaaattaggccaagctgtaaaagggggtcttcttgctcatgctaggaatttggttgggatttagggacacattgaatattggcagagaagggtcaggtagctgtattttcacacagatcgattcagaggaaataattctatttacccagaagtgtaaataaatgaataagatcagacttttacttagaagagtatggggaaaatagacaaaattcagagacagaggaagagttaagctaataccaatgttaacactgaaatttgtagatttaaagggtaaagtaatttgactaaagacacccctctccacctaacacacacacagtgctgctagtgaactctgtattaagctacagtttaagttcctggttcttgttgtcttaccagctttgatagtaaccagggagatagctggcaagagcttctaggggcaggcaggcaggattttggctcggatggatactaccagataaaaggtctttcacaacctctttgttcattttgtgatatttctcagtttagggactttctcttctcctcttcatatcacacacccactgcacctcaggaatttgacttctcctcccttagttacacattctctcactgcacttatggaatttgagttacttcctatcaggtttgaatcaccctatttggcaatcctggaattatttgaaaatgctctcatctcatcactattatttttcctctgtaaacaagcctcgtgtttttccagagcctcttctttcagttgtgttaatctcatatttattttttacaggcctagctccgtctctctttatcataagcagcataatgctctctagaaagactctttgatgaggaaaaggaattctggttctagttttgccactgataggtgttcagctttgtttaaatgctttacctcactgggcttccagttattcattcgtgaaatacaggaagaggctaaaataaacacactttggcagctttccttccttctcataaaattctgactttcagtttgtcccaggtaatctgccagtctatccatctgtcccctcctttaaactaacaactgtatgtttattactgtattgattacattgtattgaaataatcttattcatttatttatgtaatatatataatatttattgaggtagtgctgagcatatgccagggactggactaaacccaaataacaagactcttgtaaccagtccttttaggtcttacagtgtaagtgacaatacacatgaacattcagaagtgtgatggaagtagccaaggatagaactgaagcgtcctatggcacgtaagacagagggatcttccttaaccaggaaggaactcccttaaagaaggaatttacaccgagaccgaaggaaagaaacagaaaagaaagtgttttagcagagggaaccacatgttagaatgcctggaggtgagagagaataaaaattcaaaagaagttctgtttgcttagggaaggaaaaaaaaactgaaggaaaaagaagtaccatgtagagatgtgggtgtgtgaccagattttgctacagggaattttgaactgttttaaagttttggtctctattctatgaacaataaaaatcctccggcaattttaagcaggatagtgacccagtcatatttgcgttttaacagttttgatctagattcataatgatgctgaaattaaaataataactaaattttattttatgcttactatagccaaaactgtacattctttatgtaagttgtcctagtattctttacaacaactatactagtttcttagggatgtggcaacaaattaccacaaactaggtggcttaaaagaaattcattctctcatttttctggagcccagacgtctgagatcaggataccagtaaggtcataggctttgtctgaaggggatcttgggaagtatccttccctgccttctcctagcttgtagtggttactcacaatccctggtgttgcttggcttgcagatccatcaccccagcctctgcctttccacatgacattctcccctgtgtctcccattgccttccctctgcccatgtttctgtgtccaaattgttctctccttataaggacatcagttattgtatggctcaccctaatccagtattaccttattacttccgaaaagctcctatttccaaataagttcacacgccgaggtttgggcggggggacactttggagaacactattattattttggaggatactctttatcctcatgctgtaactgtaagatgtttgcctaactggagaggtgagtgaggaaactgaggcactatgaagtttaaaaatatgtccaaggtcacaaagctaatatgtggcagagacgattgacagagagaccagctaggaaacgattgcagagccatgatgatggtggcaatggggatggcaacgtatagatgattctgataaatatttttagagtagactcaataacatttgttaataattttgatgtgatgagaaagtagggaggagtcaagaaaaactaccagtttttctgggtagacctcctatttatagtgctagaaaacactggacaaaaggatagttttagagagaaaggagaaaaattcagagatgccagtgctgagtttgaagtgcccaaggaacatatagttataaatggatataacgatctggcactcaaaagaaaggtctgtgttagaccatcagaaaattgtagcattcattcatcattactaaatacttatgagtgtctgccacatgtcaattattatcttaggtatcaaggacacagttgtgaataagataggcaagttcctgccctcatggaaatgtcattcttgatgggggagacagataataaacaacaaagataaataagacaatttcaactaggcatgtctgctgtgtagacaataaaaagaggtgatatgaaagtcaatgattggt

SEQ ID NO: 41870 - DNA, 1534 bp, Homo sapiens
gccatcttttttcccaaacttccaagaaccagcctcacaactctaatactattttccaggatccttgaccaagtattaaatcttgtatcacagaagaacgatctgaaatcaagcaactctcccttagatatctttgtgttttactaatctccttttatttagcaccattagaactcttagggtccagtatatacacagtctcccagattcgccagtctattttgtctaggtctggcaatttattcaccattgtgttccattcctcccctagccgacccagttcttttcagccaggtatggtgtgacttaaccctgcttgttagcctagaggagaagtgttagtatattcaaagttcgagtgggtatatgttgccttgcaaggcacaggcctctacataattcttaagcaagggggagcactagtctttaacttgaagaaatgggccactcttacaaccagagaggattcatgttcggaaagcaagtttgtaagtacatcagcccagatattgccttctcaagtttaaagatcctacttctcaatcaatgctttctggagctcttaagtcctgggcctgcttttattgtccctgcagctgtgggaaatgagagtatttttgtatgccgcctctgacatttaccttaaattggtaatttaaattaggatttatagcttttaggctttcattttctttctttctttctcaaaatgtatgacatgttgcaccatccatgtattactttccaacattatgccagccaagttcatcaccagtgaaacttttaacaatgccactgacacagcatgccaacgctatgagtaatccatctactccactgacagggtcttcatttccagctggttagtaggtgatctaactttttaaaaaatcccattttaaagattgtatcttaggcccactcctgataccagtggtcttaagtcacattccctggggaaacagactctcaactggagacttagaagcaggagatttactaaccagtgctcatccaaacacacctgtaaaagggtgagagtaagactggacagagagaaaagttaaactttgatacacttacaaaaacaccttggccaatcccccatggagctctgtgtttgggatgacccttcagagttgacccaaactgggggaaaggaccgtgactctcttttctacgtcctgagatgtgggctgctttccaggagggagggtatccttaggaaagaagctccctataacagagcagtcgctagagaggatctcagttttgagcaatcagcatctaagtctcccagcagctttggggagtatcttattcctgcagagggatttcagaaacataccatagcttctgctttatttgatataatatgagctgagacctccaaaattaagaatgtctgatgtacacaaaggccttaaaattgccccaaagcagcatgtgggagtgttcaaagaacaagatacataaaaacattcaagattttaattttagcacaacattttaaaccacgggttactttgaaatc

SEQ ID NO: 41871 - DNA, 1256 bp, Homo sapiens
aaaatacttgcctgcaaccttatttattcatctgtaaaaggaattcctgaacaagagtatctccaaactcctttctagttttaactaggagtttccagaaatctagcagagaaagatatggggataacaaagtagaagtctatattgcatagtgttatttaggaccatgttctctggagtcagtcaaacctgggtttaaatcctggctccattatttacttactggaaaaactgggataagttaccaccccaatcatctgtttccttgtccattaaacacatgcttataatagtgactacctcttatataattattattacaacaagcaaagagctaataataattcaaagaaaaggtcacgtatgaatgagggctcacaatgcacttacaagaagacagcaattgagaagatccttgaagatgaaggagggtctcagtaggtagaatcagcagacgagagataagagacaaaaatgagagaagttctttctaaaggagggtaaaactcacaaggttttcacacatgtagagaacaggatatacagtacaatagaaccttctacctttcatgagtgatgcttccctgagggctgatcactcatgatcactcatgattgaaactacttcactgataaattcaagggaatgaagtgacttgcttcatcgtttcagcagagagctttcatgaaaccaggatggcagtccaaatatcatgggtgccaggccctgattccatcctattcaatggtagatgagttcttacgtatgagtcctgctgtcggatcttgatgagtaagggtttggacaagtaacaggtgaaatggaaacttgttcctgaataagtgccagttttgagtaggcctcactctccttgggaggacttccatctccctgactcatctacattggcttttgtaatttccactggacgtttgcctgtgttctactttgcttgtcttggatccaaactccaattctgccactttctagctgtgtcaggttgaataagtcacttaatatatagtcctcattttcgtcatctataaaatggtgatatgatgcctttctaattatgtcttgtagtacaaaataaaaataaatacaaatgtttatatactccaattgaatatgattaaaatgaggaataatgatagttatttccattaattcttcaaaaactgggctatagacctttgaaaatttgaggcgtaagcaaagaaacgtacttgatttgttgttgttgagcctcagttac

SEQ ID NO: 41872 - DNA, 2930 bp, Homo sapiens
tctggacaatcaaagcctgaagttgcttccccttattgagaagaaggaaatggaaatggttctataaaattaactgatgcaaggcagggttcccggtaccagagctaaataggacagcatggaagttattcagatgaacaatgagtgtgagtacaagttgcaccctaaggaatactaagtataaaagatggggaacccaaagttaattctcaagtccaaaggtcaggactggaatacaaatgacaaataaactacaaaggctgcaaattcaggaagccattagaagatagggaggtgacgccggtgcagtgcaaacagcgagaaaaagagtaaagggagagaactcttggtaatttcctaaaatacaattgattagaacttgtttttattagtttccccatacctggttggtgggagttcactctggtttaaaagtgtaagtagatggaagtttaagtttacaggtagcagtaaaaaaagatgctacctaatctgttgcttgatcactgttactctcttgtctaaaaccttcagttactctcaaagataagttcaaatttatccatgctccttcatctggaactgaagatcttccacaaggttaccatcacctgccactccagcttcattttcttatgctgacctaaacatatgctaaactctggacataccaaagtactcactcactgcttcttaatttaatacttactcctactgcctctaggcccttgataatattatttctatccctgatgtgatttagcaccagtgtattggaataaaatagaaagttagtcatctaactttctattttattgtgttaggtagggactgcttttgtatatttgtcactccagaatgtttaagtgagaacagatgtgctgagttaagaacacaccagttaagctaactggactgggaaggttggcatgagtgcagtgataaggactcaacctaacagtttatagagagtatcctacatttcctggcaatttcagtgtttccttgcccaacatggattaagtacacactgaaatcttaccatttgcatagtctttttgatttacaaagaagagctgacattgacttcatgagagaatacttaaatatttggagagaaaacaagaaggaaatacaaaataatgaaaggatattaataatgaccaattgaatgtgtttgagtcaaaagaaaaaaaaaagcctcaacttgtgagattaagcccaattcagacagattcattttatgtcctatttcataatgaacataggatatatgtggaagggtgtagggcattcaagagaaaggttttatgccagaatgacttcatgagttgcctactaactcaaagggagtagaatgttaacctttcacattaggtttattccaacctggttcactcaaaacaccccccattgcttaatcatgctgtaccatgatgaacatcttgtttttccaggtgaagtaagttacagaatgagtaacaacatatgccttgctactgaatttgaggctgatttttgatgaatgattcactgagtaattgctgaggtttggcttaagtaaaacttgaattctatgaaagaaaacagatgcataaacagcatactattttcagggcctcatgcttgcccaagcattctccacattggagatgtcaattattcccatcatgaactgattcatgaattttgtaggtaacatttgtaccaatggtgatcctaccactatttgaacccccaccaaaccagaccatttccctttcagtcagttctaactgttggaaagtcccttcttaattgagcataattctgcttctctgtgcttttacaatattttctagttatattctctgaagcctgccagaaagatcataattcctttgggccatccacccattatttaaaacccactgtcacgtttgctctgttccctttttgaaaacaattaaaatactctttttgtcccaatttccttcagtcatgcttcatgtgagatagttgccagatagttgccgatctcctcattaatctcactaactggaaccttctctagttgggctttatcttaaatagtggtacccaagagtaaacacaacaaatccaggtgtgggctgcccgtaatgaacactagacttccagtgcaacatcacataagctagtgtaataggattttaaattagaatcatttctgactcagtttttactgaatccactagacaataaagaccaagttccaaaatgaaacaagagacctatgccggagttgcaaaaatggtgtctgagaaccagttttgcagcccctagtggaccagctatctctctccctttcaaaacaaacaaacaaacaaataaacttaaccccaagaaaggagttagagtttaggagataatttttggagggagctattgatatgtactgagtaccacttttatgtcaccacggagggggcagacactgggagttcttgaatctcactttaagcctaaagaacaaggcttcagttcatctgctctgaacacttggtgtttgctccctggatctagagaaacacggtaaacctgtgcacttctccagctaagaaatctaaggaacaaaagttctagcagacacattgcctacatgatggaagatgactgcatgatggaggagtggctataaagagatttggcctatgtacaggggtacagatactcatatcactggaaggaagcggtatctttgtgctttgaaatgactaaaatacattatattacctgaaacattacctgaaaatgacataaatgtcatagaacttgccctatattttattcaagggtcaggggaagaataggcccaaaccaaatggatttgaaagcaccataggagacaaaaatgaaattgttttatgactacactttttctttcctttgttttcaacttagtaagttgt

SEQ ID NO: 41873 - DNA, 1198 bp, Homo sapiens
ctatatctgggctatctgaatggctattttaacttttacaggttacaattataaatatattacaaactagtatgttaattatagatcatcttaaaaattcgatgcagaagtctcactgctgcttttcttttgctgcttggaattcagtcagccaaatttgcctcaggcccaataatctcaaggtttacctcaagtgctcttacttaataaagacaacctctcagttgagggagcacacatgttccccaaagagaagctatcattcaccaacaagctcattttctaggcaagttatgactcaatagctcatgagtttccaggaatagtgcgtgcatgaataaaagctacaaggggaagtatttaatgccaacaggaataaagatattgactattatattaagtcaaaagtatgcagcctgtagcagtatgattttcttgatctgaatgctagttacatggttgtacttcctttgttaaaaggcatcaagctctacatatatgattagtgcagttttatgtattcatgttacacctcaataaaatgttgatttaatataataaaaaataataataacatagcactgccttactttgtcatttagaacaaggcagagagtggcaagtaattacaagaaattatacctgacaaccacgtcaaataatttaatgttgtcacactttaaaatccagttttctgaattcctagctctgcaatgttgggcaagccatattaccttctggagcctcagatttttctatatctcctaaatagaaaaaataaatactcagttcatgaagatcctatggtgtgataacataatattggttaaacaaaaagcacagacttaaaaagcacctgtctctcagcagaaatcagtaactcatttatttgttctcatttgtttgttcaagcattctttctgtcaaacaccattctggaacacaaaggcaaatagataagctacagttttgctttttgagtagcataagtaatatcttccctcaccccaccccttttcttccgatgcctgattcaagtatagttttctaaccatttcttccaacatctgccacatgttctctggttagagtaggaaaattgaccctgcttcactcttccctcctctcagtggtgtgtgaaacaccttccaatgggcttacatggagtaccataccatctttcataaagcactcacca

SEQ ID NO: 41874 - DNA, 2156 bp, Homo sapiens
acacagcagaaggtgcctgaacaagagagatgacttaatgaaagcctttataacgcttcccgggatatattacagactaccatctacagtggcagagggcagctgaaggaaggctcttgcaaaaacttggggaaatggaaatgaatgaaggcaaatatttgttttgagattatttccttctatgtaacctattagttcttttattcgttccccatacatgtattgagtgcctactttgtgccaggcactgtgctaggcaatgggtatattaccagtggacaatacagatttagtcttgctgtcatgtcctgttgcttgctcatatgaatgtcagttcaagacagcaagagctcaggactgcggagatcgcatctacatcctgccgcgctctgtgccggcacagggtggttgcgaaaatcgtgcagtctgaattgattcaaggccttgcagcatgattgctaaatacgtcgagacaggaagaaagggcagggtggcaccgatctcaactgcgagagcacgatcttgcaatgagcgcatgtgtgcgcctcggtgtgtagtgaggggcgtagcttcccacagcgcctggcagcgtgccgagctgcgctgcaggactaaccctctcctttccccgcgcgctcaagcccgcacaggcggtggcagggagccgaaggggccgagcgcagccttgcatccgtccgcaggcgggcccggcgccgcgcctcctggcggcgggcgggaccgtccaggacgccgccccgcggccgcagctcctggaagcccagagcgccggtggatcgcgagccaaggcggcgggtggagcctgagccgtgaggccgtggccaatcgcgccgctccgggggaggagccccaaagggggaaaagaaagtgcggcggaaagtaagaggctcactggggaagactgccgggatccaggtctccggggtccgctttggccagaggcgcggaaggaagcagtgcccggcgacactgcacccatcccggctgcttttgctgcgccctctcagcttcccaagaaaggtgagtctcgcgccgccgtgagggctcagaagtcaccaagccgcagaatctcagggtagacggattcttagagatcctatcgttaaaccctcctactttacagaagaggaaactgaggcacagaacgaggcagcggctgggataggtcatactgctagttaggactggagcccggattcgaacccaaacgttcagagacccatctttgctttgcagggatttaagtaacgcggttgtgggacgtctgctcgttgccgcccccatcctcagccctttgaggggtctacccttgttttcctcctcaccgccccctccccgctaccaccccccgcccccatctcctccttggtttctccagaccgctgctggaagcgccgaggacagaaggaagcggtgtgtcccagcacgcccactcggtatcacgtcgctctcagcgcagagctgtgacagcctgggaaaatgctgcttgcagcctcactccctcttcccctgacctgctttctcagaaagatgccccttcagagggtgtcggaccagcttctggaggagcgcggggagagaggagcgaggcccgggcgccagtgacctcctatggtactgtttcttcccagccccggaggaagcggagctagtggccctgtggggcacagggtgcccctcacttgggaagagctgacttcatggaaccatagagccccttccctcttctaaatactgagagggagcaaggaagctgagttaaagagaaaatcacaaacataaaagcaaacttcggctgtttcctttaagagctagcccacagcctgtcttccctccaccttctggttgtgaaattgtgaaccagggcgccacgcgaagcattctgctgctctgctgtacagatccctggtttagctactggatgagaaagaggacttgagttttgactccagctcttccatgtattagcagtgtgaacttgggcaagttatctcacctttccgatactgggtttttcttttctttctttcttccttttttttttttccagccaaaaaatggagatttataatggtcacaatgagccctttgggtagttggaaggatgaaatgggatcattcaagtagcatgtttagca

SEQ ID NO: 41875 - DNA, 796 bp, Homo sapiens
aaaggcagcacttccaaccttgcctgtctatctccctagcctggatctaccttgctggaaagttactttgtattccagcgatgatcccagagcattttgggtgacaaggaaaaaacagcagaagactaaagttttgccccagataacacttaatgaggttaatttacagaacttgctggaggtttaggacctaatattgatcctgtgcctcttgtgtaccaggagctgtgctgaatgtcttagtttcattatctcattcaatccttactgcagccatgtacaaattttagtcgtaaaccaaatttacaactaaaaaataaaaataaaaagtgacatgcttgacatgcttgcctctacgtgtgttttgcagggctgtggtgataaaatcaaatatttcttgtgttttgccacatttttctttgaaagcaaattttgcagcgttgcaacacctctggagtctccagggacctcccctgcagtgaagacacatttggcagagaaatgaggcaaaggttgcatgtggaaggcaggaagtttcattccagttgacagtttactttgacctggaagaagctggtaccaatgagctgagttctattttgtggattacatttgtttgcttctttgtagggaaccaatatggtgcttgtttacatttttttttttttttttttgcttttggtcttgttatgggatgtttaaaaggtgtaacttttatccttctacattttccaagtaaagttcagatgtttcgatattcctgacactatttgataaattattttaaggaaaggtc

SEQ ID NO: 41876 - DNA, 872 bp, Homo sapiens
atttctgaagacaggttcatttcagaggcagtggatcttgatggctgtcacagaacttacggtggcatctgtttgaaccaaccttttgagaatattccattcttaggatgacctgtggcctgactagataatgcagcgtgcctgtgaatccatatgtaaaataaaagtatcaatgtctcatatttgtatcatatttcaccatttattaagctttatcataaacatgatctattgtgatccttatatcatcctatgaggtaatccttattttattgataaggattccagggttcagaggggttaagtacattatccaaggccacacagttaaaaagtaatcaacagcaaactagaacagaggttgactgtgtcctagagaaatgttattcctactacccagaaattgccttgtatttatatgtacttattgcataacaaaattggactatacactgtggacacaaacttagattcccagtcaaaaaaggagagtagtaagaaaaaatctaaacaaaacagatcagggcagaagtttctcaggcctctaagacaggtgtaggtatctacccagaggttttagaaaaggaatagtttatttttagacaaaggcaagatgagagagactctggagaagctgcagaagggacctgagtcttgaattaggctgtgggaaagttaagacttatttcctttcagtgatagacaatttggtctcaagtggagttttaaaaatcatctgtatcttgtggattgaggattgatttgggaattatggcttgggctcccccttctgcaattagagttttcactatggcagtattttccatgagaccttaataggtatattgcataaaaagaggttcatggtcaaa

SEQ ID NO: 41877 - DNA, 2766 bp, Homo sapiens
acagctccttggctgtttagtccagcatctgtcctgcttggttaggtgtcgcgtttgataggtgagtttcttgatgtcctgattttcaaatatgttaaatataattcttgattttagtttgttcttatttgatttagttctatgtttgaatgctatctgctcacagaggcttccttgaccatcttaactaaaaatccctaccagtcactctctctccctccatcctgttttagttttctttgtaacactcacattccctgatattatattagccttctttctcttctctcctcctcctccctcttcctcttctcttgtttcctcctccttttccttcctttttttcttcctgaactccctgtccttcctccttttctgcctcccttctttcctttctctccatctctttttcttcctccttccctccctctgtcttggattttaagctgcctgagggcaggaacttgttcaggaacttttgtttgttatccaaacactcagaataatactgacacatagacacatagcagatgctcaatacataggtgttaaatggttgaatacatgtccctttacatcctttcccctgcccccagactgtccagttttataatggaacgtgtttgggttcatgccagtaattcatcatgtggttttatgtcctccctcatcctgaaggaagagggacaggtgactgtgttaccattgctgaaggatcatggaggttccagaagctaatgagtgctggtgccttcccagcagtcctgaccatgttacttttctgaatgacctttactgtaatccatccaaggagtccccagcccccacctcaagtgctgttggtaagagagctttctatccaggaactgtgactcataattctgccaggggaagctaacttcttgaataagataagttctcataccagccacattgcgtcaccgtgggagcaggaaacatgttgtaatcccctcagcccatctggcacgtactcatttgccttccttatgaagaggtgtattgtgtctgacagtgatgccacttcctagttggagggagaggaacaaaaaggacatgttgttgacaaaaacgaaaagagcaactggctctgggctagtgggggaagaaagaaatcattgcgcatcttgagggatcaaccaacctctctgcacatgaaagtattgccttttacaaggcatctgtggatgctgacagatttgttggtctttcatgaggctctccctgtgctcaggttcccatctcaacggaaacacaggttgatgtgaggaacaaagcagaaatgttctgaaaaccctaaagcaatctacatgcgtatcatattagtaagacatttattttgttctgagtccttccatgtgggccttttaagagaatcctcaaatataaaaaagaaaccataaaagcataagaacttagcgccatgcaatgtgttttcacacgcagtgaactggccgtgaagtcatacgattctgacttccgatcatgatttttctggtagcagtactgtgatccccttatcccctcaggaatgggggagcaacattttcatcttaggtgatgataaaagcaaatgattttttaagaaagctttatttccctttaaggaattaaagcttggataattataatagcgattctataattataatgtgctagttatagtaataataataaagctccctttgcttaaaaaagcagtttgcattgtacatattcaatgtcagtctcacacccaaaccatggggtagtcagagctgttgtaactacctttgttgggtaagacaagttaggatcaaagtatttaattgtattactcgaagtcacacagctatacttagcatgcttgtgacttcaacgagtttctggattcctgacatccatattatttttacgaaatatgctccagttggggtctattagaatataaattactaagaaaaaagattaagatctaagggatcacaggtaatcattttgcaaactgttgaagaaccactctgtgataggtttctatgctttgtaggtaaggtatatccttacacgcttatcctgccccctcacagcactgaaacattttcttcaggaggaaaatgattgtaatacaaaattcaaacccaatattcctttttttgcttattatagtattaaatattttcactaataaactcgaagaagttctgtttgtaagacttcgaaatggaaacttcagctcaatacacgtctcttttgctgtgcctcattggcagtgtgtcaggaagctgaactgttaaaagctgcctttggagtagacataaattttggaacctgtgatcccaagttgaggaggtaataaaaatagcaccatatagaatatagtgaatttaaaaaatattaccatatcaaaattatttgctggacaaatcacatgaaaaagagagtacactgccaccccaaaatgcaggcacacacacggatctttgagaaagattttatttcaaagtcaacagttgactgtgtgccaggtgcagggctggatttcacacacattatcaggaacttcgcaggaaccattgtacaggggtaggggctggagactcttctacctgtttgatagtttaggaaatgaagatccagggaggtggcccaagtgctcatgatagcctggcttgcctgatagagccaggctgccttgactccagaaacagtgctcttttttatttttccatactataattgcctttctttaggactgtgctctgctactag

SEQ ID NO: 41878 - DNA, 3034 bp, Homo sapiens
attctaatagttttacagtagtatcttgtgtgatttttaatttacatttatataatgactaataatttggaccattttgtcatatgtatatctcctttggtgaagtgtctgttaaaatattttgtccctttttaattaagttcctgatatttttctttgacttttgagagttctctatatattctgaaaatgagttcttcattgaatagctgatttgtggcttgtctttgctaacctttaattttcttgttattttaaaaatcttgctcccaggcccatcactggatctcctatagtctcttaggtctactcagtatgtttatagaacttctaggttttttcagacacagtggggatctaggaagatgaaaatgaccattgccctgttaacaaggagcttttgagtagctggaaagagaattcaggtatccaaatatttataacccacgaaataatgtcccgagtgccatagggatgtatagatggtgtgctatactgcagagtgttgtcactcattgaggtttctggttactaaaatactttgaggccccgaagagagaaacaataaagactgtggatgattacatcctacaaactgtaacaaagtggcttccctctttacagcctcatgtattatctttgatgatgatgggcattaggggatgaaaaaggggccgtgccaggcaatgcagtctttctcaacttgatcagtcacagtgcccactctaaccattgtcaagcaaaaggaccacatcagaagccattagcctcactgcatctccccaccccctcagcccgtttgctgtaattgtcccatttgacttcgtttaataacaaatgggtaaagaaattccatgcttgacacatgtggagttgcatgtgtgtgtgacccatcagacagcttcagggcacaagtatactgcccagcctatcttttgcttctgctcatactaatcattaacatgtgtcactttaggctgggcatggtggctcacgcctgcaatcctaacactttgggaggccgaggcgggtggattgcctgacctcaggagtttgagaccagcctgggcaacagggtgaaaccctgtctctactaaaatacaaaaaattagccgggcatggtggtgtgtgcctgcagtcccagctacttgggagggtgaggtaggagaattgcttgaacccgggaggctgaggttgcagtgagccaagattgcatcactgcactccagcctgggtgacagagtgagactccaactccaaaaaaaaagaaaaaaagaaaaaaaagtcactttattcattaagtaccattagtgactctcagttgctacaaggataaagtttgttcttaccctgattgaccctagtctcattgaccctttaccattctcatgctttgtgaaatcatcccacaccctgtgatctaaccccggctgactcatggactaactcatcatggctcacatcagcctggactcctccccttggaggaggagtcagtgcacattctatgcattttttccagacttaaatcagatgccatctcttctgtgaaggcaccgatgagtgtcacccatcttgaagtccgaattaaaagtgccttctgccctcctatgacacgttgcatctttattttttccttttagcatttgcttcattttgctttgtgttgtggttgtttgcctgactctccacccagtcttgacagtgagatctttgagagcacagtctatatcttccttgtatctttatccctcgttggagcctaacataaactgttgcatgtggtaagttttcactgagggtttattgattgaaggacatgccataagccacagttcaccttgctttgtgacccagacagaagaggtgtctcagtggctgatagttgtaactggaggtgacagggggctctgatgtgttctaagcaaagacagccctgtttccctattggccgtgattatgccctcctatctagaataggaaaagggtgatttgattttgagcaataagcaacctgactctaattgtctaccttaaatgccttccattgttctgcttaaggtgattttctaccagcatgaaatgttctccttcccagacagttgatggaggagctgagtcatgcctgactatacttaataagacagaggcagctaatgccccagggagctgccttcgaggacagcttgacatttctgactcctctgctttttaaaagtgggtgttgtgagggaaagttaagcatgaaggtagcttcggagtctccactggaaacaggactatatagtgacactctctaatttagacagatgtgatctaccccgctgcctcttggctgtgatatgtgccttccgatgctgggaggtgctaatcaaggatgtcatgtttttcatgaaagagtctcacttgcttactcactttgttctactttctattaatgagtgcccacccacttccgttcttttctctgaaaaactggcttgatttatatttttcagagtcaggctagaaaatactcttgaagttagcatggattataaacccatcatattatagagatggacagggttacagatcatctggttttaccttcttatacgtgataaaactgaatcccaaagcaggaaagtgacttggtcacagtcagcattaaatttcagactctagagagtgacagatctgcgttagaatccccgtctcctactgacttgctgtgtaattgtgtgggtatcttttaacttatctatgcttcatgctcgtcatttgttaaatgagggccataataaagctatctgaaagaggcattatgaagagtgaaaatgataataaatgtaaaacacttaatacctggcgtatagaaaacactcacaattaagtgaatggtactggtagttcctatggtggtggcagttttataatggtggtcacactggcagaattaggacaagaaaccaggtcttctgaccctatgtctttgttctccatagggtatactacaagatgtatctcaggaactatatttagctatgaggaa

SEQ ID NO: 41879 - DNA, 2848 bp, Homo sapiens
ggacaaacccacatatcagctttttcacttgtaaaatgggaagggtgaaaatagtaattttatgacttgaccatatagaacacatgcagcgttatcttttttggctcagtattaacgttgtctgttccagtcttcctgggtttgattcttagcctgcttcatcctctgttttgaagaggagtgtactgttgtactatttacattcaaagtgccaagtgggaatgtctgtgcagatatttatttggaatatatatttcactgggacaatgtagtagaacacagaatttggattggagaggaatgattttatacttgctacaagtaaactcttgtgttactcaagttatctttctgggtatagtttgtaaaatcttctcatttgcagaatgagaagaattttttaaaatgttgtaaaatctcccttgtcgtccaacactctcagacactttgtcacaggtgaatctccagagcttaaacatcaacaacatttgttgagcacaattcagtttgaaatgggctatactcagtttgaaagtgaaaaagagagaaatataatcataacaacagcaaagattatgtgaccagctctccgctaaacacattaccagtgttgcctcatttaatcttcaaaccagtttttgtttacacatgggaatatttaatttatttgcacatagtcacgtggataggaagtggcagaacgaggtttagaacggggttgttggagacttaccattgcatactccctagggaaagcagttgttttgggacattagagccctggtttggcccctccccaccactatcatatattgtttacccatctctcagacgtgttttttgtcctctctcgactgcattcacttcatgtatggaatgggggtattttcagctatcttactggaattcagggctgcaactagacctgaggcctgtattttctgggactctaatgataacatgtgaaataactttatttcatgcgctgtcagtcttgaatggaaatttcaacacagagactgtatattttctagatattcttcatagcccctagcactcacaggatcctgaataaatattatctaataataagaataaagagagcaaaagctgtttgattattatattaaaataatcattgaatttttacatcttaatcatggattagaaaagatagcttggagggaaaaaaacccccacaaaaacaagctaatgactgcttagcgtttctccagtgtactgtgtcacacttgacacagcctgtttatttattgtcacaacagccctgcaaaaaaaatcattcccttcagcagcatgaggttgctcattacagtaattttttttaaagaaaaccatgaaccatggtacagaagaagcatactcagaattcgttcttttggtttgtttgtttgttttgagatggaatctcgctctgtctcccaggctggagtgcagtggtgcgatctcggctcactgaaacatctgcctcccggggtcaagtgattctcttacctcagcttcccaagtagctggaattacaggcacgcgccaccacacccagctaatgtttctatttttagtagagacagggtttcgccatgttggccagactggtctcgaactcgacctcaggtgatctgtcctgccttggcccagaattcattatgtgggcttctatcccctggtgccactttgatgagagaagcagagcttgttacaggtggctattagatgatgttactgtattaccttccttattctgcacaacagcaggaagggtggctgctggaaccttctgggacataaacacatgataattcagggtctttttgctggtaatccaaaacccagttatgaaatgatttgagatatggaaacagcctggagaccttcagcagcttcgttagaccaggaagctttaaaattatctagaaaacccagggtttttattcaggtgctctcccacaaggaaaactttgtagaaagtgacgcttgtatttacaaactaagagtgaaactccagcatggcagatactgactgcaaactgctcggaggtgctaaaatattcatcctttaataatgctagactctgaaagaccccagctcttttagatttgattttataactctaagtattgcctattataattctgaatttaaacttcgtaggattggttgttttcatccgtcagggttcactttcctttcttacctctttcttttcttcttttttcctttgttcaggtttactttgtaatgatttgtccatactttttattttttaactggatggaactgccacttcaaattgatatgaaatgacagtctttagggcagtgtaaatacctggtgccataaacaggagtagtacactattcggaataaaaattattctaggagcaaactctaatgaaactgaaaccgtggcttgtggatttctccctcaccaaaccctttttttttttgaatttggcattctttcctaatctgacaaatgttatcatcccttgtatctgtcagagctattttccatttttttttcaaattattcaatcaagaaaacttccttttgttggtgggagtaaggtatgtctaattatctggtcctggaaagcagccatctgcccagtgatgaacacgggtttgtatgcagtgccagcaacatgaggatgcgtgatggatgctcacagacactccagctctccctcctccactcctgacttcttgctctcctcttgatgacttagtcagtgaatgtgaattttcagaaacattttctagactttgtttgggtagctctaccctgaataaacatatctaagttttaatattgtgttagttttctct

SEQ ID NO: 41880 - DNA, 941 bp, Homo sapiens
caataacagctaacatttactgaacacacgtattgttccaaacgcttgattttacttaattctgtcaacatccttatgaaataggctgtcatgttttccccatgttatcgttgaggaaccaaggtatagcgtggttgagaaatatttccaaggccacagaactaggagctaagattctaacctatgtaatgtaatgtgtcaggaaaccacacttttacactttcatatataatttactcaaaacaatgcagctactgatgggagagtctgggatttcaggccagttctgtgtgattacaaaaactctactctctagaactgatgtaaggagggtggtccagcctttacttttggagcttaggacattttggaagggcagggtgatctttgaacacatactggggtgtggactggaccgtgggacgtaggtgaacctgtggatagagggccctgagaaatcggaggcatctcagacaaactgagattacaggaaacagaaaaccaaatgtttacatttcagaattgctgaagaaatgggataggattggattgtcctcctccacatgccttctctttctcctcttttttttttctgcatggcggaaaaaaattctgccatgaattcacaattctctaattcaacattaggtattctagtttaactcctgtgagttaaactgatgttcagcaaatatttgttgaataagccaggttttgtaactagtctggaaagcaaaccatagtttgtaagtgatttacagaatttcaaacagctggcttataaaacaaattctgaaatataccatgtgtataaatgggagactgccttgtttattcacataggaacctccaaacatatagaagtaaagacacaggtaatgcagtccttttgttgttgcttttgttactgatgagattaatttagagtctttggcaggcca

SEQ ID NO: 41881 - DNA, 861 bp, Homo sapiens
tgttggggttacaggcgtgagccactgcgcccggcctctgataggaaattctttagtctggcattgcatcagagtgaaatctttttgtcaaaacacctgagggtccagctaggcagtcagcaaatgtagtctgagggtcactctttccctgtaagccagcactgctttacctgaaagccctgtagagaacctcttgcatgtgacttaagctatttagaaaatccagctagtagattatttaagagttcgatacgttaagtagcattaatgactcctttttatcaagattgctctacaaaatacagtctgtaaatatgacaaatgactgtatgacacaaaacagaattaaaatgccccattagaaataaaatgggcagtagtaaaatgaatgaggcaggggaaatttatgagggtaattgatctctcggtcattaagcaggctctctattggcatttaacaaaaatccatttcaggtacgtgcagccagcaacaacctccacccccattacaaaatgttcatccagagagagccaaaataactgagcaaataatgaaaataacagtggaaattaccctgttgtactgttaacataacgtactcagaaataccaaggacacagtgattttcatgccagctatccaaatagatcttagtaaactttcagcaactgcactaacacagcttctggaatttatgatggagttttcttgttttaaggtgccattattcatggaaggagtagaagagtacctggtaataattttgcactgctaagtcccaggctatacctgtggcaggattaatatccccagtttaggataataaaatcaaaactctatgattcaccctttaataagag

SEQ ID NO: 41882 - DNA, 1106 bp, Homo sapiens
ggcaacatattttaggaaaagaatgttgtgaatgctgtttttgcatttattttccaggattaaaaccttcttcaaataatctgctttgttccaggatccatgaaagcttgaaatagcacccacaccgtctgcacttgcttgccctttatgccataaattccttctaaacatagacatccatgtcaagttggcattgatataggatgcagatttatgtgtttagaagtaagtcaagaaagaaagaacatttggaaagactatcaagaaagatgggttgtcagaaaaaataaagaaaaaagaaaaaagataggaaaactaatgaatgctaaaacacactacaacagcttatcagtgtgagttagctcttcatgttctcgtagtccgttctagaattgggaccttcttttcaggctctttttcaacaatggccactggagggcattgccagccagcagtgagggaggtttatagcaagtccttaacagggaaagttaaggtataaaggtcagatgtggcaatagcgtcagacaacaatagggcaaacatgaaaaactacaactacgtgtctcagagcaagattttgctggcacttagactgaggtctaagaaagagttgttgaaatatggtgggtgtttgccctaggttttattttcccttctcactgttaacattgatgttgtcatttatttacagctttatggttgcatgggcctcatatcatttgatcagtatgttctctaacagtttggtctaaattgagtttctgaaaatttgaacctgtcaatgaagatggctgatctccatgaaaagatggcataagcaggtctcttcaaaatgggaaaaggtcctctaggaaagcaaaatgttactttaacatttgaacatacctgcaaatttcttattaagttgatttatagtgtgacacatcaataaggtacttgaggcttgattcactagactgatatgccactcaatcgggcagtcatttagcttattcaccacctctactcggggggccagtgatgcttcctctgatcacgttgaaacggcgcccatgtgaaagcccagcaccatgttacatttccattctaccttctcttcttat

SEQ ID NO: 41883 - DNA, 607 bp, Homo sapiens
tcttaatgtaatagagttgaagggagggagttcactcttacctaaagcccagaattttgagttgtttttttgtcccattattttttttctaggcaagtttcactgccattgctagagagcaggagaaagaatggcccatttgtttagtgatgacaaatagcagctttggtccttacctgggaggctgtgtcaacctgggcctgccttttgtgtatgcctatgggcagcaagtagggattcagtgtggtagctggaacctggctgggctccaatttggcgtgtgtctatcattgtttggggaacactttgtgcctgctgaggcgcactcctctctcagtgactagagctaaaaaaaacaaaagctcctggtgccaaggctaccggccttatctataaatcacttattctttcttcctgtctcttcaagggtagtttgaccttagctcagtgcctgtataggcacaactcatcaatttttcactgacaagttaaaagaccaagtgcaaatggcttctctgattcctgaaacagtgtcagtcttacatatgagtaccttttttgacctattggtgactagtacctccaagaatatgtgtgtgtgcatgta

SEQ ID NO: 41884 - DNA, 1434 bp, Homo sapiens
cttcacaatctcaaatatggagatattttatattcttcctgatgtcacagtgccatctgtattcagtagctattgaccatatattgtaagttcagatattatagtctattacatgcctctaatagtacacgcaaaagcaagtatgtcatcatggcgttcctctttataatacaaagtcactcaggtgcatctctaataaacgggatggtttcttgcggcggcttttgctagagttgcctaataccacccagtcagggaaaaggtacactgggcaaggagggctaaccctgtgcttccactggaaacaagcctaaatctttgtacacgtccgctattgattcctaattatcaccaggagatggcgctgtgcattagtaaacatccggcttacaaaagtacagggtttcagggaaagaatcactggggagatggtaaatgagacaaatgtttgtgagggaaaaaatattgaacagctgatgcaggacgaaggcacatttgtgggatttagaagatggagtataaaattgtgactttttcatgaggcatgtaaaacaattattttgctgttacttattagaatattgctggagagtcaaatcaaacagaaattgttctattcaacgcaatgggtaggtgctcagtaatacgggcgaatgtttgcactctgttgacatcaacctagctctagaaatgttaaatgattatccagttatttcccaatccgagagttctttcttctttgcccaaactgcttactccaagctgtgtcagctatgaaagtaacctttgtctcttacgatgatcctccttgtgcttatttttgtatgtaaaaaattttaggctcatagctttttaatgaatttaagaaaaaaaaatgtgttcttgtttatgttactgtttcaatgagagtgaagtgttttcacatcttgcagacttagagccccctcgatttcatcaaggtcttgcagtctgagggtctagcagtgttgtagtttcagtttcagatatacgtctaagattttttatttttgagatctcataatcttgcagtatttattcgtaggttattacttaaaagaaagtcccaaacaagtggccaagaaatttaaaagaaagttaaaatgagtctaattaaagctgaaattaacgaaaattctgataacatcaaaattttagcgttttggtggcccaaagtatttgggggctgagccaaaaagaaaagaaacaactactttgattcctagtgattccattctaagccctgccagatggattaaagccacaacatctctacagacatttcaaattctgcttgaagcaacaaactgatcagtcctttactctagctaacagaggaaaacagaggaaagtggatcacttcttagagaaaaagaaacaaataaaactatatatataaatatatgcagtatatat

SEQ ID NO: 41885 - DNA, 1047 bp, Homo sapiens
tagctgcttcctgaggtctactacagctctccccttctgtatttccaatcttcttttccgcatattcactttccttttctatcaagtcatgtttgtgggttactagaagagtctgggtgattcagcctatggagagaagttagagtgcggatcctacagtcagattttctgaattcatatattgaatccaccctttcctaactgtgaactcttgggcaattcacttgcctctctgggccctactttctcatctgtaaaagggcagtatagtagtgatgacttcattgtgtgattgtgcaattacattcattaatatatggtaagcttttggacccatgactcacctatggtaaaacagtcaatccagagttgctattactattttagttcaatttgtaactgcaaaagatagatattttatgtagttttgtctacttctcttccttcctttccttttttcccctttccttttcttttttccactttcccttcctttcctctcctctttcctctttctccttccttccttccatccttcctcccttccttccttccttccttccttccttccttccttccttccttctcttttccttgtttcttcgtcacctctatctgtaccaccttatggtcttacgtgtgtcttaggagaccttcacttagttaccacacgctttgggtacatccttcttggtcaagaaggccaggtaccagtcagcttgctgagcctctctagtgtccaggctatgctcattgtaagctgcttcaagctgcagagagtgccagacacagatttctttaatcctaccatcagtaggtctaaattcattgcaactaatacaatacttgtttctctaaccatgccaacattttcttgacatcgtgtatgacctcctgttatttctcaacaaaagctggcaagcacaacctggctggggaagtaaaacagcccagcgggccacaaactgctgctgagtgcatccatgcttaaatgaacagcacattccaaagagatccagagaagctcaactcagaagaaaaaataaa

SEQ ID NO: 41886 - DNA, 1603 bp, Homo sapiens
ttttggaatcagagctaagctattatgcaattgatacctgagaagaaaacaaacttcaaatatccctagacaagttcatgtccaagtgtttgcaaatatatgcataatctagaggaagaggtagaatgaaaagtgagtgcaggtggagggggaagttggggagaaagtaaggaaagtagtaataacagaaagagagagagagggcgagagagagaaaggagagaaagaagagggagagagggagagaaagagagagagagagagagaaagcagatagaggatactaaaagagacacagggcagcagagaggatctgttttaactggcgggtagcggagaaatcttgctccgaaggtggaataaattctaaatgcaaagcttattaactttcagagacccaagtttgccagcggactagctaacgccagttcctcacttaccatcttgcagtggaagaaagcgctgcagaaactgagcccactcaatttttcagtaaaaccagtgggagctttaaatgagactgaggggaggagctaggagaggcgagttctaatctgcgggagctcccggtgacgcccagagctcccggcgagcgccgctctgtgatttggtgagaggctgtcaaaccggtgacgtgagccaggagtcacccagcagaagacaaagtcactcgcgctctgggcggccaccgcgccgggaccagggacctgccgatctggccaccggccgtggggcagaggcaggacctccggccctctcgctccgggtgcgcggcgctgcttcacacccggccccagtgtggactcgccgcgggcggggagacgggcggggagacgggcggggagacgggcggcgaccccgcagccgggaccgaggcgagggccgggctccctcccgctccacgcgcagcgcggggcagggccgagccgggccgggcgagaagatggtccaggtgcctggacgtggggtaagaaaagcccaaaccggcatcacaggggtcaagggactctttagggaagcccatctaactggccccagagttagtatgcttcctgtgtatttttttctggctacgcgataacaatattaacttgctgtatgacgttgtcaattgacttttttttttttctattgggtgtgtcttactttcccctatttctgaaatgagtgttaaatatggaggtgatatatatccatcctggaatgtaagcttcactggaatagcaattcctgtttattttgttccctgctgtctccaaaataccagaaacgctttctcacatgtaataagtgctcaacaaagatttgtaaaaacaattaattaagttacaaatttcggaatccaagtatctttttatattgtacctttcttcacattataataaaataaatgattataattaagaaaacttggtgtatgttaatatctttcaattaaagcatttgatttcctgtcttttctcttaccttttattctcacagttcctattatatctagaggagaaagaggagtaacaccatctttaaaaccatttagccaccactaatagccaacttttatttcaacttactaacgtaatagatataaagcaatttacattaa

SEQ ID NO: 41887 - DNA, 876 bp, Homo sapiens
attatcaaagactctaaatcctcagttaactcatctggcaaattaggaaagcaatacatacccaaaaggtttattaaaaagctgaccactaatgcttacaaaattactattttactgtctatgtattcatgatgttagctcttcttactattagatatagggaattctgcctttgatcatatgcatgctgctgtgcttttttttttttggtaaaagcaactataaatgagaggtacatttgtaaaataacgtgttttttttttttgagggctagacatatttttcaagagtctttgatgacctttaaacacacaagtgttttacaaatcattaactacttcagcttactaggagtgggagtatagatagtgattcagaaaccctgaagttaaacagtgaagaagtattaacaactgaacataaatcagaagataaagctttcttaaaatcgtaacagatggaaaatattttaaattcttcaaatttgatttatgtacatcttaagtataagcctaattattattattattattggtttgacaattttttttgaaaagtgcatcaagtaaacaataatgtaaaatcttttggcagttttgttttcatatgtatgcatgaagtgcatctttcttagtgtgtagatgtaacccatatagatgattttcttctgtgaacaagaagatcagttgaatactgccttttgtattgtgtctaaagggatagtgttaagcggtaggtgactaataacaacctagttgttgagccatcgtaccgcccccgccagggcaaaaatatattaaaaaagataggaggtaatttgacctgcacacaaaccaaatctgcagacaggaaaggtagagtgtgatcagaggtaga

SEQ ID NO: 41888 - DNA, 2427 bp, Homo sapiens
tacaaagataccgttttacatttcagaactctgactacccccgccctacttattgaacaacaatatgctcaggaatgatgagtcctctactgcctcaagagggtgatttaagtctaaaccaatcagtgtaactccatgtcttttgctggtgattcatttaggcatatgcaaaagtcatagtcctggacaaatatatgaaactgttctttctcagatatgaaaccattctttctctctctccttccctctcttgctatccctctcctgctctctggcctcactgagctactaaattaacaaacagctttatctctatgtgtgttgttacgtaagaatataaattcatttgtctcatgccaatggagttgagttctttgtcattcacagacaaaagcgtcctgactgaaatagaatttagctgatagagcagaagtgtatcgtttgttgcataagatatagctgccttatgatagctagggaaataattttactgtttccgaaggttatatgttgaatttgaacaataaagaagatgtctagagtagactattttctacccaaaatcacatcttcttttctatatctagggaatctttccccttataaagggaagcaaaaagaaaaaatccaaatactgatttccttgtcctcctttcttaaacggatgaaagtataggcacataaacttgtatattgtttcaagtgtggattcaggaactagctatgtagaagagagaagaaaatcatgctggcaagggaggctttcaggtaacagtaaacccagtgtccagtatggatggcattaatggtacaatcctagtattatcatgagaatcattctgtgatatggtttcaggcttgttttggcttcataggctctaacattagatcttgtgtcttcttggagatatagaatatccttgttttcatatcctttctcagattaaattagtcatatataattttgttgcttgcaaagaaaagctttgactaaagtattaatttctgagagcctcataggaaattattcacagaactcagatgctcagatgagaacctggtttctggtttaatttaattgaatgtagagatcaaacaaaaaacaaaaaaggaacaatgcaagcatttaaaaaactgactctgtaaaagaaagacaaatcatgcacactagcaccctaccaaagcaatgcaatattgtaagtgtgtcagaggaggagtatgggcagtggtaggccaaggttctgagtagaaatcacatctctgagactatttgagatggttttcagactgaattgaaatgtttcttggaacacgttttaagatgtctgatttcacaggttttagtatggttaagataaccattatgaagtaatcaattaaatccaagcaaaggtagatttatagtggctagactgagagatcagagtactttataaccccaaattgtgaaaattataattttgcctttctttttaggttatcccatctccaactcatacctacaactcctggaataccaggagtttaaaccttggaattattcactagaatgaatcattatagtgtttacaaggcacagtgactaataaactcagcacagttttcctgttagtcattttaaaactttcttaacaagatgttctttgaggtacctgtgttaaaacattgtaacgcctgggaaaccatgcactctcccatgaaagggaactcaaaaccagaacatcacagtaaaatttgacatcttaaaatgaaccctgccataggctgatagtttagaatcatacaatttcagaattggaaagtaacttgatcttctggtctgttggttctaatgacttgctatatatctaaatcacttttgcagcttgaaaaattctagacctcaactcagttaatgtcaccagatttaggaagcactaacccacctagatagctccaactacacagccttcagaattaccaagacacattgtggataaaaaaccgatttattgattatcttaaaatatatgggggaatcatttttaataattacctcttccctattttgatgagtttataagaaatgacccaaacaaaaggagggcaaacagctgtaaagttggaaaaacatagaacatccaaacgttcttttgttttcaacgaaataataagaacagccaactctagcatttaaatctttctcatatgcaaaatacatttacgatcctgagaaaacaaactgtgaaaattgagaataagacatctaagctaccttctgctgttctggaaaaaataatgtcacattactgtattgggcagaatttgttgtgaaaaacaacataagactccatgtgaattacaaaatttttctcagcaaaagaaaaattaatcaagatagaagggaaagaatatggtaaaaatgccagtcacacccttgctgtctat

SEQ ID NO: 41889 - DNA, 1072 bp, Homo sapiens
gggggtgccagtaatctgtgacaccaggtgtcccctcctgggattggactttcccggcattaaccaggcaacaacggctgagaaaacaaaagctccttatggacaggacttcttatgacaaacccccgcccccgagcttgggagattagtaacaaaaaaagtcttgggttcccaggcatttttaggatggccacctgatgtgatccaacaaccatgcccttcgggtgatggagaccaggaaagactgctcccacttagtcagatgtcaagctctccaggacataaaactgaacaagagggaactttatttggtatccctctttatgaacaacacagaaagacagagacaaagaaaaagactgtttctgggaggaaagagatcaaacaatatgaatattcatacacaaagtaccaaaaagtacaccagagatactataccccaagttaagtcacataaatctttgtctcgcattaatcaaaattgtgcagaggaaagagtgatttttaccattcacctgatcagattacagagagagagagatagaggccaggagcttttctggtaagaaattcttactctttttgccagcagattaggtcttgggttctcgtaactgtgacttccagcggggtgaaattttaatctcgctgctcactgcacccaactgaaggtgccaagggctaactttaacctttgcccctctgaaggtttgccgaaaatcactgacatgcggcagatgtaagattaaaaggagaagaggatacaaatttatttaatgtgtatacaggggagccttcagaatgaaggacccaatctactaatggtgttcaaaaaattgtatattatcttgaggttacagaaagaatgcaggctcagagcatggccaaaaacaggttttagtgacaagagaggttatgggagagagaaagaggcttggctagcaaaggtagtcttgttatgtagataaaacccagcagccctcagagagaatagatggcaaatgtttcttttcagacctctgaaagcattagactctcagttaatcttccctagatctagacaagaggaggg

SEQ ID NO: 41890 - DNA, 626 bp, Homo sapiens
acctggagataaaaaaaaagagtgggcaagatatggaatgacagattggattgctattttagataagatcagggaaagtcactaggagaaggtgacatctgagcagacacttgaataaaattggaggagtaaatcacacagttattggcatacagggtctttctaggaagagggaccagttaagtgaaaaggccctgaagcaagactatgcgtggcttattcaaagaacatcaagttggtcaatatgaggacagggcagtgagaagggaatgagaggaagccaggaggtgactttagcagatgatgctaagcactttagactgaattctgagaagatgagataccgtccaaggttcatgtacaaatcaatgacatgctctggcatgctttaaggtataagtcactctggcttctgtgtcagtaaactccaggggaataagagcagaaccaagaaactgcgaaggaggctacggccaaaacccaagtgagagatgatgagggtttagaccacggtagcagcagtcaggagatgagatgtggaatttttgttgtattttaaagcttgagttgactgaatctgctgaaggataaatgcagggtgtgaaagaaagacagtaaagaataaa

SEQ ID NO: 41891 - DNA, 4294 bp, Homo sapiens
aacccatgtcggtggaggaagggggaagagtgatggggtagtctcgaggttcagacatggcacacgtttgggagagaagctcacctctgaggagtggggaaagaggcagtttcccaaaaggaggatgcattctgttgccaggagatgaaacaggagaggttgtctattttagagagatagaaatgtcacaattacaatccaatgtgtgcagcgctataacagagataagtctgacgcctcgttatcacccacagtacctaacatcacacttggtagacacattcatgcgattttgatgaatgaatgactcagttctcccagctgattgtgtacacactctactccaaactggcccagaattttatcagctgctcttcattctgtacgttgtatttggggtttttatggccatctaccatctctcctctaattccgggtgcaaaaagagtgtatgagagagaggcaagcatgcagtaaacatcctgtgttaatctcaatcccagaaccagaccacagaatgctgactacaccgctcacgggaaagactatgttttaggtgacccgtgtggcctttttgttgaggcctttaggatacaaggcccccacctaaagacgcgaccctcccgtaggaggggggcagggcccgggggcgggagcacagcggggccccagcctcaggcggcgcgtcactgagcacaaaggagacaacagcgaggcggcagcgggcgctgatcttcgctcgccagccactcgcaattgcggttacagacctgcagctccccctcccccagccggcccgcccgcctttctgtctcctctctccctccgtactggacggccccggtccatttccgggctccggatatttggtatcgattggggccggggacgcggagcaggtggccgcggcggggcagctgggccgccagcttggtgcctcggggaccgtctcccgctgctttggtcaccagcccctgcccgcccgacccgctccgttctccggcctgcgagccctgccggccggactttgcgccgcgtccggcgctgctgctgcgctcggggccccgctcggcgccggcggtgaccgggaagcccgcgttaaaggggcaaccgggaccctggcccggtatggctgaagtcagcatcgaccagtccaagctgcctggagtcaaggaaggtaagggccccggagggagagcgcgcgggaccctcccctctcccagcccgaggttctctcaggtcaggggcgttgccatttcggctcccgcggccctcgcccggtgcccgccctgcgttggccttgcccggacgtgaaaggaattgaattcaggttctagtgtgggacgttgggcaagtctccgacgttccaagcccgttttttctcaagggggtggttggggggggggggggctagcagcagccccagcaagtaggtggctgtgcccgtgttctcgtgcatcgcaaagcctcagtggacgctgagagccgggtgaatctgacttactccgcttctaaaaaatcgaggcccagcctggctggcttgaaggctgggaagtggagaggggttgacattcagttccgtgtggagcctttgttttgaaacatgactctttccctccttctctccctacttttcctaggccggcgtctggctggctgactttcccaccttcctcaaggtttaaaagtttagtcttggctgtgttctgcgcgggcgggaagccactataagcattttcttacaaacaaaacacacacacacacacacacacacacacacacaatagtgagcgaggggaacaggggactgatggccttgtcattgctttttgtaccaatgtccaggaaagtagagattagtactgacctggctttagctgacagcaagtagccttttgacttcccttctcttgtttttccactagctgcctcaggacctagcttttttttgctgagatcttaggtgctggatcgccttatgccttgagttatctttgtttattctttggtcctaggaagcatagacgttccagagtgctgacgcagacccctaagttccaagggctttgcaaaatcggcttctgttgtgaatgtcatttgtatcgattgaatactgtagcctgaggcgtcttggagatgtggaattgaaaatagtttttgctttcttggaaccgcttgttttattgccaacttaatttgactccgttggtcttgtgtgtgctcaggccagcccaaaaatctcaggaaaatgagggactgcttgattgctttctcagagtttcaagcactaggagactagtgactagtggtcactgattttatgtagaatttctgatgggcctagttctgtcttactgttccggaagggtgttaaagcttaggcgtgagattttagcgttaatacttttctacctttccgtccctggtatggctttgatgaagacttagggctttcacctgtagaaaacagttttcactctgctgtcaagactaaggaggctgagcgataggaaaggcggatccatacttttgagagttcttatcttagagattgtctggttatcctttacttttggatatgagggttttttgtgtgggtatgtgttgggtttgtctctagagaaagagtgatccttgtgcagtgtgtagtgcatggtgagtagaatgagaattggagttcaaacaaaacctggtatgtatagtattaatcatatggtgctatgattttatccaatcccctattcatgtgagtgaaaaaacataaaactcttcatatacatttatattacccttaggtcttctgatttcgtaccaagacatgaatgatgtattctaacatattatttctcaaggagttccacaaacaccttccatataaaaatgcaagatttttccatttccacactctagagtctaatacatttaaattagctttcattttgcgtaatacggtgtttggcaatctcttttatgtaatctggtaaattggtaagaaaattcagtgtggctctttcattaagttacaattaaatattaattttgaaggtggtcaggaatcgatgagatcactgtctttgtaaacatctgacttttctagttccaagatcatcaaaggaagtgatgtattatactaggaatgtcctactaatggtggtgaagtttttgatctgagaagtattcaagtctaataaagtgtatccttccctaatataactcttaattatggcccagttactccctaacagtgtctttatcctaattaaagagaatgaagcttgtgcccctgatagggtaaaacatgtgcaaacattgagactgtggtaatattgaaactccaacttcatttgagaagggttagtagtagtaattagtttaatattctgatgcagatttttgaaccccattcaaaaaaatccctgtatctgtctcctctactttttaatttaaacttttgatagatatatatgcagttacaatttatattcaatttggtatcatggggtagattccaatagagattaagaagaatagtgcagtgagtgtgtgcccgtttccattgctgtttaggaggggatggggcaccctgtgaccttttgtcgtgaacatttcaatagaggtcgtgggtagcagctgacattagggtaaggggatatttaaaaatcttctttcctaggttgaaatctaatgcttgcttacttagtttttaaggaagtcaaaaatattcatcatttggacagaccttttgaaaaaacacacacacatacacctatggtagtatttataccttggtaaatctcttaaactgggagacaaagggaaatgattgagttcatatgtaggtgaaaagaatcaagtcaactaagtgtcaacacatcattttttctggttaaaagtgtgtttggaacatctgtatactttttgtaatggaaaacgctgttgccaatattcaggaataatactctatttcttctgaaacatttgaggttctagatttgaaataatttccagccattttaaacttcagtaggtctataactgaaatgcaaaatgcaatttgcgaatgttagggaaaggaacaggcatgtttcaacaatattctgaaagtttcttggagttcagagctggaaacatatttttgtaaaaaacttttaatcagttgacaaacttacatttttcagggggtcagttttagcttcttcattgaatttttcttttctgaaccagcaatcaagactccctacttccttttgctctccaagttcctgtatcggtaaatgaattgtccacttgctgt

SEQ ID NO: 41892 - DNA, 1429 bp, Homo sapiens
tcgtgatccgcccatctcggcctcccaaagtgctgggattacaagcattagccactgcacccagcctctttttttaagaagaaaaaaaaattacactccggtaaatttctggggactttcaaaatcaaatgtaggtagaaatcttatgtaaagtaagagtatgccgtatgccagctctgagtaagggtctgtggggctttcagaagttcatgagtatccaacagatttaaccaccttaaaatgtttccttacgttttttttttagcttatattattggtcctgtttaaaacttattacagatatttgtgtgaatgaagtatcatttcatctttttagaaacttgtatcagaggtacctaggctaatttatcaccaaatttttcatcttgcctgatgagcatttccagtcctgatacagctcctcagtgaccaaataccaggggagtctcccctggacttttttggcttttgtttttccaatgagtcataaaggcttagtcattttccattaactttaggagttttaactgcatatagtaaaactatgaatgacttataaggatatctttccctcttcaccgcttccccatcagcaacaaattctgttttgtttattgactatggaggagtccatgattgactttaagtattatattcactaatttttgagtagcatcttcccaccaaatactttgaaaatattaggtttttcttttatattatgaaggtctgtgtaaatatcgaatacaagagttgacaaatactgtgaaagactctttttgtctagatgggagtcctgacgtagaagaaagagaaagataggggctcacttaatggtccacgttcttcccatctgtacatctggagtttgccttaatatctgggccggtagctcttttggaaagggctattcactctcaatgtctgcatttatagatcactttctggcttttcctagaaaatattttcaattctgtcagtgattgctggattctaagttaacatgtttgcttctgttgttttcccagcattctctggtcagacttcattatttcaaattggtctttggtggatccacaaatcattccttctttttatagtttccccattgaagctccatagagctaatctttgaaagatcattttacttttactttttgttgtatgagttgttccagctctcaaatttctataagaagttgattggtgttgtgattgacaacacctgaagtcagagtggtctcctttggaggcaacagtcttacttgtttaaggattaattttaattatataagatgctggtaatttttgtacacgttccagtaaagtgatatggtcattttgttgctgttactagagtattcagttagtttcttagatagtattgggttccatcagaatttttatgtgtgctattttctcttttaaa

SEQ ID NO: 41893 - DNA, 1807 bp, Homo sapiens
caaaggaacgtttttcattctgtttcagttaagtgtcctcataggcaaatccaaagcttcggaaagaaatctatcacttttcctaagccctggggaatgtttcatgagtcctactcaattgcagtaatctgaggctttggggaatttcctttttttaacatgaattacatgcttggaatagagtgagaacatatcacctaaactacacgtccttaaaacagcactttacatgatgaatccttcatgttttgtctgtttgtatgtttacgaagcaggagtttaaattgcagcttggggtaaacatggataccattgtttaccccaaaccatttcttcaagaccatttcttcccattttgcttctgagaagacaggtcaggaaatgcccttgcctggctcttcaggtggaggcagagttggggcagattcctggtttccttcagggttcccattttcttttggtttgtagattattttggggcagcccaaggtttagagggacctagagacctagttctaactcatgtccctggggattgacccactgaagaatgtttaagaaattaagaatttttaaagtagagctctgcccctacctgagggactagtgaaaatatattttttcttgaaagacgccagggtagacataaattgctgggagaggatcgtctgaaccacagggaagcatagattagatttcttttaacacctctaattatgcagtaactcagttctctctcagtagcaatatgcaaagcatgactgatacgtctgttatttcagcagcacttaaccctccatttatagaagtggattggaatttctagacctctggaatctgattctgtaaatgttctcacctcaggccaggggccaaggctaaccagtattttgtgacaccctgtgcttggcactaagcaggcactatagatttttgtgactaaagactgcatacttaactagtcactattttatgcattgagaattataaagtgtgtcattctgaaatattagaattgattttttttaaagtaaaaaaaaaaaatcctttcctttgtatgttaaagtattactaatgagccttcctgtctgtttttcctccatctactctagtatgccgagattttgctgtcctggaggaccacaccctggctcacagcctgcaggaacaagagagtgagtaatacctctcatttatgctccttcagttttctttttttagtggtagcttgaggctggtttcttagggcttaggtggggagagagcacagtcacttggcttcaccatccatacatcctgaaggatttctttaggcaaatgatgcctgggtgatcagtgaagtttcgggcatgttaagtaagataggctgccaggaattagtagactgctgcgtctgtaggaggaaaaagagaggtttgaacctttttcctagcctcttgttgtaggagggacacaatggttgtagatttatctggggtgcgtagaaggaatctattcttgctcctaggatagggacttgaacagttttcccaggcaactgtggtataaatgagatcacattgtgaatttttctgaatctttttttccatgtggtgatgaaaagtaaatctaagctatgcatgttatattaaagtacatacttgtgaatatatgatttgtgaattcacatatcaatataaaattgacattttgaaaaatgcggttaataaatagagtgacaacatgtagtagtagaaagagcattggccctggctttagaatatttgtgtagatgtcctggcactgccactttgttgccgtgtgacca

SEQ ID NO: 41894 - DNA, 2932 bp, Homo sapiens
agaacttattttcagataaagtcttagaagaaaaccttacatggaatagataatgtgtacctgaacaggttgaagtaggaaagcaagacttagctaaagatgtttgagcagggtagtggacattttcagaattaatggaatagagaaaaaaatgagaggaaaaaaaaaagcaaaaagaaaaaacaaatgaacaaaaaaaaacaagccccaaacagatgaaaaacaaatataattatgtgttaaagaaaaaattattctaatgcttattaaagacagtaagaaagactttattaaagccttgtgggaggatgactatcaagataagtgtaaggaccactgaaattgggtcttgcattgggaagagagattgagcttgacaccgaatgtaaaaaggaaaagtaggaatttatagccaaggagcagagtgagggtcgctcgatgaaaaattgctaagaggaaacatcaaggatcgaggtggtattccggctaaatgtacttagtaggacccttgctgaaggcaagccagtgtgataagacatccagtatgggaagtgagggatttgattagatatcgaaggtggaggactttcacttaactgacttagccagatttgtgctaaaattggaccgtgcagagatgatgtcagaagtctaaaggtcaggacttgttggaaaattgcttataggaacctgagtagagtttggccaaggaaagaatctttgtcacatacaagtgaggagagaaaaagacctcagtatttatcacaggccaggtcaattgcaagaatacctttttactgcttttttcctcaccctctttcaaattctttagggaattcttaaaccttggagaatgtttccaatttaattcagtctaatgtttagaaaaaaaaataagaaaaccagaattatgataacttaatttttggtttctcctgtaatgccagagctgcaggagtataagggaacactgcctacttcagtgctgaatggacaagtaaatcacctgtaggtctgggaggagggcctgggttctgcatttctattaatcgcctaagtgatacccttgtcactgctctagggaagacaataaggggcaaaatcagctgaaccctcttattttatagacaaattacttgagagatgtggggacatctacatctacctgtatggcaaagtacatgaccataaacctttacacacacacacacacacacacacacacacacacacacacacacccctacctacccgggaatctggatgaaatgtaatagagcttgaattaaagtaagagtaatctccaggaacaccaaggaaagtgcactgaaaactattgacctgattttccaaatgagtcttagagaggggaaggtgacttgctcaaaattatatctttgtaagcccagtgtgagcacttgtacaattattcaatagaacctgaagaaaatattgacacataacaatggaagaattcctgcattaccacatagtaaaacttactgtaatgctactatgatgaaaacaacagtaacaactggagagagggggcagtggagatcagacgtggtgagtttgagagaactgttagacctccaagtggagatttgatgtggacaaatagacacattcctctgaagtttaggaaagaggtttcatatggagatttggaagcatcagtgtagatatggcattgaaacccacagaactggatcagatcactagagactgattgtctcttgagaaaataagaggtctaaggatgaatcctgggacactctacacttcagagcttgggaatatgaagtggaaccagaatcaagactgagaatgagtgacccattgtaaaggaagaaaaccaggagaaggcagtgtcctggcagccataggaataggagagaaggcagagaatctgaacatagttgttggtaggagggtttttgtgaaagttccctcatgattacctaacttattgatgaaaaggaaaattattaactaagagcgatggtggagaaagataaggtggaaaatggctactgacgcattgatttaaaaagacaaagtgaaacgaacatggaaacacttcaatatgtgtgtgtgtttatgatataatttatgttaaaaacataatatcctatatattcgttatatgtgatattttatatataatatatatatcatagaaaagaatataacaaatacatatcagatttccccagagaaagtggagaagggagaaacctagttttactttataaacacctatatttccttttgaattgttatagcaaacatactttacttttgagtaaaggtaagaaaaagtagttggtcttgcagacctttgttaaggaagtaacaaatctgacacaaaggtaacaataacctttgtgagactgactgcaagatggctcaggattcccaggtccttggaagacatttgggtcttactcagtgaaggccctttgtactgtgagggatggtctgtgttatcttagtcagctcgtgctgctataaccatggactgcgtagcttataacaacagaaattgatttcttacagttctggaggctagaaggccaggatcaaggtgccagcattgttgagttctggcgagggccctcctcccgtttgtagactgttgacttctcatggtaggctcacatggcagaaagagggtgagagggtcccttttgtaagggcactaatcctacttaagagggctccgctctcatgacctaattattcttaaaggcccctcctctaaatatatcatgttggaactaggattttaacatatgaattttgagggacacaaacattcagccctctgtgtatgccttgcagagccatttcttctttggatgtctcactgtggggataatagggtttttgggtaactgtaagattttgttgttattgtttgtttttg

SEQ ID NO: 41895 - DNA, 507 bp, Homo sapiens
tgtagcaggtggtcaaagtgtctttcggaaacaagaaagcatatgactctttaaaactggtatgaagtgtaccctaatatgactagattacgaaggtataagaatatatgtgagaagttactggataatgagattttttaaagtctttttgtgtcaacttgctgaccttaatattggactaaggaatttggacctaccttgtattcagtggaagttatctcttggacaaagagttacataacatagtctaaaatttagaatgtttatccaagtagcattaatggattgaacattaaacagatggacttcaggagtttctttaacagagtgttgcaatagtccatggaatagattagggcctaaattaagttagtagcaactgaagttgaaaatttaatgtaagcagatgtggtagcataaaaataaaaacactaaccaagatctctggatttttgaaataaatgtgaataagaactttatttaaaaatttttttagtactacggaat

SEQ ID NO: 41896 - DNA, 1933 bp, Homo sapiens
gtggtgaactgcaaactcaagaggctgagtttgagtcagtagtccttttaacctaagagatgacaggatgtggaatatggccactatataagaattgacccttggtttatagtagggagatctgtagctctgcccaaatacaggagcccatataataactcatatggggacaatcccaagtcttctcgtggggctgtcttaatcctaaggagtgctattgggaggcattcagtccaaggcattttagtttctaagattagtttggagatatgttttttagagtttgattcactctttctacctttccagagaaagggggatgccaaggggtgggatatttccatctaatttgtaaaccttccataattccccttaacacccttgaggtaaagtggctcctattgtctgaatcaacattttctgggctgagcatggtggctcacgcctgtaatcccagtgaggcagacagatcacctgaggttgggagttcgagaccagcctgaccaatatggagaaaccctgtctctactaaaaaaaaaaaaaaaaaaaatagaaaatttgccaggtgtgctggtgcatgcctgtaatctcagctactcaggaggctgaggcaggataattgcttgaacctgggaggcagaggttgcagtgagctgagatcacaccattgcactccagcccggccaacaagagtaaaactccatctcaaaaaaaaaagttcatctggccaaatccaggtacaatctgttttaatattttttgaccacatttctggtggtggctattggaaggagaaaggctcttctactttgggcatttctgtgaaatctacttgaatggtttgaaatggtcttagtccaggaggtcttcctcctgtggtctgttttctaatcacctttttgtttatcctttgacaagttaaaacaactttcacatacttttttagtgagggtataaattcctaagtattgcattacacagagcctggggtccccagtgactccctttgtgtaatagagacattaggtctcctattaggggtttactcatactagctctctcacactgtccacctttatctcagctgtctgttctggctctgtggctccagccacccccatgcctgcagctgcactccctggcctgcaagaccagctcttggttaaaagttaaccttcaaaaggccttgccctactgggtccttcagatctaatccagagtattttctcatctgatctctgagcctctgcaggaatgcagagggagtttcctctttttcttgttgaatctagaatgcctctgagacattttgtgtcctaggagtggactctttgatccctttaattattagttccctgaggtcctgcatttgggcccagtccctgggatcattattatcccattcaggatcgacatttggaaatttttattcagctggaaagactcctttccttggagggtgttgcctctcccatatggtcatggccactctcctaatcactcccctttcttctcctatgaacaggatatttatgatagacattatcttagcccaggtgtaaaaatttggtcctaggaattggtccagctggtttactaaactgaggggatcttctaagagtggtctcatttcctctttgaaattcctaacttcggtacttgtaagaggactgtttacaaagccaatttctccttgttccatgggaactgccctaagtaggagcatgctagatgcctgctgtgtagaagggatagagaagttctcaatatccctcttatactgttctaattattttcttaaatttggatgaggatctgaaggagtttttgttctccaggtctttcttcctctaaccctcctgttgctcctttatcttcttgtctcctattttgtgagatgtaggtagggggtgagcatgatggagggatccca

SEQ ID NO: 41897 - DNA, 1325 bp, Homo sapiens
attttctgtaaacctaaaactgctacaataatgaaaattgattaattaaaaaaattaggcctactggaaaaattttccactagaactgtccttcagagacactctggtaggaatgtaatgctggataagctgccagacccacatttctttttctttagtcattggtcataagaaattctccttgaggctatagatgtcagttaagaggcaagagggaaagtggcatgagtatgaccaatggcaatctctgccatttatccgtaaggcttatttaaccccatcttacatatcatttctatttggtgatggaatgctactatgcatactcaactttatgacttgttaggtcagaaaatacccgtatgatgggcatcccagattatatggtaaaaaattgacccatagtaagtatctgtctctggtaagcccactagtaagacaaaaactatttaaagctatatttgaaaggagaatagttatccatagaagatagtgtggcttgtagtcaaaaacctgaatctgtactgtggctgactcaggcttgattagcctgggcctgctacaggtctttctcctgttctgcgccttactcaaaataggcagctttttggattagtcattttatcatagtatgaagagcatgcccaaacaagatacactgtgattccaaaatccaaaggtcattagttgttgcatctttgtcttagtggccacatgtaggaatttgtcctttacctcggaaggaatattgtgacatgcttcagatcactgggtcccgaaaaatttcaccaacatggaaaactcctgaatttttttgagctttattttcaaatagccaattgaactcctagaggaattttgttatatcaggggttcactgttggtctctgttgcagacatgctgaattcttagaggcagatgtagctagtaggccttatgagtccatgctcttagactactgtgtagcctctgtcactgccactatgactcctatatccatgtgaccatcataccagttctagggtggctaatgaccaattttgattaatgtcaactagccaagtgattttgtctacttgattgtttggtgattctttcatggtgtgtgttagcaggtgtctaaacattttactcactttgtttactccgttaagtctacttacatgattttacctctgaattccttgtcaatgatccagtccttttccttctgggtttctaaccagatgaccagaccattgaccaatacgcccatgaacatatatacatatatgtatgtattctcactataaggtaatttttattttatacaaagtaaataacc

SEQ ID NO: 41898 - DNA, 477 bp, Homo sapiens
atgcgtacttcagttgcataattccttttggtttctttccaggatttttattctcttatttaaatttccattttgtttacagtttttttttaatttctccatattttcctttagtatttgagcatctttaagaaagttgttttaaatctttgtctagtagatctgctgccaggtgttttgtggggacattttctggatttttttcccattgaattggccattgtttactattttgcaatatgccctgtgacatttttattgcaaactagtcatctgaaactattagtgtggcaattctggaagtcagattctcctcttattccagagcgtttttttttttttttcaattgttgtaggctacctctgtgcaagtgattagagtaagatgtaaactgaatatagtccacaaaaattttcctaatctccctagagaggttgacatgcaaatccagtaagtatggagaaacccagacagat

SEQ ID NO: 41899 - DNA, 1881 bp, Homo sapiens
ttaggtttaaaaggtggtgggagagtggtcagtcggggaagcactattttatatcactgcctgaatagtgacaaagaattcctctcctatttccacgtggtcagcacttctaaaacagagcccaggttctctcaatctcagtgcacacataaaagcctgaaattctccttctttcctgctctaccagagaaattccacaaagctgaatgcataagaacatttgggatcacttacagacacagctttctccacaggtaggctctgaggtctaattcagatactcagaaataatcccacactctgtcttagagcaacactgaattctgcattgcagcttttccagctactagacacttgccactaataataaaactgtactttgctccccatttgcactcttgtccctattttctactagttagaacctagaaaatcattactccaaacctcaacgttctttctacactggaaagttcttgatgaggaggatcatggaatattcgcattttacctttggtgacatgctgatgatcacagggcaccctgcccattgtggatgttcaattaatattcttaaatgtaaatctggttaatataattctttgagatatctgctaaaatatgccccaattgctgctatattctactctgtccttcaaataatctttacaccagaagtttccaacacaaatgtaaaaaacatagtattacctttgcaatttggcttcccaatgatatgagactctagctaaatgcaggatatggggacagaagggagaggagattttcaaaaaaataggaagaacaaaatgtattgatctatttgatttttgagaagcaggtcacactgcagaacagccttttatctagcattccacagggagagagtaatgtttgtcatgattctcaaggcaaatcaatagagctagagaataaaaagaacaaaactccaaatctcaagttcccaattaactcagaaagcaatgaaatctagacaagctctaatgtaatgcactggctttcataaagtcatagaatcaacaggctggaagtgttgaaataagttcctggagtcacctagaaaactactggggaagctggattttaactcattggccctggtgttatgcagcaagcactaggctcttatcagattgctggtgactctgaagttatgaatgttactgggatttacaacaagctgattggactgcccaggagctactttagttaggttccaccaaggtacaagtacagacatagcctttattcggatacacattacagagacgtataacaagctattgtagtatactaagtactatttgggatttaccatgacctgacaaatgcagtgttcaagtcttgagtatactgctgccctatgaaatgaaatgtaatataaatcatgttctgccagtttaatccccatgacccttagtagttgataagcaatacctgtgacagtggaattattatctccattttacagatgagctatataagcctcaaagaaataaagtaacttggccataaccacattatttctaattggccaagccagtactaaaattcaagcctcctgagtctaaaccttatgctcttttcactacaatctcaagcaaatatcttcacatcaagaactgattttctagatcaatgacttatgaagaatatcagcttattacagggaatgcaacatgagtaaattaaatatcattcatatagtttgctcctgtatttttttttcaaaaatggcctatgtaaataagcatttttctaagaatctctcatgtgagtgtagttcagttactgtcattttcttattataacttgaaattcttttaaattctgaagctctcgtttcactttctaccctct

SEQ ID NO: 41900 - DNA, 778 bp, Homo sapiens
aaatgactctggcctattgataaacttttcaccccaacaaataatctgtagggtgttgagaagctttaaactgatatatgtagcacctagctgccactttatgaatagttaatacattgtaattattatgttgatattgttactactataaggttatattctatgataaatatgaaaaaggtacttgaaaaaaataactaaggttttctttcaccaatagattttttacttgcaatgaaaattttagaattgtaatttcaccatccaaataacctttgttttaaatcatcagataaatcaggtcactgaggggaaagggtgagttggggttaaacattaacaaatcctttgggaggtcaggcaattgaatgatgtcttttccagcacatttatgcagcccttttttttctgcttacaaacgaagaaaaataatgaatgttgcctttgggttagaaaagtacagcacagggaaagaaccatctctcactttataatatgtaaaacaatttcatattcaccatatgatttcatccgcacagcaaccatgttgtaacaaaggcagggaatgttacccaatcacacagatgagagagctgaaggtaagtcagataaagtaacttgccaaataccacgcaagctagttttagaacaactgactctaaatcttgcacattttccataacactgaaatgtttaagaagaaagtttgattggaaaaggaggtaagaaaaggaagtattgtgtgacttaaagtaaagagtaatgtcttagaaaggta

SEQ ID NO: 41901 - DNA, 695 bp, Homo sapiens
tgctgggatcacaggcgtaagccagcatgcctggccgatttttaaaaggttattattatttatcttcctcttctttgagctactccaagacagtgcccaagtcttactgctgtatcctctaaagtatccaacacaaagcaagacatgctgtcaaataaactaagtaaccatgacaaatgtggagccaaaattttctaggaaacatcaacaaagactagaacaactgggcagcttcgaggaatgattggcaaacttgggcaaagttttatcccccaggcatctggagtcgtgccagtgtacactgactcactgtggctgagggtcaagggcaggttctgccaacaggggaaatgatcagaaagcagaactgagacagaccagttcagggagagaaaatatggggcgagatgcctccttcatcctttcaccaggattcacactcagagacaccactcagcatgcacagcacccatttccaaaatgcagacctatttgtatggtcactcttcaatcgatgtaattgctacaaaagctaataaactggaaagacaggttgtgaggcgaaagaaagccataggaagcaaatagcccttatttcaaagcagcaggtttttgtttgctttgttttttgcttgaactgacagtcagtaaagtattcttaaatatattctagcactcagctgaaccaccttgca

SEQ ID NO: 41902 - DNA, 828 bp, Homo sapiens
gggcaggtttgcaggagttgatgttgcagaatttcttctacaaacttcagtttttgtttttaaggaatttcaactgattggataagtctcatccacaatatctagggtaatctcctttacttaaagtcaactggttgtagatattaacaacgtctataaaatacattcacaggaacacctagataagtgtttgattaaatgactgtgtactagagcctagccaagctgacacataaaactaactggcacgccatctacctgataaatatttactaagtgcttatcacatgccaagttctgagataaatcacacgcaatccctgccctctaaaggaagggcataagtcatttaattaaagacattaaaaatgttattcgacaaatctataagagatagagaacaagagctatctttgcaggtttggaagaaggaatagtacttccacgtaaagaaggcggaaaagctgaaaacacaaaagacaattgaccttgtccttggagaacaggtaaaataagaacaagacaggaccgtggcattcctagtgagagaaatggcataagaaaaagtgtggagtcaggaaaatgtgtgatgtttatagaaacattgagtggttcagtttggctggaaatatagagcattcatcaaaacctcttttatttagccagtgattactccatgcttgttcaagtactcattccaaagctgttagcacatttgcagatgaaacagagagatcgagagattcctccaaaatcacacagaaaacctccagggcatgacacatacaagtcaatcccattttcttttggaagctagatgctgctgac

SEQ ID NO: 41903 - DNA, 1978 bp, Homo sapiens
agaagcctgggagcagcagttccagggaaaaaggagaatgtgatggccagagagccaaaagaaaaagtagttgaaggagtgctcagcactaggcatctgaactgaatgctgtggcaggctcactggccacaaacaatagggagctggtggaggccttgacgaggaccatttcaacaaactggtgggcttaaaatccggaagaaacagttgaacaaatcattttgacgccttttataaaccacacaagcttattccaaacccgttactggcctaactgatttaagtccctttcccatctgatcctcagagattctaagggacttagcctatccatgactcttcgtcctgcttctcacctcccatgattgccctaacgatgtgaaagtgctttcaaacaaagatgcccaagaaagaaggtaggcaaatgtgcaagcattagtttgtagtacgctattactgtatttcaccttgcactctctagtttccttcgtgctccctcaatatccaactcttaataaattcatggctcccggtgagcattcatcaattctcattccacgcctttagcccttcccgttcccgcccaactctcgctccctcccctggccaaatctctaacctgcaaggctaattccgaattccaaatcggaagcaagagggcggggccccgtgagaggcgatggattgctccagtccgttcccgacgcactgtgcgcatgcgctggtcctccgcggaccgttcgtgctgcccgcctagaaagggtgaagtggttgtttccgtgacggactgagtacgggtgcctgtcaggctcttgcggaagtccatgcgccattgggagggcctcggccgcggctctgtgcccttgctgctgagggccacttcctgggtcattcctggaccgggagccgggctggggctcacacgggggctcccgcgtggccgtctcggcgcctgcgtgacctccccgccggcgggatgtggcgactacgtcgggccgctgtggcctggtaagtgcaggctctaatctggccccgttaattctggggcctcttgagagtggggctgtcttatctctatctccaaaaatgtgcaggtgactctcaggccaggccgacggcagttggagaattcccagatgttcttgaggacccagaatgacaggagccctggctgggcttacgttcggagccggcttcaatactggcccttttctctggccctacccaacccgaaaattctggacgcctctcaatcttggcccgtctctattgtccttttgtctctgccctttacacccttgtgtcttcagtgttctgtctgtctctggttgcctcttttgccttttttctgtcctctccctgccaggtttggctctgtccatgagtcacctctctccacatttctcctaactctcggtgtcttctttttcttccatttccacgccatgtgtacattgcatcttcaggtacctgggctcttctatcggggaaaggggcgtccgtctctttccctagcccgctgatagaagtcagaactagagcaatgacgcacacggtgtcagagacggtgattcgagatgccctttcaatagcagcttttttctgtgtttcgggagggagacttactttttgatgcaaggtcgtgaacgtggcaccacctttctaatctcaatcattgttgccctggggtggtttaattctaaatagaaaatcatagaaatcttttcatttctgtgcgttactatatgcattgtaatgagattaaattggattttataggaaattttgttctagtatcattagataccttcaagcttagctcattgttgcaggcatttgataggaagtaagatgcatcaagcaaaattggaaaaacgtggttttcctgaattaacttctaagcagttgttttgaattttttccagacctttttaagtggtatagataatttatcgtgtttataaggaatggaatgcat

SEQ ID NO: 41904 - DNA, 1208 bp, Homo sapiens
ttataccctacggtcaagaaagaaagaaaatacatggtaagattcctggtgctgtaacttccacaggaaaaaacatttcagcaaaagtaaatacataacaagtagggctaatccctgggttttctaccctctcataaggcaaattcttctgtgttcataggccatttaccatattcataagccggggtgctgtgttctttcttgtgtttctttcttgtttgttgtgattaagcttgtgttatcttttatgcaatagtaatgtatttattaaaattgagactgtttttcaagcaccaaattatgaaccatctaaacacagtccttttttaaacattttaaagtgtgttcacaatgaaaccaagaatgaattggagaagatgttgaaatgtaatgaggagcacccagcttatcttgcaagtgatgaaataaccacagtccggaagaaccttgaatcccgaggagtagaagtagatccaagcttggtaataaatactgctgagaagcaggaatctgcttccttaatatttgtttcttgcagtaaatgttactacatgtgttagttagatatttaagtgcttaatttgacttttgtcacgtgtacatttgctgacagtaaaagcttagtcattttgattgcgtgaagagaaggaattttattctcagtattgcttttttaagagtaatgctttaatttgtaaatggagaaatttactttggcaagttcaatggtcaacagtcagttcatgcaaaatgggatgaaaccgacctagacctttgccccacgtcacgctgtttcagattgcaaaatagaatttctgtttaaaaatggcatatatatgtgtttttgtgtgtggtttacagtcaaatgtaactcaattagatgtgagtggattcagaaaaaataaaaatgttgtttttattaaattggatatgaccattgagttctttctccattgtcctcttttgttaatgtgagaataaaaatagtctacactttaggctactttttgcttaccttcatgatgctttttttgaggatgaattttaaaaaatactttcgggcccacgttttttaaaaactacattctctactgcttagttaagatgtaaggaattcaaaagctccttataatattagcttaagtgaacacaattagaaaaataagtctagtggggaaagcaatcattaacaaatttcaaagccacac

SEQ ID NO: 41905 - DNA, 1187 bp, Homo sapiens
aggctgaggctacagcccccacatgaccttctgtacacaccttggcaccagccacccgccagcataatcccagggctgaggctgcagagaggactccaaattagccaggagaagacgtgcagagcagcctcaatgctctcttagatgctggggcccaggccagtggagccaagttgaggcacaagaaggattgtgcagtttccctgtctcccctgcctctgtgtcttaggacgctgttgcatgaggtcgccataacggtgatgggccgtgaccttgcctccttgatctcactgcatccctggcctcttccaagtgcagcttcagagctctccagcccctgcgtggcctcagtttggcatcgttggaccaggcaggcctgacagttcctttgttccccccaccgtggagcttagtcagcaggcctctgttggaccttggacagagtgaccgaatcacagtcatcaggatgacattcactttgctctgagtcagactcttagagccagctccgagaacctggggcttgcatgggaagcacaagccttgtgtttatatttgctgctgcttctgtgttgggcttcttatcatttcttattccatcctgcttgtctttcacctttctcttcctagaacaagacttttttctcctatggtattgaaacatggtagatatttgaagggggtaacagaactggatcaagaacaaagacacaagggaatgaggaagctcctaagggtccaggggaagcagaaagggcattccatgagcggtcagagaccttgggataagctcactgctaacaccatggagctgtgtggccttaggcaagttgcttcccccactctccttgcctcagtttctacatctgtaaaatggggatgaaataagcctactatatgggtttgttgtaagactggataaaataatgactatcacagagctttgcattgtcacatggcccagatctgcagacttccagcagcccacagaaatttcgctggcagaagcaatgctatcggacaagtatttctcacaagcattctctttatgctaatgagtggttacataatactattccaaacctctccaggtatagtggttgcagagaggaaatatgagttccccctgtggctgggtagggagcaggtgcagggggtgggtctgggccatcttccgaggataacaa

SEQ ID NO: 41906 - DNA, 3076 bp, Homo sapiens
atgaggtctgggttttgagtgcatccttacagagagaatacgcatttgcttctctgccaggtggccctgtaatggtataacacgagaccatttttaagttaactcttccgctgggggtttccagtcaacaaaaaatgtgtgaatttaattccttgtgcagataagtttcattttcaccttcctttaccagtggacagtaaatccttttactgagactgtagcttttcaggcttcttactttattaggggtctcagttccaattttccagcttattcaggctgaatatctagtcttctgttccctgcaaggccattaaaactccagcttgtttcagcgattggcagatgctctcaggatagctttggttcagcacgaactccctcttcagtttggcacctggtgacttcccttacttccaggtcagctcagctctgaatctaaaagtattcctgtaatattttatccagaatatctgtatgctttatctcaggagggcttttcaggctctctggtcatttgccagaaataccatagcacgagtttctttctaaacgtagtcactttttcactcattgttaaatgtcacctttattttgaaaggatggattatgggtatattaaaaatatctactaggtagcatactactggcagctacctatcaccaaacgaatagcaaagttataataatttgtggggttttttgtaagagaaaaatgtgtacctaagttccttgccatgagatgacttatagaatcttcacagttacttgccatctcccatttaaaataattactgaatccaacctaattggacaaatatgaactacaatgccctgtaataagctcagaatgatagagcagatgagggtttctccgtctacctgtctaagttatagacatctcactgacatgtcttggattatgtctgggcatcatcaatgttaataaaacttaaattctatgttttgtaatcaaataaaaatacatagaagttctaatattttatttccttcatgccagtggctaatctcatcttggttggggtaagttacttctggcatgtagtgggtggaggccaggaattctggcttaaacatcctacaatgcgcaagactcccctccgtggctgaattgttttgtcaaagatgttgaaaatgctcagtttgagaagcaccgagtcagacacggaggaagtgtggcaatttcaggctctggtttcactcctcactgccgcccttcacagtcctcctgattcaggtgtaccacgctatgcttccttccccaatcgtaaatatcctcttcgtgtcttttcttccagagcttcacacacttcatgggcatggtgtgtgaattgttttccagctgcagcatttctaactgaatctctgtctcagagctagatggtgtccacagggttcaagagaagggcacttttcctaatcatttacttcaggctgttattcagatgacatcatccttctaaaccaaagagactaggaggaaaaggggagggggcgtttacttttcctgtaaagcaaactccaggtgactgcaatacagtatctcacgtggtcacaggctctggttctaagagcaaatatgaaggtggatgggaagagatggagtggagagtacgggaacggaatcaacacagcagggtgtgtttgtgttggggggagattttgaaagtcccatatttgggctgaggagacccagatggcacccctgaacctccatgcagcttggataagctggtaagcaaggtccagggcagacaggcaggcaggaggccaacgagagggaaacgcagagctcccaactccttcctgcagaggcttgcaggactgtgtgctagaaattagagggggcttttcacctgtctctgttcactcatgacacaaacccttccttgaggaaagagtcagaggtcagtgaacgtgacaaaatcacctcccgtcgctgtgaggctggcccgggactctgctggctgaggctaggtaacttgttcctctccgtgtctcccgtcctgacctcacccaggcctgagcccgccttgcatctagaagctgtctggcccattagtgtccttccactccacagaaggttcagactagaaggctcttgacctcatgtactcctttgctctgcattttaaacatgaagaaaccaagggcatgatagagctctttgttcccattcaagacatcttatttctgagggcaggtctccttggcctgaggggcttgagagcaggcactaaccttgactttaggggccctaaaaaggaagtgagctgtgtcagaaatgtgtctggggctcaccttggcaatgggagccattcagcttgtacctaaaggaacagttagcccagagtgaaacccaattcttagtttaaagaaacagacgcagaaagacttcttaagcctggatcaatgtctttccccacaaggagtgagaaaataaaaacaatgttgaatcctctcacgctgctaataaaaaggagacagggctcaagtgagggcagccagggagcgcagaaggaggcattttccattgaactttttctgcttatgcaatagatcttcattatctacactgtgctgtggctctccagctcccccagggagatgcttaatgacataaactgcttaataagcagtgactggtgccccggaagagccgatggaagaggaaagcggcctgctcctatctcctagtgttctgcatttctctctcacagctgatttcagatactggccagagggagataaagggcagctggcttcccaaccagaccagcagcatttgccctgttggaaggctggcttcaggcaacattgccactcactttccctcatgaggggaaacgcggcctccattttttgtgctcttaagcaagaatttcctactttggtgctgtctgtcttaggctccacccagaagcctcattcacttttctgagatagcgtcttgctctgtcacccaggctaaagcgcagtggcatgatttcggcccactgcaacctctgcctcctgggttcaagtgattctcttgcctcagcctctcgagtagctg

SEQ ID NO: 41907 - DNA, 1252 bp, Homo sapiens
cttcagagaaaaataccagtctggtttcaatcagagctatcctggtgtacctaagtgtttgagctcctacaaggcagggtctagccactactcagtttataaacaggtcagcgcctagaactgtgatctgaacagtgcggatgctcagagaggctctgcctcatgtccctgcaggaggcagaagaactggggccgaggactggtggttaggcctggaatgttcattctctctccctttcttcaggccattcccttgcttcttcccatcggtcacttccaaatctccatcttcaagttccaactcaaaagctaccctgccctaatgccttctcagcaacccagccaggaaagcactgctgctcctttggaacctgggagcttccttagaacggtcccttgcatctcctgcacccccaggcaatcccaccccactcagtatgtgtctgtgcagcagcccatcccacctttcagagtgaaaggtttttaagcatctctcagcacctcttcccttcctgatatcctccaggaccctaacacagcaaccacctcatattacatgcacaagagtgcaagctgcctgagacggtcaccttaaaaagaggccacactccttcctgggacccaagagcagtgtgcaagaggtggtgtgaggtcgcgggtggggcctgggacagcctctggcatgaactgggactgcacttatctgactctgtgcctacttggcatctgcctgtgccctcaggaaaagcctgtatcatgatggctgattgctgataagagggggtagagcatgctctattcacctgactcccagcacagtcaaacctgcaaccactgctctgaatcacccaggaaagtcccacttccaccttgtgtttttttgacctctccttcgcgtgcattaaaagcaccaggagcaaggccggtgaggtgtctcacacctataatcccagcactttgggaggctaaggcagccggatcacgaggtcaggagttcgagaccagcctggccaacatggtgaaaccccatctctactaaaatacaaaaaaattagccaggcatggtggtgcatgcctgtggtccaacagctcgggaggctgaggcaggggaatcacttttggacccaggagatggaggttgcagtgagctaagatcatgccactgcactccagcctgggtgacagagcaagactccgtctcaaaaaaaagaaaaaaaaaggcaccaggagccaaaaaatatagatgccaggg

SEQ ID NO: 41908 - DNA, 737 bp, Homo sapiens
agggtttgctatgtgcaagcgcgttttttcacgtaatcctcacagtagcaccatgagactgttctcagcctcattttaaagatgagagttgaagcacagagcggtaaagaaacttgcccaagctaaggtcacacagctacgaagtgcaaaggctggatttcaaaccagtctgtctgcctctacccaagctcttagccaccccactctacagcaaagcaaagcaagatgtctgcaataactaacccccatagcacccttgagtcctgctgtcctggagaaaagctatctgcagctctgagtgggagagtagggagccaccccatcatggggttaccaaagtccagagtcctgcccctggcattgtcagtttagagattaggtttctatcagcctcccagagaggaacaggttcaggcagtctgacttatggtgactcagcccacaagggaatgcgccaaacccagtgaattgattcacctgtgagatacactggccagaaaaaagattgtggtttagcgccctggcttcagggtcaaacacagctgggtttgaaactccatccaccacttcctagccccatgactttacacatgttactcactctttggacatgaaactcaatctcagtttcagcctctggaaatggggaaaaatgccaatcttgtgcagtggctgtggcttaaaccagatgtgtgtaaaatagtacaataggagctcaataaatgtcagtacttaaa

SEQ ID NO: 41909 - DNA, 2762 bp, Homo sapiens
ctactaaaaatacaaaaattagccaggcctggtggcaggcgcttgtaatcccagctactcgggaggctgacgctggagaatcccttgaaccccggaggcggaggttgcagtgagccaagatctcaccactgcactccaacccggacaacagagcgagactctgtctcaaaaaataaaaaattctcgttcatctcttaacgtggggacttgcccatttatatttggacggtatttttctctggctgtcccacttcccggggccttggagctccctcccccgcagggcggcttctctcctcctcctccctcctccctcccgctcccaggggaagggccgcggccgcagccctgacctcgcctcccacgcgggccagcagccggccagcccgcgggcggggcaggaagggggagccgaggctccgggcacccgagatccttaactgcagcttccaaagccctggctgatcctaatcagtgtgggaaaggagcgccgggcccagcccgccggccggagacgccgcctcttttcataaactttatcgccgcggtgcacagccgctgataaagcaccataaataaacgagcgggcgggagtgcgcggctgtctggaggctgccggagcgcacgccctgcctcggccctgcagctcccgggggaaatgaatcacacgccgggctgcaaagagcagcatgttctcctctccagaccaaggccgtaaataataatgcgttctttccctacgtggagaccctcaccttttgtcttgtgcattccgtaaaaagctcaggagtttccttccggctgcctggcctcccctccttgccccggggggttaggagtgctctgttctgacttaggcgtttccctagggtggagctcctgggcctgggttgggcctgggcgtgtggctccgtgatcgtaagtcccctctggctcttgcacaacagaccgaggctggagcagggcagggaggccgcagtggggcctgggttaggaggggggtggtttgacatctctagtggtaagtgatggtgagcccggttcccgccgtggtggccacggacatgtgtggtggatagcctgctgcagctgagtcatcgaggaaccctgggtacagcttattcagaggccaagggagagtgcataccctgatcacaaagaaagaagactttgccccacttgatggcgtgttcagcaggccgcatgatccgtgtcccttagctgttgaagttttgacttggggggtgcccgaagttaatctatggtacaattttggggagtagagtttgaggatgattccatgaacatgaaacaatctagaaagtcagtggtgtgtggaacagcccaaagcaggccagctccgccacaaggtccagtctctaacccaaccctgctgccactcagctctgtggcctcgggcagccactgcccttctctgagcctcagtttccccatccttctaatgatctctaaagagatcttccagctcttctgctcacttagtgagaaataacatccttgctataaattcttccatttccgaggtgtcccagcacaggcccctctgaagaaacactgtaatgtccacttagaagaaaccagggcgtgggccatttctgtaactgacacctcgttagcgagattagcactggaaattacctcctggggagtttacagaggttcaggagccctctagccagaataaagtcagcttgtgaggtaaaaagatttaaaaataaaatccagtacttgattacagcattaggtcagtgtttctctgcgccccaaggataagctccatggtggctggggttctgcttcctgtgagaaggattggctggcttgaaacatctcatccccaaaagtcaaatgtttcctttagtgggaagcagggccgggaaggaaggaacttctggttgcagctctagagagtggaatctaggagtcctgatagattatttatggttcagcactcctagagagtgtggattttgggagctgactcctccagccatggccaacaagagccgatcactcatgaaatagaaatgaacaatggcagccaggcaccgtggctcacgcctgtaatcccagcactttgggaggcggaggcgggtggatcacgaggtcatgagttctagaccagcctggctaacatggtgaaaccatgtctctactaaaaatacaaaaattagctgggtgtagtggcgggcgcctataatcccagctactcgggaggctgaggcaggagaattgcttgaaccggtgaggcggaggtcgcaatgagccgagacagtgccactgcacttcagcctgggcgacagagtgagactccatctaaaaaaaaacaaaaataaaaaataaaagacatgaacaaaggcctggttcttctagtacccatttctgacaccacatgtcccaggaaacatgtggccccagacagccttcatttcctgctctccggacagaaggccactcagtcttgtttcctttatttgcataatgtcaagaaaaatgagtcacaccagattgtcatgtgttaagtaatattggcaaaggtttccaactgagtttagagttgatttcttaccaaggaacaatcactcactctattgctgatttattacgatgtgaatgtgatcattctctgagtctcagttttccatccatgaatccttgtgatttttaatttttcatgtaggactgtcacgagaagtaagatttttaaatttccagaacagaaataggtaagggaaacatct

SEQ ID NO: 41910 - DNA, 1343 bp, Homo sapiens
ccagagggtgccattagctggcttcccaggagccgtgcgtcctgcctggcttcccagctgggttggatggagggacatcgtggttaacagatttgccaaaaatcatagagctggggctggctctccagaggtcagggatattaagagcaagccaaagggcacagagtcctgttgcaagactggaagcagccagggacccaaagaaagtgcctggggctaagcatcgtcgagctcatcctaggcctgtctccactccctggaggacggtgaacccatcaccacacatcccagggcctcggtctccttgtctgtaaagccagcaggttgggtcatctgagtggaatagatactaaattagtctaaggtcccttccaatgttgtgattctctgactactttacaatttgggggtctgaagacacccctctacctttttccatttgcaaggtgtgctggggccacaacaaacccaacctcaggtgcagcgccaggtcccgcctcgtttgtgcctgttcttcctcacatgaccttttgcccccgcctagcctgtgccagggcaaatggaattcagactgctctgattcattgacctcaaaggcaaccaaaaaaatggccttgcaaaggggatctgatgcctccaaagccgtgacgagccttccaggtgggtggcttttgaaactgctctccttccttgggaccacaaagctttatttgaccaacattcaagttcaaaaactttatttgcctggagcaaacccaggagacttactcttggaaaactaccttctcccaggcttcaccagacacctcacagggtgggagtgtggggtgaaacacatcacacccatggccctgtgacattctcatcttcccagcagggagaaccggtccctgccagtgtcgagaagtcaaaacaaagctccttttccatgtgctttttcttcctcaatggcttagactgtaaagtcatcaggaagcatggtctagtgctccaagctccagacagacggcttgacctctgtcctggcgccctgggctggcctgggccagacaccgcacccccaggactgttttcccatctgcaaaacaactcgggcctctctaagccaacactacctctcactgcaaaacacagccccctccctcctccaggggcagttggccttagaaaccagcccatctttaggggaagaaatccttatggggcaggcggcagcagggcatagcacagaggaagaaaagagttcatcgtgcgctggaggctgagggtgttgggggtttgagggaaggtgatggtttgggggagcgtcttttccactctcctggatctgaggtggaaggtct

SEQ ID NO: 41911 - DNA, 920 bp, Homo sapiens
atgggagtgtggcatgaactgtccagcccagtgacttccaaactctcgcacacatcagactcacctagagggcttgaacgcaggctgccgggcccaccctcagagtcccatattcagtgggtctgcgtgggacctgggaatttgcatttctaacaagttcccaagtaatcgtgatacttccggccttcccaagacactttaagaaccactgtgctaggcaaagggaaatcccaggaagtttcagatttgaatcacttggagaaacatatacacacacagagagagagagagagtagggaggaacttcagtaggacaggaacactgatctggcatagagagaaaatcacagagcagagcagcccagaagcgcatgcaggcgcggccactgcattacagaagaagaaaggaggcccgaagagggcccgggcagtgggactggggaggaaggcgggtttacagcaagttcagtggacgcgtgcacaggacatggtgactgactggatttggagggaagtagggcagagtccagggggagtgacttctggaagcagaacagccaagggggtgcaattcactgagccgaacgggcaagaggaggggcaggtgtgggagcagtgccaggggcttggctggaacatgaacccgaaccctgttctcaggtgcctggcaagaagacctctgacttgggcctagagtgtgccagaatgaagacggccctgctccctaacagttgctgtttctgccctaaaactcacctcccaggggtgttgggtggcaggcgggggagagctgagccagggtggtgacccatcgtgaggtgctttggggctgcgtcccctctagtggacaggcactggagtccagcagagctctgtctcttcaggtccagtcagggaggcaaaggaatcaagcattgcca

SEQ ID NO: 41912 - DNA, 791 bp, Homo sapiens
gattacaccactgaactccaatgccttggcaacaagagtgaaactccatcgcaaaaaaaaaaaaaaaaaaaaaaggaagcaaagaagggaagccagagcttgcaggcttcctctgaatctgaaattatagttgcagttgctttgtccaagggaaggaattctaaagggagggatctggttgggttaaaattgttggaaagccaaaccaagtccacactggattctacagaagatttgttgtcccactgagctcacagggacacccaggcacctgctgcagcaccaccctgctctctggcctgtactgccagctgccagcgtggcctggcttcctgacagctctgcactcagcactggctgtcatgatgaaagcagctgagcaaagtgtttcccttgcttggggacgctggtctcctggagctgagaaaaagggaggaggccaatgtgggagagtttggctgatttgagcaatatgcagaccacatggggatcaggagcctgagaaagagtgcctggtcttgctcatcacattgaaggcctgcaactaaggtcaggctccatggggcactctcaccaaagcctgcatctcccaaggcaaggcaactctgtgagcctcaatgctgatggtactgtccaagcatggagaagaggagaatgccacagtctctcacacatctaggtaccacggcctggcacaggtatgtcctcagaagagtcaactgaataaactcattggttcaattgaatatgcttttcacataatgtttgtgcactttttttttttttttttt

SEQ ID NO: 41913 - DNA, 1801 bp, Homo sapiens
aaaagaaaagaaaagaaaaaagaaagtcctcacttgccatgtctgacttccagatttcccagcgtttccttctccactttcttgaggttcgtggcttgcaaaggttaggagcactggctctggagcaagaccgcctaaatgtaaacccaacccaaccatttggaagctgtgtgattctgaggaagttgttaaacctctctgggccttctttggtgcctgttaggcagaaataagaattcctatgtcatagaattgttgtgatgattaaatgagttattacatttaagtgattagaaccgtgcttagcacagaggaagcactcaaaagttaactactattagtgatgtctaaacttttttccccagggaaggatcaatgcatttatctgagtcaagttcaactttgcactccagtccttcaggcaggtagagaggtatctgaatcatgtgaaaaccgttaccggtttgggggcgaatatcaggaaggagatttagcccttagagatttaagggcttaaagagcctcagtccctgttgaccacataacatctgcagaaaagaaaaaaagaaggaaagagcgctgaaggacccacccagggaggaggctgagccgcgctccctctagcctccccagaggtgcattcgttaggttcccgccccggccccagccccagccccagcatcagctccggttcctctgcagacgttcagccccttcggaaatgtaaaacccgggaagcgaaagctgcggcgacctcccagagcctctcaggcacgcggcatctctccccaccggcagcgccttgaaataccaaaggcctagccaaagatggaaccgttttgttgggagctcgggtttcccccgccgcgaggctgagccggtggcgcagctgctcaaaggtcacgcccgagacacgtccgcacaagcccgggtggcggggcgggcagcggggagagaagaggggagtggggagggggacgggggcaggggggaggggcgccaccttctccagggccctgcggggtgggctcccatcttcatctcgcaagcatccaacccggggaggtggctttcctctccctactaagattttatttttgcaaaacaaaagggatgccaaaaaagcaaaagttcctaaatgaaaagaaaatgcttctttaaaaatgctaattgtgagctttttattattgttttggaatttcaactgatggctgaaaatctaaatttggccacaggaaacctggatccagttaaccttgagaagttaagtcttcattttctattaagtaaaatatttgggtttgaatgcttagagccctctgcttatgataaaaatagaggcactgagcagtttaaccacctgtgttttccttggatcgcatattttccacagtaaacaagaaaacacagattggaaatccattcattccttcataagagtgcttcagttggggtttatttgtgttttcaatcaatagaaaccaaaaacaacctttgcagggttatgatatttcatgcaaagaagctccaagaagctctttttatcccctctgcagctatttctacataaatccccagatttttttaacgcagttaataattataattccatttagttttctgagcacatactacatgttttacctgctgtcatctcatttgtgataacacttggagagtagttattcttaattcttatttgccagatgagaagacaggctcagaaaaaataagcagtagctaataagggacacagcctttacatctgagagctacaaagctgtgctgattccaccaccag

SEQ ID NO: 41914 - DNA, 2282 bp, Homo sapiens
cagtgagcagacagccttctgcaagccaggaagagcaccctcactaacaacctaattcgccatcatcttgatcttggatctcccagcctccagagccaggagaaaataaatgactattgtttaagccaccagtctatggtattttagcaatcattcatacacacacacagcatctgctttgtgccagccactatacaagtcactttagacgcagtatcagttgatctccattttacagatgagaaaaccgaagcttagattaagcaacttgcccaaggtcacacatctggtgagattcctagccagtggtaaattgcataacattcagccaacaaacagagcagctgccataagcagagttctcaaataatcatttgtgtggaaatcaaaaaggagggcaacacagtctctgccctcaggaaactccggaagggaggagaggacaggtaggccatgagttacagggggccacaaacgtcataaacaggcgtttgtcaaaggccgccggagaaccgggaagcaatgattgggcaaatctgggaagacttccacagaggaggtggcaagccggaacaaggcacacaaatgccaggtgctcgtagagggctggatacaatgggggcttcactaccaggcctgtcaggtggggcacccccagaaaatcaggctgaggtgacggactgggacgtctcgcagcatgaggctgagtttaggcaaagctgtcggggtcccaggacccatgatttccccccacccccgtctgccccattcccaacttctctatggggcaggaactcgacgaggggcaccatgctgcagagaaagggcgccatgcctttggggctggggctcggcagaaggtcctctgagcgtggattccaacaggagctctgccgccacccagcagggtgaccttgaatacgtctgcccgcatggctgggcttcaaagaccttgcctgggtgatgtgtgagcacatgtgattcccgctcacaccaggctctaggctaccgtgcaggcgggagcgcgtggggtggtgcagatcccttgcctcgccccggtgggggaggctgtttctgatttgggggagcaggcagcgtggggcctcccgttcagagctctctcaccactgggcctgacctcagggcgcctggctggggccaggaaggcgttcgcgtcagacaaccccagcggggaagcccccctctcccgcgggccaaaccgcagcttcttgcagccactcgccccggccggtttcgggaggagggcggcgctccgaaggcggccgcgcgcaacggggcctcggtctgtggaccagcgtcccctgagaagcagaaggggtgtgaagggcaggaaaggggccgtgccgggctgtccctcccgccgcctgctccgcgggtggcgcccggggccgggtggcagcggggtgtgggcggggagacgcggcgggcgcgggggcggccgggcaggcggcgcgcgctcggaagtgcccccgggcggcctccgcggcaggcggctcctgtttcccggctcccgcccgggcgggcgcggggcagctgctgggaggtgagcggagcagcgttttcccacagtctggggcggtgacacatggcgctcacacattccacagccggcggccgcgccaggcctggctgcgagtcaaggcagcgccgggagctgccgacgagcaggttccgactttggcacccgccgcgccgccttcccgccttccccacgcccggcgggggcggagggggacgcagaggggcccgcgccggcggcttaacccttggacgtctagacacaactttgatcagcagtttattgaatctcagtgtgtgtctcacccaggtgctgaataaatgtcgaatgcatgaatgaattactgaatgaatgaacgaatgaacgaacaaatgaatggacgcgcgcacacatgctgtagggagcccttcttggctcgctcacgtaacgcacctatgcaacaactggccaatacgctttccaaagctcctgactcccactccgtacattctttggtggtgtttctttgagacagagtctctctgtcgcccaggctggagtgcagtggcgtgatcactgcaacctctgcctcccaggttcaagcgattctcgtgccaggctcccaccaccacgcccggctaatttttgtatttttagtagagacggggtttcgccatgttggccaagctgggctagaactcctgaccctgtcaggtgattcgcctacctcagcctcccaaagtgctgggattacaggcatgag

SEQ ID NO: 41915 - DNA, 1652 bp, Homo sapiens
tagcaacctactgagtcataggcatttacctaagataaatggaagcacaagtccacaaaacgtctcctgcaagaatgcttgtagcaactttacttgtagctccaaactggaaacaacctaggtgaccatcacaagagaacagatatatttgcactatatttgcacaatgggatactacttagcaacaggaatgaatgatctactgagacatgcagcaactcagatgaatctcaaaaataccaagctgtgtgaaggaaggcaaacatgagaagtgcatcctgtttgcctttatatgaaatctggaatagctgaaactaaccaatagtgatagaaaccagatcacggttgctgggtgatggtgggcattgactgggaaggaaggactttctggggtgatagaaatgttctggaccctaatatgccttgatcaaaatggaatctttacaatcggagcatttcactgtatataaattatgcgtgtaaaagaaaaaggcatcacacctaaaaagcctggatttccctttacttcgatattcaagacagcttagaagcagaggatcgcagatcagcttgggggctgcaaaacaactgcctcagcacatgggttcagggagtaagctgtgttcctcttgctttcttttagcaaaatcaacaaagcattatttgctttgttggccactgtggttaccaggtctccagccacaggacagagtatgggctgagccggcagagggcactgaggtcagcctggcctggtcctgcccacagcccactcgtcattcctccatcccctccttcattgttgaggaagccatttttgagaaacttgcaaagttactccatccccagttatcttcagtttctcctgttttcctccactccttctcccctcatccacaaccttccatccctcttctacctaaatactcttagagagccatgtgctaaagatttaatagcccagggcagtcaggaacccctgattccaagagttctgctagtcactcaagcacaaaaattggttagtaacttgtcaaaggttaccccgtgcgttgactttcacttactcactctctgagcctcactttttttaaatttgcaaaataagggaaataattctcagcagtcaattttagggataaaatgagaatctgtgaaaatatcagccagtttgagggatttcaagtttatggctagttttctctttttatattttattgtaattaatcgttactataagcattttcaggccattctaaagagggggtgcagttctcccaagtcctgcacggaatgaggagcaaagccaggatcccagcctgggtctctgctcttcggtcagctcggtgctttcccaggtggaaggccagctggcccagggcactgcagcggactccacctactcacgtttccatctctgcaattctagaaaaatagcacagagggccaggtgcaggaaggtcgaaaggctgttatctcacacaaaaacagtaaaattcctttcacacccttctacctcccaccctttaattagtctcttatgaacataaagtctccttgacttttcaaagttttataaagaattacttgtggaactcttggagaccaagtgtgaggcacttataaaacttcacataatacacagagtttcc

SEQ ID NO: 41916 - DNA, 1290 bp, Homo sapiens
gaataaattaattaattaaaataaaataagactaatttcaaaaatccctcttaggtacacagcagagtatagcatacaaaatgcatttggccctctcaccctgggtttcattctgcgatttccctataagcatttagatttccttctgcatgacccaagctaagactggaagggaagcttgccatcagctgacagtgaggagtggcaggtagacaggccttaggagaagggggaggtcagtgtcttgggacgtccggccccaattctgacccccaaaaggagagcatcaaggcccagaagcattcaagcagaggtgaaagcacaccccacaccagcagcatctgcctcactgccacccccaaccccaacttaaccacccggttctgctcggggctgaactgattagtcattcataatgcttaagtcattaattcaggaaggaagccacgctagctgcctcttctcactgggagtttgctgccgttgcaaaacagatgagtaatcagacattccgggagccctcgttaagcccattgccaagaaaggtgtcttgcagctcatttgctgcgggggaagccacgctacaggccctgagtcacgctggatccaggggagggcaaggccaaacttgctggagtgcaacattgcatcaccgagatctgcgacggagaggcttacccagccaccgagctccactgacctcacccacagccccagctggggctgaccctctgtgggctgctccgctgcttctggggttcggggaggctcaaggggtcagagacagacatcctgggagggacacccggtactagatggagtcttatgtccctatatgacaggtgctaaaactgaggcccacaaaggcagtgacacttgcctagagtcaaacctaattcaaacagatttaggatagaatttcatctcagtttttttgtccccagcaattttcactgcaccaaattacatcaataggtaatgcaggtaatgttaaaggctagactgtgaatggcaacgtagtaaaaactacccgacgtccagcagcagcaagtactttagaaaattgtggtcaaataaaatgaaatgctaaccatccatctaaaaaagattgttaccactttacattctgatatggagctgtctccaggatacgctttttattgctgttgttgttgttgtttgttttctttcttttttttttttcttttgagatggagttttgctcttgtcacccaggctggagtgcaatggcgtgatcttggctcactgcaacctccgcttcccgggttc

SEQ ID NO: 41917 - DNA, 1641 bp, Homo sapiens
tatattttttacccagatgattcactgttgctcccattttaccccatttgctttatccatcgtgtgtgcctgcatgcactctcccactccacacacatacagaattcttttctgaagaatttgagggtacatttcacacagcatagccctttagtgctaaatactcagaatcagatgccctttccaagctcagtttgctcagttagagcacaaaaaggataagccctgtcctctccacctaccagggcagctgcaaagagcacatgagatcctgcacaagcaaactcttggacacacagcaaaactattatcttttttggaagcacttcttggaatttggaaatgaaaggtgatttcccagagaaatgcccaggttctcagttcctccaggagacagcatgttcttcagccaggcctggtgtgtgtgtgtgtgtgtgtgtgtggtgtgtgtgtgtaggtcagcagcgttcccctgcagcccctcctctccatcaggcagccagggcagacttgagctctggtgagcacctttctggctgatgagctcccctggctccagggaagccttgggagggcaaccgtggcttgaaaacaatgctcatccgcccctgggaagggctccttctccttgatgaaatggaaccgagccagcacggaaacccagacctgcattcagggagcccacaaatactcacagagcacaataaacaagtgttggtcctctcagcacgttttgggacccatctccttaatgagaacaataaattcacacgaggaaaggtggtcgccaagcaaaagcgactgacacactcccccggcttccttggccccgggggactaccccctctgagcgtgggacctgcagaatcaataactggaagggacaagggccagacctacggagtcagaacttctgggctcagagcctaggaatgtgtatttttaaaggcttcctggaggacaatcaggtttagcaaccactggcctaaaaaccctgtgagatcactcctagcgctgaaatactctggtcctgtgaataggaaaatggatctaaaggtagaagatacacagacacagttaaataggggtgcattcatccctggaccccaaaaaggcacttgatcatagtttccgcagagctgaaatcttaagccctttgctggcagcctgtgaatcctggaagggaaacgtgtacagccaagcctcagcatgggtgcaaggatgtcttccagctcctctccctccttagtttgtcaaaaccatccctgatgtacagattctgtccccagactgcaagttctccctgggttggggagaagaggtggaggagaatcagggaggcagccacagtctgctctagctgcattgacaagaactggttgctggctggtgtgggccagctcagaggagcacagctgtgagcaaggccaggtgcagtcggcctgagtgagcccagaggggccagctgtccggcccaagctagggagcagtgctcactgaccacagggcagtggggactctgttctctgtgtggctggcttcttttctttttttttttttcctcaagtgacccacacccctcaatgggtcactctgcctctcactggaggtttcttcttgagtttctaggcaaacactggg

SEQ ID NO: 41918 - DNA, 1592 bp, Homo sapiens
tacctactgcttgatgaagcaggcgtatggtgtgttcaccaacaatctttaaagactgctccccataactataaaagcaataaaaaggagagagagggaggaaggagagaaaccaacacatcacccaggggaagaagggagagagaaaagccttcttctgaaggactaaggtcctggccccactgcaatgcggggtgtgtgcatcagaggtagccagcagcaaggcaccgggcatgtgatcagagtcactgctgagtggacctgaggccagagctgggaactagcaagggccaagtccaaaagcaaaggcgaaatggagctgggagagtaagcgccaggtcaggtggtggggaggaggatgctgaggacaggtccggaaagcctgggggtgccggagtccccattctgtggtgtttttgcaggtttgaggacaggtgtggtggccacaggggacctgcagggcgaggtgtagtttcctcttctggccgatgaagtggttgaccctgggtttctctgcttgcccccagctctgacgttgagatggtttttcatgaaccgaaagcttttcgattctcaatctctagaccactgagagctgtgtcacatccagactcagagctaaccagcaagcacaggagataccactgcgctctccccttcatacctcacgacccaaccaggagagcagttcatgcctgccgtaccgatggggaaactgaggctttaagaggcgaaggtacttccctaagtaccacaactaggaagtggagaaatttgaatgcactcctagctgactgcaaacttcaggttatttctactgcatgaagctgcttcctaagttcagagtaaagatccacccagggtcacagtcccctggggccatttttcagaaagttggccacctacatcaatgaactaaaaaggagcagtgataaggctccatctctttcctttcctttgcccaaagagaatgagcactcataccaacagcagtagtgcagaaagccatttgcccccgtgtcctttacagagacaaacagataacccttatttgcaagctgggtaaaatattaactcagcacccaagggcgctgtccaatacaagcaagacaaagtccttggctttagtttgggagctcagaactaagcatccaccctcaggctgtcctcccacacccccaggtgcagggtccccttccctcaccattacagcattgcaagaaggcagcacaatgcctccgcagcctggagaagcaagggagagcacagtcctcacatccaactaaaggttccctaaggtgcagggctgtgtttgcaccctctgcctgctcagacagccattccaggaagtgattttgcttctgcatgtactcctatgggtgccacccaccctcacttttggtctcacccactgtgacccggcagagactccacatcatgatggctttcaagaggtacagctcccactctcctggctggctcaggaagggagtggcctctcccagatgtaccaaagtgccttttctctgggccctcagtggcatctccactgctgttgtctgcccattggctgagcaccacatgctccaagc

SEQ ID NO: 41919 - DNA, 1490 bp, Homo sapiens
aataggattattttgcatccattctattgttttgtgggaatctttcacagtcattgcctgggaatccagtgatgaaaagtggcccacaaatacaatctaatggaggccctcaggttattcactaaagctcagagaagatcattttccaatcagagacatccacaagtggaatggtgctagaatcttccctcccctgcaggaaagccctggtcagccaggtcagatgtgggcagatggtttgctcttctccaccgagtactgagtgaagccttgggctggaaatccaggtagggaggttaaggacaaatttggaattaaaacacaataagccccttcattccttccccattcacatcctccattcttaaggctgggaaaaaaaaaaaaaaaaaagaccccttacttcctcatgcaagactgcccccaggcttaatcagagccttaactgctgtctttggctgtgttgtaagcacagtgacaatgatcaggttaggtgtttagaacagtatgatgtcagtcgggcttgtgatgaaagagtcgctgacagacagtgcaagccaacaccatgagaacagctcaggctatgaggtcattcagtccaacaggtaggcaggtttgttttcttagccctgacattcgatgccctgccggttattgaataaccagaaatgaggcgactcctacaaattcctggatctccatggggatggagaaggaggggctgtgcttcgtctgccaaactgtgggtttgattaagggcaccggaggagaagccagaactggaaacctgtctctaggaagatgggtagatgaaagaaaatgcaagaaagatattcaggggcaagtgggatcatttctgcagaggtgaaaaatgattctgcatcccatttaatccaatcatgccctgctcctagagaggaaagtgaaacaccctcagactgaacacgtggtcaaactcagatgaatgaagcagccagttcacagcaaatttacttttcaaaagactgggaaagaagggaattgggggaactttttttctgtttgttgaggagggagattatttattaacttgtttattttactacccaatatataccacacataggaccccatgtgcaaagatttcacagctttaagaacatgaaatattttaatgaaagactgtagttaacatttcaaaaatgtaagttcaagccaagcctactttcctttgaacatttcatagaagttaaaggaaacgggggttgtaggtttttttttttttttttttacgtatttatttatttagaaacagagtctcaccttgtcatccaggctggagtgcagtggtgccatctcagctcactgcagcctcgacctcccaggctcaagcgatcctcctgcctcagccccccaagtagccgggactgtaagtgtgcaccggtacacctggctaattttttgtatttttcatagagacagggtttcgccgtgttgctcatgctgatctc

SEQ ID NO: 41920 - DNA, 721 bp, Homo sapiens
aacggcatggagttacctcaaaaccagggagagggaaaaccaatgtacgtgacatggaaaccagggtaaaaaaactgcctcaaacctaccaacaagtgaaaggaaaaatctacaaaactcaaaagcccgtcttggtcattctacacaatctttattctgtgagagaaagcagtggcccccactcaggatatcaaagactgaggtcccacgttatctccaggttttactcaaagaactctgcatatttgggtattatttttatctctccctttcgtttattgtctcagggtaaacacttgtgattcataaatgccttaagagtgaatcagtattctcctgttcaaaccaatagaggccacatcaaacaataacctacaaggtattattaatcattaaataggcatatatatgagcactcaggcaagggagccatttttcttctcttgtttgtttgtttgaaggaaattaacaaagtacaaaccttgattttgacctattcagaaaaaaagcatttttttaaccattaaaaacttagttaaattcaaggctaaaagggcaaatatttcacgtgggaaagtgctccttcgttcaggagacttccttcagccattaaactatggtctggacttcaaactgtagtagttactttttccataagcacacaccatcaaaaaatgaacattctcaaccatggctggtagaagcaagagtccattgtaga

SEQ ID NO: 41921 - DNA, 849 bp, Homo sapiens
ttttgatttttggagaaatttggtctgacgttaccatttgggcagcttatcagcaaggcaaacacatgcatgccctgagtttaaaggggatgggcttcaccccacattccagaggcttcctgaggtccctgggcctgcccccatatgccccagccccagcatggctctgaccctttcatgcacaagggtacaagttagcatccctgtgatccctcagggataccctccttcatccctggccttgcaggctcgcctcactgaagctctgctcagaggttaggaggttagctgggagcacatttagagcctgcccaccgccgctgctgtggctgggccaaacgtgtgatttaagccattccaggatgccccgcccccaccctactgggaaaggctttcttggcaaccatcctctttcagagccattagaaaagtgcacattcccttggtttcactggctccaagcgagtgttggggggtggggggagtattacaggctgccgttagccaatgttgaaagcttctgttttccacccccacctccagtttgcagtgcaaggtcctagcttggccaggaatcaaccaggcattttgttcagaagtagcaactcatttttatcaaagatggaatgcagttgcagttgtttctaatgcctctgcatgacaaccagggctcttgctccaagcactcccgactcctcttttccccgcagacactttgctttctcacctatccctttctacatccaaaaattggatgcagagctgctcaagtgcctcagaattcaggagtcaaaagttgtagcaattcaaagtagctttattgtgtctattttaaatgcaggctttggt

SEQ ID NO: 41922 - DNA, 1228 bp, Homo sapiens
cacatacagacacacgttgaaattccatttcaggggctttataggtaaaaaaaaaaaaatcctggttatgaattctgcgatcagcacatacagactgctatctagaaagactatgatactgattctagtagagggttctcaagctaccagtcagcacatgccagagaacgggggcagcaaggtggtcattacaaaggtgacctctagttgccccccccttcccagcacccccacctggcacgcgccccagcaaacatgcatgcacagccggcctggaatgtgctgtttctgggcactgggactgctggaagctggctgcagccctggagagatgacaaacatgtcttttctatcctgggctttatttttctcacggtccctgaaagggctgtgatcaggtgatatgtgtgggactgctccctgtacaggtgcagagcaggtaccgaggggaggagaaaatccaccgtgtgtgtacttactcaaagctcgttcaatagccctcccaggatagctcttggcagggcagctaccacgtctctggcaggctggagggaatctgagtgtgagaaagtcagtcatgcggaggaaaagggaaaaaaaaaagcttcaagtcctcaggcaaaataccttttttcttcttctcttgctctctcctttctgtagctttaaaccaaacccacaaaccactctgatacctaggggacaaaggggagtttcactagagatgcagttatttgttttatggtttgaaagcaaacaggtgatgcggtaagacagagaagtcgcccttccggggcgggggtggggggacgctgtgggtggagacaagtgcgggagcccctggttgtatgtattgggcatgacacggtgagaacgattcagaacgatgctggtgtcacagggggatcaaagaagtgacctccactgatgaactgggctccattttctctttgctttgggagtcgggggaaaaggatgactgaaaaataaaggctgtttctatctatctaagagcattcttccagatgcagatgcttcttcctgagtttaggagcttactgtcccatttgagaaggggtggggagaggacaacgttggtcctattttcactgcctagcataaggaaactgaaaagtcatctgtgagcccatctgcaagaaactcttcttgaatggttagagtggaaagccagagagttcctggaatttatttttatttattatttatt

SEQ ID NO: 41923 - DNA, 5701 bp, Homo sapiens
agttgaactcagttcccaagagcgtgcggtcaatgtccagaggagctggatgtagacagatgcctctgggagtcagtctgcacctgcctcctaggaaccttcttcactggcttgaactgcctaactgccctttctgcctccaagccctgcaatccactctcccacttttgccagagccatctttctaaagggaaaccctgatgcctcttctttgctcaagaatgtttcatggctctccactgtctaaagataaggtccaaagtccttcagcaagatgtttaaggagcttgtgacatggcctcaagctgcctcttccagtccctcacattccctaggctccagaccatgttccctgaataaagtcttcaagttccaggatcttggcctttaataccatgggtacctgcatcctctccagcccacgactaagcacattcccaatgccccaatcctacctatttttcaaggtacacaggccaatccctccaggaagttttccaaggtaccccaacttaaaagtaacttaattctcctgaaactccatagcattttacctctatccagacatacgtctctcttgaacctacgacttcccagaggaatttactgggccatccgtagatgtcagctgtacacgtttatatgtatctctagactgttagcttccagagagcaataacggtcttactcactgctgtaaacccaggtagaccagcaatactgttatccatacaagtatggtttcatattttgtttctgtcctcctgatctctcaagccaccacctaactcagaaaagaaaggaaaaataaaggaatgtccagtcatcaatcagaaaatcagcgtctgtctgcccccgcagtttactgtcaacttctagcaggccgccactgtatctctcaccgtggaaatcccagggtttaacacagtgtctgacactgcgcgtgtgttccacaatgaaagagagaggggggcttgcccaaggtcacccagagtcaggaaccactgaatctcatccgggacgagatctggcgaaatcattgacaacgttatctcagtggggagctgggaggccggaaggaatgaagtgtctgagaaccgtgcgccaggcctccgggacgcgggaagggctgagggggcgggaggccacatcaaacaagacgctgggctcccgggctgcccggagccgcgagccgagctcccaggcggcgggaagggcggagggggggtgggggcacgggggccggcgacccgggcaggcgggagggaggcggaggaggcggccggccggcccaggcagtgcgcgccgcccgcccggctcggcaaatcccccagggaggccgccgccagagccctggcgctcccggcccggcgcccgccacgtggcacccggcggcggcggcggcgactcctcccggcgcgcggcccggccagcaggcagcacgcagccgcccgcgccgcccgcctcctcccgggcgcccgccggcggcctcccgggcgtagtgagggggagcggcccggccgcccgggacccggggaaggggcgggcggcgcgaagccgctttaaccgcagtcgccgagcggaggcaggaggctgacccggccgcttcctaagtgcggtcaggcatcccgtgaccgcggcgggcgcccagggccccgcggggagagggcgggggcgaggagcaaacttggaggcccccacctcgcccccgggctgttgcgaatgcggctttcggccgagtgaaaaccccaagcccgaaagtgagggtggggaggcgggggttggaagaattccccactctccaccccgggtgtgcgctccccgccgggaagagctgaccttggcctggggaggcgggggtggggagagagggtaagcgccggggctcggctcccagcccgccgccccctcggattcctggcccggcggggccggaggagggggccccggacacacacacacacacaccccccacacgcagcgcgcgccaatgagcccgggccaggcgcagggggcggggttttcccaggctcgagcacagcagctgctatttaccttcttggcttctcccggggaccaggaaccggcccccgctctccgccgcccgtcgccgccccccgcctccctgcccccggggcgcgcgcacacacactcactcacacacgcacgcacacacacatcctcccggcccggccgcagccgcggcggcaataaaacatcctggcacgtgctccggctccaggcgcgcccacgccggccggctgatgtcaaactgcagctcggctggtgtagctcttaaagggcccgcgggcgccgggggccgaggccgcccgcggggcgaggagggagaggctgcttccttgcccgccacctcaacgcgccgcagaacctaaagcctacggatgaaaagggaaagggtggtgaaggagggcgcgagtccctgagtcattgccctcggagccccccttgttcattttttcatttgaaataccgtttccttccacccagttggaaattattctgattgtttcctggggaagcccggggtctaaggccccaaatccaaacgaggaatttctgaaagacggggtgggggtgggattcaagaactaccttgctccgaaaaacctgcatttgtgaggtagaaggcaatttttcctttttctgcatggaaacaggaaaatttttttggcccttttcctttaccatctactttcaccctcctgaatgtaaagtctgagcgggaactttagatgtgtcggtaactcacattcttacacccgtccccccctccccccgcccccttttaaccactgctgtttttttctttattgtttatacctttaaaaaaaatatgtttcaaatgaacttactacagtcaaagcagctctgttacatatgagagagggcataaagagcaaagaccctggctccaaaagaaatagacaagatcaagaccaaagcggaaagaaaaaaaaaatctctaaaccaaagcccagagggagagtagcaaagggttaaaatccttttgattgacgttgtagcctccggtgccctgggctcaggcgcgcgccattggccgccagaccttgtgcctggcggccaatgggggggcgcggtccacgagcggtgccgcgtgtctcctcctcccattggctgaaagttactgtgggaaagaaagtttgggaagtttcacacgagccgttcgcgtgcagtcccagatatatatagaggccgccagggcctagggatcacacaggatccggagctggtgctgataacagcggaatcccccgtctacctctctccttggtcctggaacagcgctactgatcaccaagtagccacaaaatataataaaccctcagcacttgctcagtagttttgtgaaagtctcaagtaaaagagacacaaacaaaaaattctttttcgtgaagaactccaaaaataaaattctctagagataaaaaaaaaaaaaaaaggaaaatgccagctgatataatggagaaaaattcctcgtccccggtggctgctaccccagccagtgtcaacacgacaccggataaaccaaagacagcatctgagcacagaaaggtaagggcggtacctgtatctctttgcagcccctcaaaattaagtaggggttggggggcttctttctgtcttgaaaccccgggatggcagattccatgggaacacagaactcttttttttatttgcagtcatcaaagcctattatggagaaaagacgaagagcaagaataaatgaaagtctgagccagctgaaaacactgattttggatgctctgaagaaagatgtaagtggggaaatgctgctcgctcttttaattaaaaaacaaacactttctcagctactaagagtgaaaccccccgccctgcggggtctggcactcgctggtactgcgttctcccaggcgggagggcccggccttattcgctggggtccagagataatgcttgcgctccgtggccgggaggagggacccccagcactctgaagcagctgacacggggctcactttcctttcttgcctactctatgcagagctcgcggcattccaagctggagaaggcggacattctggaaatgacagtgaagcacctccggaacctgcagcgggcgcagatgacgggtgagggcggctcgccgcgtccccctgtgcgggcgtcccgctcgcctcgcggtgatttcttccagacttccgcccgtggttgtgagaggcattcagctacattttactgccttggctcactcttgcgttcccacggtctggggcttatttatagccacaactccaagttgttactgttccggaaagggagggaaagaggttgcagccgcgagggtggcgggcgccgggtaggggcgaaaggacttaggactgtggcggtttggaactgcgtggagcctgggggtcactggtttagcactccttcccgttgcagaaggggaaatgaggcttggatgatggattgggaggcattgtccaaggtcacatcgcgcgcgggggtgggggtgacagatctggggctgagataggtttaaatgcagctacagggaatcgggaaggagtggctcggcttttggcagcaacgctagtgtggagaggtggctggttttttctaaacccatctcaccctccctgccggaggcagtttcacgggcgcatggtcagggaggcgcgccacagggacctcccagggcggaggcagtggccacggggccagggccgttcggtgacccgtctgtctctttctggcccgcagctgcgctgagcacagacccaagtgtgctggggaagtaccgagccggcttcagcgagtgcatgaacgaggtgacccgcttcctgtccacgtgcgagggcgttaataccgaggtgcgcactcggctgctcggccacctggccaactgcatgacccagatcaatgccatgacctaccccgggcagccgcaccccgccttgcaggcgccgccaccgcccccaccgggacccggcggcccccagcacgcgccgttcgcgccgccgccgccactcgtgcccatccccgggggcgcggcgccccctcccggcggcgccccctgcaagctgggcagccaggctggagaggcggctaaggtgtttggaggcttccaggtggtaccggctcccgatggccagtttgctttcctcattcccaacggggccttcgcgcacagcggccctgtcatccccgtctacaccagcaacagcggcacctccgtgggccccaacgcagtgtcaccttccagcggcccctcgcttacggcggactccatgtggaggccgtggcggaactgagggggctcaggccacccctcctcctaaactccccaacccacctctcttccctccggactctaaacaggaacttgaatactgggagagaagaggacttttttgattaagtggttactttgtgtttttttaatttctaagaagttactttttgtagagagagctgtattaagtgactgaccatgcactatatttgtatatattttatatgttcatattggattgcgcctttgtattataaaagctcagatgacatttcgttttttacacgagatttcttttttatgtgatgccaaagatgtttgaaaatgctcttaaaatatcttcctttggggaagtttatttgagaaaatataataaaagaa

SEQ ID NO: 41924 - DNA, 4130 bp, Homo sapiens
tcttctagctcctcctgaggaagattgaacaggactaaattcacgaagctaatggatccaatcctattgcccattgcacgttaagggtggttcctgcagctctcctctcagggtagctcaccagcatccaaagcaaaaacacttccaactgctgcgcctccttcaagacttggggtcttcattaattagccaatcctttggttcaaataagacgttccctagcacccaaaagtttcctctccgcaccctcttaaagcaagctgaaaaggtcaacagattccttctgccaagggacagttagttagactcccaagtggaggccgagcccagatgattaacaccagacatgtgtttttgataagtttctgtgcttggctctaatagagaaagcatgtgggggctgtgctggcaggcacacaggccatcttccccttttaatacaaacagcaagcgaccccttcgcttggtcatgccccatttccaggcaagatgtgggctccagatagaagcaaaagggttgtctcgggtttcagctcacataaccctccttaacaagtcctaactcaaagcggacagctttaaactgtgccaggatctgcagggaatttcttccaaatcccatcacaaaggcttgtcagattttgtcagatttggccaggtgtttgactgcatccaggtgttggggaaatgaaaaccacgagccctgcgagaccagacacatcagccgcgctgtgggtctggcgggcgcgccctcctcccccaccgccggccagtcctcctcccccccggcccctcccgccagcctcctctaaccccccttttcttagaccggcttctgggaggagaaggatgaggcgggagagatcaatctttgaagctttcctaacaaagataaagccaacgattttctgtcttgtttcaaaagctttacctctcccccgccctgctctggcctttcccacaggccagtgtggagagcggctctatcataggaatgatcggggagacagcagttttccactcaagataccttcggacccagcttccaccccagagggagagatttaaaagagacctttttgaatttgtctcctacctgccttactttgtgtacatgaaaggtgtccaacacaccttccgccaaagaaacacacacacacccttatcatttttccacgttttccctcctgttgaaacacaaacaaaataacaatcgtccattaagacacccaactcaagcaccagtgtttcatttggtaagcctgtcctctgggtccactaggagccccttaacagtcctggtagaaaaaatcagacctcaatgtcttatttttacacaaggaattccttttacatcgatgtctttaaaattcacaggaaaaaaaaatctcaacaccagttgaaaattcaatgtccctatgttgaaggggaacaattttaaaagtgcatttgtattaatatcaccgaaagtacatagatatcttcctagggaggggactaaatcaaaggaaaaacacaaatacgtttttttcttttttttaattggtgatttgaaaagagcactttttttccccctgaaagctaggtttagactattccacgaggattttttctttgttacagtaaggggagaaggtggagaccccactaggctccaaaccggaaagggcactttccagttcctgcccagctatgccaccaaattcactgtgtcaccttggataagtcatttcccttctctgggtcatttccaagtctggaaaatgaatggacttatttctaagacgctgtaccctcctgcactttggctgtttctggagtaagtagctgagggagaggcgaaacttcaaaaacgacttcaatgatgttgcctccctgggggtccctcaggcctggcctaattatacggcctcgggcacaccagcagcccctctcgccggcccccagcagtgctgatcgctcggggagataaggcacgactccaaactgcgtccggatgcgggccgcgggccccggctgccgcgcgcattagcctctcaatggagcccttccggggccccggccccccgccgtctccagcagcatccggagcgggaaaggcgccgaactggaagggggtgggggtgctcttcggtcaacacgagagccctctccaagcgcagaagcgcgactccggaggctcgcccctcctcgcgccccgtcccaccccacgcgtttctggaatggggaccctggggtttcgttggaccccctcgtcgtcaccaccgtcccgggaaacctgtcattaaagtcaattaacttttcccacacccgttggccggtaacaacccgctcctagcttcctccccggctcctaagtgcaaccagatgggcggacgggctgcccccgccgcgcgcccgccggggcggcccgggggttccagggaggccgcccggggccctccgcccgggcgggagccggccagggcggccacgccgggccagccctggcggccctgcggccaaggtggttcgcttagcaggcccggctgctttctggcaggaaatgaatagctcccagatgagctcaggcaacctgagaggtcgtgagaacggcgcgaacccccgcctgtgcagccggcagcctgccaggccgcggggggagcgggcggcggcggcggcggcggcgggaggccgggaggcccggcgggcgggcgggcgggcggcgctgacacacgagcccgcgcccgctcccgctgacaggcaggccgccgcccccgcttcccccgccccgggccccagcgcctcccaagcagcaggcctaggccgcaggaaggcggccgcgcggccccgccgggcctgggggtggggccgcctgccagtgtttttccagttcccccggtagctccgggccgcatttagtagctggggaaactgggccgaggccagggccggggcactagaggccctcgcggcccgcagagccctgccaggcggcaggccacgccggggcaggagtgggcagagcggcggggtgaggccatcccagcccacagagccgtcccaaaaaagaccttgccaccagacagcaaccctggacgcctaaaaaaaaaatcctcatttctgaaaaccctgagcgcctactgagtgctcagcaggcccaattcccaccagcctccgccgcaccgagctccctgtgtagccggggagatccacaaacaccctcgtgactcatcccaggtttgatgtgctaagtgccaaaactgaagtttaaacaaagggcacctagaacagagagattaattctgatgagaggaaaccaggccggggaggtttttcagagttggcacttgaagccgagaggtgaaagatgagttcaacaggaagggttagaagcagaagggtgagggaaaacgcggagatgaacatatatacgtccagtctggggagatgtcagtatgtttaccatggtgtggtatctaagttttcaaatatacaaattggcttagaggtcaaaaaaagaaaaagagggataagccctgccgcagtggttggcttaaatgcaatacagcccaggggttagaagcacgtggtctggctcctggcggcttggcttaggttttgagcccgagggaaattactgaactccctgcctcaattttgtaactctgtatctcatttgtaacttagggctcgtcagggtagtgcttcacagggttgagaagatgaaatgagtacatgcacttaaagcatttagaatagtgctgtcagctcttcggattcttaaccacagtgagggacgttcaccagacaagaaagccagtcccggcctttgcccagcgatggcaggatctgcttgtaattgcaccaggccctaggtgaaaggaccactgcttcttccttagtttctgaatttcatgcattcatttgataattattgaaccaggcactatgggaataaagggagaagaaaggcatggtctctgtaactataaagctatctggtagacaagacagcttccacacaagaacagcactgctgggcgcggtggctcacgcctgtaatcccagcactttgggaggccaaggcgggtggatcacaaggtcaggagatcgagaccatcttggctaacatggtgaaaccccgtttc

SEQ ID NO: 41925 - DNA, 806 bp, Homo sapiens
tcaaattctttttaaacataaagattaatactcctcagcaaaaatgaattgccaggtatttttcagaatcaaaaattctgtgcagagaatgggaaaataaatcctaaactttcaggaggaagaaaagtatccaattttgaagatcgtattgtgagcctggtttgaaaaagacttgtctgttataggtgaatgagtcataatgtgacccagagaaacccgtaactaaaagcatataagggtgtaacaagcgaagtccaaatcaccggctgggactgaaggcacaccaggaaagccaaaacacagtgtggctgtttgtcacaagatcaatacaatctctgtaagcaaagtgttctccacccacaaagcagttgctgactttccagataaaatttttttggctttttctgcctatctgtgactcctggtgttttgcattccagttttgcgatacagcaaaatacatattacctgaggggtttacaccttcttcaggtcacctgcagccaggatgcggtgcctgacgagaagtgtgccctgtgctgctgtgggccactggcccacaaaacacttcccagtggggctgactagtcattcatgcaggggattaatgcagcttctgctctgttccaggcaccattccaggtgccagagtttcaacaacaaacaagacaggcaaagcgctggctctcaagaagttcacattccaccattgggaagaaaacaaataaataaaggagaggatgggccaggtgcagtggttcatgcctataatcccagcactttgggaggctgaggcaggaggattg

SEQ ID NO: 41926 - DNA, 429 bp, Homo sapiens
gggttaactggcatttcttgatgaagtgatttcagctctgaaagtctgatgctcgcggccccagcaggaggcccctggagtcccaggtttgggacagggcgaagtgccaggcggtctcctggcctcggtccctgacagcgagggcagcagcgaaggcagccgcgggggcggcgctggagccgacgaccgggcggggaaagcccgagacgcggcccgggcccggggtctcggaggctcggggactccggcgcgggcgtgtctctgccccacgccgcccacagcagccgacccggccccgggggtagatgatccgcggcgcggagccccctggcccgggcctgcctttgtggcgcggcggcgcggccgcctttgtccctccggcgcgcacgccccgccgcgcgccgccttctgcaaggatcacccccgccg

SEQ ID NO: 41927 - DNA, 1566 bp, Homo sapiens
ctggattatctgattccagcctttgggctagtttactgctctgtaagttttagggaagagaggacacacagtgaccctgaattgtggacccgcaaatgagctccatccaccctcctacacggggcaaaagccagatcattgtgaccacttgaaaatcaacattccataaccataaacacatctgttctttggattcttctttgaatcagttgtaacatcgctggttcactcattcacaatgataacgtgctcatttttatctattttagaatcacgatttctaacttgttttaaaaccattttttaacaacacgcattattttctctttgtatagatggtgaaatccagactttgaaagactgagcaaattgcccacagcaacactgttgataaatagcagagtttggattcaagcgcaggtctgcaatcctgcttgcgcaaatttcaaaggaacggatactgggtatcttccaggtactagaccaaacatttagtgtatgttaatttgtttaaccctcccctcaacctatgaagtgagtgttagccccacccttatagaaaaggcaactgtgcccagagcggtggaggactgcgctccaggatgcaaccaaagccgggtgcacagcagccggcatggcgccaaaactgaagccctgagctgctctgcggtgctaccctttgtccctccagactctcttttccttcatctgtttgtcagtaaaccgaagccaccacagtttgtcatttggatgattttcggtaaggtaacattgcccagaaactttggttcctggttttgaaaggagccagagggagcgtatgcatttcccaggggtgccataacaaactaccatgcactgggcggcttaaacaacagacacgtgtgctctcatgtgttggaggttagaagaccaaagtcaaggtgttggcagggccgtgctccctcggaaagctccgggagagaatccttccttgcctcttctagtttctggggtttgctggcaatctctgacattccttggtttacagatgcactactccagccctccctcttcccgtggcatatctgctgtgtgtccctgggtgtcttcatgtcatcctctttctgtgtctgcttgtctctgtgtttatatttcccctgttctaaggacaccagtcatattgaagcaggccccatctaagggcctaattttaacttggttaaatctgcaaagaccctatatccaaattaggtcacatgccgagctcccaggggttaggacttcaatgaatcctttcgggggttgagagagtaacacagttcaacccgtatcaggcagcatattgaagtttagcctctaccaagatgagctctaagcatgccagtctcacaatcagctctgtggagaaggggccctgtggcctcacaaatttggaaaaatccttcatgttagatgccctggtggtaattcacaggtatcatgagcatggtgacatgctggaaaggactgcggcaaagaaacctgttgactcgaagttggcatttcccaaacttatttgagcatgggagctgcgggggtgatgtg

SEQ ID NO: 41928 - DNA, 942 bp, Homo sapiens
attttttaccttcatattaattattgaaaaaaccgtacctcaaatcacacccccaacctctcagcatgaacaagctccagcagacttctcccagcagcccctcccgcctttctctgcatgtaggtcggcttttcagagctgccatcaatgtggacataaagccctgctttccacactcctccctccgctttgtatacactttcccatgcatctgggtcagcctggagctgagtatttcacagggcagcaaaatatacagaggcatattttgttttagaatcttaatacccagaacatctgggtaatactcagacaactggacagattcttgctgatgctgcaagtctccaaatacggtcccttgcagagagaaaatgctgtattttgcatctgtacctaggcacatgggttttctcaagcatagtggactttggagtgtgacagttagtgatttctccccgggaagtggcatgacctgtaggagttactgttggctgcagctgctggtgcagcccaaattatttattggttttgattcgtgcaccgttccctgcgtaaattaaaatgtgacattattacaccctccgagagcccatcggcgaccttgagcactctccccccactctgcagccattattcagcataatttgactggtttcaggcaagttgggagggtgggaagggatgggtgggggcaggggaaggcagagtccaaattagaaacagatttaaagagcatttgcagggaattaggcagtgggccaggcgcgcttgctggcagcatgtgtaacccctctttagggactgtcagctcctcccaggtttccacagcggatgtttcccggccggagcacagctgggtttcagttgtcaaacccacagccaagacatctgagaagcgggtggagcatccatgtgcacgcatgtgtctgcacccggcca

SEQ ID NO: 41929 - DNA, 2772 bp, Homo sapiens
gttttctcatctatgaaatgggcatcatcataatctcatctcattgagttcttgaaagattctctgttttctcatctatgaaatgggcataatgttctcatctcattgagttcttgaaagatttgtgtaagtaacaagcttagcatggtgccgggcacaaagtgaacactcttcaacaagtctgggctgtttcttgttgaattaatgagtctaggatacacgttcagtcctaaggtagcacctgggagtaggaaagcatttgggaaggccgccccactacttccgtcaaccctgagaagccttctgatcctcacataggataaaacgcagctcttcctttctcatgttggaaatctccagtgacctgaccttggaggcatcccacacgccctcagtcccccggcgggccctgccaccacccctcagcgttgccggatgtgcggctgaggtccaaggtttggagagtttccgggactggccgggtcaccctgcggctcggccgtgtctggcagccccacccttcctggcagccaggccctctgaaattccgccagcaccgggggacgaagaaggtcttgctaggatgggggagggcgggaagacggggagcacgagccggctttgccctcccatccagccacgcggagaatccatccctggcggtgccgactgctcctgctagtggggaaggaagctcctcccggcaccaggaccgagcgcctccaccaggcctgctagaggatcacacctccatctcaccatagagccccccacagccgaaaaagccctcccacatccagttcccccagacacttggtggcttttcaggagacacggttctaacacccatttcacagagaagagcactgagtccgtctctggccgtgaggctatggcagggctgggactggaagcagggcctttcatttgacttcttgtaggtttcttccggggcaccactttgtttttgtttttgtttttgttttttgttttgttttgttgagatggagcttcactcttgtggcccaggctggagtgcagtggtgccatctcggctcactgcaagctccacctccggggttcaagcgattctcctgcctcagactcccgagtagctgggattacaggcgcccgccaccacgcccggctcttttttttttttttgtatttttagtgagacggggtttcactatgttagccagggtggtgtcgagctcctgacatcagatgatccacccacctcggcctcccaaagtgctgggattacaggtgtgagccaccgtgccgtgcccagggcaccactttgaaaactggcatagaggaagaaatggccaccttctcacccattgcccacccctttccgcctccacccctcacacaagcctgacaccaccttgacaagaggactgcttcatttcattgccctgggtcgctagagcctagtgccccagggtgtgttgactggctcgctcctttcctgccggatcatcctgcttcttcaagctccacccatctcaggatcagccttcccttccaaccgcaggcctgaccccactgctctacaggaggaaaaggcgctctgcgctttgtggccggatccggggttcagcaagtctcatcctggagctacctccatcagagtcaagctgtgcagaggcccggggcagctcagatgcttgggtgggggtggcgaggcacggctcctgccctgtcaacagaacccgcagaggtcttcaggctgcccccttgagagcagactctgtcacccctgccctggcaaagaccaattggagagaagccattttggagccagtcactcattaaggagggggaggtgacccttgccctgccttcttccctgaaaacaaagtccttcctttgagctctccagaggctggcctcctgcactgaatgcagccacaagcagcccccagggagccccaggtcctggggacaggccccagaggcctggcttggagaccctggcttggaggctctcccaggccttggagcctgctctcttccctgggatagaggggagggcctgccacccgccacccgcctcctggatcctgtcatgggacagagctgggcctgagctcaaggacagaacaggcagacagtgatctgtgttttctgggaagacagccagtcctcgtgccctcaggcttccgggcactgaggagtatggccgagcagtcacccgccgccctggctcagccccctccaggcccaggctgggtgggcacaccccgtccctggtatccaggccagagagctgcagcaggaggggccatcacgctgctctctctccctcgcctgtggcttcataaactaaacagtacagcatcaaggggagcgggcatgcaggctgagctctgagccgtgccagcctgtgccccaggacacacagaggcatcgtttggtgggtgcaccctgagcatgtctcatcctttccccctcaacgaggctgagctgctcaagggcatgggaaaagcactaatttggcctcaaaacagcattgggttccagttcctgggcagtgctgccatccacccgtgggaccatggcgagtcatttcatcccctgagcctgttttttcagctgcgccgtggggcagtaacctccgctgtgccccttcctagttgctcagtcttatggtgtcaggcagctgtgagagtaccgaagccatgatactcccacgagaacttctccctacttttttttttttcttttttttgagacggagtctcactttgtctcccaggctgg

SEQ ID NO: 41930 - DNA, 1732 bp, Homo sapiens
agaaaaaaaaagggagggaggggagggaaaggaggagacccttgggaacggggaagtggagaagccaggccccagggtcctttggcatgatcatgaaatatcttttttctttgagaaatgcagcccctggctccaatcagctaattttcaaacctttgatccattgatccattgggcagtctgggcttgcttggttcttggttcagtgacagacagcagagggtgagagaaatggcacagggctgagagccatgaagtcactgggtgagtcccttccccttgccaggcctcagtttcccagtctgtaaaataagggggttggaagggctgactctagggctgactctgaccttttctctccaggcataggtgaacggtgtgaccacaccaggccagggaagaaacacgtgcccagcctgccatctgccctcctgtcttggagccaggtctttccaccagcttccttcatcttttaacacttggtgaaaaggaatgacacgtcagtcaaagcccctggccggtgctcatggagcatctggcaggaggaagccccttcctggctggcctcccattcatcagtcagcgccgcaggctgggccaggtaaggtttcagtggctgctgatggcggctgcccggcaagggttctggccaagtccgccccctcgttcctttctaactgggctttgggaagttttcaggacttcccaactcggcagcatgcccactgccacagtccccacccaccctgcaacatgaggaaggcacagaagcccaagccaggcagagcagtgctccctgcatcacccacaggcagcccggggagcgcgggcctcccgagagccagcccaggcctggatggcccactggggagggcaaggaggggaagaggggaagggaggctgtgccaagggctgtgcctgtgtttcagggacagctgtggaacctgagctgggaggcagctgtgaaaggcaagaaacaaggaaaggggacagaagtcacccggtcggtgagccagctcggaggcaggcagagaaagcaagagaaggggcctctcctgccgtcatcctaacctcccaggtcctccccaaaggctcccagcccttccccagacactccccagtctcctccctgtccccaccaccatccctctggccctgatttacagctgggcagtcacgggacagattctggttaagcctcagaaacatacacccagcaaggggtttggattttctccttcctaccctccctcgagactcttccgtggaggaggaagagaagcagatccagcctggagaagccaggccccgaggccctctggcaccctgactccagcaccctggtctaacatgcagtaggagaaatgaggtctggaagggtgaacaggcagccggccccccatgaggccttgacctcaggccccggctgggttggcaacagctcttcttggctcagacaggctcccttggaaacaaacctctgttactcacttctttcctctagttggctgacaagggagccgaagctgttggctcaaatctttttttttctttttaacctctcctccatttttttttctgctgctaaaaaatttgttttgcaagatatagtataaggctcttttacttcttgaagtttctttaagaaaataatggtgcttacaagaaaattgtgatgactcccggcgtttgcacaggactctgctgtgtgtaaaatgctttcctgggtctt

SEQ ID NO: 41931 - DNA, 1628 bp, Homo sapiens
tgagagggagcggaacacgaatcccctcaacccatttttttttaggaatatatgagaggaataaaattcgctactgtctgctcaaagtttgagttggacccttgctggggaatgtgaaaaacaaagctgttggtgacgctttgaaaatcagcaaggtgtactattaaaggttaaataaatgctattttaaattctcattcattatgatttattgctcaagtctccctatgagaaagagggctacagtatgccaacatcacccctttctgtctttgtcatgggaatggaatgtcttttgaactgctaaagtagataattccatgcctggaagaaaaacgaaggcagggggaggggagagtagaaggaaaaaagatcctctcatttcctaataactgcaaaggccaggaatgtgccacagcggcattcaggaaaattcggcgatgcgtgccaccgttgggtgcgcgccccgtccctctagtgccaggtgggggactgggaagccgcctctgccatctgccaaggacccacgcggcctgagtgatttacccattcccggcaatggcgagatttctttctaaaaaaaaaagaaaaaagaaagaaaaaaaaaatctttgttgtttcaccgttggcctcttggcctcgaagggcagcgcgcgccccgcctgcagtcccccgggccgcgcggctggaaaggcctctctgaagggggcgttccgctctgcccactgcgactccggccattgtcctcattcgccccgcacggggactgaggagggggctttttaagtagttccccgggaacaaaggggactcaggcgccgggcttcattacgggctcgttggccacaccagcggccccgcctctcgccacagcctcggccacaaccagccccagccagtggctcaaggccgccgccgccgccagcttgctggctcctcccggccctccccctcctgccccctccgtcccctcccctccagccccgggcccccgctgcgcccacgccccgccggaccgctcccgcctgccaggtaaaagcagagcgccgggatccacccggccccgggccgctccagacctgccccacgccctggcgtgtccctttcccggtggggaccctctagcggcctgagtttgagagaagatctaagctaagccgccacagcgagggaccacattgagaagatcggagcctgcctggccgttgtgagcctcctctcctgcggctgaacagacctaactgactacagccaggagtgggtcattcgagggtcaggagaggttttagacgtaaaatacacacgtgggtgacctcaaacatactctctgagcctcttgttgaacaaaatggagctaggcagtttggggttctttgtttgtttgtttttacatggagtctcactctgtcacccaggctggagtgcagtggtgcaatctcggctcactgcaacctccgtctcccaggttcaagtgattctcctgcctcagcctcccaagtagctgggattacaggcacgcgcctccacgcctggctaatttttgtatttttagtagagaaagggggtttcgccatgttggccaggctggtctcgaactgctgacctcaggtgatccgcctgcctcagcc

SEQ ID NO: 41932 - DNA, 1355 bp, Homo sapiens
aggtcaaggatgcagtgagctgcggtcacgccactgcacttccagcctgggtgacagagcaagaccctgtctcaaaaaaaaaaaaaaaaaaaaaaagacagttctggcgtcctggttggggaaactcctccagccatggaagacccttccagccagctggggcagctagacaagacagcgttgctctactcggctgagttctcctctccagaatcaactcccatcgctgcttaaagggagtaatgtggctgtgggggacagaacactagagtttcatcagcaacctcgtcacccccaacatacaaaacgctccttacaaacgcagtcctatctgtgctgctaaagaaggcaatccccccttcaccatcccatctcttccacttctgtgcatgagaacgcataggcaggaagtatctgatccacacggctcagatgagagaaaaaggaggagcaggaacaggaaaggaactgagcagaggagagacccagaaagggaaaggtgagaggtggttcttgcggctgacttggcaaagccccaggcctgtgggattttccgggaccctccgtgttctgaaaaggcaggggaggggcagagaacagccagggaagatggaaaaggaaactggtgtcctgccgggtggaaatgggggagaaactctcgcgtgagtgtcatcagagcagcatgagcaagggctcggtcccagaggtgagcccggcgttctgcctggagggggcgggcagcagggctggccagggtgaagcaacctgtgccgagcggctgcaaaggccgcgtctccccagcacggagcacatcactgacgtcaagcgcggcgaggccgcggccagcattaattaggtgccgatgcacgggggcgggccggcctgggccagaagccgctcccggaggctccgacccccggggcttcgcgccgcctcccagcccggagctcctccagccgctggcgagaggaggctgaaccgcagccggcctcccagcggtgccacagcgcgccctagtggccgtcgtccggaaagcgccgtcagaagaatcgcaggctcgcagcctgggagccccgcagccctcatcttctgtccgccctaaggctcattgacttcacattagaatcacttggggagactgtaaaaatcccgatgcccgggaggcacctattccgattacattagaaccccgacaagcgggccccaggccccagtatttttaaaaactctctcggtgcttcctatgcaccgcccagtttagaagctgttgtcttaaagcagtggttctcagaattgagctcatgggagtcgcctggagggcttgttacatcacatattgctgggcgctaccccag

SEQ ID NO: 41933 - DNA, 1187 bp, Homo sapiens
gccgttcagtcattttcagctgttgcacagagtggcagtgagatgctgacaacttcacccacgtgggaatcctctgaggccacctgagaaggaatctcacagatgagagcttggctggggatgcaaaaggccctgagacaagcttaccacgttggtggctccagggagagattccaaaaagtttgcaaaagaagaaaatgcatcatcctttaaagaggcgacgtaactgacctccacgctgaaatatgtgagtttcccaaattcatgattctccaaggaagaactgaaacctgggtatgaaaactactcagcctcttgggggaggggtgtctggcagaagcttggagctgctccagctgggccctgctcccagaagagcaggcttgcagaacaggcctgggcatggcccagctcatttgaactgagtttcccctgtgtgccattgactggcccaaagaagacataagagggaagcttcccagggagactgatttccaattttatcatttccaattcaagccatttctgggaaaagttcccattgtcctgaatgctcagttcaaccaggtgcactaggttgtccagaatcctgaggggtagtatctaattctggtctctttcagccaagtgtaccagggtcggctagcacccttgtcccttgggcaggaaagaaatgtcagtattgcttaggaagtttcaccaactctcaaggttatcaaatggtctcttcttttgattcacctgtcattctgaagactggattttcatttccacagctggcaaggtggtgtctgagcaccttggtagcccatgtcataaagtgagatctccagagacccccgagcacaccaggccttccagattagtagtacatctgcttcaaagggcttagccagagcctccacaggccactttttcaaccttgcaggagtattaatgctccccatccgatcacaggaatgtccacgaccaggaaatggctctctgaaggctgcctccatagtctctggaatttccatgacagccagtgtggcaaagaaatcttgcaaaggctgttgctggaataatccatcccacaggactggaatcaaaggacacagccaggccagccacagagttccaagaaaaaaataaaaagctccccggatacagtgacggatgaaaactgccaggaaaaaggctcaagg

SEQ ID NO: 41934 - DNA, 2129 bp, Homo sapiens
gtgcctgctggagaggcggcacacctcagacggctggagcaggaggtggggcatccacacgtccacccaggctttcagcccctagttactcagtgaagattttgaggcctggagagagggggcgtggcttgttcacagacacaggtcgcaagtgaggcagagcgggtgccacaaatcaggcttcctaactgtgatgttcaattttaggtgtcaacctgagtgagccacagggtaccctgatgacacacaccgttcccaggtgtgtctctgagggcgtttcccgatgacattgacatttggaaaggtggactcagcacagcagatccgctccccagccagggcaggcaccacccaatccactgagggcctgagtgaacaaaaaggcagaggaaggagtaactgccccgcgtcttcctgcctcactgctggagcggggacatctcatctcctgcctttgcaccgggatttatatcatcagatcccctggttcttaggtcttgggacttggatggaattacaccaccgccttccctgggtctccagcttgcagaacctgagatctctcagcctctgcaattgcatgagccaattcctatctatctatcatctcttgttggttctttttggctggagaacagactaatacacgaatctgtcctttccctccaaatgcagctggaatctctgctcccctttacaaagcttctctgcgaaaggatctctcacgccatggtgggaaggggagcctcagacccatagcctccaccccgggaggaaaacagggccaggacacaccagcaggcctcctttgatgaagaccatgtggttttgctccttctgttactttgacctctgaaccgcacccccacagacctaatgatttcctggtaaatcatttgtaacacccgctttagtctcctgaaaaaaaacttcacagataatatcgtcaaacctcgcagagaatttaaaaataaaaccttctatctgtaatattaattagaagtcaaaggtaacttataataaaagaattcgtttccatgtggaatgtttggccaagatctcactaacagactggaagtcactgtcactcactcacgatgagtaaaggatgaatttgtgtccgtgtttgacattttgcaatcagggctaagcattgcctcgggataaagattcccaaagtgctgaacaactcttgataaaatcccaaagaaaacaaagcacagtcttcccaggatgcacgttgccaggtgcggtcctgaaccgcgcgtccacgtggcagcagcgcgcagcaggaggctcccagctgagatcctcgaggacggggttcgtaccacatcggcatctggaggtcgcaggggacgcttggaagccgtggagggcgcgggacgagtcactgtgcaggaccgcggcagcgcggggacaatctggagcgccccgaacgcttcgccgccccaccgggtggcgggtggactcgcctccgcccggcggctcctcggtgcatgggccccaagcggacctggcgctttttcaggcgtgcaggagacagaagccgtgacggctccgcacgcacgcccgcatgcactccggcaagtatcccccgggtcaccgtgtcaatgtgcccgtatcccttctaggggacccggttctgactttccaagaataaagtaccgcgccgcgcccgcgggcggagctgggagaacccctccctggccctccacgtctgcgcggggcgcgttcttccgtgcgaccacaagggggcgctccgagaccaggctcgggacctctgcaggcgcagacttaaaatgcttgcagatgcgcgcgtggtggaagcaggctgagagggccagaaagcattcgtccttggactcgcatcgcgctagacagtctaatctttgacggcaccgtccagttttccaatatccactgttagcactgaacaattgtgtcaattgcatttccaatcctcctaaacaatgcaattttgatatataaacagcagtttttacgttcttccagaaacagatcaacgggaacaggtaaaacaattggccggtgcttgcctaccccgtccgcacccacacccacagttctctctagaataatactaacaaaaataataatgcaagata

SEQ ID NO: 41935 - DNA, 641 bp, Homo sapiens
ctaactcccctccagcttagctctgtggctttgactgcattgcttaacctctctgtgttttgctttcctcctcttccaaacaatgagcacactactaccttcctgatgaggatgttatgaggatggaatgagaaaacgcatggaaagctctaagctcagggcctggcacatggcaaatgcgtggcaacgttagtgaccctgatcttccgagcagtgcagccccagctctgtgctgaagcagtcatgggttagctagggagaaacccatgagatcatccaaccaccccactgtgagccaatgagacgcctctccacagcactccttctagctctttcctccagccaagggaaagagctagaaggtttaggggagcagagattctgagggctctgactgggagctctggccttggccccttccccagcctggcctcaagaaagcaggtcactggggagctctggagatggacgcgcccctccctgggaactggggaggctggcccccagggccacagtggggtggcagccagaggttttctgctcctcatctgggaataagaccatcaaatgcccacaaatatgttccacactttcggcaagccaaggaagtctggctttttaaatggggttttttttttttg

SEQ ID NO: 41936 - DNA, 1680 bp, Homo sapiens
ggtactgcagtcttgctgtggtgtctctgcaagcagctctgcaccccagcacctggctcggggccaggcactgagaaggcagtcaggccctgtgtgctgaattgaaggaatgtgtttgtggctttcagtgacttcgcatctcaggccttactctcatcctgcttagtagcaggggaaagcactttagctccgccagtgcccccagctgggatcagattctgacgccatcacctactagcggtgtgggcttgtgcaaatcactccaactctctaagcctcaggttttccagacttaattatcacctctgccctcagagttcaaattagcactccattggatgataaataggctaaataagatagtaaatagaaagcccttaacacagcgcctggcacatactgaatgttcaataaaaggtggccccctgcaggtttatttcaccacaaactttattatatgagccagcacgcttctgggaaggaaaccaggagctagtcatccttgggcctgagctgggtgctgtggcatgcgcttgtaatcccagctactcagcaggctgagtgggaggatcgcttgaagccaggagttcaagaccagcctgagcaacataacaagacccccatctcaaaaaacaataattatattaataaataattaataatatttagtattaatataggattaataagtaattagtaatactatttattattattatgccaagatgacaagtataaactaggcagaaccaggccaacctggacatctggtcaccctgcttatcctctactcactaccagccttgtaggccaggactggcagatcttcatctcacaaacccccgccccaccttcctcctgcctcttcccagcagcgccctagctgagcacctcagggacttctcctcccggggcaggggccccccagaaccgcagcctgcctggagctgcggaatgctctgaaacgggggagatcgcaagttcccgttcctgcccccacgtccctgcagaccctggagcccttcagcgaccccgggagcctaccgtgagggccgagcgggtggcgccgggctgccctgtcttcctcaggagcagagaggagtctggtgtggcctgtggtcagctcaatccagccccagcgctgatcaaagttccaggcagtggttcctcccctcacgtggccccagcgtcccagaatgtcaccagggtcacaggacgggagagggccttggcaaggcctctgaagattacaaaatgaccctgaactcctcccatgtacagagccctgccggggccaaaatcccaccgaggttgcagggttggcaccttcaggaccccgaggacactcagaaagctctagagattcccgcaggcggctgggttggtgaggcctgggatggggtccacgctcacacccatacctgtgagcagaggcagagggactgggagcctgccttcagcctcaggcccctgctgggctctcagcgcccggaggcatttcaagagggctgtggatttgttgttttgtcttgttgtgtttgtttgcttgtttaatgaatgaactttctaaacccttcctgaattagaagggggaaaagctatagggagatgaattggggcccaatatggagaggagcgctcacacactcagggctggccgaggacgaaagatgctgcttt

SEQ ID NO: 41937 - DNA, 1015 bp, Homo sapiens
ttcatttcatttaaagttgcagttttcaagaacctatcagtaatgttaagtgagaacttatggtatagaaaaatgatgcatataccaaataagtggaggaaaaggaaaattagaggaacatgacagaatgtgtccaaatttgttgacaaagaaaataaaaaacattgatctaaatatttaaacgctacgaagtaacctttgaaagtaactatgaaactgaacccaccttgtcaaagcaaacaagattgagctgtccacaaatatttattctttgaggactgatacagaaaataccgatttttttcagtcttctctgagcatacacaataccagcagtcattgcagcaggaagtgcagggggcacagtaattgtgataatatcaagagactcgataattatgaccccaacttgtacctacaattaacacaaaaataaatgtcaaatccccagtattatttacggatttaatatgggtatttctttagtgaaaatctgtaagccattttcaattgtatatttcaattttatgtatgtgtgtgtatatacatatctattaaccatatataatttttttcttcagatatttctgcaaaataaaaaagctcaatggattatagaatgacagctactttcaaaagaaacttatctcattttcaaggcgctacatacttcacacatgacacacttcaaagccggtcaacaatcattatcagatattgactcagcgtgcacacaccttactgtaccactctccacttctgacaagcggcgccttcaattaactaaccacaaatcattttaacactgtatattacatctcagaggtaaaaaagagaaaataaagcttttggtgattatgtgggggggttttttttcctgttttttttttttaaagtcacaagaccaagtaaaagaccatctaaaccagaggcacccaaaagaagtatcctttacaatggaaatgttctatagctgggctttctaatatcatagctactagtctcatgactttgt

SEQ ID NO: 41938 - DNA, 5115 bp, Homo sapiens
aatcccagctacttaggaggctgcgacaggagaatcgctgaaacccaggaggcagaagttacagtgagccgagttcacaccactgcactccagcctgggcaacagagcaagatgccatctcaaaaaaaaaaaaaaaaatttaaagcaaccaaatagtgtcacttttcctacccaatcccctgaccaaagccaggcattgttgttctaacaaggctcaaaatctcaattatttcactctctgcctgatctaatggtaggataatgcaaatcaaagataccagcaaaagttatgttctacaacaatcattaataataggtttactacttcgaacaacttccaagcactgatttgccttaaaggggttgcaaaccaggatgagatgcccacacacattgatttttggcaactgtagtctattaagcaaagcaacaaacctctagagaaaataatgtcacatatattccagtgaaacaaaattaatacatgtaccttggtaaagaggctgagctctaaccaaagatagagcactgttcattacgtactcacccttcaaaggaatcaaatcgaaacactttcattttaacaacgatactttttaaaggctttattttgcaataatctttcaagtccctgcatttcttagattccttaaattctaacttcctgcctcatagatctaaagtagccatgacatacccaggtatgttctactcatttagttagaatcgtatagaggaacacaagtctgtttctaggtgtacgactccacacccattcattttgcactaatataaccactaaatatagctctaagacactgatgattaaaagcggctaattatgtgagtgattcatacctcctatgtccaaacaccaagattcagggatgtctgtcagatctatgggaagaggaaacaataaacacctgtcacaaagcttcttccacaccgggaagcccccagctgagttcctgccaatcccaacccgattccctcccccttcatccctacccctcacctccccaaaaaagccagaggtcatacttccaccagaacctgactctgtgaagggaatggagagacagaaaggccatagcgagagtggccacgagagcactgctagggcaaagggccctgggtttttctagtcctcactgccacagagtccgagtgggaggcctcaggcaagtcagaagtcacttttcctccacgggactcactccttttatctgtgaaatgcggagatggcaagcagctccatactccacggctgaggacgagctagggtcccgcacagactcatcgagggccctgccagcacccctacgcctctgcccacaggacctccacctcccacaggactttccgaaagctctgactaccaaccaccaagcgcccggcccccacgctcgcccccggcaggcggcgcgtcccccccaggccttcgcacccaccgcgtgggctcctgccctggcctcacctgcccccgacactccccgtccccgcgatgcccaactccggcccgagaaggctggccgcgacctcgcccggtacccgccgccccgacaccaccattcgcctcctcgacctcccccggcgccgctgcccacccgcccctcgccccgctcaccggggccgctcactggccgccgccgcgccgcctcctccgcggcctccctcgcggccggaccagccccagggaccgcgggggacccggccgccgctgtcgccgccgccgcctcgcctcagcccagccccatcgccctcggccggcgccgcgcgctgcggctcagggtgagggaaggaggcgccgcggcggggccgggccggccctgggacgtccgcgctctcctcctcctccgcgcccgcggcggcggcgtgcagccggcagggcgagaacaagggagggcggcgggaggtgggcaggggaggggggcggtctgcactccgaaacggcccccccgccgccagcgacgtagagaacccccctcccctccgcggcggcgcccgatcacgctgcggggagagccggcaggcaggcgggggagcgcgcgcgggctcaggactcccgcgccggatgtgaggtcacgtggtggcttcatccccgcgcggagggcggaggggcgcgggcgacgtcaggaggcggggaaggggcggggaggggcggggcgatttataggccccgcccacccatcgcctttgccaccctcgaacgggcaaaagaaagaaagaggcaggtaaggggaggcgaggccgtccaaaaacgctgggtgtcagcccggggtggctaatggagggcggcttttctggtgggatgaaatggaacggcaaatcccacttcatcccctttgggctatgacaacatcatagtccaatctcccattttatgaacagggaaactgaggctcagtgactagacagacgttgcccagagtcatggtcatggaggaagcttgtgctagaatggtggagaggaaaccagagcccagctcctaatgcaaggctctttcattcctttagccaccctcgcccccgccaaaacaaacagacaaaaaactgtcattctcatatgaccacggactctgcgccccggccgcaggcggaggacagggaggagcgcacacgagaaagctcccacgcgcccgcgcctcgcctccgacgggaaggcgcctcttccgaccgtcctggatgcaaattaaatacttccctccgcagaagacttatctcggggtagggccgcagccggatttccaaatcgcgggtttgattttcgctgcgtcctctccgcgacgcgcgcagggagcgcgcccggccacctgcagcctctggctgcggccatctttccgcctggggccacctggcctgcgccctttgtgcccggcccgctccgtgactgttcttcttgccgctacttacagaactcagccgccttagcgtcttagagaagaggacggcatgcatgcggaccccgtccaccacacctggagagcagggagcccttagtccctggacacttaccagggccgccacccctggtccacgcacgtgatgacatctcaccaggggcagcacaccgcccgagtccgcgacactgataacacctcctgcgggcaggagggcgccacagccacccctggtcccctagattgtgtgaggctagcatttctgcccgcctcttggcgtggacagcacgctggaccgagatggaaccacagctttctcttcccaatccctggcctcaccgttttgtttcatacctcaccgtttgtttcaaacctcgtggtgttgaaatgattaaatgagattaaggggtgtgtggtagtgttgggcaaaccacaagaaaacggtctgggtggggtctggccctaaaatcttcctcccccacctcccaggcttccttgccttgctgcttcctctcagcctttaaacaggttggcctctccaagtcctaaaaacaaaattatcaagccaacctcctcctgaagtgctccctccaactagcttccaagtgtttcatgcggacctcaaacaatggtcttccctggctgcctctgcttcctcatttctcaacacttggcattctggcttctcctccccaactctaacccttcaccttgctcaggcaagagcaactcatgactttcattttgccaaaccttgcaggcattcctcaggccttatctctctggttctttctgctacatttgacaccttgggatgactctcaccttctggaatctctctactaccttggtttcagaagagtgaaccctctggattatcacatgaaggtaagtaaagcctctgcctccttggtaacatctacttgtgaatctgcaccttaaattcaggattccactctaagccaacaactttgctcacttcactcattcttctgggattgcctgcatcctcatggatgcagctcccaaattagcaatttccaacccagaccccttccacaaaatttagaaccaaatatccaattgcctgccaggcagctctagctagatatcacagacaccccaaactggacatttccaaaactgaactcattctctgctttcatagctgcccctccctcagctgttggcaccaccatctccacagtcatcagaattagaaagttgggaatgagtgagtcattcttaattcagccctctgccttacccaatcaccaagtcctatctatttcacctccttaataagcctcaaattcctatggtgggctgggcgcagtggctcatgcctgtaatcccagcactttgggaggccgaggctggtggatcacacgaggtcaggagttcaagaccagcctgacaacatggtgaaacctcatctctactaaaaatacaaaattagctggacgtggtggcacatgcctgtaatcccagctacttgggaggctgaggcaggagaatcgcttgaacctgggagatggaggttgcagtgggctgagattgcgccattgcactccactctggccaagaagagcaaaactccatctaaaaaaaaaaattcctacggtggttcccactggcatccatcctttccagcctgaattgttagacaaattcagccttcagagtgaactacaatgcactccatttaaaatcctaagagtttccctaggcttctggctgcagtgtatacctccaagctacccagcatgaacctgtcaacgcgttcgggcttttaaaagatcacaaagagccccagaattcgaggtgcagccaaagtaaggcaacatacagccagtcaagggaaagctataggaaaaagagaaaagcagttggatattccaaaaacttttctgttacagatgttttgagaatggtgaaaaaaggaatttggacactggctttagaggaagtgctgagtcaccaggaaaggcttgagcatgtttatgggttgagggaaaagaaggtgcaagaaaaaaggagaaacccaagataggcgagagaaagggagtggaacagtctggagaagtcctggaagacttactggttctcaagtcatgatgattctgggtccaagcccactgcttcccccctctgatcctactcactgtaagcaccaaccctgattgcagctgcatggaggtaacagtcatac

SEQ ID NO: 41939 - DNA, 1969 bp, Homo sapiens
caagactccatctcaaaaaacaaaacaaaaagaatccctctttagtgcatatttgtctcactgcatttacaaccttgaataagcacctatttagtgtttttgttttccatgagtctaccttattcatgtttttttcctaaggttctgaatactttcatatgttatctcatttaatcatcacaacgatgccaacactaaaagtagtagtgactattctgttcattttcatagacgaagaaactttacatatatgatctcattaacctttataacaattctaggaaggaggtactattatttctgtttacagattgaggaaagcttatttctgcttacaaattgaggaagattatttctgcttacaaattgaggaaagcttaaaaatcccattttacagaatggaaaaagaggtgttcaataactcacccgaaagcacagccaggattcaaacccagacactttgctccagggccaaactcttgaccactataaccaaatgaagccagagtgattcaccagaatgagttcatctcgcatcaaaactctggattatctgtttaagcacccagacttccacctcctcatgagccaggaccttcctcagccacatctggatcctcagcccctcacagcacacagcggtagtcagaaagtatgctgagtaagtggagaacaagttaacattgattttcacaaccacgatgtcagactagcaatggaattgttttgattctccttttatagagaagaaaaatgagattcacaacttcacaagagggagtgtcttatctaagaatctctgactgagttcagcccttgtttgtattccctctgctgcctccacaaaaggttagaggtcacatgtttagattatgaagaccttttgccattaaaaaatggcaaaacaagcaaacaaaacaaacacagcactcattgcctttcctagaaaaactgtccattaaaagtactttgaggctgtgcgcagtggctcatgcctgtaattccagcactttgggaggctgaggcaggtggatcacctgaggttgggagtttgagaccagcctggccaacatggcgaaaccctgtctctactaaacatacaaaaattagccaggcatgatggcaggcgcctgtaatcccagctacttgggagaccgaggcaggagaactgcttgaacctgggaggtggaggctgcagtgagccgaaatcatgccactgcactccagcctgggcgacagagggagactccatctcaaaaaaagaaaagaaagtactttgattatgattatgatgtttgcccaacaagctctatctctctttcttttagtgcctcctaagccattcagttcctatttagcttgacctatgcaggccagtgtgtgtgtgtgtgtgtactggaatgggaacagagagcaggactgttaagtcagatgtctacaaatcacagtccatggccatcactgacttgtttctgtctctaaacaaagcatgtaaaaactgtttgcctctgccatgaggcaaaagcatgcgcttggcatttttctgaggtcatgatgccctaggatgtggcagttcacgtgccactgaatattgtttaccaactagctattcaggacacggggtccctcctggaggagtgcttactgctggcgtcgggccagtgtgctgataacctagttctctaagagattgaaaactctgactgtgtggcccctgccaatttcatggtgtaaatgctcccaccacagccaatttcaagctaccaagagtttccctactgcttcacgaaattcctgaaaatttttatggttacttatttattttattgtttttgaaatggagttttgctcttgtcgcctaggctggagtaaaatggcaccatcttggctcactgcaacctccgcctcccaggttcaagtgattctcctgcctcagcctcctgagtaactgggattacaggtgcccacc

SEQ ID NO: 41940 - DNA, 802 bp, Homo sapiens
tactcgggaggctgaggcaggagaatcacttgaaccccagaggcggatattgcagtgaaccaagatcacaccactgcactccatcctgggcaagaaagtgagactccatctcaaaaaaaaaaaaaaaaagattttggctttaggggccaaggcctgactcctaggctgtcatggggaatttccctgtgtttcgatgtgatgatttttcctctgataagaaaagtgcaattgtattaatattagagatgaggaaactgagttcaagtcgtagccttcttctaagtcatgtatttctttatttgaatccaaatcgtaatgggaataatatatccacagcacaggatgtttcattatctaacacactctgctatagcacttactacctggtaggcactgtttaagtactttacaaacttaactcgtttaatctttataacaacactgttaagtactatcactaatttagagatgaaaagactaaaatacaaggaagataatgaagttctttaaggtaacggagctagaaggtgagaaagccaggatttgaacctggcttcaaagtccaagctcttagggccccacaccaaagctagctgcctgtttttgtggttttactggaacacagccatgcccattcatttacatattgtctgactgcttttttgttacaacagcagagttgaatcgttgtgacagagaccatagggcccacaaagcccaaaatatttactatctggccctttacagaaaatgtttgctgaccctggctccgtagtatcctgtctgtttggagtgagacatt

SEQ ID NO: 41941 - DNA, 1217 bp, Homo sapiens
ctacgaatccatcctaaagacacactttcagctggatgtggtcgctcatgcctgcgatcctaacactctgggaggctaaagtggaagaatctcttgggctcaggagctcaagaccagcctgggcaacataggaagaccctatctctaaaaaaaataaaaataaaaacggcacacagtcaaaaattcaaaaattaatatacataaggctatttattacagaaacattggtagtagcaaaagactggaaataactcaatgcccatcaatagggaacggagtaaataaactaagatacctacacataatggagtgccatgcagctttgaaaggaaatgaggcatatttctatgttatatgttgtgatcaccagaatataacctaatgagtaaaaagccaggtgaagaaaattctgataatatgctatcattggagaggggaatatgaatataccatacatcacataggaggagagaggaaataaagtgagaggattgggatagaagctagacttttctaaatatatcttgttttatagatttatgttggaagtttgtggatatagtactttagaaaagtataaaaccaaattagacttgacaaaatgaaacaagtcaatctgttgagttgatggtgtaactacacagtgagaaactattgcaaatgaccttaacactcaggaattccactgtatattcctaatgggagatcccctaatgaccaaacttaaacccagtccaaccaaaccaaaaaaccttgtaaaatatctgaaaccatttttagtaatgaaatgagaaatgtggtcgtgttggtgatatggtttggctgtgtccccaccccgacatcatcttgaattgtaactcccacaattcccacatgtcatgagaggaacccagtgggaggtgattgaattatgggtgtgggtctttcctgcgctgttcccatgatagtgaatgacaagatctgatgattttaaaaacggtttccccgcacaacctccctctcttgcctgccaccatctatgtaagatgtgacttgttcctccttgccttccgctgtgatcgtgaggcctccccagccatgtggaactgtaagtccattaaacctctttttcttcccagtctcgggtatgtcttcatcagcagcatgaaaataaactcatacagtaaattggtaccaataaagtggggtgctgctgaaaagatacccaaaaatgtgga

SEQ ID NO: 41942 - DNA, 2480 bp, Homo sapiens
agttggtaagactgttttgcatgtattataggataaagcaatgagtaattatgttgttttgaaaagtgggatgttttacatcccaggtatggatataagatcaataaagttaagtagaaacactttagtcttacctaaatttgaaatagaactattagtaagaatccataaagtatttgcttgtaaaaaattctttctagaaaccatcatcaattcaaaagcaagcatttcttgcacacagaatatgatctctaaatgccatttactaaaagaaagcagggctccttagaaaaatggctgattccagatctgggctcctgggaaagaaatgtacaagatgagcctggaacatcatattatacacctgataatcaagcatttatcaagaacaatagggtgatttcacaaggcaaataccagatattatgtgcctcctgatgaaaaacattagtcatgaagtagtcttgccaaaatccctaacctaaatctgatcaactactctaaatccaacttctagtttacaggaaatgtcaaggacagagaacatgttaaatcatactgctggttgcaatcaccaaaattattgcagtggctcatgcctataatcccagcactttgggaggctaaggagggcagattgcttgagcccaggagtctgaaaccagtctgaaatatagtgagacccccatttctacaaaaaattgaaaaattaaccaggcatggtaacatgcacctatggtctcagctactctgcagcctgaggcaggaggatcgcttgataccaggagtttgagggtcccttgagccatgattgcaccactgcattccagcctgtgtgacagaacgataccctgtttaaaaaaaagaaaatatcacaaagacttagttgcctatagtcctagctactcaggaggatgaggcaggagcatgaggctggaggatggcttgagcccaggagttccagtccagactgggcaacatagtaaccccctcccttaaaaaaaaaacaaaaacaaaaacaaaaaaacagactcagtcaacttgaagaggcccccactaaccaaagaataagataatctgagcatcaataagaattataactgtgatgaattgaagctcatcaaatgtttaaaaccatgaattcatgctttttaaaaattaaatctattggtcacttttggtgggtgctagggatccatttgttattttgaaaattggcaaataaagagagagaagcatttatattacctttccagtgacaaatatagcttatgttaactgcatagacgatcagggaaaccttttttggatgtattacagctattaaacagagaaagactagaaggattacaatatcaccattttgccatctttagtaaattaacaggcctggactttgatcatcaatgacggtcaaaagacaaatacatgagtgcctcccgatgagaaacagtcatgaagtagtcttgccaaaaatcactaacctgtctggtcactactctaaatccaactactagtttacaggaaatgccaaggacagggaacgtgttaaatgatactgctgaatgcagtcgccaaaactcagatggtgagaaattccatgagataaatgacccagcttcttcaacaaatacattacaagcaggaggaacttatcaagtaaaagggatccaagaggcatactgaagtctatgggtgaaaatgatgccatgatatgatttgcttcagaataatccaggaagggattagtcataaaataagattagccatgaattcttttttttttttttttttttttttgagatggaatctcgctctgtcacccaggctggggtgcagtggtgcgatctcggctcactgcaacctctgcctcccgggctcaagcaattctcctgcctcaccctcccaagtagctgggactacaggcgtgtgctaccacacctggctaattttttgtttttagtagagacggggtttcaccatgttggccaagctggtctcgaactcctgacctcaggtgatctgcccaccttggcctcccaaagtgcagggattacaggtgtgagccactgcgcctggccgaattcttaattattgaacctaggtgatagaatcgtggaagtttatgataccattctgtctccttttatgttagaaattttccatagtgaaataaataaataaataaataaacaaaaaggaaactaaagactgaagccacagaaaagctaaacaaacaaaataaagactttctctctctttttttttggacacagggtcttgctgtggtgcccagactacctgggctgcagtgcaacggtgccatctcagcttactgcagcctcaacctcccaggctcaagagatcttcccaactcctgaatagctgggactacaggttcgcgctaccatgcccagctaagttttccatttttttgtagagacagggtctcgccatgttgcccggtctagtctcaaact

SEQ ID NO: 41943 - DNA, 2217 bp, Homo sapiens
tccatctcccaggctcaagcaattctcctacctcagcctcccgagtagctgggattacaggagtgagccaccacacccggctgatttttgtatttttagtagagatggggtttcaccatgttggccaggctggtctcaaactcctgacctcaggtaatctgcctgccttggcctcccaaaatcctgggattacaggcgtgagccactgtgcctggcctattattttattattttgaaagagggtcttgttctgttgcccaggctggagtgcagtggcgtgatcacaactcactgctgcctcttgagctcttcccgccttagcctcctgagtagctgggactacaggtgtgtgccactgcactctgctagttttattttatggttttgtttgttagtttggttttgttgttgttgttattgttgttgttgttgtgtgtgtgtgtgtgtgtgtgtgtgtgtgtgtgtagagctggtggtctcattaaggtgcccaggctggtctcaaactcctgattttaagccatctttccacctcagcctcccaaagtgctgagatgacaggtgtgagccactgcacccggcctcgttatttaatctttagattgtacacatacttttctctaaatatgatacattttataattttaaagcctggagaggtgcctgaaggctactgtttcctctcttggttcagggctgcagccagagaatatgtgcagagtcactgtcaacagcaagttaagtataaaaggaaataatgattttctaacattctaataaacctgtgctagttagagaggatagtggttactgcaatagagtccactgtttgcactgggaaggggtaaagtccagctgcctttttcaggccctcctggtagaacagcatttttctggcccagagagcattcagaatttggtccttacttccacatgtccagaaacttgattttagccactccactgggacttctcatgcttagagggaatgcctatgaatgagcagccactgtgagctccttgagggctgagatcatgctttatccatctctaaattcccattgcctagcaaagaacctacctacaacaacagagtccagggacctttctggcaacttgcatactcgtgtgttccagacagaacatgcatgcctgctctggaggcacagctcccttcctggggcctggtggcctgaccctgaggcttagcccagaggttaatcgcccttccaccaaggatacagcacacctaccttcctaccagcctcctcatgctgtcatttacccaggccaggactggctgccagccctggcacagtgccatgctcataaaaagggctcaggaaatggaagaagaaatatagaagcccaagtcagaaggcagactttcttttcccccacatgggctacttcgtggtctttgccttatcttcacatatatgatcgatcccccagcccagccgatagacaggcttagatatgaagcttcttagaaatgcttttccgagtaaggttctgctctgcttgtagaaagtgatggagaaagtgaatgccacccagccaaatacactcattagtttacccagcaaagagtgcagcagtcagaatttcaaacactggaggaagcggtgaggacaaaatccaaagcccttgccagtcacaggggagtaatttgaccagttatgaccatgctcttcctgctcacaaatatatgctgactgccttcgggacaagcaggtggttgctttgcctggggagccaccaaagctgtgtaaggcctgggccacagccagaaatagtttagattccaaaagctcagagtcaaggctgcgagagcacttgtttagtccatcaagaagcagatcaagaagagaagtggcttagaaagacagtgacggggtcgggtgtggtggctcacgcctgtaatcccagcactctgggaggctgtggcaggcagatcacttaaggtcaggattccgagaccagcctggctagtatggtgaaaccctgtctctactagagatacaaaaattggccgggcgcggtagctcacacctgtaatccccgcactttgggaggccgaggcgggcggatcacctgaggtcaggagttcgagactagcctgaccaacgtagagaaaccttgtctctactaaaaatacaaaattagccaggcgtgctggtgcatgcctgtaatcccagctactcgggaggctga

SEQ ID NO: 41944 - DNA, 5355 bp, Homo sapiens
accattgcactccagcctgagtgacaagagcgagactctgtctcaaaaaaacgaataaataaataaaataaaaactaattcggctggggaagggtagtgataaatttgcagttaacagaatgtttaagtctgaagccatggctgttatggtagagatctcttcagggcccaggcaagacttcggtcactgcggccagggccaggactcggttcctatctccccctcgctgcccttgcattgttctccaaatcccctggtgaccgagcagataccctggagggacgaaacgaggcccaccctggcttcctcgagcaggacagggcctgcctgtgtgcttttctttagtctcagaaaagccaaaattagcctcacttttgtttcttttctcaggagcctctaaattgtatctcaggaaaggattattgtgctctagggaccctatcttatcgtggggtgtgggggaggcgatgagtgaaaggaaaatggtctttgacaaattggttcaattcggacaatcacgtgattttccagtaattgcccaccactgctgtagtgagctattgtttcacttcccaaatatttagtcaagtaggaggcctgagaaaactggggagggtcagaggctggagagcacgctcatggaggggaaaagtgctgtttttggtgatctctgcatattgttgtgaatggtaatactaaggacgctctggactctttatcactaactttgaaggactgacaaccactttaggtgtaaggagacccctcagggacaccccctgccggaatgcactgccgtgggggaagagtccttctgaggcgtgggctctggagctggtagcttttgagcctagtttgatccagctcttccctgcttcatggccgaccaggctgccttgctgacccctctgaggagataagggagtattgttttacctctcctggtgaacaccgctgagaaaaacaaagtcacacactgtgaattaggggacaaatgagactcgggctgccggagctaaaggcttcacacaaagaatccaaggcatgaccaggcatttgctcttatgcaacttttcaaaaattcctgggtctccagggaaaaagagcatgagctctggggtgacctcaccctgcctcactcagcctgacatcacgggacatttgggggattaggtcggacggtggcggcagcggcagcacgtgagaatgtgtgttatcgacggggaacacttttcccgtgctctcatgtggtcatctgtctgatatgcctgtgggtggaggtgggcagaggggaagggagtgtcctgtcaccggcgacagaaaagagccatgaggtcattggagcccaaggctttcctcactgaccatcggcagcaattgtcttcccagcttccactcccaagggttcacctccgctcccacagagggttctgatcttgggattcctgctttggacacacattttcttccatctgaaaataggccctgatagtcggacaggggatatattatttggagagagatttggcaattaactttgacaattttgtttttttccagcttctgatgacaattccctcacatctgagcccctctgagatgctgcccttgcttcttataactccctgcctaggcatgatgtgcaggcagcccttcgcccaccttgcccacaccctccccgcccagggttcctcaccatgcatctcactgcgatctgggatccctcccactcctccacctccatcccactgaatcagcgtcgccgatcaggagctgagacctgagaagctgtataagaagcagaccactcccgcgattctgctgcccactgaactggagaatcattgagtcggctgatctctaaccaccgactcagagcctgcgttctagaatcgaaatgttcccagggaaggcagcctcaagggaatcaacggacagcctcccacttgtgcaggggttttaataaccattaggtctcagtcttcctacctcagtgattctcttccttggctgcatgttggaatcatgcctggggttttttaaagttacacataatatggttcccagcagagatgagacatacgggctttccccaccccgcttctctaagaagcaaaaaatggccttggaatcccaggcagtggtaccaccggaagtgtaatgttgacacctggtaaggaaatctcccaactaagtcacctggaggcacagagggcagccatctgaacagagtggggactggggatcccaggacttactgtggtaatttcctttagaagaatcgcttcagtgttggagaaaggggtgctctcagacgcttaggctccaaggcggccaaacaaatgctgcagaccctggggtggatctctggggaagagcgggcaagagcgtggaggtcctggctccctgtgctggtgaggctggaacggggtctgacacagcatcccacagccagctggtgtcccacgaggaggctgtataggtgaacttaggagtccaagtagggattccttggccaggattagcaagagggaggggaaggtggtctcttcttgaagaggcacagctgccctgcgaggctgctaggagcagctggagggtacaagctaaggatggggcaggaccagtgactgacagtgacaccatgaggcagtgagcggtcacagcagaggtaaccgtaactgctaataatgatttggtgttgtttgcccagcattgatcaatgtgccttacacttattaattcacccgataacagttctgtgaggaagtcattatcacccccactgtagagagaaggaaatggaggcatgaaggctacacaattagagtggctgccagtctgtgaacccaggcagtctggctctggagcccacacccctacccaggaggccttgctgccttcatggcaatagccttcatttattgagcacttactatgtgctgtcacagcctctgtgctctttcagccttcaccgcaatcttctgaggtggggcatacttttcttctcatttcacagataaggaaagtgaggcgcaggaaagaaaaataggcaactgcttaccatccattctctcccctctgggagtggaagccagactaattccacggcagctcctttgtttttttttttttttggagacagagtctcgctctgtcgcctaggctggagtgcagtggcacgatctcggctcactacaacctccacctcccaggttcaagggattctcctgcctcagcctctcgagtagctgggattacaggtgcctgccaccacgcccagctaaattttgtatttttagtagagatgggggtcaccgtgttgtccaggctggtcatgaactcctgacctcaggtgatccaccctgctcagcctcccaaagtgccgggattacaggtgtgagtcactgtgcccaaccagctccttcactttttagaactcaataagcctttagggttctcagaaaactcagggtaggtggaagcttcaacaggggattctgggcatcctgcaatacaacgtttgccctcttgagtgcagaactggaaaaacaaagattataggacattctttctccctctaaatttgtgaaagcaaatcataccaattataggggcctcatcccagatccatttaatcagaatacatgaagagtggggccaggaaatctgaattaaatcaaaaccaaaaacaaaccacaggtgattctggtgcacaactggggttgaaaatcactgcgttatctcacggtcatatgcatggccccagtgagcagtcagcactgtttcaccttgcccgctgcctagacacagcctatttatcaagacaggggaactgcagtagagaaagagtaatccatgcagagccggccgtgtgggagaccgaagctgtattattactcaaatcagtctccccgagcattcggggagcagagtttttaaggacagcttggtgggtgtggagagccagtgagccgggagtgctgattgatcagggatgatatcacagggagtcagctgtcttcttgcgctgagtcagttcctgggtcggggccacaagatcagatgagccagtttatccatctgggtggtgccagctgatccatcaagtgtggagtctgcaaaatatcccaagcgctgatcttaggagcagtgtagggagggtcagaatcttgtagcctccagctgcatggctcctaaaccatcatttctaatctcttggctaattcgtttgtcctacaaagacagtctagaccccaggcaagaaggaggtttgttttgggaaagagcagctgtcgtctttgctttaaagtagaaactaagtttctcccaaagttagttcaccttcgcccaggaatgaacaaggacagcttggaggttagaagcaagatggagttggttaggtcaagtctctttcactgtctcgcttacagttttgcaatggcggtttcatttccaacaacaacttctagttttcaaattctcttgcttagaaagaagctgcatgcgagacctgagcaaaactcctctcctgtcacagaggggatgttgctcaacaggcaagagaacgtgccaaggaaggagttgggtcaggcctggggcagacaagcaaacatccaggcactctattcttacccttccccctgccttctctacttggagaatcatcaactggtcttaaaagccaggcccatgaagccatgtcttcttggtgaacactccccctgtctggcctccgcctcctcctggcctctcctcctgggcactgcgcttcccctacagggctgaggtgcccttgcagacaagggctgggagttattcctgtgctccccctgccccagcagggtgccttggacatagtaacccctcaggaagtgtcagtccaatgaacataagggaaaggaagatgggaggagtgaagacagagggacagagaagtcaaagggtaaagcggtaaccatatttgggggatggccagtgaaaggtgatttaatgccaaccccatgagtaaatgggatctttactctgacccatgggacagccggtccaggtactcacctggtcaccctctacctgtggatcacaaatactgagagaaacatgagaacaacatgcatgattgtaccaggaatcatttattatcattgttgatccttattatgaccctctgagataagcagggtagatattaataatcccattttgcagctgaggaagctaaagctccaaaagggccaggtgcaatgggtcacgcctgtaatcccaacactttgggaagcgaaggcaggaggaacccttgaggccaggaattcaagaccagccttagcaacatagtgaaacccccatctgtgcaa

SEQ ID NO: 41945 - DNA, 2021 bp, Homo sapiens
tgacctcagatgatccgcccgcctcaccctcccaaagtgttgggattacaggcgtgagccaccgcgcccagcccaaaagattttaaaaaggagtctcttggaggcaaagggacagaacattattgtttttcatcataaaccttttggtgcaatctgattttctttttttaaaccatgtacttgcactatttttatctcaaaaaaggtttttaatgcatttaaaaacaaagaaaagaatggtttataatacaccgttaggcttctgggaggtctgaaacacactatgaaccgtaaaataaccttgtaattatctccttaaaaaccgagtggggtgggccaggcgtggtggctcacgcctgtaatcccagcactttgggaggccgaggcgggcggatcacgaggtcaggagttcgagaccagcctgaccaacatggtgaaactccgtctccactaaaaatacaaaaattagccgggcgtcgtggcgcgcccctgtagtcccagctattcagtcgcagaagaatcgcttgaattcggcaggcggaggctgcagtcagcagagaccgcgccactgcattccagcctgggcgacagagactccgtctcaaataaacaaaccaaaactgaactacggagacgccctcgacagttctttcccggctgcgtcgccgctggctgaggtcagaaacgccggccttcggctgcggcggcggctgcggcggcggggcggggccgcgggactctcgctcctcgcgggaggcggtggctgcggagtgcgcacgcgcggaaccgcaattccgttcttcccggaagtgccctgctggtgctgggagtagggcgcaagatgtcggcggatgcagctccgaggaggtaggcagtgggagccggcgttcagtccggcccgtgccaacagtggttcctctctcccccgtagttcgaggagaccacgcgctgcccctctggcacgatcgtggatgaaccccctggcaactgaaatgggaaaggcagcgcccccgactctggggactggaccgaagtccacggtagtgacagctgccagaccctgaggagaggacgagaagacccgaggcctctgctacgaacactggcagccgatggaaaattcagacggatttgggacagtatgcagagttctccaagcgacagattaacagaggctcttgaagaataactgcgtaatcacgtgttctgctcaaaagaaggcctgaatgcccagtgccttatttggctttcagggttggtgaaagaaaaagcaaagtagatgctttctaatgctaagtcatttaatgtagcaccattccttgaacttctttcatctctaaggtcgtccctttcacctgatgatgacctttgggccatcgtacaggcatgtgtaaacttggagatcttcctcaacattgcaccatatcttgggttcattcaaggcagagtctccttgcaaaagcattctaaaacaatgtaaagtcgaagagagtagagcaatacctccatagttggaaaatgtggaggaggccaattaagggacagaaaaagaagtgcagagaatcttggaattgttgcaaaattattctggagatatttctaagtctcctctatccttttccttagtgattaatacaggtttttatattaagtggacagtaaaatccaaacagaaagaggtatatgtcgtataatgaagcctatgttcaaagtatatctgaaatttgtttttataatgtctttcttgagagcttataaagatgtcagtattctgtgggaaacaaattggcacatgcataaaagagaaaaaatgaaaaaaatcaggcccaactttcagtttacagatgaggaaactgtgacatagaaaaggaaatgacaaagatcacactgaatcagacctgggaactggagcccagccatgctccttggcccagtgcctcttcttattctaggagctcatacccctttgaaagaaacataatatgaatgtgtcttcaaatgatgctcataaatctcttcat

SEQ ID NO: 41946 - DNA, 583 bp, Homo sapiens
aaaaaaaaaaaagatgttgaagtcccaacccccagtgtctgtgaatgcggccttatttggaaatagggtctttgtggatgatcacgtcaagatgaggtcattaggatgagtcccattccaatgtccttataaaaaggagcaagtcggacacagaaaggtacggagggaaggccacgagaaacccagggttaccacaagccaaggggctacccgaacctgggagaggagcgaggcctggaacagatccttccctggcgcctgcagagggagcatggccctgccggcaccttgctctcagacttctgacctctggcaccgagacaataaacttctgttgttgaaagttagtggcactttgttacgacagccctagggagctactaccggcggtcagggcacggtgccagcttcttcaaaggccttcatgcaatgtggtctcccagctctgacaccaccctggagagccaccccggtgggctgctgagctgagcccagtgctcaccactctcccctccattaatctaaagacaggacacctgctgatgaggcccaggccctgcgaggcttctggcagtcacagcac

SEQ ID NO: 41947 - DNA, 1297 bp, Homo sapiens
atttactaagtgctttaacggtactgattcatcgaatcctcccatcatcctatgaggtattatctccggtcataggaggcccagagaggttctggagcttgcccaggtcacactgcgagtcaatggcgaagggctgacaatagcacccagggctcgcggtgtcctcggggccccatccgctgcaccacccagcctcctccctttggctcacagcccagcttccctgtgcgtgggatccggaaagaagatcccacttcagtctacagagcaatgttccattggatcctattactgagccatctccttcatccccctttccgccccctcctctaggtttccgagagggagcagcaggggattggcgcccgtttccccgcccgacagccccccgacccgtggccccattacagcgcgtgggcggcgatccagcaggaggaggcgcagatccacaggccgaaggagatgcagacgcggtggcgggcgaagcagcggtccaggtagtcccagtcccagagcgcgggcgcggggctgggcgcctcccccatggcgcggctgggcgcgcggcgcggggccggggacctgggcgcagcctccctcgccgcgggcaagccccgagcgccgccgccccgcgtgcccttctctgggttccgttccgccgcggcgcctccggccgagcgcaccgaccgcgggcagagaagggcgcgctcccgggcgcgggcggcggcggcgaaggcgccggggaaaagtttccgggaccgcgcgctccccacccctcgcgctattgtcgggggtcggcagggcggaggccgccccccagcggcgggagccgggagctgcgcgcgcacaaagactgcggcccccgccccccgccgacctcttcgcggtcacccacctccaacatcctggccggagcggggcgggcggctgggctcgcggacggccgagtccctgccggtcgctgtaaggcacggcgtcccttcctgcgtattgtccacatttcctgagccaacagcaattagttgcgctgctgaagcgcatgggtgctgggatcccgaggtgaagggggcgtggtcctgatcgccgacagggcgcagtaaaaagggtggggtgcaagaccaggaaggaggaaacaaacgtgccggagaacaaatacccccacatctgcctctcactctcctttctgaagctgccaacggcaccctccgcccccaggcagtcgcccaagccctgctcctggatgtcatcctagcccacggccccgcagccaagagctggttatctctgcaaccggccgcct

SEQ ID NO: 41948 - DNA, 2124 bp, Homo sapiens
agttgcttcaaagctaataaaaattaccagtaatctaatgtccagagtaactctgacctgatgaatactgataagcactccatgctgtttactctgcagactatatggatgaaagtcagctggtgtgacagtggcacacgcttacttagctccagggacatatttaactaaatttagcacacgatcttagcactcaacatgttctcattcattcccgggggaatgaatggtgaaaataacgactagaatgatgaacacaagccaaatcacttcattcatttttttaaagatccttctataacctagtaaaatattaggtcttgtcacacctgaaaaatcaatgatttatctttgagctaaaccactagggggtgcttcgcaaggatgaggcaaggatctgaattattttatatttctggcagtaaccaaccgcttctggaggatccattctttgaacaaatcaatacaaaaatacgttttgtctttttcctgctctggaagttccaagcacttcagtggcttctagggcaaaacccaaacgtactcaagacctggcattgaagactcttcagattctcactccacgcctcatcaccacactaactcttctttcaagcttctcctacctttgtgttctgggccttgccaggaggagggcctgctactcagcttggcagaaactccaactcatccttcaaaacccggctgaggcgtccctcctgcaaaacttatctgacttttgaccccgaattttgcagcactcaggctagacagaaaagataagaaagatgacatggtctgtcttacccaggagtcagtgtgacgatggcttcggctccgctgagtctgatggcgcataagggcccgtcccagcgacccaccggccggggctctcctccggcccatggcaacacgaccgctggacgaagcttcccggctcggcgcgtgcagtttccgggattcacagttcgatccccggaagtgacgataagcgagcccaagtagttcaggctcaaacttgagaggggaaagcagaatgacttgttctcaagttctccttttacgtctcgattttaccagtattatagaatataagtgaaaaaatggttctgggaaattttcgatagatttcctggcgaatgtctcgagtttggataaatgactgagttaaaagaatggtccattcttaatttgtgcgtcggtctttagcgtccggcgagaaactagagcacgtcggaaacatggcggttcctattcgcggcactagctccgccttccgctgcttccgtcaggaggacgcggagactcggaggaagagtgtttcggtggcgctgggacgggggcgtttcccagcgctggttttctgctggcgtcccgaggtgtggtctctccgaggtccagcacagcaactaactttttgtttatctagccgaccccagctgcgaactggggagaaaagtcttcgcctggatgtgaatttggaatgagaggctgaatagtatttccagagcttggcaaggttgtaggaaaagccaacaggaagtgacttacgctttatttcaaagaaaaaaaaaatgtttaaacagttctaattatattttcattaccctttttaaaaataattaaaatgaaagtgaaaacagtgagccagctccactcctagaggcctgggcttttgttcctcacttgaatgtttgatttccctataatgggaataatagaaagtcagcttagagtggctggtgaactacattctcattgatccagagaaccatctctttgttttgatgcttggagagaggaagcagcttgagcaagtcgtagattgagtgcgtgcagtgtcaggaataaacccaagtcttgtcactagcctgtacacccctggggagagtggggaatgagggttgttaacatgtattatttatttatttttatcttttgagacagagtctcgctgtcccccaggtggagtgcaaaggcatgatctcggctcactgcaacctctgcttcccgggttcaagtgattctcctgccttagcctcccgagtagcgggaattacagacacgtgccaccgcacccagctaatttttgtatttttagtagagacagggtttgactatttt

SEQ ID NO: 41949 - DNA, 947 bp, Homo sapiens
tctccagagacttttcactatctgctatttcattagttttttgtttactgtctgccctcctgcctccaccagaggctataaatcccatgcaggcaaagacctctctatctgtcctctttagtgctatatccccagcaactatgtgacattcatgggagactctccacaagtatttactagatgacattgaagattccagattcgtcatgtgtcatctctgaagtcaatgtccactgagtaggatgttggaggaggggcgagaggaaggagcattatgtaagacgtaaggtgggaggaagctggtccaaatcctctgtgagatgaaaggcttactcctggatgtcaagtttagggctgggactcctgatggcagcatttccttccaactgcgacccggttgtgtgtagtttcaaccactagcttatctggtttgacgagaaaccatccaccgagcagcatttctgcctgctaccagtagatgggggcagtgtcattaaaaaagtacactgcagtttctaacctgtttcccagctccactttgctgacagtctgttctggagttgccctgtctcagatctgtgatgtggactcccacatggtgctgccagctctcccagctgaagaaacgcagccttaattgtgatgtgtgcttcaggtggggtggtcagcttctccataaggtgaggcgggccctagaggctggcacaggtccaggccacaaggggaccgcgggttctcctccagggcatgactcacaccagggtgttcacactggcctagaacctttctgttctcccaaggttggaaacaagcttattaggaaggcggtcaaggcgtgacatagcctcgtcaacaggagcagctctgtgggcctgtgccgctgggactggcactccggctgctgctgaacagcccggcccaccagtagactcctccctgcctctgtg

SEQ ID NO: 41950 - DNA, 620 bp, Homo sapiens
ttgcaggtcggctcttagagttgggcctttttggccaattaaatggtctcacctctcccttaaattcaagaactttctccatgaattctcagtcctgtgctcacccagcctctgctgcctcttttgctgttgggtggctgtggtcgccacaggttctgctgcattttagagaccgagtcagccttctggacttcccacctgctgggtaaaactcaagtaacatgtgagagccgcgctcctcaggccccaccccctgtgggtgattgatttctaagtaggggaagcccgccctcctcaggtcccaccccttgtagatgattgatttctaaagtaacaagtgagagccaagctcctcaggccccaccccttctggatgattgatttctaagcaggggaagcccgctctcctcaggccccaccccttgtagatgattgatttctaaagtaacaagtgagagttgcgctcctcaggccccaccccttgtagatgatggatttctaagcaggggaagcgcggccgccccgggttagacacgcgtctgtttgcttgcagatgtgcacacactgtctccggcttcttctgtggcttggtagaagccccagctttttaacttattaag

SEQ ID NO: 41951 - DNA, 599 bp, Homo sapiens
ggattagggaacaaagctgcatccctgttccctgtctgaatgagcagttcccattttataagcgcagaataaacacggaaagtgagttgttcctagtcttccagtcaactgaacgttaggtgcagaatctcccatacagctgggcagtccaagtctctgcctcaaccctgcacttcagatggccccagtgtaggccttactccagctccaggtggggaaatccacagggtcaggggccatgccagcagcagcccctgcagcctcttccagaccatgacacagacacatgggatgacagaatttctggatcaaatggctgggagccacctctgtggcctgaactagcctcttgcccaacctgcagaggtcaggatgtacctcagacaggagaagaggggcactgtttccaagtctgactgtgggtcgatcgtgcgtgctccttaccccgcctcacacagagactcacactccttctctccccagccctttcccaccagagccagcaggagaatggagattcactttctaaataagtttaacagaagggactttgacttgagggccactaggatcaatggagggtagtggggtgccgcaca

SEQ ID NO: 41952 - DNA, 3110 bp, Homo sapiens
tcagcgtggcactccatgaggtgagtcgcatccctgtcactgctgctccaggaaacagcagagagggccttggcctgtgtattcggttcccagggttctcgtaacaaagtacacaaactgcgtggcttaaaacaagagaaattccttctctcacacttctagaggccagaagtctggagttgtggccgggccctgctccctgggaaggctctaaggaggaaccctcccttgcctctcactgctgctggtgatcgttggttccctgcattccttggcttgcggctgcatcactgcagtctttgcctctgttgtcacacagccttctaccttcagtgtgtctgtcttcacgtggccttcttacaaggacaccagtcattaaattcagagcctacagtaatccagtacgaccttgacttgttaatgacatctgcaaagaccctatgtccaaataaggctacattcacaggtaccgggtaattccgaggacaccatttaacccagctgagcctggcagttaatattctcacaaccacaaactcatccgtgacccaggtgagtcccttctcattctgggcatctggtttccacctataaaatgaaaggggtgactggagtcgctctaggccccagcccagcccagaagcactgggtgtccttagacactcctggaccgggtctcaggtaggtaagccgggcatcaggaacaggactgaggaggccgaggcctgtgtgtgtttcatgttgctgcaggcgagggacgtgcactggctgtcactgcagacactgcagccattgctgaggatttctgaagtcctgagcccctaggttcctgggaacaatgaagcttgaactctgtggccagaatcatagcccagagctatactaagactcagtcctgcccagcccccttttatcacctaattcatggcacaagtgcaaactcacattcttgtccaaagaggagttggaacaaactggatttagcgcagcagattctgagggacatctgaggtcatgaactgagcgggcgtgtgctgctgagtcaactcacacaggctgccaggtaccatcctcagactccgcaggagagggtggggaatgggagaaactggaagaagcttccaagaggaatttgtggcaaacctgctttaccgtgttggttccctttgggtaaccagattgcaataaaaacaacaaagacactctcctcgtgtatgagaacttcacacctcatgaaaagctttatacctgttcgcttgtttgatttgattctaaaaagttgtgtgcaaacagggactttgattgcagttttccagataaagaaactaaagctcagagtggtgccacacagggtccctcccaggggctgcttctgatggctcattcaggagggagacctttagaattactgcccaaatctccaccccaaggcacccaacacagtgtcagcgtaatcatcttccatggggacactctgttctcacattcttgtgtaaagtatgaatacctgcattttatggaagattgctatttgtattgatttataacatacaatataaatgaaagcagtgtgtttgctatgcaaacacaggttcaagaccagcccagaagacccctcccagcacctaagccgttccagatgggcctcctggagtgatcacagttgttctgactcacaggaggccagccaggatgctgccagggaggctgcctgtgtgagcacgccgtctgcagaaggcagtctcactctgctaagacagacagcttagcgccgggctcctgctgaggacactgccccggggagaaaccctgggccaccccactcactgttctagtcccgggcggggccggcagggcctgggcaggtcagactttgctgtggggctggtttccacagtgagggaggagccggttccgctgctgactggtgggcagctcaatgctttggccagtcaatgacatggccattaggcaaatatttggggcttgattttggttatggtttttaaaatagaaaatgaataaattaggcttggggaagtggtgttttacagtcacgtgggaggaacaggcattgaatctgattgtccttgggctgcagctagaattgcagcctcgcctctgtggcatttaggcgttggcttaaccacaaatcacagaccagagaaggcctcagtgtcagagaaaggcctggaaagaaggaagcagacacagagagccacggactcacccaaggtcacacagctcatatcgggtgattgaactgtgtgggggtggaatcacatctgtccaggacatcagcatgtcactggcacccatctggcacctggcagggagtgggtgtccattacgtgggatgactgtgtgtaggagggaggaaggcaggcagggaaggagggagcggcagagagcgaggacacagggctctcattgtccaggccctgtgctctgcatcaccactctgagcttgacagacagaaacgggagacagcgggagcaagctgtgaacaagggaaaggaaggatggagcaagatggagagggtgtggggcccagagtgggctctactttctcaagccatgcctgactgtccttggtgatgactcgggcagagaaagaagaggtaccccagaatgttctccccaataatcctggccccgcgcacccgtgccatggactctgataccaggctccctgcctcttctgctggagtcctgtgggaagagggaaggggaagctgagagagaagagagggcaggcactcaccttccagtagggaagcagcagcaacccttaaatctgctctgtcttttacctctgacaatcacaggccacgtgtaatttgatccctgaaacagcccggtgaggttcccattccacagacacaaaaagagaatccctctgggctcttgccacattcctgtatgattagttttctggtaaacatgaataaaccaaactaaaaagggctgttagtgtatttaatttaacaaggagtaattcctcagtaaatccaaggacagaatctctaatgggctttgctgatgaactggtcaggagatatttggagtccaaaaaatctcagcaaccacagctcagttagcattctat

SEQ ID NO: 41953 - DNA, 519 bp, Homo sapiens
cacacacacacacacacacacatatctgggtgggtatgttttacagaagtactgtattgctctacattttgtaacatgctcttaagtttttgagaaaatgatatacagaaggatttgtaacttctttgctattcactcaaatgaatccattttgtgttttagtagcttcagatcacttcaacagccaatgcaaataatcaagacagaagcagtgcaacctcttggagttggcctatttccagtggtacagccaaacgcaatggcattatttacccaaattgttgggcaaccagcatgcactggaagcagatgccagcagacgccttcccggacgccaagtcctaggagttggcttaggcccttagctcaggatggaggcagcacccactgcattgacacaatgctgtggggtgatccagtcctcagcaactacagggaggatccagccactggggcagactgcacttcagggacatcagaagcggaaacctgggctggggaggtgcttccaaaggaaac

SEQ ID NO: 41954 - DNA, 847 bp, Homo sapiens
gctgagtcagtcccaagtctccctggcaaatggatcaccccttagggtgggaagagccccccagctgtgtggggaacctggctagaggttgctgaacctctgctttcaaggagtcttgtgaccccgggagcatagaacaatcgcggaggcgcttacatccaaaatccattttccttcaaaaaagtgtccaggtggaggtaaagaaagaggaccctgtatactttggtaaatctgtgatttagctacaatgtaactgggccttgggaacccagggtgaggtttcttatgtgacatctcctggaaaagctccgctcaattcctgaaaaatcccttatcagacaccgacaggaaacagggatttccagggaaatggatgtggaaggcacctgaaggccattccaaaactccaaagtttttatttattttactaacttaggtgacttagacatacaacttcctgcaaacagtgcattcagctttgtgttcctaagcaaataaatggaacagaggccaccaaaactaggcccgctggaaagggcagagcagatgcccttacacccatagcccctgggggtcatgcctgtgagttcttgcatatcagcttgtgacagcgttgtgacctgcccctttgtcaccttgccaccacatcaccccccaggggtctgggcatttcctcgaagctgcttccaggacaggatcaggaacgtgttacttgggtggggggctgggagggaggcaaggagctctggttctgcccatgtcctccagcctcgagtgtgcaactgctcttctgggaacttgggtctcctcatctgaaacacagggaattagagaagatgattttgta

SEQ ID NO: 41955 - DNA, 1146 bp, Homo sapiens
caaatatatattcttaggcatcaaaagtattatcaataaaagttaaggtgctaaaaaagaatggctgagcaaaatctagaatttgagtcctagagaaagttcctgagacaggtctctttcaatcctgagtttcctgacagcaggggctgggagcatatcaaaacagtccttgctagaattttcctcctaaagctaagtgtttaaccggtgcattttagcaacagcagagctggaaaaatatatctgggtagaagtagcagacagacagcggtcagcgagccaggaggtcgcaggccacaggccttgggcagtcacacctgcagagtaaacactgagtcagactgggttaattatgcagagattgattctggcttgaaagaggaagggagagccgcctcactgcatactcggaggtgggccttggctaggtggatctaacaattgattattttatttcagatccagggagtgttgtgatattgaccttcaaggttcagagaagagtgtttaggacacacagtgaaatagacagctgcagtccaagccacagtggaatttctagtgtcctctgcccttctggggcaggctagggcggggtggagcagggagacggcttcaggcctttctaatttaaaaggacaaggaccaggggctggatgcctttccgtttcacacccgcggcttcccacttcaggagtgttcctgtgcttcccaccttggcctgtcttcagacgggcacctggacgtggggcttggagatccaactagtccccaagttcacccaagacagtttgttcccaggagctcatttaacactaggctgtttgcaagtcaaagtgcgtcccgtgcaaacaacatcccaagagcactgagcgtggccagctgacccacgaagtctatgacccatccctgtaccttgaagtcctgaaagctctggacctaccaccatgttgccacgagcacacactctagatctgaactgctcattcggtggacgctgggaagtggggaccctgtgtccaccagtgttccttcagcacacagccactgagtgcctgctcggggccaggtccttatttagggaaaccagagagatgcctcgtatacctcaaaggtctcagtttagggcagaattcaggacaggtt

SEQ ID NO: 41956 - DNA, 1792 bp, Homo sapiens
ggaaagaggtgaatgtcaaggggacctgggacacaaccaagtgtgtcaaagtgtgtcttatctaaatggtttatgaaaaattaaaactctataatatataagcatatgttttaacagacgaattttccctctactaaatctttgagtaaaactgactcttcaggaagatgcagtaagctttgatcctgtgactggagagtacagctgtccccaggatattcaccaaagtttaagagaaacagacatatctacacaccgtatcatcatctcgtctgacttacgcccaaaggcaaagggccacgtgaagtccacagcaggactcaagtgcaaagtcaacagacttttatttaaacttctgttcaaaggtatgtgagtgttgaaagtgtgtcagatggtggagaaaatgacataacaggaaattgtcgtttaacaacagagtccatccctgaatgctgcagccaagtctgcgcctccgcgtccactcacggggccaccgagcagtgatttggagacctgtttcaactatcagcgggggccaagggatccctgagccagacctacaccatggcagagccccccaggtcattttcccaccgtcggtgaaactgtgaggaaaccatggtattattcctggcctccctgcgcttccctctctcctttcctggtgacgtttccagctgtcaccagcattccatggcatacttcttattccccaccttcccttactctcatatcatcacttcttagtaagactaaagccttcccctttcctgtattatttacttctgattaatgtcggcagcatttcaccggcgcgtagcatttaactattgacttgaacaccataggtattgcttcttatggaaaaagaatactttaaattaaacgtggtctctttatccaaaagtgcccaatttgttatgattaataaagttaccaatcaataaagttacttcatatgatcactctgaaaaaaacaataaaacctctttgtggaagctcaatacactgccattctgtcattcactagtgttctcgacggagaggcgctcttgctgtgctgtgtcgtttttgatggagagatgctcttgctgtgtttttgacggagagatgctcttgttgtgtttttgatggagagatgctcttgttgtgtttttgatggagagatgctcttgctccgcactcccacctaaccctcacccccaaccccctgaaaggttctggccccagcacggccccgcacacaccctctctcactggacttgccccttcccttctcccgggcctcacggcggtgtctacgccgggctcgctggaaccttccagggctcggtgattcggggctgcggtgggagggccctgagttcttagacccgcgtgcagatccggccgcgacacaggcgagacccctgccggcgaggcgcggaactgcaggcacgccgcggcagggagggccgcagagcgggaggggcctggggcgcccccagcaaagaagctggggtggggggctggccacccatcaggtcatcaggagccaagtcctcttccacacttctttcaccactgtcttcagctgccacctctgtctgcctcaggaccatcaagctgtctggcttccgtcctaagaccctgagacagaatggaaccctgggcacttaccctcctaggccaaggccaaattctccaaaacaccccctagaggtgggggtgacggggggaggagagtagacacttggagccctggacatcgggccaagcatcccacagacgacagataaacggctcccggatg

SEQ ID NO: 41957 - DNA, 1399 bp, Homo sapiens
ggtttcaccatatttgtctcgaactcctgacctcgtgatccacccgccttggcctcccaaagtgctgggattaaaggcgtgagccaccatgcccggccagctgaagctttgcttctcactcctcccaactgtctcttctgtgtcccttctcttgataccagcctccactgttattattaatattcattcaattttttttctgaaaattccaatttatctgtatagtgctatgaggagccctaagaatacagtcaatcaatcagacaggcaatctcttcctaataacttgtcctagtgtttactggagcgactgaagagctgaaacatacagaaggggaaagaaatgggattccacccctggacattattcctttaagcttctttgattttaattgctttgcatgcacattgaggtagagtcccagttgattgaaacttttttcatttgcagctagaagtgaatgattcaggctgcattccaccgaacatgctcttaatattatggaaagacccggggctgaggacatgcctggacatgattaacaaagttgtgcatttgtaaattagatgatttccaggaaatatttaaaacctccctttcttcctaaacacttcaaagaggtgtccttgtttattttcaaccttttacccccaaccttttttttaaaaaagtaaatccctcctctctcacaaagtctctacaaaagaaagccactgtgatatgaaatccatccaaagacatgagttcaactaacgtctcaacgagcttgcttggctctatatttagatgtgagagtaaacatctgactctggagaaggactcatcccagagacaccactcctgaacaggaaaaaagtctaggggatggaattaaattagtttagctcccaaaagaatagttaatagaaacagtctctaaccagctaaccacaaatataggatttgctctttactccttggagaagaaaatccagggagtgaggctgaaacaatcctctgtgctgcccagaggtagggctcaaacacgggaccaaattgaggactggctaaaacaggtctggagtgggaacagctttccataagacacacccactaatgtgccatgtcagtttagcattgccatggcaacaacctgacaaccagaagttaccaccctcatcctagaaatttctgcataaactgacccttaatttgcatataattaaaatggtataaatatgagtgcagaattgctgctgagctgatactctaggcatgctgagtgctctaggtactcctcaaggagcagtacctctgctgctgctgtgtactggccatttcaatcaaagtcgctgcttaacacactggtgcactctcgaattgtctcctatgaggagccaagaaccctcttgggctaag

SEQ ID NO: 41958 - DNA, 1829 bp, Homo sapiens
agtgtcagagaaggaaaaaacaccgtagtttggagaattgaagacttgcaagaacacggggacaccggaaataaacctggccagaaagctgttttgcaagctagctgcactgccctccaactgaatcaacggtatcagcatggtgaataaacaggtatgcgctttctagagtgacaacagcagggtgtcagttcccaacacacctattccggtaccattattagcagccaccgttgaccaagcacctgccatgtgccaggctgtgagctgtctcatttcatctgttatcccggcagcacagctgtgctatccccaggcctgcctgagcagggccgcaggggccagcctctgggagactagtcccaccagcagaggatggcttaatcggggctgcttaacagtcatcgccctaataaataaaaccaatggccttaatttaaaacacattaacttaacagcaggctttctgtcagctgatgaggcctagctccactgctcagaacaggcaagtagttagagtggcctctcagagtcagagccgtgaagtcaaggtccctgtggcttgcgggtaaggccctggtcatcttgacttgtcttccacaacccacacgacggtgtgagtggtcccagggcgaaagataagagccctggatgggaaggctgtgaggaagggcagcagggaggccttcgggccctgccaggcggcccttccagcaagcaggcggccgggctcctcctcccagggagaggcctcccgccccaggtacaggcctgggaagccctcatctcaccgcgaggacagtcgcgtgcgacaggcctgtaaggtggcatccgagtccctcccgcaattaaggacgccgggctccaggccagcgccagggacagacccagcaccagggcggcccccggagccggcctctggcggcctcgggtcttttgccaaattccccaccggcgccaggataccgaggggccacccccaccacgcggctccaacagacacgtttcccacactggctgcggaggcccgccgggtgtgacggggaccgggcggactggaaaggatgtggctggggccccggggaggaccaggcaggagcgacgggcctcccacgcagcctccctccgaccgtgctgccgcatcgcccgtcccagcggctcggccccgccttgtccaaagggctcatcaaagccggtttaccggcggcccaggaaggaaatgaccgcccgccgcagccccgccgactgcctttcagttcagtgctttcgaaaccacaagggcgggcggggctagaggaggaaaaaaaacaccccgcgggagcctcaggcttgggggctgcagccgcgcgcacctcgccggccgggggtcgggcgcgcagacgcggtgcagcggcgcccccaggcggccgcgcggggcactgcactcggcccgtgtgtcggccccgggcgggggagggaccgcgccgcggaggaggggccagccccgcccaacgcccgacgcccgcggcccctcctctccagacggggggccccgtgctgaccgcagccgcggagcccgcagcgcacatcccggagcacaggacaaaacctgtgcctgcaccggagcccccatccggctcccgcaacactgacccccctgggcagcctcgggcacggggcacctggaaagccagccccggacaccgcgcggattctgcctcccggaggtcggactgcatcctcccgtcccgggcgaggcacatccaggaggagacaaggaggcgaagccccctaggataggtgaagacgacaggccctgccaccttcgctgtgggtattagggtgggcta

SEQ ID NO: 41959 - DNA, 1759 bp, Homo sapiens
ttccccggatcccctccgggagcgcaaactgacctcgcctaggatggggtgggccacccaccgggagcccccagccgcggcccgctcaccttgcacttgaagccagcggcgggcggcaggagctcccgcagcaggcccttggccacctcgcggctggcctcctcgctcacgaagtgaaggttaagcacctcgtgcgcctcgaacttggcgaggcgcagcagtgagcgcagcgcgacgcgggccttggcctgcagcgcggcattgtgctccgccttggtgaacatcatcagcaggtggtagtccaccggcccggcaccgccgccctccaagctcttggccttcgcgccgggggctggcgccacggagccccgcgctagctccagcgcgggcggcgagggcgcggcgggagccccggcgcgggcctccttcagcctcttggtggcgctggagaaggtctcccggcctgagccgaggtagtagaaggcgcagacggccagcgccgcggccagcagcagggcgcagtagtgggagcgcacagcgcccaggcgcgccatggcccgagcgcatgggagcccgcctcggaggaggcccatgcgctacgagaccgcggcgccagcggtgccagcaacgcgggagagccctcgggtacccggacgccggcggccacttagccccggcgccaggcggcggccatgaaaggggcggggccgcgccgcctggagccaatcgcgggcgccggtgcgcggaggggcggggccgggcgtgccgaaaccgctgggtcctaggttccaagggtattagaggaggggttagggtgggatccggcgcccggcgttgggagggggggattccggactccagcgtgctgagggctggcccgctgtcccggctgagaaatggcgccctacgcggcgagccccagaggatatccaagctgagtgttgaagggaatggaggcgcccgaacagaggaacttaggttagccaaaagcgaagctggaggcaccaagaggtaaaactttaatctctgcaccttttttccctcaatttcttggaggctttaagccgtctcggcctctccctgcacacgagctgcagctaggcaatttaaaccggcagctcctcccttttcccccgccctgggaggaaatggcccgggccgcacgtcgcgccggaggccgagcggagggaggctggaggatgtggccagcagggggcccccgccgcccgcacgaacctgcgaggctgctccccgagccccagcaccgcaaagccctggagggcgacattcatccacttttgttttataaacagacttttaacactttatcaagagcctccttgagggtaccagggagttttgcacgccgaggtcacgtgcccaaagtcacacagctagccagtagcaattttgaccctaggcagttgcacactgctaactagataaaaacgtactaacttcagtcttctaagaattgaggctataccagtagtttttaagtaaacacgtgcaagtgctgtgcatgctgtctaaatagacaaagaacttgagtaagtacagtaacccttcagttctttggccaagttctctgatttctgaccagagattaggtaaacggtttttcctgttatttccacattgtaaggttgcatggattatccaacctctctgcttcagaccttggcttacatgtcactacctacacaaatgatctctaaatacctcctatccagtgtctgggctaagtgccatcctcaat

SEQ ID NO: 41960 - DNA, 1747 bp, Homo sapiens
aataatagccctaggctccaataaaattaatacccaaaaatcatcaaagggcaaacgcaaaaagcgttcttaaattttctctaagtagcagttccttagttttacaattcttttctttttcgctgaaaggagaataagaaatccaattaacagtgttaaggatgagaacagttagttcccaggcagaggatgcaatttacaatccaggcttggcccagacattagcgggcacacacacgccagtgctcagaggaagcttcaagaaatgtcactatctaacggaagtgttaaggccttatatttgtaaggactatgaccagccctgtaaataaatacactgtaaaacgcaacctagaaaaactccattgtccaaaacaactcaagactttcctactatcctcaaaacagaaagaacctgtgtcctggacggcctcaggacgaccgcctctcacatagaaagaagggcaacccatgtgaatcggagtgcccccatgtcaactctgtgacagatccactgggagcatccgactgtgatccgggccctcctgggcagaggctgctggaagaggaacacacaggcaatcttcacggccctcctacttccgttctcaaaacagaaatgcacttttctgctagtcctccgccctcagcccggtacctctcgacagctgtgcccccttcaacgagcttaagtggaaagaaaagcaggtagtcaccaactagggtccacggaatgcggttgatcacagcgcttccccccgcgattcccgcacgcatccaccgcgggcgccctccggagagtcgctctggccgggggcaccgcgaagcagaagtcggcgtcccagttcgccccctactctctcctccccggggaaggggggcagaaaagcgcaaagaggaactaaatgaactgcaagaggatgccctgaaagctccctcaaagagggggtggggagggggtggaaaccaagaaggggcggaaggaagggggaaggaagagcagccagaggaggaagggggcgagagcgagcgcccgcgaaggggacgggacttcgggagcgcggctgcaccccatttcccccagcgggagagggtgcgccggccttcggggcgctccgccccggcagagggcaaggaaagaaatgagaggcgacgtccccgtccccgccacttcgtcgcccctcgggagggctcggtggggactgcagtgccctcgcagggtgggaaacggcggcaacagccgctcgccccgtcggaaggagcggacggcggggcctcctccgggtgcgcgggcccggctttcacgcccccagcgccgggaaggcagctccgcggtgacgccgggcggccgtgccggttacctgaagcggggcgagtccttcagacactcctcgaaatccacagtcatcttcatcctgcctccgcctcgcaggcggcgctggcaaagccgagggggccgcgggagcggccgcgctgggacgcagacggctacggcgggcgcacggccgcgactagcgttgcgcggagctgcgaagggcgcctcgcccgctggtcatagcagccgcgaagacggcgacgactagtcaggccccagtcccgcccctcttcctcccgccccaagtagagcgctggccgcagggaaacggccggggagtgacagcagcggccagccagccacgaacctggcggccaaggggcggggcatccggcagcaccgcctgcgggcgcccgggcaacgggtctgagc

SEQ ID NO: 41961 - DNA, 1231 bp, Homo sapiens
tgacggatcgcctattagcttgagactagatcttaaagggttcccaaagcaagaaaatacactgtaattatcgaagaattttagatacctcagagatgaggttaagaaatagtaaaagcttaacagtcgaagatctgaagcttcaatttcattctttgatgttcccgattacagaaagttcaaagatgatgtttaaaaatattatatatgcccaaatgcttaaaaaaaaaaaaggaagcatgataaacgtcatcgcccagccttcttaaagatcgctcccacccgcggctagccgggcaggagaagagactcgagcggcacccgagccgcatccacgccgcccgcccgcccctggggtctgggtaggtaacgggcccggcgggaaggaggggctcccaggccgtccctcccagcgctcacctcagctcctcgtcgacattcccgcggggctgttcggccgacgccaccatagaggaagtcgtagaggtcttgttcttcaagatccccttgatgggccggtgcgaggccgtcgaggccgccattgccgggcgctccggctgtcggctcagggtcgctgcttggcgtggggtccgcgaagagaagggtcggcacagcagagactcgcaggcagccgcagatcccgctcagggctaaagcggccgcaactgctgcctcggaaacggctaccgcagcggttgtcacgacacaacgaccccgacgccagagccaacgccgaacgggtggcggctactcgcgcacccttagccactgccacttgacccgcggctcgcggagagacgccggcctagagctccagcgcaggagcgacgcgacgccgaagccaagcggacccgccctctcgcgatatctagggaggaggcggggagagggcggggcgagaacaaagccgacctcctcgccccgccccctccgtcccgcccgggctgctcgccccgcccccgcgcggcgctgggaggcgggagctgtctctgagaacctgcgggagagcgcccgggcttgctgcttcccggacccgcgcgtctctcgagcaccctcgtcccaccaccttgtgaggccgtagtgttatttttattttttagatcagcagactgagactcgaggtgacgtcactccgcagagaggttagctgacttgaagaaaacgggtatctcctctttccatttcgcccgtgtaaacagccgaactgcctattataaaagcatggactgcc

SEQ ID NO: 41962 - DNA, 2633 bp, Homo sapiens
atcataaagtcaaacaattttaaatccaatcattgtaagccaggaccatctgtatacccaagacatacacaaggatgttcatagcagctttattcaaaatagtgaaaaacaaaacaatccaaatgcacagcaataggaaaacagacaaataaattgtggtatatttatacagtggaatactatgcaacaacaaaaaaggatgaagcataatactacacacagcgtgagtgagtctcacagacacagtgttaacagagagaatccagacacaaaagagcctatctatgcatgattccatttatatgaagttcaaagacatgcagagctaatctatggtgatagagataagaatggtggttacactgaaatgggaggatcgctcaaacccgggaggcggaggctgcagtgaaccatgatggagctgcactccagctttggagacagagcgagaccctgtctctaaaaaaaaaaaaaaaatgattgttccattctgtggtggcaagtgggggcttgactggaagggaacacaagggcacctgttgaggtgctgagcacgttctgtatcttgacctgagtgtcggatacatcctggggatacatacgtacataaaaattcatcagggtatacgctacttaagctgggcgtagtttacagtatgtaggttacaacataaaaaagaagtgaatgaaccaaagaatactgggctccctggcgtttcctcttctgcaacccaaggaaataagcctcggtgtggagagggcctgtcctcagggcctggcagatgtaggcgattcttaccacgtctccttcggtaagcccacctggcaagttctcatccacataatctgtgcatgctcaacatttgaaaccagtggggacccattcggaccccaagagttggtattagagatcattttaaagtgaaaactggccaggcacgatggcttacacctgtaatcccagcactttgggaggctgaggtgggcggatcacatgaggtcaggagttcgagaccaacttggccaacatggtgaaaccctgttgactcaggatgactcagattagagcaggtgactgggggtgactcaggatggagcaggtgatagaggctaggagggggttgtttactgaaactaggggcaaggagatgaagaaaacgaggaagttaaactttaaaatgaagagctgaacatactgatacattgattctttggagaggatctcagaactcattgtacttaacaatttacaggctaaaacctttgaagaagaatttattatatcctacaaacctgggaggcagaggttgcagtgagccaagattgggccatcgcactccagcctgggcaataagaatgaaactctgtctcaaaaaaaacaaaagttggccagggctgggcgtggtggctcacacctgtaatcccagcactttgggaggctaaagcaggtggatcacctgaggtcagaagtacgagaccatcgtggctaatatggtgaaaccccatctctactcaaaatacgaaaaaagaaaaaaaaaattagccaagcacggtggtgcacgcctgttatcccagctgcttaggaagctgaggcaggagaattgcctgatcccagaggcagaggttgcagtgaactgggattgtgccactgcactccagcctaggcgacagagcaagattctgtctcaaaaataaatacataaataaagttttagagcaggaatgaaaggaagtaaagtacacttggaagagctgtgttggcaactggagagatccgagtgcctcatctgacccttgacttgggattaatacattggcatgagatgtgagcagtgactcaaagttgctcagaaaaaaatcttcccccgctatttagtactgcagctggcacctgccctccccacgcactgcagctggcacctgccctccccacaccagtatttggtactgcagctggcacctgccctcccctctgctatttagtactgcagctggcacctgccctccacacagcagtatttagtactgcagctggcacctgccctccccacaccagtatttagtactgcagctggcacctgccctccccacaccagtatttagtactgcagctggcacctgccctccccacgtcagtgttcaggattctttctctctgtttttcttttttttccatagttttcacctttctataattcacttatttgttatgtttattgttttgtgaaaggaaaataaatcttgggcccccaaaatcactaagctaaaggggaaagtcaagccgggaatggcttagggccgacctgccccccattctattcaaaatcaccccctgctcactgagatagatgcatatctgattgccttctttggaaaggcccatcagaaactcaaaagaatgcgacctttgtctctcacccacctgtgacctggaagctttctcctggctgcgagttgtcccacatttgcttggcgttgcccggccttttccagactgaaccaatgttcatcttacatgtgttgattgatgtctcatgtctccctaaaacgtatgaccaccttggcacatgtcgtcaggacatcctgaggctgtgtcacgggtgtgcatcttcaaccttggaacaataaacttt

SEQ ID NO: 41963 - DNA, 435 bp, Homo sapiens
gttacagccttctgggccacacactgtcccaaagctggaatttgagctctgttctgcctggctccaaagcaaaagaagggcaatcacctgggctgaccgcccacgacatccttcgctccgggtcctttcccggtggcaggtggagacggccttttggaggggcctcgctgtccagctgcaaggatagtggttagtggacagctcccagctgctggcccctgcagggtgggccttgcttttatgctgagctcatgctcttctccaggtgaccctgtggccgatgactaagcaaagtggcatcacagtgacctcaccatttccaccccacaagactccgccaacaggcagtctgcccctcagagcgccccatgggcaggagctttgtggctgtgtcagctgtgccacatcctcctgcccagcccggcctccttcttc

SEQ ID NO: 41964 - DNA, 1375 bp, Homo sapiens
aatgacagagagtggcaaaaaaatcattaagcagttttagatcaaaacatcttcccactgggcaagtatataattttccccaccaagatcaccaagatcagacaagggggccgggtgcggtggctcatgagtacttaccgtgtacctgttacttgccaggctgtgggtacaggagataaacctggtctctgccctcatggagcttcctgtctagtgggaaatctttccccagctgtctggtgtccactccctctgcctgcccacttctgacccttgccctcttcctcccccgccctgggcctcgctcctctcttggcacctatgggcagagaaagaggttgcccaggttatcagccacacccctttgggctccgtttccatttcggagtgtggcctggtctctgctctccccagggaggttttgtgcattagtcactcggcttgcggaacatgggtcagcagagatgatggggtcaccaggaggacaaggctgcagagcaaggacttgccccagagtctcaccgcctctgggcccctctggaatgaccacggccaagcctgtcctggggagaaaagaaggcacaggccggtgatgggtctagctggggctggcgctaggtgcggggccccaccggtgacatgcctgatctgtccacacgcccggaggagggcagtcccggctgtcctgggctggcctgcgctgcccccttccctcctttccagcctgtcacaaaccctggcacttcctgcttggtgcctcggttcaggcctgggtcttgctccctgggaccaaggaggggcttcctccctgatcacccccgccccggacaccacaccttcggttcaccctgtgcccacctctgcagactcccaggagcagccctgcacagcgcctcccccacctccaagccggaccaggccacaccctccccagtgcttctcctgctcatccatggacaacgctacaggccaccgagttggcccccacacccttcctgggggtgggggtatctttatgaaaatggaggggaaatagagatgctctcagcataacagtgcaccagagtcgtgaggccaccaatgatggcaaaagaaaggtgcgctggttttgtggctgtgcctttccgagggccattttctttcaccctctcccctcctccatggctcctaaagtcttctcgtctgctccaggaagaggaagattggacggagccaaggtcctgggtggatagaagggcctccaggaccccctggatgtggaggagggagggaaaagctagggtagagcagaaagaatccccagtgtccccatcctgggcgaaggcggctctgaacatgtaaatatttgatggatttacaagaaagatttccttct

SEQ ID NO: 41965 - DNA, 698 bp, Homo sapiens
ataaacctggccacggcctagggaccgtgcaactcttgatcacctacaaacacctggaaagcacacgttgtggcaaacatgggctttggtgacaggaagacctgggtccagatcttgcttgctacctgcttactagctgtgtgaccctggacaaactgctgaacttctctgaacttggttttcttagctaaagagagagaatataagacttcttatgcttgtcaggaggattcgtgtaataccatgtcaagttccaagcacagggttctctctggtggaccagtcgttctcagcgaggacagtgatgacccctagtggacagtgtgggaagttctgggagtgtttcaacgaggacagtgatgtcccctagtggacagtgtgggaagctctgggggtgttttcagttgtcaccgagccaagggctaccggcgcgaagggcccggcctcctgcaatgcgtggggcagtgatgcgccatgaggaaatgtcacggatcctacgtgacaaaatagtcttgcgaacaattttaagacaaactgaattttccgggaatgcaactactgtgtaagttgagaaagtttcataacgtgttttgttcggcactttaccaacagttgttcaccgacgtggaaatcttatcactggcggcacctgccgcgtgtggtatctgagtggccgtgactcgtgcgtccgccctcgt

SEQ ID NO: 41966 - DNA, 591 bp, Homo sapiens
agccgacactcctgcagctggaggaagggtcttggtcctggatgactggtgtgggtggcaaaccccaaatctgcgatcaacagtacgctgatgtttaaacatggtatgtggacagattacattacctttggaatttaatttcagtatagtaaggcaaaccccgaatctgtgactgacagtaggctgatgtttaaacacggtatgtggacagattatattacctttggaatttcatttcagtaaagtaaaggtgttgcaaaatatttgtcctagaaagggaacactgagtttcgtaggtttacagcctctgtacagggtaaatggcagaggctcctattaccagaaatgatagttcaccaagctcagcaaatacctactgagtgcctaccatgtgccaggcgctgttttaggcacttggagatacatcgatgaacaaagcaatgaaggcctgtcctcactggagcttacattccagcaggtgacaaggggttacaggctgtgatcacagttttcagtttcaggcccacatctgccctctggatgacccacaaggcatcccatagttggcatcagtcaatgggtacctagttt

SEQ ID NO: 41967 - DNA, 879 bp, Homo sapiens
gtcttctgcggacgcttcagactctgttgtccctacacgaatattcacgcattaaccataccattctgttccctgatttcacttaatattcgtctttctcctgactttttaacaatgctgaatagttcagatctgaaaagcatgcacacgcacacacagcgtgctggccaaagcacactgcaggccgcaatcagccagtggtaccggagagtgacctctgacctacactatcctgggcccagataaagaagctggtggcaccttcaaagctaagcaagcggacccaccgcacagcaaacccatccctgtctgcgtaaggtgtgtcagagctgagggcgtggccaggctagccccggacccatgctcaatccccaaagaggaacaggcgagagaaaaaaggccagctgcccggctggggaccaagccatccccctcccccactcagcggtggcctcctccccagctcccatcacagtgagcagcactgagaagcaggcacacacagcctgggcccagcgtgagcctcctgcccccacagttcccagtggccctgccaacacagtgccagttccgactttttcaggcagctcagggaagtacaaagagtaacaaaggggaatgagaaactctcagttcaaatcctggctcttccacctcggcgaccgggccaggcagctgggccagccgggtggtttccaaacttaaagctgtaaccctttactggaatggttctcatgaggctgcacagccccctatgggacagttctggttgccacaacatttgggggggccttagtgacattcagtgggtggttgggggacaagagcgtgagctagcctgcaatgcgtaggacattctcgcactgtcccaaatcccac

SEQ ID NO: 41968 - DNA, 719 bp, Homo sapiens
gcaccgccgggcccaccccgccccgctcctccacgccgagcttcagcccgcggagctgctgcgggccccagctgagaacccctacgcgctgcggctgctgctccggcagcgcagggctcagcccgccgcgctcctcctgcgcgacccgccgggggcccccgaccggctcggcccagcgcactcgcttgccccccagaggccgcgcgctcccacccctccagatggtgctgccctcggcgcccgctcacaccgcccgcccgccccggccctcccctcccgccccgggccgcccccgagtcccgcgcccgcctccccgccctcgcctccgggcgtcaacgtcggcccgccgggcgcccgccccgcgccggcccccgcaggtgagcgcccgcccgccgtccctcctgccgagcgccccgagcccgcctgcgcctgcgcctgcgccgccccggggtggggggtgggggggagtcggcccgccctcttaaagggcccggcctcatcgctcctcccccggctcctcccccagcctccggggccctaccccgctctccccgactcccccgggcccggcctgcgccttcctgcggtgccgaggagcggtggcgccctgggtgaagaagtcccgccgagtcgaggggcgcaatggaggagcgccggaacaggtctctcattccgagtagctaccgttgcactgtgcgagtgtaaaagtcacttccacc

SEQ ID NO: 41969 - DNA, 1125 bp, Homo sapiens
aggctggagtacagtggtgcgatcttggctcactgcaacctctgtctcccgggttcaagcaattctcctgtctcagcctaccgagtagctgggattacaggcacgcaccatcacatcacacccggctaatttttatattttgaatagagacagggtttcaccatgttggtcaggctggtcttgatctcctgacctcaggtgatccacccgccctggcctcccaaagtgctgggattacaggtgtgagccactgctcccagccagcatcttagtttttaaaagctccttaagtgattccaaccagctaccagacatgggaggtgcttggctgaaggcaaactctggcggggaggaggagccagtctgttcccaagcacaccctcactgcctagaaggaggcctgggctaaggcccacggaagggagggctgggatcaggacgatctgacttgacaaagggccaccatttctgagtcaggaggggatcacttgcctcctggcggaggtgaagagacggatttctgaaggaattcttaggcatggtgtgtatctgctaaccccggccacatcctcccaggaccgagaacagactgtgccttcaccctattgcccaagtcagaggtccctggagctgccaagggggctgtgctcacatgcccccgagcaattcagttttcaaaaccttactaggccgttgggaggaggcactgccagctgctcccacacacctgccccctctgcccaatcacagcaagagccaaatgagccgagagatgacaaaccctgaggtcatcatgggctcttctgaaacagagcctcatggagccctgcgctctggtgccccctggtggacacctagagttgtggttggtaaccaacaaatggaccagtgagttcagttactcctgattggttggtgttcgggcacagtcatgccagatgtggccccatacacagaatcaaggaatttctagtgcggcgcagtggctcacagttggaatcccagcacttgggaggcagaagcagcaggatcagttgagtgtaggagttcaaggctgcaatgagctatgatctgcactccagcctgggtgacagagggacaccctgtctctaaaaaaattaattt

SEQ ID NO: 41970 - DNA, 2507 bp, Homo sapiens
ccttggcctcccaaagtgctgggattacaggcgggagccaatgcgcccagccgagggtcatttttaactagcattgtgatcgattcaggtttagctgggaatcttgctccatgacatttaaatacattatcagaggcaagtaactgcctcgccttagggcggagttagccaaactgctgtctatctaacaatcttcaacacaggctaggtttacagccaccattacttgataagaacatccaaaggaaattgaaggatgctatgctatatataaccttgcaaaatcgatgacaaaaattatcttaactctgagttttcttgagaagcatattgtaacccaaaattcagggccggggggcggggggaaccagcagggtccacaagtactctagacagcctaaccttaattttcacagtaagcttagcatataagcatggggtagccaaatacaatttcctactttaatcctcttatcaacggggaagaaaatggaaaaagctgcagaatccagtcccccgggtaagtgaggtctctacaagcagtaagcagagggaaagcgttatccgaaaagagccgaatcagaatgtattttcttacccaccctcccaaccttaaaagaactgtccagcagaatgtgacacaatcggcctctccggcgcccatcaatccagcacagccctctgaccacaccgctaatctccaagtatctttcacaaataagtcactcctatggctcccgtcttgtagtgagaactgctagcaatattcttaatgtgaacacctgcggcgttcagtcggattctgccttgagaaaacagaatccacacacaaggcgaacaggcagagcatggcaagatcaggttgtaccagagccgaagggtaagtttacagaaacccgtatctaattaatgcctgtaacacgctagtaaccgaatcggggacagctttgtccctttccgcagtgagaacggggcccgcccggagcccggggaaccgaaggtttaggagcccaaggtcacccacgaatcccagccgttccctggggcgacttcctggagcagccacgtgttcccccggcgccgcacgccgcgcagctgcaccttggctgcgcccgcgctcccggacccgcagcccggagccggcgcactagggcctgcggccttcaagggcgaggacccgaagtccccggggctgagagcgacagtgggggtacacctggtctcgtcattcgtcgctctgtgaccgaggaggcgggcaagaaggcagagagaagggaagggacgagaggcgaagggacgagaggcgcagggacgcctctgcgcacagccgccgaccccgtgtacctgcagccgctcgaggcgccgccacagccccttccccacaggctcgcggccccgctccatcccggccgccccgcctggggccgcgaccgctttcccgctccccgtgcggctccctatggctgctggacagcaccggagcggccgctccagccagccccgcaggatgaagggaggacacgagggtcggtgtagttctagaagcccgcactcacactagcgcgtcctccgtcccgagccgccacccgatatcccgacgctctgaggggatggcggcccctaaccggcggtttatagcctggccccgcccccggcccccaggggggctgtgcgtcacttcctgaggcacgtacgctcgcgaggtgctctgacagatcgcccggggggcggggatgcgcgcgcagcgggcggggccctatgcggagggcgctgcgggcgaggcgaaggccaagggaaaaggcgccaaggcagcaggtgccccgaggagccgcgcgatgggcgcactggcctctgcctcggcgccttcctccaccctggtagcctggcagcctccgcctgaccttgaccaacctccagtccctgcagtgctaggtccaatctgttggcgttgacgcttaaatgttggatattgcactgcggcagtgccttgaaatgtacgtgcaggatggaatgttaggtaactattaaagccactcttgtgaagatgtattttgcagcctcagaaatacaaaaaggaaaagaaaagcaaaatgcaaatttttattcagaatgtatacaagctgcactttaaccaagactagcggagtgctttgcgtaatgtttaatgcatgagggaataaaagggaaaatagaaacaagtgacttaatagggtgataggattgtagattaactttcgttttcattgccatcgctgttattggattgtgcaatgaataacaaataaataaaattcaattcttgtcactgtttaaactctttccaaacaatcacaccctctccctccctctggtcagtaaccagcaggccagggaggtagtagctacaatgcaagaaagcaacccataccttaaaaagcattgcacataaactgaccttcaggcccgtagggacacagaacagccctttaagaagcaaatccgtttctgggccttgggcttttactctt

SEQ ID NO: 41971 - DNA, 1080 bp, Homo sapiens
ttgcagatgtgaattgaatgcatggatggacagtgagaccgtggaggggatggtccaaccatcctctgcactgttcagacccatgaggagctctgagtccaggtccagggaggcagattcctccccagaacccctcgacttatcaccgaagagtgcataggagactggagaggttgaagagcttgccccactgcacagccagctgggcggcatagctccctggtgagctcagcacagcagtgggaaacagaggtgaagggcagagccttgaacttggctgtgttctctacccactgtgtgacctcaggcaactcacccagctctccagctttgagagttgggtaacttgcccgactctcattgggcacctacctcattgagttctgtaaggattaaatcgagataaaatatgtaaagaactcagcaggcaggtgggctgagaaaaagggagcagccagcatgtctgtttctgcagtgcctcaggcaccagggcctgccagtggccacagaaatggagttgacctcaccggctcccttccagtctcccaggctgtggggcagtgacaaccccaagcaggaggctggaggcacagacttccaagaaggaggagacgaggcatgctggtacattttccaccttactccaacccttcacccacatcctgacttcttcaaaagaattattgtataaacaatataaaggcattaaaaaaaactgcaaaggaaaaacgaaccacctatgatctcagcattcgagcccaacaaggttgttttcttcctgtctagttcttccagcttgtccaggcatgtacatattttatttcgctgtagtcagagtcattatttattttttgcttgtgtaatatttttatcataaatgttcattcacaatcctgtagtcttcataagtagaattttttttttcccccttcaggacagagtgttgctctcgtcgcccaggctggagggcaatggcgcaatctcggctcactgccacctccgcctcccgggttcaagggattctcctgcctcagcctcccagtagctggaactacaggcgtgcaccaccccatgcccatc

SEQ ID NO: 41972 - DNA, 896 bp, Homo sapiens
ggccggcctccaggcagggcctcccgctggctggatcccgggccacactgtacagaagacaaccccgtagagaccttgggtggggcagaagcccccttccctcactgacaccctgccggtctctcctggggtctcccagtctctgctgcccagtggggaagcacccgtctcagcccaaccgcagccccccccggctccctcctgccctttcacctttcctgccattccccactgtgtcctgaagtttctaagaacatccccagcgccctgttgtcagctctgggaagtctaaagttcagggctttgggtaattaaacccaaggcctctcagtgggctgggggtgaatgacctggcgaacgtgcctgcggagatgctgggaggaagctgagtcagtctgcgtctttgtcagggtgggctgaggccagtgaccctctgggggtcagggcccttgcaggcctcttccttccctgacctccaccttaggaggcagctggcccctgagacgcctgcctcacgacattgtcctgtcccaggaactggactttaggaggaggggaagctggagggggatgcagcttgactcttgggagagactttgaggtgtctgggcacaggagtggggagtcctccgggtaccccatcagggactgcttccactgcttgtatggcctcaccagcccagcgcaggaagccccctctcccttcccagaattgaccctctgcaccctctcctgggccctcttctcactacctccatctccaccatgccccaacagagcccctcccccaggcccctttggccgctctccacaccccacagctttctgtctgacctggtttcttagcctctctggacctcagcctccttatctgtaaaatgggaataaggatacta

SEQ ID NO: 41973 - DNA, 1171 bp, Homo sapiens
cctcagccctgagtctccccgctgcagagtgcccaagcctgagttccagcaggttcttcaggggccgctgaccagggaacactgcggtgaggagcgaggacttcgtccccaccccggcccagggcaggggcttcgtggtgagcccaccccaccccagaaggctcctggaagggcagggcagactggcagcaaaatcctataggatgggccgggccagaggcaaggggtggccaaaggcacctgtccaagaggtgggagggaccacacctgggggcagggacgagtcaggcacagggaactccgccagcctagaggatcaaattcctccggggtgaactctgagatagaaagttggcccgggaagctcaaggagggagagcggcagaggggaagactctgcaattctgcttgccccccaccccggcccaggcaagccaccctgcccccggcccccacctgcccgccccgcctgcccttcctcaccccggtgcctgcgggattgctggagagaacgcggcgatggagccgggcaggacccagataaagcttgaccccaggtaagtgagggcggcgggccctgggccagtcgctgggcagcggtggcccctatcccgcggcctgtcctctctccctcccagagccctttggcggccgcactcagaatgagacaggactggaaatgctctagctgttcctaggtcctcagggacaacgtgggtttgggccagggtgtgacactccagggcctcggccttgccccccagcgtggggagagaaaggtcgcagagcgggggctgtggaaggcattcgcagaggaaatggcagcatccctcagcagcagggggcccgtccgtctgtaaggactcacccttcctctgggatcctgctcttcctctctggtcagtccctgggctgctgcccgacccgcatggagagaatccacggtgggctcttcaggcacggcagccaggcacagcctggctaggtggcagcttgtcttactcccccacctgggccagttctccactccctctaagaaaagggccctgaggccgggcgcctgtaatcccagcactttgggaggctgaggcgggagtccaggagtttaagcccagttccagtttgagtcctggagttcgagaccagtgtctgagcaacatggcgaaatcct

SEQ ID NO: 41974 - DNA, 1310 bp, Homo sapiens
ttgaacccaagagacggaggctgcagtgagccatgatcataccactgcactccaacctgggtgacaagagtgaaactctatcaaaaaaaaaaaaaaaaagggctgacagccagaatacagcaattgttaagacctgatctttccaactgctgcctattcactccctagataagtcaccttatcttaatcactgaaatttgagcacagactctaaatatggacataaaaacccatcccccaacaccctgcctgctaagtacattagtgtctccaaagtgccctcgaaatacagaatgcagtatctgtgcctgtgatttttactccgactcacaaagacctggtttggtttctgctgactcacctaccagtacacactgcttgccttgttcctccacgttccaacacatgcctgctgaggcacatcagctttgctagacaagtggaagatgtgtttgtggagggaggggtggcactgaggagacactaaggatacagctagtcatatttttccaatgtgaatgtcctgaaggagacagaatctaggtgctggcatgtctatgcttgagtctgaaagatgataggctcctacaagtagttttagggactcctatccagtcctttctttttttttttttttttttttttttgagacagagtttcactcctgttgcccaggctggagtacaatggcacgatctcagctcaccacaacctccacctcccgggttcaagcaattctcctgcctcagcctcccgagtagctgggattacaggcatgcaccaccacgcctggctaattttgtatttttagtagagatggggtttctccatgttgaggctggtcttgaactcctgacctcaggtgatctgcccgcctcagtctcccaaagtgctgggattacaggcgtgagccaccgcacccggcctatccaatcctttctattcaacttccttattgcaaacagacctaccaagggaaagaggagttggactttgcttcctgaactatgtaacaatctaaatatagcagagtcctctcttatccacaggggaaatgtttcaagacgccagcagatgcctgaacccctagagagtatggaccctatatggacagttgtccctcagaatctgcagggcactggttccaggatctcctgcagatgccaaaatccacagatgctcaaaagtcccttatatatataaaacggtgtcgaatttgcatataatctataccccctatatactttcaatcttctctacattacttacaacacctaatacaatgtaaatactatgtaaccagttattat

SEQ ID NO: 41975 - DNA, 1966 bp, Homo sapiens
ttagccgggcgtggtggcgcatgcctgtaatcccagctactagggaggctgagacaagagaatcgcttgaaccagggaggcggaggttgcggtgagctgagatcgcgccactgcgctccagcctgggcaacaagagcgaaactgtctcaaaaaaagaaaaagaaaaaaagtacaggttccatccactaaattggtttcacagctcaatactaggaagaaacccatagtgtgggaggcattaaactagtccaaacttcccattcactgatgaagaaactgtaactcagtggtgaagtttgtccgtaaaaattaaactcaggcctgttaagttccagaccagtgttctttccactaaagaccttctctgcccagtcacggccaatcacaccccgtgcccaaacacaaccctacagcgccatcgcccatcacggatgccatcctcttctccaagtcagcccctcgaagtcactgctctgggtcggagtcccctcgcggccgctgctcgtgttcccttaggtccggatcccccacagtcactaccaatcgatcagagtctccttggagtccttgccccttgatcatagtcccttgcagtcactgcctcatacttcctcggtccaagtgccgtcgcagccccggcctcgcgctctccgaggtcaccgtgtttcgcattcactgctcctgggtcacagtcccctcgctgtcactggccctcggtcacagtagcctcccagcccctggctcccactgccctcgctgtcacttaccactcttcctcagtcacagtcacctcgcggtcccagccccacagtttgtcctctcaaacagagacgcaaagataggcacacacctgcaactcacgctcccccgagcccggtccggtcggatttctggccggcgccgcgtcactgactagggaagttgaggaggttgcggggagacgcccggggaaggcagctgatggaagagccagccggaagttccgcctacttcccctacctctgtcaatccgaccacgacttctccttgaaaaccacgactcctgacacagtagttccgcctcctcagaggcccccgggatgaagtgacccagcagaaataccagagaccggagacggaatggcccagggtcagcctccacccggaaccggaggatgcagcgaagacgtctccttgaagtgggatacggatgtgaaccggcccaagtgctcgccggtccgtcaagacgcgctgcccggctgctcccgtgtccaactcgggctgtgtccgcccaggcgggcctgtgcgcggaggtcctaccgctgcacctccgcgcctaccgcagcccgcacccccgcacccgggcagccaacgtgcaggaggcccgggcgccttcagcggagacgccccgaccgcggctgcctcgccgcagcgttagcttttacctacgtggggaagtaaggggaatttgcgaccgccagcccagtccgctgaaaacctgtggctgacccaccctcttcctttttctgacccacgttggctccaaaaaaaaaaatccctagggatccactgggagccagttgagcaggagtggattaagacacgtgtcgcagggtgtatggtggaaagaaacgttttcctttgctagaatgaaccttgggaaggatcccttttgattccgtagatgtaagaggctacacaatattatggaagaaggatgtaaaaaaaatgtattattattttttagttaccaactggactgaagtaaaagaccttttaaacttatttacttattcttttatttttttaaaagacggagcctcgctctgtcgcccgggctggagtgcagtggcgcgatctcagctcactgcagcctccgcctccagggttcaagggattctcgtgcctcatcccgagtagctgggattacaggcatgcgccaccacgcccggctaatttttgtatttttagtagagtcggggtttca

SEQ ID NO: 41976 - DNA, 1540 bp, Homo sapiens
gtgtgtgtgtgtgtgtgtgtaaagttagtgatctcacaaacctagctgagtaccctctgctctggcccgtgagcctgatatttttttcagtgtgtgtgtgtgtgtgtgtgtgtgtgtgtaaagttagtgatctcacaaacctagctgagtaccctctgctctggcccgtgagccttaatcctagcgagggctcgctgcggtggtctaagggcctccagatcccacccgggtaggacttcgcacagatgcagctcccgcgccgggagtgagcccatcctggcacccgtgtgcacagtcaccctcgaatcacggctgaacggcatccgacgcgagtggcttcctgcctctattctacccatctccttactcaggacgccatcgcgggtttcccagggccaaccattcccgccgcgccaccctaagacgcgcccggcgcccaaacactgaggaagcgggtggggtcccctgcggcccctgcagcgggaggggcgcccggacgtcacagcagggccgcccgcccgcctcgcggcctcccgcctcccgccccgcggaccccgcgcgtcccccgcgctccttccgtggcccaggtcccaggcgagctccgcccctcagaccagcgcgctcgaggtcgccccgccacagcccgtcctctacccgcctctgctggaaaacaggccgcagaatataggtgttctcgggctcccctgcgttcttctcagcctcaggcaccccgtcgcccaccgagaaggacactccgatggacgtggccatgccggggcttctcggtccgggcgtagctcgcgatgaaggcctagcgggttgcggtcgcggccggcagcagggaaagcgtctccagggcaacagggccgccctcccgcctcgctgaagcccgcgagcgccccgcacagccgccctccctgcccgcgcctgcgcaccggctgctgggcgggaactggtcgcgtccggacgcgcgacagcttccacccgcctcaggcagtatcagccgcgccgcagtcggaggaaatagacgcggggcctgaggctcctggacttgaggtattaggctggtgcagaagtaattgcggcggccgggtgcgggggctcaggcctgcaatcccagcactttgggaggccgaggcgggcggatcacctgagtcaggaagagttcaagaccatcctggccgacatggtgaaaccccatctctactgaaaatacaaaaattagccgggcgtggtggcgcgtgcctgtaaccccagctgctctggaggctgaggcagaataatctattgaacccaggaggccgaggttgcagtgagccgagatcgcgccactgcactccagcctggcgacagagcgagactgcgtctcaaaaaaagaaaaaaaaaaaaaaaggaaggaaggaaagagacttaggctgcattccccgcttttaaaaatatatatttatttttatttttttaaacgaagtctcgctctgtcactcaggctggagtgcagaggcgcgatctcggctcactgcaacctccacctcccaggttc

SEQ ID NO: 41977 - DNA, 1690 bp, Homo sapiens
aaaattacactcaggcacattggagtactcttctctcaaatcactccacagagaacttcatcatttgctccgccctctaataactcatgcaagaaaagttcagcaccatcagagagaaacaagacagagagaattcatagaatggctttagggcctttcctccaggcggtaagaggatctgcgtgtgtccttcgcaggggtccaaagggagagaacctaggcctagggtttcggggataccgacacccagaaacagattttctctcaaagaagtttctgccgccatccctatcttatcagcaggaggccccggcgccatcgtctccgtctttatgattttattatggggaggtgggaaacgccaccctggattcttccaggcctcccctattcagcttgggggttccccctcattcttccctcaaagcctcagtccctgaggtcctcctcagcaccccccgcttctggcggcctgtcccccgtgaagtgtaaaggcacggccgaacccaccggccttgccgtgaaggcgggagggcccgaacccgccagggccacggcgatggctccgaggggcccagaaaggggaagggcaggccggggaccggggcagaatgacctggccggggaagaaaggaaaaaaggaggtgaggagatgcaccgcaccgcagggctgcacagagaagggaagatgatgaaggaggaggaggagggcggtggcccgggtgcggccccctactcctcccgcccccgggtccccgggccggcgggggcggacggactcggcccattcccaggtctgggctggcggggggttgggggatctccctccacgctactaggagacagagaacgagggtatcgggagcgggggggggctgtctcccgcctgaacccggagaccccgacgccgtcgtcgcctcttcctcaggagggaggacggcagctgtgggtaaagcccgaaggaggaatgcctgaaggtaaggggaagcccggggcagacccgctgcccgctccggaccccactctccaccttccggtaaccgcgtctcttaccggtaatggtggtgaactgttgaattaaccccttcagcgccgaggacgccgcggagcccccgtgggcagccatcttaccgccgccgccgccgccgaacaacaacacagacacacacggactgccctcccccacttcgccgtgcggtgtgcgcaggcgcattgaccgcccctcgagccccgcccctcccgtccccagcggtctgcgcaggcgcattttccgaccgggcccgcgcgctcccagctctcgggttggctgctcggttgctgcctgctcagtgcatcctttttgccattgctggtgccttcctctccgggctccaaggctagcctcgcaggcgcggtgtcgattcctagattccgaaggaagcttcggtctcggcagatagttcttcgcatttcagcttcgcaagctttattgacagagccaactgccgatgacagcatttttctgttttgcggttgtaccgcactctattaggtttcctgcaggtcccatcaaaatgcaaaccctacctcctcgctttgaagcgactctccccgtactcgccccccagcctctaaactaatggcttagctaaccgattgcgacgagtgaaataccagaacccttcatgccaaagaaagcacttagcgcggg

SEQ ID NO: 41978 - DNA, 3445 bp, Homo sapiens
ctccgcctcccgggttcacgccattctccggcctcagcctcccgagtagctgggactacaggcgcgtgccaacatgcccggctaattttttgtatttttagtagagagggggtttcaccgtgttagccaggatggtctcgatctcctgacctcgtgatccgcccgcctcggcctcccaaagtgctgggattacaggcgtgagccgccgcgcccggccccgcaattttttgacacacagagttaagataccagttcacatgtactagcatggcacggaaaataacaagtgttggtgaggaagtgaagaaactggaaacttcgtactctgctaatggaaatgtaaaatggtacagccactgtagaaatcaatgtggcagttcctcaaaaagctaaacacagaattaccataggatccagcaattccactcgtagatatatagacaaaagaactgaacacaggtattcaaacacatactggtacataaatgttcgtatcgccagtattcaaataacgaaaaggtgaaaaaaaccaatgtccagccaatggataaacaaaatgtaacaagtatatccgtaaaacaaattattattcagcccgaaaaatgaagtactgatccatgccacactgtacatgaacctcagaaacacgctaagtgaaataagctagacacacaagatcctatattgcatgagtcccttctatgaaatacctagaatggccagattcatagagacagaaagtggaatagaaggtgccgaggctggggggaaaggtgaaatggggagtcagtgcctcacggttagagtttatctggggtgatgaaaagttctggaaacagtggtgatggttacattgtgaatgtaattaatgctattgaattgtacttaaaaatggttaaaatgtcagtttgttatatacattttggacaatattttaaaaataacgcaatataccaaaaaccattaaattgcacacttttaaacattttactgaatttatgttacccagaccggcctcaactcctgggttcaagagatcctcccacctccgcctcccaaagcgctgggattacagctgtgagccatcgctcccggccaaccgcacacttttagtaggtgaattgtatggtctgcgagcatttgaataaagctttttcttttaactattgtttaaaaatgtttaaaatggcatttttttacaataaaataaacgtatgtttaaaaggcaggtacacatataactgtgaccaaaaaaaattagaaaaaaaaaaaaaaaaaaaaaaaaaaagacctgtccacgagagaacggagacaccatatcctaagcccagacaggaaccaccgcccggcttattgctcacattagtggaggaaagagtcaagggttcagtttggggctcctgagtctaccgggtgcagggttgagtgataaaaaagcgactttagcctcgtcgcatgattaggagaatcaagaattaaatgaatggagatgtatagataagtaaatcagaggccgggcgcggtggctcaagcctgtaatcccagcattttggcaggccgaggcgggcggatcccttgaggtcaggagtttgagatcagcctggccaacatggtgaaatcccgtctctactaaaaaacagaaaaattccccgggcgtgatggtgcacgcgtgtaaccccagctactcgggaggctgaggcaggagaatcgcttgaaaccgggaggcggaggttgcagggagccgagatcgcgccactgcactccagcctggaggacggagcgagatcctgtctcaaaaaaaaaaaaaagaaggctccagacgggcaattctttaatttttaacacaacaaacacccatcgaacacagcgcgggcattttgacaatggacaaaatcttgcccttgactttataatccatcgacatttggggacccataaaccccctaacctctgagaactatttagacaaatactagtcgggttttttggtttgtttttactttttaaatggaaaagtgatgattcaccttttcaaagacttgcggcttttggccaacaaacacgccatggtttactcacccacttcctctgattcttggccagacgctctaagcttgcactccctgggatagtgtttttgaattatcgtccacagttccacgttgacgagagaatttcttcgggtatggtaccgagtccacgacgatacccggcggcgacagaagggacagcataaactcgccttttcgacggtcgactggaagcacggtttacacagcgtgtggttacacgggagggtgacgggctccacgaggatttccatgcagatcccgcactggcactcggacagcgaggggatggcgtctttgggtagagccatttcaatatgttagtaaagccgactaaacaacgacacctgcacgaaaaagaatcctattttcggccaaccacagagagagcaaaagcagttttgtgtttcagtattatgcccagaagcgtatcagaattcggagaacaggagcatccaacacgtcttgaagcaaaaaggcgctctcagggtcaggcaaacaggaataccccggagggcggcgtctttgtccattttcaaggcaaacgtcccgccagcaaataaatgcaggttttcgtcggaggagcctggctgctccgcggcatgaacaccgcggctgcggctcccggggcagcgaggggaacgcgccaagtcctctcctcccctcacccggaaaggatgctccgctcagctcggggcagccgggccccgggacgcggctccgggaggaagcccgggctccggctgcagcataacttccgctttaccgctgctgcgggggagacgcgcgactcccgtgttcacctttcgggcgcctggcgcagtttcccagagctccgcgcccccgtccctcctacgcagccagaaaccctattcgttgcggcagcgcagcagccaccggacaagcgctagcaacgtcacaaccgcccgccaaaatcgcacttcccacccagaaaactgcccaagggcgaacgttcccggggcgggacttccggggtctgcgcgccgcccgccctccctcccagccggagacggtcccgccctggcgtcgcagccccgcctagtgcagcctgggtggagcctgacctttccctgagatttctgcgaggcctcagacacccctggtttcttggtttctgggtagaaaaagggaaacctcaaaacaaaatcaacagccaaacaaggccgggtgcggtggctcacgcctgtaatcccagcacttcgggaggccgaggcgggcggatcacctgaggtcaggagttcaagaccagcctggccaacatggtgaaacccccgtccttactaaaaatacaaaaattagctgggcattgtgacaagctcctgcaattccagctactcaggaggctgagacaggag

SEQ ID NO: 41979 - DNA, 1971 bp, Homo sapiens
ttactaagcatgctttaaaggctgtcggaaaactttggggccacctaggaaatcgtagtataatcaaataatgctgaaattcttgtgtgtgtgtgtgtgtgtgtgtgtgtgtgtgtgtgaggtaggggctcactctgtcgcccaggctggagcacagcagggcgattacggttcacctcagcctcgacctcccgggctcagcctcccaagtagctgggaccagaggcgcacgccaccaccctcggctaatttttctatttttttgtagcgacactgcctcgcaatgttgcccaagctgggatgctgaaattcttccccttccaagaatccatctataattatagcctccacgtcattctccctattggaatgtttaattgactaaaactacattgccttcatctgcttactaagcggtggatccagtaaagaccacatcttgtccaaaagacggcagcacttaattagcgctcaaatggcactcgaacgtttgggcgagggggtgttcagtcgcagccaccttactttgcgaaggcacacagggacagacgttcgctaagtgccgatacttagggagaacgagagggcctgaccaggtaaagacggcctccgctgcccaagctacacaaaaaggttggggagccaggacccggcaagcaaggagagaaaagtttcatgcgttgagctggagtctgaagcaaggacctaacggacacagggaaacgtcacaggaaagggagcccaggagagcagacgcggagccaccagaccagaaaaaggaaaaagcactggaaaacagcatcgaagtcaccggaaagcagcatcgaagccaccggcgccagcctcatacctgcgcttcccgctcccctcctcggcgcctagtgataacctcacccgccggcgcccaatcccgtcgagcgtcaggcgtgaggcggcgcagccaaacagtcacatccggggccgagaggaaccgcgaacgagctgggcgtgcgcccttgcttcgtgccctcaacccgcatggcggagccgctggcgcgccgcggagaggccgggcgagtcgggcggtttcggcgcccgcgctgagccgcggaggaggggcggaggacgcccctgcagccggtgcgtctgccctcagtgaggcggggcgcgcggcggacgcccccgggcaggggcgggagtggtggaggcgccggcggttggcactgacaggggcggtgagcgagccgctccggtctccgggcgaggcttggccttccgagcagagacggcgggaagcggcggcggcagcggcggccctagggccggctggtgaggcgatggcggcgccggccccgggggctggggcagcctcgggcggcgctggctgtagcggcggcggcgcgggcgcgggcgcgggctcgggctctggggccgcgggggccgggggccggctgcccagccgggtgctggagttggtgttctcttacctggagctgtccgagctgcggagctgcgccctggtgtgcaagcactggtaccgctgcctgcacggcgatgagaacagcgaggtgtggcggagcctgtgcgcccgcagcctggcagaagaggctctgcgcacggacatcctgtgcaacctgcccagctacaaggccaaggtgagagagccccgggccacaccgctgcccccagtcccgctccccggcgtcgttcgcggtgtttctcatccgagcttctgagtcagaagcttcgcctcaccagcccgcctttccacggctccagtcagtatcttcctcacctccccccaagataaagattctcttttctttggatcgaagttctgctccttaacccatcccacttccgtgatccacttttcaaacaactaggtagtttgcctcactcattcaacttttgacagttttccccgttaaagacagaccaccactcttgtaccttttaatgccctcatcctacttttctccccggcctcca

SEQ ID NO: 41980 - DNA, 1690 bp, Homo sapiens
tcttttttcttactctctctttgctatctattctcacagctctaaatatgaattatttctctaggtagaggccaagcatgagtcagcttctcccaagaatcagttgcctgggcttcgagacagttttctgccgtattttgggtaattgtagttgccaggagtctgacttctgagggtgtcaggtgccatttgccgttaagtggagatagtaggttgaacagggtgggactaattggggccagttttgaggaggtgaatctttagtgaaatcgccaagaacacagtggtgaggacctggcagagaggaggagattccaaggctgggggaattgggtagtggcgtctgggcactgggtcctgtagaagggaattggcgagatgaatgagcagggcttcacaggtgtgactgatcttggtaaagacggtgagaagccgtgaccaggcagggtgtgcatgggagcagtgaaaggtctaaaattcagcctttgagctcagtgctaggttcatgctagtaattggttccgataggttaagcttcctctggtttgccggtgtgagaagaaagaaaaacctactcctccctgtttccgcctcaccagcttcccttctctgccagccccaccctgcccccggcccgtgtggctaaactgcccaactgccgattaaaacccgcacctcccaacatacctcgcaccacccagaggccccggtccccgccattcattccgctcccggccgggagtcgctctagccaatcaccttccaggctcagggcggccgaggcagggcctctgcctcttcggggggcctctccctccccctgcccctgattgtggctgaactgccaccgcttgatagcaaaccacactcggcacaggaaggagaacagcgcccgcggccccgggcctccatgaaatcagcaagggcgcgctcctcccaccgccgcgctgctgagcctcccgcctttccttccggtcgctcgcgcctcgagaggcgccgcagggagccctctgccggtcccgcccttcgctgttagcgcttaggatctggtgccttttcacgtgggggcgggtgggcgggaggcgagtctggggtcttcgggccgggcctccgctctctggcagtttgcaccttgctccactcactggcctgcggtctgtgttcactcctcctcctctcccacgtctcaggaacctgcagctggcccccgagcccgcgccctcccggttctaggaattcaccactttcttgcctttgtttgggtatcttttgtttggagccagagccggctccaaggaggagctgccggagggtgctaggctttttgcagaggaagtgaggagcagagtgatagggcgtgaagtcagagggagcagagaaggggccgaatccagcggggcccggatcatgcagggcccggagcctgtggtgaggactccgggatttatattcaccaattatgagaaaggacttctcggccgggcgcggtggctcacacctgtaatcccagcactttgggaggctgaggccggcggatcgcctaaggtcaggagttcgggaccaccctggacaacatggtgaaactttgtctctactaaaaatacaaaaattagccaggcgtggtggtacatgcctgcaatcccagatacttgggaggctgaggcaggagaatcgcttgaacccaggaggc

SEQ ID NO: 41981 - DNA, 1381 bp, Homo sapiens
tcctctccccagagatcagtaactgcccacaatcttgttaggaagccccacagcacctaagggtacgaatgtccccaaagagtagacgattctctccctactcacgtctccactagtgcaaggctggctttcttacccttagaggaatacagaaatgacatcgtctgcaggccaacgtctaaacaaccaggagtgggtttttccacccaaccgcagtgcacgcaaagcccctaagccgactgtgagaccgggcggagcctggcgctgcaggaagaggcgacagccacagccctactgacgagcccgaggggtgaactccccggcgggaggcccgaaccctcaaacaccgggaagcggaggtgggggccggctgggggaccggtccaccggctcccacctcggcgtacagggattccaggtcccggcgagcgctggcctagcggtttccacagcgacaggccgggcgcgcgtccccgcgcgtgcgcagctcctcgcccgcccccgggtgggcggagcaaggaacagctgggcggggacgaccgccccacgccgcgcgggaacccttgggggccggggctgcaggcagctgggaaccgcgggcgctaggcgcgcgcacccagcactcggtcccagccgataaatctggggcagcgcgcggtaggagctgcgggcggccaggccccttcctgcgtccgcacctggccccgcgcgcccctctcgggcgtccggcttccggcgtcctggcggctcgggtggcggcggttcgggcggccgcctggctgctcctcggggcggcgaccgggctcacgcgcgggcccgccgcggccttcaccgccgcgcgctctgacgccggtaaggggggcggggcttggggggccagagcgtgggagcggtcccggctcccgggcctctcggcgggttgcggggatgtggggacccggcgcgggacctagatcagtagggcgagccggaggaggtcagacactagagccgtgtgccctccttccctcccgtgcgctttgctctgcggcggatcccgggtctccgggagagtcgggctcgggccctgcggttcccaggctggactggccgccctgttactaaagttctgagaaggaaagtcagccgtcaagcgtcttgggatgctcttgagctgcacgaagcttctgatcaccaaggggccaggcaaggccttagcgccctgtgaggcctgagaatccccaaactgaatgtaggactccgtggcaaactgctagttgttcgtgcaagtagtagttggcaaactgcttgtactactgagacgggcaagtgcgggaataattacaataaagggtaaggtttgatgggaggaaagcacaaaccctacaagtttctccatctg

SEQ ID NO: 41982 - DNA, 2704 bp, Homo sapiens
tccgtggataaaatagggaagtcttaatttgcaaggaggtgatacttaatttagcagcaaaattttagttaagaatttgtaagcaaaaaagcaaaatggataacggatgaattcccagaaacaaatgtcgcggagcagatgtgtataacagcaatcgtctgtcagcgtcttccgtcggcagagacctgcttggagacaatgctgaattaaatgagggactggctgctcctctcaatacaaagactacccaaggaataaaagcaacgtctatcaccgaactactactcccagcggcccccgcgcgggcctgcccatgggaggtggcgctcgtctccgccccggggagctccggcttcggggcgggaggggttctgggttctggccccgccccgccccgctccccgccgtcttcctcccccagggttgtggccacgcgcagcggcggcggttgttccgcttcccctccggcccgggccgtcgccattgccgaaggctccctcccctcccctccctggcgtgcgcaggactccgccgccgctgggcctagcggtagcagcggctgctccagcgcggcgtctcttcccgccccgcttccccttccctcccctcccctccccgcaccgcgcgctagcccggggcggctccgcagcccgccgggagctctgaccgaggcgcctcgctggggcggggaccttgccttgcccggggtaagtgcacacaggccggccggcgcgggacgcaggccgggtctcttcctcctccttccttctccgtggcctggcgggcgggagcggcccgggacggccgacctgccccgcgcggggccggggagccgccacctgcgtgctgggagccgcagctcctggggcggtggctcattgtctgctccccagggccgttttcttcgctggctttagccagaaatgggaagctcgctgggctgcggaggtctgactcttcctggacccagccctgctctgaacctcgcggcaccacggtctctgccgactctcggtcttccctcccctcgcgtttcaccctcttcctttgctccgttttcttaatgctggaccagactctccggttttgttccttgatttttcctctcactgattctcagcccctgcttgctcgctctctgttcacccgtttcactgctcaggaatattgtcgcgagtagcttgactgttttctcagctccagcctgtaacctcttttccacattccacattggtaaaaacgtagagcgtcccgggcgcttgagggccaccgcttacgaactgatctttcggagcttctcctcgctcctgtttgagcttcagcctaggggtgaaatttgcttctttagataacttaggtgaagttaagattggtttttcaccatgtttggctctcttggaaacacacgcacgcacaaacacaaaacgttgccactcaaccttttaactaattctttaaagataagtcatccaagaacagaagcgtgtcatcgtcagtgggtgtgaggttgtacccatccttgtatcttaattttagtagtactctccctgggcagtgtgagcgtgatttgttgtcccttgataaataacgaactccggttgatatcattatctcacttctgcgttacaggcgatgtgtcctttctttgttttcttttttaacctttataaaaagacaaaatggttaggcctaaaattaaactacgaagagctgtgttttggatcaaggttgtgcacgtcacgttttttcccctgctgtgttcgactcttccgctcttataagtaggcaggatattgaaatgtacaagaatttgctctggggattttgtttttgtagggttgtccaatagaataacactcagtaaagttacattgggatgaaggcagtgaatagtaatttttaaagcaggttaaaacttgtcaactttgccagaaggtctgtggcttctgtaaagcccactcatgctcgtgtatatatgaagagcctttttcatgttctgttaggagtatggatttcaggcaactttttcactgtgtcatcctcggctattaaatctttcgagctacttattagccaagcacattgattgacacttattacggaaagtgaacctgtaatagatgtaggtcttaaaccaactttccgatttggtaacaggttgacctaaattcagtgtattttgtgttttcactaagtagcccattgttacctttccctccagcaaggctctgaaaaaagtggctccaatactcagcttcaatactgtcatcatttcttaaatagtagtatcagttgtccttaacttaatggatgttttattggcctgagggattaaggtgtagaaaggttggagttttgttggagtttgaaacttggtctgtagatgttggcttctctgccagtttcttctaatcagcagatatttttatgaaggaagagttcctgggtatttcacttcccttagggccttggtttatggtttactctcattcagagagagatactattctggactccgtgctatttaatactaaccttgcaaacccaaattcaaaattaagtttatagttcgagtatacaggcgatagggctctctgatctttatgatagacaggttcccaagtagatgcggttaacaattaatatttcttttttttttttttttttgagacggagtttcagttgcccaggctggagtgcaatg

SEQ ID NO: 41983 - DNA, 1730 bp, Homo sapiens
agcactttgggaggccgaggtgggtggatcacctgaggttaggagtttgagaccagcctgaccaatatagtgaaaccccatctctactcaaaaatacaaaaattagccagacgtggtggtatccgcctcccagctacttgggaggctgagacaggagaattgcttgaatccaggaggcagaggttgcagtgagccaagatcacgccactgcactccagcctgggcgacagaatctcaaaaaaaagcaaaacaaaacaacaaattcaattagccgggcgtggtggcgcactcctgtaatcccagctactcgggaggctgaggcaggagaatccaggaggtagaggttacagtgagccgagatcacgccactgcactccagcctggggacagaacgagactccgtctcaaaaaaaaacaacaacaaaaaaaatctgtggacacagtatggtaccataaatcagtaaacattgcctaatacatgcacagtacctgcctttgaattgcttgaggtcttaggtaggaaaagcagataaaataactaagggtttatagttgtaattcattgccgaagaatggcccagtatattagcataagtaagaaaaaagagcctgagattcagagttgttaggaaacttgagttctagtcttagttctgttagtaattagatttatgtgcctttaggctaaccacttacttttgggtaagttggttttttttcacatataaaacaaggcagatggactagatgacttaatcctttacaatcttaataccgtgtgaatttgttttcctgtgtaactcgagtttagaggatgtgagggatctttttgggcaaggactgacctcaggaaggaaatcattttcactaagccttgaaagatttggttgggtagataaaaggaaaaagaaaagctaagaatgcagaaatagatacataaaaattatttaggccaggaaagtctttggtgtatttgaggaatatgaggcataggattgacatggtgcagtcacgtgagatgaaattgactcagcagttcagagttcagtggccctaatgccagagtttagtcctcagtctgtaggttatgggcagctagtcaggacgatgtgtagccagggagagtcatagcacttgttacctttagtcaacttctgcatgataattaaggtatatttaaccaattctgacttctttctcccaacaaaaaaactgaacacagagaaaccctctagggagctagttattaggtggtgcaaaagtaattgcagtttttgtcattacttgtaatagaaactacttttgcaccaacctaatagaatttcttccactcaacaacaactgaaaacatagagactgagagaaatccagagatgatgtggtaaatccccagctaagcagctggtagaggcatcagtattgtatccaaggccatgcttatatttattgagatctagtcactcgtggtatattagaattgtggcggcatggttgtcatcttgaataatttcattagggacatctctgactcaagtttactattaaattagggttttgttcaggcaagtattgcttaaagggtacgtcatgttaattggaatttccttgagacagctcattcagcatgatagtgtgtagtcactaaaaagttccgaaaaacacaacgctgtggttcctctttagttctattagactgagtatgtacagaacataagttactgcatagtata

SEQ ID NO: 41984 - DNA, 1400 bp, Homo sapiens
ctttccctctgctcctgtccataaccagcattcccttccctctcactgtgaccagatctcttttaagttacatgcctagagaggagatggacatttgagcataaatccctcattactagttaaataagtattattgtgtttcctaccaatactaaactagtagtatctttgtaaacaaagaagagcatacggtaacatttccagtcttatatgtatagacttatcaaacagcatgatttttaactctttgatattagaagaatcttctggttaaacacagcatgttgaccacatacagaagcattctatttactctccctcccaagacccaactaaaatgacagaaaaaaatatatatatatacacacacacacacacggtcaaagagaaaaagagaggagacagtattgtgaaagaggcttcagtacacatttggaaggcagaagtggtggaaaattggcacctgactcagcaggacagagaaacacataacctaagcgtttgcagaggggaatctgtgagaagggaaacaagtttcccttgtagaaattctggaagctcaagatttagaggcacacgacactgtgtcggagtgggggtaggatgcactacacatgctgaggagaagggggattagttgaaaatcaacatcgaaagtgtcaaaggccccccaggactcctcctttacaccccacacatccatgtaagtgttatccccatcctccggaaggaaaaaagaataaactgggatttacatttatttccagagaatttaaaccacagaagcctctgttcttatcaggggagtcaggaaaagttgaagcaccagaataaagcaggtgacttcatgcaagtcagcattttcaactcctttccccatcctgctttcagaatacctgcagcctgactcacagcctcagacaggagattggaagatttttctctggataaacaatggcctggggaaaaaaatactttaggtaccttgcatgcatgctgtccttatctttagtgttaaggttggcttaactcccagttagctttttaatactttctatatgagtagacagtacaggatcacccgacatttatgaaaaaccctttataaatgagagggagagtccaaaacaatagggataaaaacaggaacttaaaagaaatagacagtgtaaggagaaaaaaaaccccaaactgcagcctgtgcatacacacatactgtataatcgtcaaagagaggagatagaggaatccatgaaacaagaaaagagttcgcagagaaagaatgatcagagaacaatggaaaacagttcttggaatatcaacatttaaaattaccaaaacaaacaaaagatagcaatagaaagaagagtggaagataatcaagaaaattctccctgctg

SEQ ID NO: 41985 - DNA, 1568 bp, Homo sapiens
cttctccaccatcaatgcatatccttactgcctacacaggctctcagcaacgcactgttggttttccattgcagtcacctccactttattcttccagatcgagtatgttcaaaactgaactcatcttccgccataaatctgctattattatgtttttgcctgtcaggacatcggcttataattttggaaagcattcacagttggggcgggtaagacatagataaagaggccaatcacaataccaggggtaagatcaataggaaaaccagagagcggacgcctgggccaggcctcacaacgtccagagctggaatgggtcttttgctttcggcgcaggggtgacgggatcagcggagggtaggggtgtacactagctgcggtctgatttagcccttttaggttaaaagctggagaaggggctgaagtctcaaacgcgcttagcagctcctgaacgcggttcccatcccagcgcgttctgagggaggccggggctaaggacgcggtgacgggcgggggcggggcggccccgggtcgggaggcggggcgggagcgccggaagcgggcggtgccaggcccagcctcgcaggcggaagggcgcggaggaggtgacgcgataggccagcgccggcgtcgcggcagccgcttcagaggaagctcggcggctgtggccgcggcgaacaggccggacgcctcgtcgctggcggggcttcccttggagctgacgaaggcggggtccgcggtccaggctgctgccgcgacggggccggcggcggggcagctgccaggaacgagggtagcaggtaagcggggacgcgggcagacgagtgacggactcagcgatcgcctggcggggctggctggggccattcccgcgccggtgcgccacctcagcgcccggtccggaggcctcgagccgccctcccccgcccgagctggaggccgccgtccgtctcggccacagcctccctttccgggggaggcgagcgagctcgtcccgaggggccgctgccctgcgctctcgctccagccgggctgtgcgtcgcaggcaccgggaagctggcgccccccagctcctcctgaagccgggaaagctctgagaggaggagccgctgtcacaggcctccagctccggccgccgtggaagtccggggtttttatttgcttagaccgctctgcctccttccggccttcgtttctttcctcgcgctccccgggacccttttccagagagcccggttgggcatgagcgcggtgggagacgtcttttcccttcggtctgctctgagcggtatcagcctccgctctacgccctgtggccactctgtcggggtggagggatgcggagaggatgtgggagttttggacttagagcgagaatagccgaggtgaaatcctaccctgctctctggtagtgtttttcatctcatgctagatagacatttcgacctttttcaccgcaggtaaagtgggactttcttctaccaatgtaaattataatgtttggagaattaaatgaagaaagcagacgttagttatgaaatgttttgagaatctggttaaatttaatt

SEQ ID NO: 41986 - DNA, 2384 bp, Homo sapiens
cctgccaccacgcccgcctaatttttgtatttttagtaagacggggtttcaccatcttggccaggctagtcttgaactcctaacctcgtgatccacccgcctcagcctcccaaagtgctgggattacaggcgtgagccaccgttcccagccttgactaaataaatctaagagcttccctaatttagcgtcaaacaaaatttccctttccctactctagtaacacatttcacacattctccacacttaccctctgctatatgcgccccttcctttcccagtcacaaggggatttttcccttttctgaatcctcactacaggggattatgagctcgcagagcgcagaaactgtcttccctctccctctagggtttagcacaaggatttggcgacagcactcgataaacgtttactaaataattgggttaatgagtcccgccccgccaacccccaaccgtattccatccctacctccgctgatactgaaaagtctactttgaatatctgctgcctcccctttttccacaaaatatactgtgatatagtccggactaaaaatttccctcttctgaaatccagcaattctccgatctttacatccgaacaccctcaaagtgccgagcttggcgggtccacctccccactccgaagcttccccgagggcggagtgaggactccacttgtgtctcccacgcaccgcgtacagcttccgtaacaccatcctcccagagaaggggcccgaatcgccgaagggcactgcttcgccgatttaaaaaacaaagcaaaaagccccgcatctgcatcaggaaggcgcctctgcctactctgggagagagaagggcacccctcccccttgctacgtagtcgtctgcggaggcacaaccgtggaaacgggagccgccaccaccaccaccgctcaaacctctcggcactggctggggtacagggagcggctgcgagcgaatgggataagcgagcctccagttccccgtcttccagagcaagtggcttcagtgatatccaagcgcccttccagcacccattccctgcctcgccagcaggcaccggggccccacttggcgtttgcggatttcagctgaatgggaggcgacacaatgagacaagagcaaaccgtttctcagcgttcttgcccagggccttcccgtctcgcggcccggcctccctcacccggaagtgctggtcccggtactggctcagctccacgtaggagtcgctgcgcagcgccttcaggaggccacccgacatagtgcagagaagcggaccacaatgcggcgactcccggcacgaggctgcgtccgcgatggcggaagcggaaacgcgcggaggcgagcatctcattggacccaatccgagggcggcgtgtcgtcatcaagctgcgcgggggcatagacgtccgggtcgggcgccgcggggcggaagacgagggcggcgaggtcgggttccgggcgcttggagaagatggtgctgcggcggctgctggccgccctgctgcacagcccgcagctggtggaacgtctgtcagagtcgcggcctatccgacgtgcggcgcagctcacggccttcgcactgctgcaggcccagctgcggggccaggacgcggcccgccgcctgcaggacctcgcggctgggcccgtgggctccctgtgccgccgcgctgagcgatttagagacgccttcacccaggagctacgccgcggcctccgaggccgctcggggccaccaccaggtagccagaggggccctggcgcaaacatttaatcctgggctgtgcggggccgaggccgcttgcttttccttccgggctctacagtggcatcaatgtggaggggtcattccgggcactgcgcgcggcttcgaatcccgactgggattgttggcctgcagacatcccacgcataagagcctaggccagaccgcccgctccgttgaagtcttgtgattggacaagacacagtgtggagacagccctaagcctaacagagatgaaggtaggctgggtccagacacggcacctacggagagccacggaccgaagccagagagcctttcctctgcaagtgggactgaaactcttgacagatgctgctcaatctgactggtatagcaggacagttaattccagggacgatatggatgaaaagacaaccctacagctgccaaattcctttgattaaatgtgtgagctggttgataggcatgagtgtgatacttctcaggcaagatgtgttaagaataccggggactgtaggcctatggtaataataaacacgtattttatgaaatgagtcttctgtgctgggacttgctcattgcactctatgtgttatctcactccttacaacgacattcacatgaggaagcaga

SEQ ID NO: 41987 - DNA, 1871 bp, Homo sapiens
ctgggcaaatgtcaccgctgcctccgtccccctaggtccggggcgggtcagtgcttcgagccagcggaccccggcctagggacaggtgcctgcgagaatgcggggggcggcccccagctcccctgccctcctccctagaggctgggcctgctggtctcccggctgcgcgcaaggtgggaacgcggccgacttggtccgctcgccctccccgcacccgctcctctggagccgctggggctgcgcaccgactcacccgcgcggcctccgggctgcgccttcagcgctggcggcgtcctgcccggcgagggccagggtcccaggaggccccggaggcggcgggaccgcagggcggaggggaggccgtgggagcggccgggcgcgcctcagcagcgcggagactggggccgccgccgccggcgcagggcgggccgggagggaggaggagcgcgcgggcggggccgccgtgtacgtccccgcgctcccgcccggcctggccccgcggtcccggagcgagctggggccgcgctggggagggtcctgggggcgccgccgtccctcgggccgggcaacgccgggcggggaccggtctcgccccgccgcgctcgggctccctccccggcggcccctcctcggcgaacagcctttcggcgcggggggctgttaaaccagacaccccaggccacactcctctcgttcgaaatgaccatttcggggttctccgtggcggggagctccgccgccgccgtcccccttccacgcgcgggaggtcggcgagggcagggcggggacccggagtgcggcccccggtcctgcttcgtggcccgaaacgcctcgcaatggagtcactcatgacaggggactcagcgcacggggcggctgctgagccccgcagcgatcggcgggcgtgaggggttccccggcgtggttgcccgggagcctgtcagccccagcagccctgacaggaaagggaagtcgagaggaggctgagcgaacggccgccacccccgcgggacgctgacccgggcggaccccgaggggcctctccccgcgccagagcgcggcgtgcgcggggaagcgcgacccaccggggtcggcgacggcgcgcggggcgggcgcggcggttccctctcctccgcccgtgcccgtgggatcggcgggcttgtcgggctgggagagcctcgtggaacccgggcatccgggcagcagcggcctccgagccactgtggaggcgcccggggtcggcacggcgaggccgacggggacctgacacggtcacgcggcgccggggagcaggttcgagtggccgggcgtggccgtgctgcccctccgcgttccgcaggcggcgacgggcgagcggccctagcgggctgcagggaggacgccgcgtggacggagagccggcgcccgggggccagatcccctcccgggacggggcgccaggtccccgcgagctgcggcgcgacgcgcgggcacccgtgtcccacccggtggcctcgccgctgcgggctgcgctgagagcggggtggcgcgacgcggtccctcaccgcagggggaagacggcaccaccgcgtcccggccgctggagcttcccgcccgcgccgccggcccgacgctgccccctggcgggagagcgctgcaggggccccggcgaggccgcaggacccgacctccccgccggcctcgcactcccgcgccgccgccgagggtcggcagccggatcgccctccgtgccccatagcacccctcacactaaaaacgacgactttattaagatgtgaggtattctatacatacgataaataccaggaaatttaagtacagtacatggaagtatacagttccatgaattttttcctttattttttagatac

SEQ ID NO: 41988 - DNA, 1829 bp, Homo sapiens
tggagtagagagaggccccggccgggcgctttctgctgcctcgcggaggggcgggcacggggagtgaggggtccccaggcccagcgggtgcggggccgggtgaggagacggagctcacccccgttcggaacccagaagcatggcgggtccccacgcgcagcccttcaggggcctcgggagcccgcggcctgggtcacctccggctcccttcaggcggggggcggctgctgccgccaggctcgggcgtgggtgcgggcggtgggcatcccacgggggtaggggaggcgagagcctgaggagactcgggagggggcccgtggacgcggctggcccgggatggagctggcgcggccacagtgggggacgaggcagggcacgcggcgttccccgggctcggcctccctcccagcgcacgggcggtcggaggaactggagcccccaccccggacacggtcccgcgggcgaaggcttctccccgtcgccccggtccggcctccctcccgccgccgccagcagaggccgctgtcccacgcgccgggtcccgttggcgccggggcctcctgggacggcctggccgcggcctgcgggtgtaggcgcctcggcggccaccgcgtccccagggggcctcgcggacgggggcgcggggctgcggggaggaggcgggcgggcccctcgggcgacaccgcggggcgggcggcgggaagcccggactcagcggtttcctgggcaaccggcctcctccggcgcggcccgcgcggctccaggtggcgggaggcggcggttggcgggaagggccgcgcgggcccgggggcggcgcctcaggtagcagcgccaggtggcgcccgtgggcggcggggctcccggggaggcgcctgctcccgcccacgccgggcccggccttcgcgagcttccttctggattccagcgcgaagccgccgcggaaactccccgggcgggcatcggagctctggggcggggcggccgggctcagagggcgggcgggagcaggcgggcggcgagggcgggcagcagcagcgggagcaggggcgccccgggcgccggggccgctggggacgaacgcggcgggtcaggccccgaagcccgggccgcggtggccgcctcaggcgcccgctctggggtgggggtgggggcatctttcgggaccgaactcgccgcagcctccctctttgtgctcctttcccctgctgcccttccagatgcgctctttccagaaaggcagcacacgcatgtctctgccgtggccccagatcctccccgcgccgccgttttgagcgttcacactcattacccaggtccgtctgggagacccgccgggctcccgccctcccggcccgcagcctcctggccaaaatcctcccgggacaccccacctggactgctgcgaacgggcctccacccgcctccccggacccgcagcgccccccgctccctcagggttctggggtgaaggggtctgaatagcaccaggggaggcggcagggcgggcctgtcctacctgcgcccgagcactgctgagacgacatcccttccagcgccgccacgtagtccagccccagccagccgcggtaggtggttttctctccgacaggcaccgcccggacggtggcatccttgaaaagcaggtcttggccatgatagttggaggagtcgaacattttgaacccgttcttattgtggtcgtctccaaacaggtcctggaagcaccgcaggcagacgacctgctcctcactgggctcaggcagggtcacccgcccagtgccgctagctgcaaattgctttacatacagtgacccaaagagcaagtcatt

SEQ ID NO: 41989 - DNA, 3688 bp, Homo sapiens
caaagttcagacggggcgggggtggcggtggcttcatcgtttgcattgatgagtgcgtcgcctgcggccacagcggtgccacgaactccatcccctcggcggtcgccgcccgcgatccccgcgagccgctccccgaggtcccgcctcccgtcccaccatcccgggccctgactccccggggcgccgacgcgaggggacccggcctccgtctccacctccatccctgcatgtgccagaaacccccgggcggactcccgcgcctgccggtcagtccctctgaatcttctcccgcgggggctcgggagaaagagctgctccgagcccccaaagtcttcctgagttcctgcgcccgtcgggaggggccgccctccgggagctcctctccacaccccgaggcctccccaccacgcctcagcccgcgcttctccttggagcgtcggaagcctcgggtgttcgaggccgcctcctccaagaagccttccagacttccccgtctgcgcttcagtgctagttccctccgccgtcctcactcgaccccgagcccctgcctcccccgtctcactgccccggagccgcaggctcaggcacatttccagccccgggacctgctcagccgggccgcggcgccccgggacccccgcccgcctttggctctcacagcggggcctcaccggtgcgcagagccaggagcagccacagagccccgctcggaccccgcatggcgccgtcggggctggctggggccgggctggggctgggtccgggtccgaggaggtccgcagcagccgggcttcctccctgctccccctcgcgctggcccgagctccttaagtgcggccgcgagttcccgggcggaatccacgcccctggggcgcaggtcacctcccgccgaccccggaccccgcccctgggcggccccggcgcgccccctgctggaggcctcccgctcgggcccgggcgccgctgctcggggctctcgcctcagcctcctaccccgcgttccagggtatcctcccctcctcgcgccctagaaagactccagataccgtgtctaactggagagagaaaagctcagacgtggaaggaaggagaggtcagaatcccagagtcggggctggagggcagctggaggatgatctcattcacgcagcagctccctcccagcacagctgcacagaggatctgggatacgggggagcccaggccgagcgccctggcgaggggggagccgggcaggggcatctcggccacagctgcacagaggatctgggatacgggggagcccaggccgagcgccctggcgaggggggagccgggcaggggcatctcggccacagctgcacagaggatctgggatacgggggagcccaggccgagcgccctggcgaggggggagccgggcaggggcatctcggccacagctgcacagaggatctgggatacgggggagcccaggccgagcgccctggcgaggggggagccgggcaggggcatctcggcctagccgactgcctctcctcgggcctagagacgggaggtgacttgcccgagtcaggcatccagtcagtggcagagccagctgattggaaggtgagaagaggaccagagaggaattggaggaagcggaaaaggagaaacaggcggagaaggggaggaagagagtgaagaaggtgagggaggaaagggtgggttgaccgtatttctaggacagtggttctcagtgtggtccctaggccagcaacgtgagcatcaccctggaacttgctggaaatgcaagtgctcaggccccacctccgacccactggatcgacagctctgggggcggggcccacaatctgtttttatttcggggcacagcaaatgttgagaaccactgtcgcaggcgggcaaaagcggcactccccatgtggttggggatgcggggaatgaactgaagacattgttagtcacctgcctccatttaggcctcacctttatgtcatcagcccctctgagactcagaaatgatgtctctctctgacatgggtaagtacaacagtgagagagaagacatccctctgagtttgtctgtccttgagcttgctctgcgccctggggaaggaaggcctccctcctatggggccatgaagctactgcttatcacacactggatcaggggaaggaacatgggctgggcttcaggagactcgagctctactttttaaaaaccagcgacttacagaccctgggcgagttcgtcgccctctctgggcttgttccccacatgtaaaaggtaggtcatgatggccgtgacgtgccatactttccgtctcctgtctgctctggaggacttgtgctgtggaagctgtttctccatccccccagatggatcccttcttcctagtttgcacaaaggtgccgaatggactagcaggcagccttgctagaggggctgatggcttgtcctaagaagatggaataaatagaagagtccttaacaagcctcgttctcctgaccacgaggatagaaaggctcagttggcacactccaggagccaccagatgactggcaggatctgtttgatgactaagtccttcctttggcaaaactccacgtgacgctgatagggagtgagaacaaccataacctaagaggtttgctgggctctttcacaatgaagttcttcccttatctcttgggtgtcattcagctgtgactcatcagtgaacttgctgcctctgggttctcagggattctacatcgggcccgttggcccagggttggcatgaacgcgcatcacctttgtggaatggggaagtctgcctcagcttgagccaggattctgccatttctggggtccggacatacttgggtgtgccagagaaatgggtgggatgtaatgagagagtaataagccagtagtttaacccacaaacagccttctggaggagcagaagctgaggttagtttggtccccattctagactcatattgagattagagggagagcatacagactaaaggaactggtttcactgacacttcgatcagattctggggcctaagcagctctgcctgagtctccctgaccctaccccataatatgaaataaaaagagctcttctccactcttgccaaagacacagctctggctctccaaggattcagagtgcccagaagcattgagcttgcttgtcagggaatcgaggaacagtacatcccatggagggaatacactacaggcagcctcagaaagtgggggcctttgacaggagactgagaaggtccatcagcaggtagtggctaatgagccagcaaagggtgaaatcctttacccaaaacgaagtaaaatattgtacttaggaaaaaatatttttcaacaaatcataatttctgtctgtctatttctatggcccgcaatgtctttaagaacaagccaaatagtttttattctggggaacccttggaaggctggtgtgccctgagaaagtttgggtgtgagcacctgcagtagtgtgatgtcagaggatgttacgctcttgctgactggttggggtgtcagcacctgcagtcgtgtgatgtcagaagattttacactcttgctgactggttgtggtgtgagcacctgcagtagtgtgatgtcagaggatgttaccctcttgctgacttgttggggtgtgagcacctgaagtagtgtgatgtcagagg

SEQ ID NO: 41990 - DNA, 627 bp, Homo sapiens
actgatcattaaaagaaagtaatgtaaactttagcctgtctttttagaaggaacagaagttcatccctagttgatgaagaaaaagagtgttatagaagaatgccaactaataactacaaacagaatgattaaattagggagaaaaataacattttgaaacctcaaatgtagtgatttggcaatgatcaccaatggggggaaactgactcactacaaggtgccaaagtacaaccccatacacacttcacaatatcaacaagaaaaacgtacctttcccgtggaagatctggaggtccccacctttacgcaatccaactcagcaccacaagagcaacaacctgatattgtgagcctcctgatgatgcaatatgaaatacaacactgtgtatcactgtgaggtctgcttaccaaaaacgagtctcatcaacctttacacctaacttcctcttaccagaaatacaaggattagtggaatgagttaaataacataaggaaacaaatgagacaaataaagaatgtgtgatagtctataaaacaactggcatggtctcttcaaaaaggtaatgtcatttaaagggggggaaaagaagataaggaagactattctatcagattacaaaagactag

SEQ ID NO: 41991 - DNA, 3121 bp, Homo sapiens
tgttaagaaagtttaacaaacattttcgtgtttccatcttctgaaatgatatgaggcttagattccctaagcaataaagctaggaccgtgctgtctcatcaaagttacacaaacgattctaaaacggcaatcaaaaaactgacacacggaaaagcaagtgacatcgacaacagagttacggaataaactctcaccttgcttccggaccggcatttttctccagaatcaggaagagggcacacacctttaaaacacacaacggaaaggaaaaaggatagaatcatgttaaactagcattttcccctatcgaaatagaaaaccctcgcagcctatttgaaaaccccacgttccaaagttttaccaagtcaaagaaagagtctcaaaacgcagcagttgtctgtcaacgtggaaagcttttccttggagtgggtacccctccaaattaagaacagacagaagtcggcttccaaactctcctcgaaagcgtcccctccccaaagagcctagacctgaggccgcctcttcccccgcacaagtatccacactccccacctgctactgggtacgggcgggtgaagcgctccgacccttggcccctgagccagcagcggccgcagagcgctgagaggggaccagcgggactggccgcccgccctgctcgggccccctcctctcgcttgcctttctccttgctcgctgcctccgggctgctccagcgggggccggacagggcagcggccgctctccgcgacgccctcgcgccccgcatgcacacctccgcgggcccccacacctgcggcgccgccacaaagttccggtgagcggcgtgcgctcggaactggggtgcgccccggccagactcggagcagctccccagcccggccccgctccacgtacccccgccccgcccggggcccgcggagccgagcggagggggcgaagggacgggggaggagctcccctgggccgccgcacccccgcggcctcgtcctccttctcggccgcgccgcctcctcgctcgccgcggccccccggcccgctcgcccagttgctgccgcacgccccacccccggaacctcgcctccttccgcgcccccaaccgctctcccccgaaactttccgccaagatggcggcccccgagctggcctgccgcgctcccacgtgaccgctttcccggcgctctcagccaatgggaagtgaggaggcggctcgcgccgagccccgggctccccgcgctgctaccttcgggttggaagggggaggcgggtcgggggagggcaggggaacggaaggggtacccggggagcatcctaagggaacctcttcgcttaaaagggcggccgctgaagtggctctgagaacaaaggagttaacactcggactccacaggtggcccggggtggccctggaggagcccgcctttaccttgccctagcccaccggcgcgtcccgcagttccgaactaaacgcgccaggccgggaaggctcgggctgtctgaagagaggcgtgacctcgcctacaccagatccaaggcgcacataccgagacacccctcaacctcactcagcagtgccgtttccaactccgcggcagagacagcgcctggcgaccccgggggtagatccccaccggggaaaagccgccttaaggaggagccaactgcacctcccagggggcggggagggcggggcctgggagagggagagggaggagttcggggaggggtgccaactctgcattgccttccactccaggctgattgttaagttactcttcgtcccttagtaataggcttggggggaggggtttcattacagaaggacatatgaaatagagacactggttaacttggcaagagtttgagggttatagtacaagatttttaagcctaactgattaattccgagtatggtatacttaagggtgggcagagaaggtttgttcattcattcgctcattcattcattcattcatttccctcaagcctgcgtccccgcccggtcagcatcgcaggtgttacccaaactctgacggtccctttaagaactcacccggagtcgcgccctccgaagctgagccgccctcggccagcgctgcaggtttgtttcgtgcgcacctccgggcggaattaccggccggctgggaccccgctcccggtctgagccacccaggttatagaaggggaatctcgggaagctttccaagtcactgcccacgtcttcgaacttcctcggggtgacgaggacctccctattaggaggtccagagagaatttgcccaaagttaccccgagtgagtgacagaactggaaacccggagatcctgtctttcaaaaccggaaggctcttcccagtaaacctgacggcctctgactgaggccgtatccattggctaccaaagggaaggccgaggaacctcgtattgtaaccttaacagctactcagaggtatactgaccactggttttacttttggattgcaccttagaatcctaacttactgtaaggacccaccgactttagaacctatctaggacaaggaaccgaggtccggaaaaagggaagcaacttgtccaaggacatagacgctaatcagtaacagagcagccgagaactcaggtctcctagctctagtccagggctctttctcttgtgattttggacaacttgacagagaggtatgttggtatgttggcagcagacctctgtgctttcccggatcaagcatcctgggatcttgaacaacagttaaagcaacattgcatagagaaaatgggatagaagggtcaaacggtgctgaaggcagaggtgtcctaacagccgggaacttaacagagggacggaatttatttagtagtgaaagtggctcatgacaggcatcatactctcaagacttcgctgatggactgtgaatgggatggttgcagtaagaaaccattctaacaatggaatctcttcagaattcagaagaaacagggagggaaatttgccctctcccttgataacatttattgttcatatatgttcacttgctaggaaacggggatagaaataaataagatccgagtcctgctctcaaggatacacagccttgtagcaagtacacaaaggccaatgcacc

SEQ ID NO: 41992 - DNA, 511 bp, Homo sapiens
agtggaaacaacgcaaatacccatgaattggtaaatggaaaaataaaattggtacgcccatgtaacataatattattcagcaaaataaagaagtgaagtactgatacatgctatgacatgagtgaaccttgaaaacattatgctgagtaaaagaagcaagttacaaaagaccacatactgcaaattccatttagatgacatatccagaaaaggcaaatctgtagagagaaaaagtagattagttgttgcctagggttgaggagcatgggatggaaggggttggaaggtgagggctaaggaatgaggtttttttattttaataaaaatgttctaaaattaacagtggttttggactcacagttctgtgaatatactaacagccattgaactgtgcagtttaaatgggtgaattgtatggtgtgtgagttatatctcaataaagctgcttaaaaaaaatgtcaagctggtcattttattgcccttcaagaatgcagaccaggccaggcacggc

SEQ ID NO: 41993 - DNA, 737 bp, Homo sapiens
tgttcctcattagaaggataatgccattataatagctttactctgaggcataaagcggttaaatgaagcaccagaaaaggaaaagcaaaagtttgtttggtgaatcattcttttctatggtttggtgaccctaaattgagccagaaaagaatgcagctagtggcttaatttgaagaatttcccaaggaaatgatgcaatactgtacaattcttattggtctctaacctctgggatctctgttcatgaagctgcctattaacacagctttgcaagttaattgtgaacaaatcaggagagaataaaaactcaaacataaatctctgatctaaccacttcatttaggaagggatttggaagatcttctcggaccagtgtttttgattctcttctttgcattgtgaccttatactggaaactcaggtgtgactgctattattctggtcccaagtgccaggaagttcagatcaggttgagggcaagctcaggccagggtgactctgaggtcaggctattcacatgtcttttcttaggctaggatcgcttgaggaacacaaccacgttgctggggttaatagatctattctccaaagccaaagtatttggcatggtcagcataattgtactgtgtgttgcaattgggctctgagcacagagtcttgctgagtgccttatgaatttggtcatggagagaaggctggtgcaggagtgagcaagggaaactcctattcagagaaag

SEQ ID NO: 41994 - DNA, 554 bp, Homo sapiens
ctggagttatcggctctctcaggtcagagggcatggcggatttattttcgtgtcctcagtgtctagctcagtactggcacacagtaggaactcgggaagtatttgaagaatggaacggaatcccgtttatgtcatctataaagaccatcaacttggcaattgggccaaaatcctttttgggtgtgtgctctctgggtcactgtggtacaatcagagcaatgagttattttaaacctcataaactttttttgtgtgtgaagccacagtctcatcctggcacaaaatacacacatcttgttcccatgaggtcatggccaggggagattaactcagagagcctcggcaggtttccatatctgtgagtgtggcagcacgctgcactgcctggctttcctccatgctgccctgcccccgctgtgtctgcaggagcaatgattgaggatgagacctctttctccactgaaggaaggagtggggcattcacagaggaatgaactgagtgtctttcttccctttttctttttaccttgtttccgaaattttctctgacctga

SEQ ID NO: 41995 - DNA, 673 bp, Homo sapiens
ccctggcctgttccgtgttctccaagtgcctgcctgtttctctctatgttctgatgactgctaaggctacccttcctccatccttgctctgcatcactcacggcatttgcccactcgtaccccaagacattgcaggagcttgtcgttgtcatttcccctgggacctaccgagggtcaccaactctcttgctgaccagacctagagcccaagagaggcatcaagccttgccctgagataggatgtactaccatctctctgttgaaaagggaggtgatatctaaaaaatgctgcccttttgaccctgggacctcacagtagacattacaatacaaacaaagccattggagaaatcaaagctcatccttggataaggaaactgggtctggataatcttgcaagataattgcattcctgtgcctgtcctctctgcccacaagagtcaacatggggccaggtgttgcctcatgcctggaatcccagcactttgggaggctgaggcaggcggatcacctgaggtcaagagtttgagacaagcctggccaacatggtgaaaccctgtctctactaaaaatacaaaaaaaatatagccagttgtggtggcaggtgcctgtaatttcagctactcaggaggctgaggcaggagagtcacttgaacccgggaggtggaggttg

SEQ ID NO: 41996 - DNA, 1916 bp, Homo sapiens
tgagccaagatcgcgccactgcactccagtctgggagacagagtgagacgccacctcaaaaagaagaaagaaagagagagagagaaagaaagaaaaagaaagaaagagtgatttctgatttctgacaacaatgatttctgacaagaaaacaggttgctgataggagagcgtgaatttctgacaggacgctagtgtccaccacgtagcaaaggggttattcctgacaggacgtcttccacaggaatgagggtttctgttaggaaggaccaaaagcagcagcacagaacaaactgaaaaataacaggagggaatgagaccccttcaggaaatagcttcttgggtgtggagggaggtcctcaggaataaaaagccgggttgggggaggctgaaattggggaagacctggggtccagtatctcctctggcagagtggggctgagtgggctggagggagagtatctagaagatttacaaaataggtgtgagcgtaggtgactaggaaatacattctcatcgagaggcttgcaggaagggggagggagggaggagagggaaatcgggtccttcttcaatcccctagacccagaggtaacaaagccttggtttttactcagcaaattcaaaggcaagcttttgccctctgaatgtatcgccaattcttagcaaaggggacagggcaatagagaagtgatgtcatgaggctgtagttctgaggttatccgggaaccaggtcggagcctgcttgcagagaatgtagcatcgtggcagagaggaaaaggaactaagggaagcggaagtatcagtaaggagcctccgacagaaatggtaggctggcaacatcctgatcagcagcagaagtgattttcccgtgtccccgtgtccctgctcaccacccacgctcccgagagctcccaggccaggcctcacagggctccttccctgtgggagcggaggtttgccgcgagccatcgcccggcacgggacacgtctcagggggaaggaacacgttttctctcagactgagcgctcgctgaccccggctcccaggcaccacgtctaccacgtgactggattcctgcggccgccgcgagccgggagaattctaatagcgcagatgcccggaaccgctgcagcagcccgagccggaagtgccagactcctacttcccaccggatgcggggctcggcaggctcggcaggctcctccgcaggccacacagccggcggcacaggcctcctgcggggaaccccaccccaccggccagcccggtgctctgccctctctgggggtcccgaccactgtctccctccacacccaagaaggggagcctggtcttgtctttccagctgcccccacctgtcctccctctggggcttcctttccatctgaactggattcagaggacacagagttccccagctttctccgcttttgatgccctatctggtcctcaagctgtttttgttttgttttgttttgtttcgtttcgtttcgttttgtttgagatggagtttcggtcttgttgtccaggctggagtgcagtggtgcaatcttggctcactgcaaccttcgccccctgggttcaagtgattctcctgcctcagcctcccgagtagctgggattacaggcatgcaccaccacacctggctaatttgtatttttttttttttttttttagtagagacggagtttctgcatgttggtcaggctggtctcaaactcccaacctcaggtgagccgcccaccttggcctcccaaagtgctgggattacaggcgtgagccgccgcgcctggcccctcaagctgtttcgtggctgccaatgccaactgggaaaaagacacagtggtagaaagaattagagatgagacgcagacttgagaattcttttcaaattcaagagcagtagtttgtctc

SEQ ID NO: 41997 - DNA, 1254 bp, Homo sapiens
ggtgttacacttgctgctgtgttatttcgttctggcattgaacctgttgccatagaaccatagacctctccagagggaacttactttggagaatagcttgtccacttgcctcttttaggaactaaggctcagagaggccaagtgacttgttcaaggtcacacagcaacttgagacagagccaaaactggaaccagttctcgtacttttcctactatctttcagcctcttctggggtgctcaatcatgatattgcatgacccaaagaaagaatataatttcccaggtcattgtgcaatcttttcaccttggaaaagtttgaacatttggaggcctgtggggcatggctgtctgctctccaagatgacccctggtcacggaatgcagtgttcaaagctagtttctgataccatctgttgattctaagagccttgaactgggagtgaggccagcgaggttctagtctatctctgcctcttaccagctgtgtgagcttgggcaagtttcctcacctctctgagtcagaatttcccaagtgaaagacaggagtgcctgcctcacaggatgttatcatgatcacaggacagaacaaaaattaaagttctcagaaaaatgtaaaaagttagataaatgcaagttactattatgggctattaagctgagatattagagactctcagaattctctcttttcacaggtgagaaaatggaggctcaggaaacagggtcatccagccagtgaccagttcagattagcaagcaggtctcctgtcctccctgccacagccacagttggaatcacggatctcagttaaagccatctggccccaagcacgtgggcagctggtcatggggtgaaatgggaaatgccctaacctccccttacaagagtctgtggaagcagagtcccagcctcaggaacagaatcattaaatcctgctcattttaagggcagaggcagagagggaaggaaggctctgtccctcctcatccacccaagactgggattctgggtagcactgactcagaagaggcttggagacccccaagagcaggcccccgcacttgctggtggctgattcccagcctgtgggcatggatttgggaggaattacactgtgcaaatgaacacggtttttgcagacttgtgggacctgccagctctctcagtttaactagatctctgcagtgacacccaggcatgttccgcattaaatcagagctggtaatttcagagggaaacagctctgaaatgg

SEQ ID NO: 41998 - DNA, 1884 bp, Homo sapiens
ttacaggtgcccatcaccacgcctggctaacttttgtatttttagtagacatgggttttcactatgttgcccaggctggtctggaattcctgacctcaggtgatccacccgcctcggcctcccaaagtcctggaatcacaggtgtgagccatcgtgcctggcccctaactgaaaaatttgttaaagagtgtcctttcagtagcacgtttctaagatattcacagagcagcagactctattaacaggtctcagtctacccaagtttttgctgctcctgacggctcggcaagcccctcaagggccccggcgggaatttggaagtcaatgagtcagcactgtgaaggccactttgtttttggagtttactccagggtttgtggaccaaggctgagaaggggcggagggtgtaggaggtaggatgggtgattagagccactgaaacctacccaagagggaaaaaaggattaagaaaataaagatgcagctggggagtaggaggaggaagatggcattagtttaggggcagctggcttgaattaggcacctcccatcgggaaaaatgcatccaactcttgtggatgaaacattgacattcccttgcactcaaggaagcagcgcactcctgtttggctaaggagtacctctgaacctgacgttttggggcatgtgagttccatttagtttcacactctcaccactgagcatttttggttgggcattggggttggctgcactgaataagccctcctctcagtctactgggatgataaaataggtacagagataaccgaaatataagctagtggggaggagtgctctgaggaaggacccaagaaactgctctggggctacagatgaaggagagatcagttttatgttgcatcaggaggagtcctcacggaagaggtggcatctgaacagggcctggaaggatgagtagcaataagttatgggacctttagaccagtggagatcattaacccaacatacaaacaagtccctctgggactcaatccattctggccatgactcaaagccaggctgagctttcctctccagctggctcccttctcttgaagtgtgctagagaagaggcagtgaagcaacaagacacagggcaaggacaagtctggcaacccagggttgctctggatgaaggtgagaacaggggagcagagacagcgtgtccttagacaaagtcctgggtggaaacgaacactgagcctgccaatgcaaacagcagcagcagcagccaccgatggctcatgactgtgccttcccagagcgactgaaacctgcctgtgattcctctgttgcctcttccttctgtccctaggcttcaacctggcaattaaccccttcatttaggggcaaagagaagtcaaacttaatcagttttctgacagctctgatactgaattacaacagattacttagaaagataagaagtcgagatatttatttgcatagttgactcctacaaaatgatagttttttggactttgcaatcacacacgaagagtttctaggattactatggggtgtgattcagtttcagggttgcagttgaaccattgctgacaaatggcaccccttcattaagacccatttgtctcccactctgtccctcccgctgggtaactgtggaacaacagaaactctaagcctggatgaagagatgttggttaatgggtgcaaacatgcagctaggtagaaggaataggctctatagttcagtagcatagtaggtgactaacaataacttattacacattccaaaatagccagaagaattggaatgttcctaacacaaggaaatgataaatggttgaggtgatggctatcccacttaccctgatttgatcattacacattgcatgcatg

SEQ ID NO: 41999 - DNA, 1384 bp, Homo sapiens
cacatgtgttttgcccacccgtggggctgtgtgtggcccatgcatgggcacaaacagcgcaatgcagcaccctcccgtcaaagcggccccatgggaaggcggtggggcttatctgtcaaggtcaaggtcagctgtgctggcatctgaacagcagctgctgaagcagtgggaagcaatggggatagggcggagaggaccatgaagcttttccacaaaccccgtgggttctcctccccctgataatttttttttttctaaaggaatttatcctagctagttatgaaatcaggaagccaacctagagtttctggagacctgatccctttcccccagccccaaatctaatagacaacatcagatggggaggacagagatagaaaacattgtctccttagcaatagcctctgccctttccgatttccaaagaaatccacaaagcaaaacaaatgtgctcaaacaccacctcaccccaccctgcacatgggaggcctgggccctgcagtctggaagcttcctgattttcctgtgggaacagtgggtgtgctttgaggcatgctccagaatgcctggaattttccacctgtggccctccctgccagctacaagcctaggccagagtgacaaacagaaccaagggaagcatagcttttagtctaatgcacaaggatcatgcagagactcagaactaaatcaatcacgacaatgatcagaactatggtgtgccttctatgtgccaggcattcacatgtatgatacaattcaaccctcgtccctgccaccatgaggctgagacctttaccttcattttacaggtcaggaggcccaaattcagcaaggctcagcaacttgcttcttcaacctcaacaccagagtctgtgagtggcagagctggggttcgaaccaaagctaggacatctctcctccacactatgctgactgccctgtgcccaagccacaaataacatagagccatgggacccacagggccacagtcactgaagtcagcaccagatggttctcttctgcctctgccaagtgtagcctcaggacttagcacatggaaggctttcaacaaaggggaattgaactgaagtatcactaggtcatgacacaagccacacaggtcattggggcaaaggccaacaccctgattctgaacaaaggtactgatcggaggcccaggggagcccttgctggatgagtagagtgctggcctgtcagccacagaggggtgctcagctttggtcccgcagggtgagggggcaaagcaagtgaaaaaaaaaacatatttccaggccctgaaggaatgagctacggtgccactcttcttccccctttccagtgagtggtgcttaacccagggtttttttgttttgttttgttt

SEQ ID NO: 42000 - DNA, 3037 bp, Homo sapiens
ttacaagagtgtggccacatacattcttttttttttttttttttttttgagacggagtctctctgtgtcacccaggctggagtgcaatggtgcaatcttggctcactgcaacctccacctcctgggttcaagcgattctcctgcctcagcctcctgagtagctgggattacagatgcctgccaccacgcccagctaatttttgtattttaagtagatacagggtttcaccatgttaggcaggatggtcttgatctcttgacctcgtgatccacccacctcagcctcccaaagtgttgggattacaggcatgagccaccgcacctggccatacattctttactctcaagattattccccaaaacacctggacaggaaggtagacaatcaccacctgtttcatagttgaggcacccaaggcccagggagttaaatgatttgctgacagtcccaggaatagttacagtgcagccaaagcaggtcctgaggcttaggctcctggttcaatgctcctcactcctgtacagcttgcctcctgctcaggctattggactccaagttaattaggcagcaaagaactctgggaggagctgaaaatgaggggaagtgcctggagaggctggcatagggtgagcaaagcagaatggcatgttttaattgatttttgattgtgccaacgactgcaggctcctagggcaagcaactgctgcttctgagtcagcacccttgcgtgaggctcagccttcccagagtgcaggcattgctggctctttttgttctcccccgagctctttgtgtgggaagtgggtctgtacaaagcagaaggtttcttctttaattggccaaacagctgggagcctggagtcctgggaatacggtccagggtcacctacagctctccccatccttccacccagcttatcctggaagccccaagagacgcagctctgctgatgcagctagacacagctccgaagacaccacaggaagctttggaagcacaatatactttgtgaagaaatttgaaaacttcagtgctacttagcaagtttcttggcattagcagttatccagggactcccagcgggtatctacccagctggagaaagaaatattccaacaggaaggaagaaactctccaatctcactgcaggcctggatatttggaaagatctcatcaccagacagggtgaaggacactggactttgacttttggactcacatagccaatggcttgcttggcgtcttcacaaagatatctaacaagcatctcaaccctaacagaactctcggttccttccctctcatccccaacatacgcccccactaatgttccccatttcaataaaataaatggttttggcttaagccaaaagcctagactcctcctcgattcctctctttctcacatctccacagccaacctatcggcaagaccttctggctcagccatcacaaggtatctcgaatctgtccactttcactccttcttcattgctgccatgtgcttccaagccaccagcatccattcaaacaactcagttaggtctgtccgtggccaccctggctctatgacaacccattttcccatacagcatcccgagaccctaggcgacctggctgctgtctacctctcccacaatgagcttctcttccttcaggtaagaactggaatgttacatgaccctgttcaatttcatcagtgtacttagaagaatcagccattttaatactcgttcatttgtgtttgttgtcacgcctccctcatttgatgagggtggaccatgtcttattctctgctaatttgccagtttgcatgtatgttcatttcccaggacacagtaacaaagtaccacgaactaggtggcgtaagatgatagaagcttaagccaggcatgatggcacgcatctgtagtcccagctactcaggaggctgaggcaggaggatctcctgagctcaggaattttaacttaaaaaaaaatttatttcttgcagttgtagaggttagatgttggaaatcagggtgttggtggagccatcccctctctgaagcctctagggtaggatacttccttgtctcttctagcttctggtaactgcaggctttccttggcttgtggcagcataaatcccatctctgcctccatcttcatatggcaatcttccctctgtatggatggctctgtcccttctcctcttcttatgaggacgcccaaccatattggagtcaggcccgccctgctccagcattacctcatcttaacttgattacattggcaaagactgtatttccaaataagacaaattcacaggtaccaagagttagggcttttggcggggatacaactcaacccataataatgtagcatagtagacctcaaaaaccattttagaaatgaaggaacagtttcagtcaataaaaatacagtgagctcacttccagagcagcaaatacaagaacttggggctcaacatgcaggtagaaggaagactgagactgtataaagcctaagcaactcactggaaagggacatccaaagtaaccagttatttggcattgcacgattttttaggctcttagaactgaatttaaaatttttcctagtgatctcaaaacactagccatcaaggcagcctgtagcttataaatgcctctaacgataccctgtctttggctcttcacagaggagtgggcatgtgtaatggctgaagatacaaaaatgctgagaaatgatgtgactttcctaggaaatggcagggctgggatggggacccaagctaggctgactccagaacttgggtattcagaaaggaaagtgattctatacatagattccattaaacacacacacacacacacaaacacacacacacacactacaaaaaaagactctgtgatgaggaccctgtcacagaacccaagaaggatgaaatctcaggggtgagattaagtctcaaatgactttaagacaaagcagaacgtcctaagagtgtcgccacaagttctaatgaaactcagatatgggactgtaagtct

SEQ ID NO: 42001 - DNA, 1119 bp, Homo sapiens
cgacccacaaaatatctcaagattgtatttgattggctttagcttgggaatcaactttcatcttcaatggcactgctgttttgcaggacagcttttgactcgacatagaacaatatccagcagtttcttcctgacattgctggatgaacactgaggcacatgatgaattgttgtgctgagaaactctgagatgttgcatgggtcacggctgctgtgagagtgactcacagaagcccagacctgcctgggaggcaggaagggcagcattgagggactgacgggccctgggccatgacaaacagaagcagatgggatgaggcccacagggacattgtgtcattcactgggtgacctgagcattaccagaggcagacgagactgccaggaagagcactgttctctcatctggtgggtttgcaaacctttttcttttactattttcttaaaagaaacctcttctgaattctgtctgtggctttggttgggatccagccaagctttagtttaaaaataagacatattacattgttacggaattatcaagctttggtcaacgtcgacatcaacatcattagcaaaacatgattcaggtgttcggctgggcagaccctcgcacatggcaatctaaatgaataagcacacttccttctcatttttgagaatgtagctgagaagcaaaaatgaatactgatgtggatgaaaatgtaaaaggcttgcagacacataccgtgcacaccaaatttcggcacacaacattaagaaggaataaaaggtaaggtgcctgatccttcgtcacacgtgtacccacctgatggcatgctgatgcccatcagttgaggtcggtggcgagagaagggtggatttgaagggtcatttcaaattcttctgagtcaaagtggcctagaccaggagcccccgagcagagaccatggcttttaattttgaatcttcaccatccaacccggggccgagtagctaggcagtagtttgattgtagtaactcttatcttactgtcattataatctctgctgttgaatgtccctgcatcaccttctaactaccccaccatacgaggctgtcataaatgagggttgatactcacaggtgtcttcagcttg

SEQ ID NO: 42002 - DNA, 1187 bp, Homo sapiens
gagagtggtggacctagttgccatctggaatcctcagccaatgttctgaataaactcacggaggcatgcccgctggttgggtgacagcaactttcctgtaacatccccaagatcgcctccgcaccagtggcccctcagttctccttgggagtcacggctctctctcctcatcccatctcctgtctcgcttccacctgaatgtcccacgggtccctgactcaccctaaccacaaccaacacgtcaagtttccaagctgcccaagcctgctcctcctctttgttaatgattttacttttgtctgtgactcctccagctcctccacccctcccccacctactgagtcacccagtactgctaatattacagctcaagatcaacatgacagctggcagacccctaatcaagccctttacattcattaacttccctgatcctcacaaccaccctggaaaatagatcctaaattgtctcatatccggttgaggcaactgaagctcagagaggttaagcaccttggtcaatgtcacccagctaacaggcagggagggtgggatttggacccagatctctctgaggacaaagtccccacgccccaggctgttgctggtttcctctgctgggtcagttcttccttcctgtttccactagcattcccttgggtcctcgctgcctgtctcctgggctgctggagaagcctcctgggtctgtttgtctcactcactcctccacctccgtcttcaccccacccctcaggcagacccatcagtcacttcctgctctatggtctccatcccccctcaggccgacccccgcatcagtcatttcctgctctatggtctccatccccccctcaggccgacccccgcatcagtcatttcctgctctatggtctccatccccccctcaggccgaccccatcagtcacttcctgctgtatgtctccatcccctcctcaggctgacccccccaccccatcagtcatttcctgctctatggtctccatcccccctcaggccgaccccctcatcagtcatttcctgctctatggtctcaatcccccttcaggccgacccccccatcagtcacttcctgctctatggtctccatcccccttcaggccgacccccccatcagtcacttcctgctctatggtctccatcccccctcaggccgacccccccaatca

SEQ ID NO: 42003 - DNA, 2276 bp, Homo sapiens
ggcattgcctgagggggaattgccaaggcaaggccaagacatggcagagtggcagagtgtggaggggaagcagggagagggaggagagggagacgggaagaaagcgagagcaggagatgggggacacgccactgcatatctgacggatgtactgttttcttcagacctaaaagtcttcaaatccttttccaaaaaaaaaaaatgcagtatcggttaaggaagttgatggtgagaggttcatccagccctccggaatgcccggcgtgggaaaagcagcagggaaaggtctgcgcgtcaggctggtgctggggttggagcccagatccccgggcagggggtgagtgcctcccctctgtgtgggccggggcccaccctgccttgtaggttaggctgcctggccagtccagtacagacaatggaagtgattctgccccagagtcaggggggcaggggacgaggaccgccagcctgagcaagccggcctggtgcgttctctgcttgggtctccggtgatgacgcctttccacgggcattttagatcaccacaaaacccacgctataatcaagtggctttatggtgccgatgcagctgttttcctgcccagtagtttatgaaggaaaatatagcagctgcccagggaaggtgggagggaggagaatttaccgccagggaagggcgaagcaggctgcaggttctgagccggtaatcaccccagcgggacccatcctgccttttcttaatgggctggctctgcctgttaattattaaacagatgttcagcgagaacagagaacagagaggcctgtgaatggcctgttgggaggatgggagcgacagtgggctgatgaggtggcacatcagagacaggcagaggagcggcatcaccgacagccacacacgcagcctctgaggcagctgctgtgacagacagcacatccatctggctgatacaggctcagcagagctccccgcatgggatctggtcactcctgccttttccgcctccttccccagccactgaagtagctgctcctgagagctgccccaccccattctgagggaaagcagaggcctgaatgacgcacaccctttctgcctgggctgtcagggagctcaaaggtaaacttcatagattcgcttctccagatgctgctgggcggcccggctccagggagctccatcccccactgctgtattctacatgaatggcaccccgaggttgcagacagagctcctcccacaaggccctccactggctgaactggaaggatattttagtccttatgctactggaactttctgtagcttttgaccctgttggctactggtactgccctctcctccaaactttctgttgtttagcctctggggaactgtatccaacctctctgacagctgcctctccccctcctctgatccccgaacactcacattcccaggggtccctctgtgcatctccccgactcccagtgtcacctgccgtgggcacctgctcttctagcctggacattccctcagggtgggcgcttcagtgtctccctatctccccacctgctcctgcagtgcggggcaccaggtgtccaggacagagacttcgcgcctcacctcatccccacatccaagtcaccaagtccaggcagcttcgccttctcaacactcctcgcacctgacccttcctgtttcccaacacctaccaccctagttccggagtccagaacccatgtttaactcccgctttgaatccaccttcacattgccactgccatcctcagagggagattcacaagtctcacaatgaccaggccattccctcaggatgaccccttcagtggctccccagtgccattgggagaccagccatgttccctcgcctgggatccaagacctccctccccaacctcctttgctgccaccccctctgcgtgacctgacccatgactcatattgaggtgccggctaatcccaccacttgaccaacagcccccgctaccctccccgtgctcctcgaagctgtggttcctgctctcccctcctcttggaacaaccatatctgctctctgccacaatctgccttaactggcctatttccactgcgcccccatggctggactgacccctccttcctgtgctgctctgcctctctcaatgcacggctccctgattttgaactcagtcctccggctgaactatgaggtcctggggacagaatgtgccttgaccatctttgtgtccctggcacccaacccagctcctgggccagagggggcatcaatgg

SEQ ID NO: 42004 - DNA, 632 bp, Homo sapiens
taaccatacaaaacagattcattccccaaataaactacctatacacaagtccttgctcaggctctgctatttgggggaacccagattaagccaatggttaacccaaaagagacatctcagcttatctttcccaaccctgctaaggaagaatttatttgtttggtttgtgctttttctcctttatttcccaaaggccctgccccttagggcatcacgagtgaactctgacacagatagtagcaagagactcccaggagaaagggccaactgaggagttgggactgggttaaggggtcagacaaagccattctcagccccaccttcaacctttccccaccttctaccgttctggttgttgactttggaactggagaaacattcggctgtgaggttgaacacagacagtctgtggaaatcaggtcactcccaacactgcatgcaccaagattctctctccctccccctactgtaaaaccacctcctctctgttcaggtacaaggcctcaggccagggtattcagcactcagcacactctcctcaacccagggaggtactgtttgcaaattagcacgttagttttgggagggaaacagtccttagtccctgccttcaaggaggtgtgaaaagtaaa

SEQ ID NO: 42005 - DNA, 1042 bp, Homo sapiens
aagatacaaaaccacatgcttattttgcctaattctttttccaattattttcccaatgaatacatattactttttatttatccctattgctaccagggacagagcctgctatttcaaaaagaaaatctaattgcaaagctgctgcctctctgttttgggttaacagcacctctttccaaaggcctattcacgcctccccaacctcctccctttctaccaggccttacccatggctcaaattttcttctgctgaccgctctcagtgacagcccacatgttcaagttcagctgtctctcaccttagctggcaggtgcctcagcactatcagcatgcaggatcctctccaggcaagtgaccagccggatcctcttaattctcagttgacagggcgtattgacacccctggaaaccttttccaggctttctgtgtattctttcaatgcttgcctttagctgagaatggaaattctcacatatgtgtgacaagtacagtgggggtcagcggggggtgggccttgggatgtttttgtgtttgtccttgcacaggcaaagttcaacagctttgtaactgtttgttttaagcttaaaatgtctgtgagtttggccttctgacaagcagaggatcaaggacagatgctgctgcttaggaatacattaaaaatcaatgatgccaaagggcagctcccaccaactccatctttagctctccctgccaggtatgtgtgggcataaattagcaaggaaccggcctgaacaggatgagaaatcttcagagactgccctgagcataacccagaatcaggacctgagaaagatttcaaaatggccaagtggtttttagatagggccatttccaagaagaggctggagactcagggaggagttacagtttgaatctgaaggcagattcaagaaggtggggccaaagccataccccttgaatgtcacagtggaggtaaggaagagtatgtctgaaatacaggagataccataggacgtctctcagtattcccatgccctgtgattaaagtcagtggaaaa

SEQ ID NO: 42006 - DNA, 1085 bp, Homo sapiens
taaaaatatatatatatatatataaaaaaatatatatatatatataaatatatatatatatataaatatatatataagtttatgcttacatttgctaagaaattttctagaaggaattacaagggagttactaagagaagggatacatggggcagtttttacctcatacttctgtctgttcaaatttgtcagagcatttggtacttcaaaagaaaaacaataaccgaaaaatacactgaaatttctcagacacatcttgtaacagcctctagcctccatcaacaccagcaaccagaagcgtctcactgtgcaggcgttgcgccaggcactgggctacccaaccacaatcagagttgcctttccaggcccatggaattttgttcagccagtggctgccagttagttctctgtctttgtttccaaggtagcaggaaccctacagaaaccaggagaaaatatgtcacacccctaaatgtgttttcttcacagatttccctagaaggctgccagcctgggcagtgggtgagaagccgctctgctgggttacacatggcaggcccagcgccctgcaggctcagggaggagctctgccctgacccagccgaatctcacccatgcaggtggtggatcagaggactttctgtgactaggaaaacaactcaaaggtcagcccttcccagcagtgagtaaacacccacatccccagttctgagagaggcctgcagaggtggcctcttccctagtgagaagtcctccatggctagttatggattattggtctgggggcttctggacttcaaagaccagctggattaatctctgtatcccggtgcttggcacagtgcctggcacatgggtgatgtttgctgaattgccatcagggcctgtctcttctcctgccactttccacacctctgcaaagaggtaactgctcttgggctgattccctggagtttgaacctcacctctctgaagggggcatccttttgcaggatgtgcactgtacatccaggaaaacacaccagatgaggagctcctgatgactggttcacactaattttgagaacttatctcagaaaatttag

SEQ ID NO: 42007 - DNA, 724 bp, Homo sapiens
gggattacaggcgtgaggcaccatgcctggcgttaataacttttttttaatgacgatgactggaaacaatttctagcctctgcatctgggccaccatgcccactatggttcaaaactcaggcttctggattttttttctgtatcctcttcccaccccacactggtggcctgacggaatttcaacagtgtcttggtgacagcaatttgaagttgtgttagcattcggaatgaaacaggactcttaaggccagtcagttttgccactgattaaccatgtcactcctccctctctgaaccttggctttcttatcactaaaggaagaggtttggacaagatggtatgcatgaaaatgataatgttttgatgtttatcgtttatttggcctttgagccataagagctcagttaatccctgtgaaatcatttttattgcctccccacttttcacagagaaagagaattggaaaagcacagtcatttttgagcatcaagataaagaagatggccacataaaagcttctgcaaaaaccccacggaggacctagtcccttatgttacttagtgttccttatataacagtttacatgaaaaaatcctcctgaaagttagtgcctgataaatatgtccctccagaagatgtaatatgcgtcattttataaggcagaatcaactttctaacacttcatgtttttcttttgtttaactgccaggaagcttggagcta

SEQ ID NO: 42008 - DNA, 774 bp, Homo sapiens
gcttcttcttcaggaccctttccggaccactcagtcaccagcgccaagcagaatgtgctcaaagggcatctccacgctgctaaatccattctacaccaaaatgaacacaacaaaaaagtaacccctttctcaggactgcacctggaaaagggagtttaaactttacctttgcgacctggcttcttatgggcagcattgtgcaagagccgggtcagcactcaagagtgatgccacctgaaaggtcacacactcagtgcccagcttgccttccccagccctggcctggcatctcagagcccttttcttgctgtgtgaagcttccccttctatcatcccgggccctcattgctttcaaaacctgctcccaggaaaggcactgcggaagccacgtgtaccgtggctaagtacctgcgtgccctctctcagacgggcagtgaccgcatcgcccggaccacagaacagtgaggttcgatgtaaaaaatgccacacctacgggctggtggactttgggaaagtgaaagtctgaggctttgctttctcatcagctaaatgagagttgtgaaaacgacgtttgtcacaaggtgattgtgacaatgagatgagatgttgctggaaagcactcaataaaaatgatttcttatttaagatgtaggtaggtgggagatattttcagggaaagtggtgggagtgaggatggacatgacaggcacaaaacgtttttgaaagaaactgctgtatgtactttgttttttgagtttttttgtttgtttgttt

SEQ ID NO: 42009 - DNA, 1527 bp, Homo sapiens
agacgttggggctgttggttgataccaaaccctccaccgtcgtcttcaaattacccagcaactgccagtgctccctcctgcaagggcatcagttacaccaatcgttagttacctttgctgtacttgatcctgatcatatcaaagaaagtctaagccgaggagcctcctgccccacatcctaacattctctcccctcttaatttttacttgggcacaaaactcaactctgagagaattaaagttgtgaacaatactaatttaaagacaaaaaacaaacagcaaaaaccctcacattcaaatggtagattatgctttgtaaagggattttcatctactatctcactcaatcctcacataagcagcttataaccctaactttataggggtataacccattcagatccatttttattttttgagacacttaactctgtcacccaggctgaagtgtggtggcatgatcacagctcactgtagcctcaacctcccaggtagaggtgatcctcccacctcaacctcccgagtagctgggaactacagatgtgcaccaacacacccagataatttttaaattttttgtagagatggggtctcactatgctgcccaactcctggcctcaagtgatcctcccacctcggcctcccagagagctgggattacagatgtaatccactgcactcagcctaagatccatttcttaacaatgacagtacctgcacaatatacaaaaagatgaaggcatccacacagaaccagacatcttttgccaaacaaaaaaggccaaaaacaacttcttatttcctatatttccaagcgctaactacagcatcgtgaaggacagaaactgtaggactaaggcggtcactaaaatgtcatttatgattataccgtaagaaacggccatcgcagaggccaatggactgccaacttttgcccagtgactctgcatatcctatgcctcttcctcagagcaaactagcctctgatttcttagtgacacagttttcccatgtgccaacaggttacaatccggtctcataggcctgagaatcagtctgactcatgacgtgactctgcatacctgtgttctgattcattctgtactgatcttacaaggttaactgttaaagaacatcatgaggctggacgcagtggctcacacctgtaatcccagcaatttgggaggctgaggcgggtggatcacctgaggtcaggagctagaaaccagcctggccaacatggtgaaaacccatctctaccaaaaaatacaaaaattagccaggcgtggtggcacatgcctgtaatcccagctactcgggagactgagacaggagaatcgcttgaacctgggaagtggaggttgcagtgagctgagatcatgccattgcactccagcctgggcaacaagtgtgagattgtctcaaaaaaaaaaaaaaaaaaaaaagaacatgataaatcccaaaagcaaacattaagtactctatcatcctagggctttgattccaaaattacacaaagagcattga

SEQ ID NO: 42010 - DNA, 1915 bp, Homo sapiens
catggttccatataaataaatgtgaacttgcttagtttgcattgtgaggaaaaagggacaggtttgaagacgaaaaggaaatggcacagaggtcctgccactctctgacagggattcggcaatgacaaagtgcagagtttctggtctcattagcagtccccgccccaccgcactgccatgacactcgctcactttctccccaggctctcctcgccttcatccccatgctcatctctgcctaagcttcttccgaggccactcataacgcttcacctctgctcccaggaattctcacatcctcttcgcgttggccccacttgctgtcacggcaagtttcagtccgggtggtgccctgcccctgtctatagactctggcctgtaaaacctcactgcacccctctggcctcttcgcccagtctctcagctgccacctcctctccagcagtcttggatctgagcttcaccctcctctgctgcccttgccctccgcaaatcccacccaccctcctcaccctaagccggttccttcgtcccatccccgccccgcccgtccttcctctgcgaaatgcttcccaaacaagtcctccgcagccgtcgtcctcaagactcgtcgcgcccggcccttctctccgtgaccccgcgccctcccaagcctcccggggctccggcgcctgtcgctgccccgactccgcggcggctcccagcccacctgctctcctcaggcaggcgctcctcgccgcctccgagctccattcccgcgccctccggccgcatccggggcggtgaggccgcctcttcgcccaagagaggcgtccctgccgcttcgcccttcagggctcccggggccccctggggccggaggaggcacctgcggccggtgggctccgggtgatgcgctacacccgggcggcgacagcgggagggaccgccgcctgggctgcggcttctatcccggccacccccacttccggctccggggactacagcccccggcgagcactccgaggctaggccgctcccgcaggacgcgtcctccaatcccaggccgcgctcgcagaccgcgcccctccaacggcaggccgctcccgcaagccgcgccctccaatcccaggccgctcccgcaggccgcgccctccaatcccaggccgcgctcgtggattactacgcacccggtggttggctgggccggcttgcaagcggcgggggaccttggtctcaggaatccgtgccggggcgtatccttattcacccccgtgacattacacgctggggaccgaactcagtccgagatgtagactaggcaataacgctaatctaatcccggtacgattaaccccactcagcccgccctggcttaatgtccgctggtggtgtttggagacctcgagcatttaaatgaagcgctcacaaacaagagcacaggttgctttgggatcataaaagagcaggagagaaaggcttctgggggctctcggaagatggatgtcaacgcagagttttcaaggctgagtacgggttagccaggagaaagaagagaaggtggagagagcaacacggcagatacaaggaaggaagtgctggcttgggaactgcaggtgctgggtagccagagctgggaaggagtgagcagcagcatggtgtgggcattctggtgtggggaaaccagatcatgaaatgccattttaaggagtttggattttatcctgaaaacaatcagcaaatcaagcatatgcaaatcaagaagtgatttgatcgaatctgatgagaaagccacttttgacaatgtggacaggagatggggcagatataatactatattgaggtaacggtggaaggctagataggagactggtcatccttatgggggataaccaagtaatgctaagaagtgaagcgaaccagttgaaagaaacgt

SEQ ID NO: 42011 - DNA, 2155 bp, Homo sapiens
ctcagcgcagctgtaggtggaggagcgtgccagggaggggggagctgggatgcagctgcaatctacactcgcaggggtctgtcctgcctcccgaggctgcgttgcggtgggcgcgaaaggctcgtgtgtaccgaagtataggggacctgtctgcagcaggagggactcgaaggacacggaggattatatcactgaaggcataagattcagaggtgcccgcggtctagcatcccccagtttgggcggaaagtcgaactgctcacaacggcggtcctcgcgagcgcctagcacagcggctgcaatgcctcgtccgatcctgcgagggccgctaggagcgagtcacggcgcggggccgctctggtcgcccgcgagtgtcggtggccccgccccgcccgcagccgcgggtggagaccgaggacggcgccggcgcgtgcgcgctccctcggtgcggcgggctgcgtgcgcgagtgggaggtggcaggcctgcgactccggccttgtccgcgcccgctctcggcgcgacgtctccagccatgaaccggtttggtacccggttggtgggagccacggcgacttcttcgccgccgccgaaggcccgcagcaatgaaaacctcgacaaaatagatatgtctttgggtgaggggccgagttggaccgagttggagtgcgggggagggcgcgggtggaagccggcggcgcggtttgtgggggcaggggcggtcggcagcagttgccggcggagttttctcgctggtgggcggacccgagcggaggcccggaggacagccgggagcgcaggctcgacgccaggtgcccggctggaccgcgagggacccgggcgtcccctcggccgcggcagtcggaggaggggctgtggaggcgggggcaggggcgctgcgggcccgaaggttcgcagggtcgcggggggcgtctcttctccccggaggggctacggctcgccgctcgccggctctttgtgaggaaagatctgccggtttccccggagcgcgttcgcggtgggcgttatcggggagcgaggggaatggtccgaccgagccgttctctctgaagaaaggtcttggagagcccggccggggctgcggtcggttaaaccagcgcttccggagctttccctggtcgccgggcgttccaggccggcgccggccatggctgccgggcgcgactctcggggccacctccggccgcggccccggagcgtctgtcagaaaggaagcagcgctcggccgcctgtgggatgtggttgtgtattgagcgctgcctagaaaagcacagtctccctctccaggcctcagagctagctaatgggggagaaagcaaacatctttgaaggagagatgattgctgtggctcgctgagaagccaggtaaagcgtggggttcttgagcgcatctgagagggtggcgtggtttcttgccgattatataaaaaccgggaggttggtgattccattaaaatccagccctgacactaccgaggcaccagccgctgtggttagcttaggtgggctaaaagtacgaatatttttgtcgggattcaagtgatggcgttgggtgtaagtcagctctgccaggtgtttggctggcagtttttcggatatttgaaaagtacctgactagtggattccgaggcgtaccctttcccaggacggtctttagagtgataactgtcttggaaaccttctttcggttttcatttcttcccatttgtcttgtgtgtcttttgttgtggtttatctggaacgtttttggttccaggtgagatgggaactattgatttctacgattgccacagtcagaatccagtatgtgaactaagcaaatgatcagaaataataggtttggcctcaagtcttgccttgctgctggttagtagtgagcttgtaagaaatgagaaagctggggctgggcgcggtggctcacgcctgcaatcccagccctttgaaggcggaggcggaggcaggcagatggcttgagcccaggagttcgagaccagcccgggcagcaaggtgaaatcccatgtctactaaaaatactaaaattagccgggcgtggtggccgcgcgcctgtaatcccagctaagacatgagaatagctggaacccgcgggcggatgttgcagtgagccgattgcgccac

SEQ ID NO: 42012 - DNA, 1876 bp, Homo sapiens
cgcggtaggtcacgcctgtaatcccagcactttgggaggcagaggcgggcggatcacttgaggtcaggagatcgagaccatcctggccaacatggtgaaaccccgtctctactaaaaatacaaaaattaaccgggtgtggtggtgcgtgcctgtagtcccagctactcgggagcctgaggcaggagaatagcttgaacccaggaagcagaggttgcagtgagccgagatcgcgccactgcactccagcctgggcgacagagcgagactctgtctcaaaaaaaaaaaattcttaatttaatgcttagtcgactcctccactactgagggagcaaggcggagaagttttgatgcggagcgttgcctgaaagatgtttttgtagaggcattttagaaatgcccctgggaggttagagtagggggctgctctggatttgtgaggtccgttttaacttcccttgaaaagcgcatcatgtgggcgggggcaagcgcctggctgcgccggggggcaccacggtgctgcccatcacgggaaccgtccggggtcggtccgtgagcccctttctccgcccacccagcggtccggccgcgcatgcgctgagctggcgggcccgagtgttgtcggctgggaaatggcggccgcgggcttggtcgctgtggcagcggctgccgagtactctggcacggtagcgtcgggaggtaacctccctggtgttcactgcggcccaagctccggggcaggccctggttttggcccgggctcgtggagccgctctctcgatcgagccctggaggaggcggcggtcactggggtgctgagcctgagcggccggaaactgagggagtttccccggggagcggccaaccacgacctgacggacaccacccgggcgggtgagcggggcggggggcgtctctgcccgtcggagacccggcgccgggagccgccccggccgggggaggcggatgcgggggagttacagcagctcgtcccgtaggcgccgggtccggacccgggtaacggggagaagccgacggcgccagccctccgggcctgcgccagacccagagcctggggagaggcggcgggcggcggcatctctcggggaagggggccggagtgattgatggatgattttttaggctttctgaggaaaatcagtttctgccacggcggaggtagacccttgccccgccccggtttctgcaggccctttcggatttggggtgccgaatggacctgctaagacgggaacgttagcgcgagctcttcacagatcagagtagcaggggtgtctggacgagctgcattgtcaggaagggtcggtctcagccctggagttttttcgaaagaagtgttggggagcgtgtgtttaaagtggacccgaaagaagtgttggggtgtgtgtgtgtttaaagtgaacccgagagaagtgttggggtgtgtgtgtgtttaaagtgaaccccaaagaagtgctggggtgtgtgtgaagtgaacccgaacgctggaacgtctttcttcgcctccatctagttgacttacaaaataaatacgcttgtaaaaataactagagcccactttccgactcccattagtttcctcttccactcctcatgtcctccaaaaaaaagttgaagcaaactacttagaaaagatagtctaacatatttgtacttgctattcctttttaaagcattacttcgtgttatgtatgttttcgaacacaggaaagagaataagaaagtaggtattatttggctttcttagttgtggcgaacagtgtctggtgcccgagttgttcatcatcatgtttgcagtgccgtcatcactgctcactgcagcctcgacctcccgggctcaggtgatcctcccacctc

SEQ ID NO: 42013 - DNA, 581 bp, Homo sapiens
acagaagacttcttgaagcagaaaggatataacttggatttgggcaagcagaaacaagaaggaaagctattttaggcagtggtggacagcacgcaaaaaatgttaagagtataagggacatcagttaattttgccagtccattattcagtcccttctggtaatagtactccaattttcctagggaaccacccctctcagttatatgaaccccaccctggcatagggtatgccagtgactcaggcctagctaatggtcagtcagtatatagtccattgctctggccatagtgattgttcagaggtgggcccattttgcaatcagcacacatgagtaactgaattttttgttgaactattgagaaagaggcatgctttgagccctggggttgctgagacaataggatgttagcctggaagttaccaataagtgggaagcagagccaaaagatggaagttctgatggcagtgtttgtacctttgggtcagccgccatgcctaaagtcagtgctatctctgtactttcaaattatgtgagctaataaattcttctttctgcttaaggtgagtaaaaaagttgttg

SEQ ID NO: 42014 - DNA, 1846 bp, Homo sapiens
aagtgttaatgtggcagcttccctctgttcatataatgatgggtttacaaattattttggctgatctcagaattatggtattctgaatttattaatcttcgaacctgtaggtagtctcttttcagaaccattgaattaagctattaagtgagataccagaaggtctcccaaacatatctaattttatagacagtttaaagcagacaagtttgtaatgttaggacaatctttattttgtatcttttcgaaataggatgtgagctgcaatgaaattcaaactataccttcccaaattggtaacctggaggccttgagagaccttaatgtaagaagaaatcacctagtacatttgcctgaaggtaagaaactatgaaataagaaaccatgaaataattgttttattattttaaagctctctcagaccaatcaagacaaaaatgtataagggttacatctaggctgggcgctgtggctcctgcctgtaatgccaacactttgggaggccgatgagggaggattgcttgaacccaggaattcgagaccagcctgggcaatatagggagtctgtctctacagaaaattaacaaattagcccagggggctggcgcactcttgtagtcccagctactcaggaagctgaggtgggaggagtccctgagcccaggaggccaaggctgcagtgagctgtggtggggtcactgcactctagcctgagcaccagaaagagaccttttttaaaaaaacggggtggggagagagagagagagtgtgtgtgtgtctgtgtgtgtttgtgtgtgtgtgagagagtatgtgtgtgttacctccagtgtttgaaatctaatggtttatttaatagtgttatctgttccattgtggattttaaaagcctcttcaatgaaaaggtttgataactcttgacctttgattttatttttagatcttgtcaaccgatgtaattaataactcagggtagggtccctggaaatttcagtaagcatgactgtttgggggaaatgtaacatgtttggataaggggatagtgtagtataatgaaaaacatttctgcagttagcactcacttaaaaatggactttgacctgaacttaaccggtcactggagatgttcaaacagaggctaatgaaccatgtggaggtgatgtgtagagtgaatgataaatggggtgagagactgcgctaagagacgggttatttacttaggctgactacaagctctgatatatgtatttgataaaaatgattaaacattaatgaagtctagtttatcaatctttcacaaattaatgaaacagaatgctagaaaggaagatgaaaatgagagctattattttatgagatccagaatatatatttcttcctatatgtttctgctcatcacccagcagtaagagtcatcagctcatggcaagtcttgtctcaactgtgctctcatttactttcccctgcactattctctagattaatttgaatcaaatacagaaatttattggtaaacattccagaaaaacaaggaatcttctcaaggtattttcatgacagtgcttttctgggttctttgacaaaatatgacttacagtgtacaatcaatattttgtttgttttgagacagggtctcactcccattactcaggctagagtgcagtggcacgaacatggctcactgcagcctcgacctctcaggtttaggtgatcctctcacctcagcctcccaggtagcttagactacaggcacttgccaccatgtcacctactttttgtatttttagtagagacggggttttgccctgttgcccaggctggtctcaaactcctggggtcaagagatcca

SEQ ID NO: 42015 - DNA, 848 bp, Homo sapiens
caagcaatgctaggtgacttcaaagcaaaagttgcatgggtcaacagtagttccctaaattgatagggaatattggtaacgtgatcctcatttttacttttgtatgcacaataacgctttggttccagctgtcacacacagacctggaacttcatcagagaagggagcagttagtagagcgcactcggagagaggctcagcttgctgccctgcagtatgaggaggagaaaataaggaccaagcagatccagagagatgctgtcctggactttgtcaaagtgagtcgtttgaatgatgctgttcaagctgctgactggctaagtgcttatttgtttggtcaggcccgttggtttttattgtccattaaaatgtcgaccatttttctctctgtaaggaatcttgactaaatagagtgtctcttttacttgtgtctatctgcatgaggacagaacaagtgattatcttgttaacggtaaatctgtcattggacatgtcactttactatccagctgccatttcctcaatttctagtgtcatagtaaagatcagtaagatgaaagtgaaagtgctgtgtgaaccataaaaggcccgtgcagatgcaaactgttactcagacctctctccagcttcctcgcttttgtaaataacaaaagtttgctagcctcacaggcttaatcctttgcaggaactttgatttgttcctttctgctctccacacacatccaattaacaacgccattaatatttcttaacgttttgcagcctctatagtagtgcctgaaatgttgtcattttattttacctgtattgcttatctttttgttctgaaatcgtcattttttcttcat

SEQ ID NO: 42016 - DNA, 1909 bp, Homo sapiens
aggttgggggaggtggtctcactatgttgcccaggctggtctcgaactcctggcctcaagcgatcctcccgcctcggcttcccaaagagctgggtttacaggcgtgagccactgtgcccagtctcatttcttgaaagagataaataagtagaggggagaaaagaagtatagaaaaagaaaaaagagaaggaagaggtcctgctgccttcgtgctcccggcctttctcttccatgctagattaggatcccagaatttccgttctgtctattgctgtgtgtatcgagagaaaagcaccccactgttggcaaatcaatcttacagtcaatcattctttaggcagcgggaacatcctccactcagggttcgcctttccacctacggcgtccggggacgcaggaagtaaactaagttgtttctatggcaacgcacagctttggcggatttagctggctaccattttgccttcccttgttcccaagtagtacattttgcagcctaccaagatgaaaggacttaggaaaataattgtaagagtgctattgaatgtggcttatttcagtgcgaagccgatttccgaggattgtttttctggcgtttggagaagatgcctaaattgagggcggagtcgaaagatgtttaatcccacaaggccacgcggcggggcctcgtccttctcttaccgccatcttggctcctgtggaggtgagtgaagggtctgctgctgaaatttgggggcaaataaccggagtaggtttgttcctgtgccttggcgagtcgccggtgcgtatcggagtctctgccagccattgatttctacgggtttcaagaagagggagaacaggatggaggagatgttgggctgatggtgtttggtcccctgacacccggagaacggctgcccgggttatcccagttaaattcctgggcctgaacggagtgaaacgatgtttttgttcgtgtgcagttgtccatgaggcagtgcttccttcatccgtttcctcccagtccataccttccttggcttgtctgaccagtctctttcctcagcttttctcccccagccattgcataaaagtcttacgtgtgtgtttctctttaaggcttcatttcttttcctgagtgttgcctactgataacggcatgcattttctcaggcttttctgagagtcatttttgtgactcctgtcccttagttttgtcttcattctgaagtttgcttagataccagctgttctctgaggtttgaatgtcttgccggaccctgcgtttcatatggatgttctggcattgttgtccccgaactcctacatgaaactcccatccaaaaggaatttgctttaggggcttaaacgagaggggacgaggtgggaaacttgtgtggcttggttttaaactaatctttttgtttgttttaaggcctgctgggaacgggacttctaaaaggaactatgtctggaaggtacgcgttttaaatatagttctttatttttgtgtgttagacgtgaacgtaaatgcgagcttaaaattggcaagaaaaaacttagatgtttgctctgagtaacttttgggtgggggtgattacaagtcagattggttttttgaagcttatgtttcatgttgtgtatcttttgtgtcttaggctgtggtccaaggccatttttgctggctataagcggggtctccggaaccaaagggagcacacagctcttcttaaaattgaaggtgtttacgcccgagatgaaacagaattctatttgggcaagagatgcgcttatgtatataaagcaaagaagtaagtttatgacactggtaggttttgggtttttgagatctgcctcattttcttttttatataacggagtcttgctctgttgccgaggctggaatgcagtgacttggtctccctca

SEQ ID NO: 42017 - DNA, 2336 bp, Homo sapiens
tcaaaaaaaaaagaaacagcctttcctcagcataacactattgttacagccaggagcttaggatgactggttccattctttattcacaatagcaatttatttgtggtattgtagtggaaagggcacgtttcctaagttacaaatgtggtttggaatcccaccttccactagttgtgggatgatacacacatttagtgagtatttacttgtaaaatggtaatacttaaaacaccaccccatcctcgtagctgaatctccacccatagtttgtaacttgaggttttccttctttcctactccttcatttcccagtatagtagcttacctattcaattcccgttgaatgacttccagctcagtgagttcgtaattttacttcttagtgtcatgagccactgggatttgtcccaatttcccattttgtatagttcctcacggctcagtttcgaaggcaaggtttccttaatggccaggatcccccttatctcaggtgcagtggcaattcttggctggaaactaaaagatggagttgagtaaaacagtaaacggtgtatcatagatttttataggaaatggcgttagttaagtaatgggcctaaagttggtgactcaggataagtaaatgaaagtattccactcaccttttcatacagaggactacactgaaagattttgcagagggttgtatgtacgtctaaacacctggcacctagtaggtgcatgtcactttggtaaatgaaagaactgaaaaactgcctcaagacacccacatacggccaacgcccgctagcctttcttcctcccacagccccactcacgtgggcctccaaacagcatttattggccggcttcgcgccacgagacgcgatggacgtgatcgccgccctcatcttctgcggcgaacttctagcgggtgacgctgtccaatcggaaagcgcctttccgccggctgggccctccgtctacccccagcggcgaggggcggggccggcgcgggcgcagaggcgtcacgcactccatggtaacgacgctcggcccgaagatggcggccgaatggggcggaggagtgggttactcgggctcaggcccgggccggagccggtggcgctggagcgggtctgtgtgggtccgaagcgttttactcctgttgggcgggctccgggccagcgccacatctactcccgtctccttgggcagttcccctccctgccggcaccacgtcccctctgacactgaggtagggcgacatgggcgggagcgggccctctcagggtaaagtcacccagaaggagcaggcgtaggagatagtgactgggagaaggtgtcctggatgagaaagcgaaattggggcagagcctgactcttacaggcctgggacccgctctcagctccctacaccctgcaagttggctgttaggcgctcagaacagtatcacttctgtgcggagggttgtgcttagcagtagccctcgaggagtggttttcaaacttgagcgtgcatcacagtcacccgacgcacatggtacaacacggattgccgccctcagtcccccacttagtgactcagtaggtctgggatgagtccccagagttgacagtttacgttcccagctggttggtgagatatgcttgtccggggaccactttaggaaccgctgacctgaagtttcgggaagacattgaacggagagccagatagaggcgttggtgggacgttgggggctcactggagacaaaattcaggtttcttttcacgttatgtcgtcactttgtttgctttacccggttcctctgctctggaagtgcctgcccgcctcccatcccatttttctctctgcttaaattctttgtctcatttcaaattccctaacctcaaggcagcctgctgaaaccaccacagcgcaatattcttttcattaaaaagtacatcgtgtctgtactccctcctggcatttaaccaagtactgctatgggataatggcttattttttaggcgtatcttgcctttgcagttagattataaggttccgtgggataaggtttgtgtttcatactttgattccttcacagtatttaggtcagaggtgggtccacgataatccatattctttgagaaagggagagtacctggggcagggctgcatgctgatacacctacacatgttcaattcagcccagaaatctaaagacactcatttttatggtaatttcccaaaatgttacatgcatactcttcataaccaagtgagccaaaatattaacttcggagtttatagcttttttgcagcttttatcatgctgcattttcgctgaattctttaaaaaaaatttcccac

SEQ ID NO: 42018 - DNA, 826 bp, Homo sapiens
caggaccgcccggcccgggcgtctcccgaagctgaagagcttcctcatggggcgacttctcctcagacgcccaccaccggctcctgagcccccgcggctcctcgtggcctttccactaaccctaaccccaaacccgagatgtagctcagaatccgcgacccggccgggtccaccacagccttcagcagcgacactcgcagcctctgacctctcagcccgcgaagccgttaggcgcgcgcctgcagctcagcgcccgcgcggactccggaagccgctcccaagcccgcgctgccggcagggggcggctgcggctcgggcgcaggcgccgctggcttgcgggttctcctgggctcgcccgggacgtcccgtagtcgcaggcgcgcaacccgcccggcctgagggcccgcctggccgtgacccccgccccgctcctcctccgaagagagatcggggccgctggcaggggccctccgcagccaccagggatggggctgtggggcagttcccgccccggtgcagccgccgccgggcagaccgcctggcttggctgcagccgcggcatctggctccggttctgcgaggctgggagctccagcgagcttgggagctgccaggcggctgctgcgagcaggcagagggcgcctggagcttgggccctcaggcggcggagcatggcctgggcggcctctggatcgcgagtgcacctggcctgagagcctgccaggccctgcccccgctcggctcctcctctgccggagctccggaccgctagccaggggccctctgcagccaccgggaatggggctgagggcgggttcccgcccct

SEQ ID NO: 42019 - DNA, 1096 bp, Homo sapiens
taagtgtattttacaagtggacataaccttacacacaacaaggttaaaaaaaacacccctgggctgcgtcaggccaagccgggagagaaagccccgcctgaaagggcctggaggccccagcctgtcactcttgccacatcagtggagtgtatggttgcaaattctgttactcaaggcccgagggcggggattggagtaatatccaatcagagtgtcggaatgagaactgcccaatcaggcccgcagccagagaggaggggttggcttccgggatctggcgcggcgttttcctctggctcctgcgagggcttggtttagggcttcagctctctgcgttctcggctccgggaggcctcggtgattcagccacagcctctgcctcccgttgctctgtgacctgagggtattggacaatttgtagctaagactcccggataccctgaagtcgggaaatggtgagtgtgcggggcagggcgtccggaggctggggaggcctcgtcggaaccggcgggaaatggcggcggcgggaccgagtctgcgaacggagtccccgctgccgcctctcagacctcagtcccctccggtgacggaccgggctcctgtcggtccccgcacggcggctctggcccagcctgcggccctccttgtgcagttctgcgcccgcagccccgcaccttccctgggccgtggggtgaggaggagctcatctggaagacgccggcgcccgcgtgcgaggtgcccgcctgggaggagctgtggtccgggggtccggtccctactttaccctgttcggaatgagatcgaggccccatcgaaacaaagttcatgtgagcaaacggggtctcattaatgggacagcgtcggccgcggctcctggtttggggactgccagcgggtcttgaaggaaaggcttttgtgaggtgtgtgagcaagcgaagcaaatcacccgcccgctccaactattccaccagtccctttgccctgtgcacctcctccgcgtggctgttcctgagtaacatcttttagaatacgctggtgtcggtgcgcacggcgcttctcagttctgtgagtagttctgccacattgctgaacttga

SEQ ID NO: 42020 - DNA, 1014 bp, Homo sapiens
tccagcctgggcgagaagagccagactcaaaaaacaaacacaaaaaacctgcctcaaagtaccaggaggccagagcctgtcactctcgcctcattcagtgctgtgtatggttgcaacttctgtcactcaaggcctgaggcgggagacttacagctctatccaattagagcgctggattgacaactgccgaatgaggcgcgcagcagagaggagggtgcggcatccgggatctggcgcggcttttgcttgtagctccagccagagctcggttagggcctcatcgctctgctcccgctccttagggaagcctcggtgattctgccacagcctcagcctctgtggctctgtgacctgccggtattggatgattcgtatctaagactctgggacactcctgaagtcgggaaatggtgagtgtgcagggcagggcgtcccaaggctgtggaggcctcatcggaaccggcgggaaatggcggcggtgggaggagtctgtgaatggagttcccgctcagccctctgtcctcagtcccctccggtgagggacccgcgctcttgtcagtccccgtacagcggctctggcccagcctgcagccctccttgtgcagctctgcgccggtagccctgcactttccccgggctgtggagtgagtaggagctcatccggaagacaccgcggcggcctgcgcggtgccggcgtgggaggagctgtggtccggaatcccgtccctactttaccctgttcagaatgagattgaggcccatcaaaacatggagttcatgtgagcaaaacaggacttattaatgggaaagctctgccgtggctcgtggtttggggactgccagcgggtcttgaaggaaaggcttttgtgaggtgtgtgaggaagcgaagcaaatcacctgcctgcgccaactttgccgccagtccccttgccctgtgcgcctcctccgcgtggctgttcctgaatacgctggtgtctgttcgcatcttttagaatacgctggtgtcggtgcgca

SEQ ID NO: 42021 - DNA, 1942 bp, Homo sapiens
cgccccggccctggctaggccgacggcagccgggtccgggtggggctcgggctcggggcgcgcccctcccatctctccagggtccgcgtcctcgctgccgccaggtcccgccgagatccccggtggccccggctccagcggctgcagcgtcgccatcgccgggcagaccccggccgacctcaaagcgaccgcgcggtggggccggcggggactggggctgcgcagcgcggcctggggtgggggcggcggggcccccaggagctcctgggaaccgagggtcctggggcggtcccgccccgcacagctccgggtgagcttggggagggagacacactctcagcccacctcgccccgcccgacagcgctccgagtcctgagtcccctcacccccattctacagacacgaaggtgaagccaaagacgggacgctcacttcctgagaatttgctgcctgctgcgtggacaccaccgacctattgtttacagcggtcagggacccgccccccagacccccaggaccgcgcttccgggggaggagggtgtcctcagcaacggtgacccgcaccaaagccctcctcaccggggtcaccgccacagccggtgcgaggcccgcagggcgctggggatgcgcgaccgactcccgtgaacctgctcctcgcgcgtcagggagagctgtgcacccaactaggctctgtgaggacggactgaggtcggcctgcaggctgcggccccgaaggcaggatttgtggagagatgattcgcgagccttggaggaaggatgggctgtgcgtgcgtgggtgcgtgcgtgtgtgtgtgtgtgtgtctgtgacttttgtatgtttatgtgagactgcgtacgtgcgcgcgtctgtgtgtgcgcgcgcgcgtatatgtctgtgtgtgtgcgtgcgtgtataatttctaaatggacgtcaccttacacatcacaaggttaaaaaatgacccctgggctgtgccaggccaagcacgaagagaaagccccgcctgaaactgcctggaggccccccggctgtcactctcgccacattccgtggagtatgtggttgcaacttctgtcactcaaggtctgatggcggggagattggagccgtatccaatcagcgcactggagtgaaaactgcccaatcaggcacgcagccagagaggaggcggtggcttccgggatgtggcgcgggtctttgcgtctggctactaccagaccgcgggttaggggcttcatctctctgcgttctcagttgtgggaggccttggtgattcggccacagctcagcctccgtcgctctgtgacctgcgggtattggatgattggtagctaagactcccgaatacttcagaagtggggaaatggtgagtgtgcggggcagggcgtcccaaggctgaggaggtctcatcggagctggcgggaaatggcggcgggaccgagtctgcgaacggagtccccgctgccgccgctcagccctggggcctcagtaccctccggtgagggacctgggctcctgtcggtccccgcacagcggctctggcccagcctgcagccctccttgtgcagctctgcgcccgcagccccgcaccttccccaggctgtggggtgaggagtagcttatctggaagccgcccgcgcggcgtgcgcgatgccggcgtgggaggagctgtgggagaagctgtggtctggggatcccgtccctgctttaccctgttcggaatgagatcgaggccccatcaaaacagagttcatgtgagcaaatggggactcattaatgggacagcgccggccgtggctcgtggtttgggggctgccagcgggtcttgaaggaaaagcttttgtgaggtgtgtgaggaagcgaagcaaatcacccgcccgctccaacttgcccaccagtctccttgccctgtgcgcctcctccgcgtggctgttcctgag

SEQ ID NO: 42022 - DNA, 1923 bp, Homo sapiens
tgcatttatctcagtgagcagaggaatgactttgaatagaatgggaggcaggtttgtcctgagcagttccgagcttgtcttttcccttagtttagtaattttggggccccaagattttcctttcagaaaaaagaaaatgtggtatatatacacaatggagtactattcagctctaataaaagaatgaaaccctatcatttgccacaacacggataaacctgaggatatcatgtaagcaaaataagacacagaaagacaaatacctcatgatctcactcatgtggcatctttaaaacgaagttaatcattaagatatttaccagttgtctgaggtattgggttgaattttctttttttttttttttttgagacgcagtctcgctctgttgccaggcagaagtgcagtggcgcgatctcggctcactgcaacctccgcctcccaggttcaagcgattctcctgcctcggcctcccgagtagctgggacgacaggcacccgccatcacgccccgctaattttttgtatttttagttgagacggggtttcaccatgttggccaggatagtctcgatctcctgacctcgtgatccgcccgcctcggcctcccaaagtactgggattaaaggcgtgagccactgcaccctgccttccaaattaaaaactttttaaaacctcgtacctcgccgtgggcggcgaccgtcgcggactcgccgggaagacggccccacggagccgggaacaccgcccgctgttcgtatgtccgaggtgacgccccgctgtggcgggctggcggaagtgacgcgctgctgtggcgcgccggcggacgtgacgccactgtcgctgcgacgataaggcctggcgttattgcttagaggcggctacctggagccggaagcgcggctgcagcagggcgaggctccaggtggggtcggttccgcatccagcctagcgtgtccacgatgcggctgggctccgggactttcgctacctgttgcgtagcgatcgaggtgctagggatcgcggtcttccttcggggattcttcccggctcccgttcgttcctctgccagagcggaacacggagcggagcccccagcgcccgaaccctcggctggtacggacccctccccggcgtctccgctcccctgaccccacatcccctagaagaccttttttctgagcctcgctgctcggatttcttctcggcgctccccggtggtctcttccattatggtccccacctcagaaattttttttaaccgctccagcgtctcttttctgtattcttacaactttgtggcaaccacctctactggccccacttcgaccttccttcctgatcaccacaaagtaagctgtgtccatacctgggatccagcctctccacttctactcgtccagagctcccgcccctttcctgagcagcctttgggtcactccccgttataggcgccctttttgccccctagcacacaacagataagacccctgccgatcccctcgcgttttggtctcttatattcctccaagatgttttccctgcctaggggctaaggcctctctgcgttaggcctcttcctaggcttcacctacccagccatatacagcaagtaaaggcgccctggttctggaccacttgcacacatcgccagccgctgaccatgtaaacgcagtatgtaaacgcccagccatcccgtagctgcagctctgcgttttaggtcaagctccctaaatgtcccattccaggacccttacgtagggattctcctaccccagtactcttcaccatactgaggataattcactgcttgctactgtgggtccctaagattactcctgttaacccccgtcctttccccccagcactacctaccaagtacaagtcgcctccttttgggttgggttatgtagatatcgcagggta

SEQ ID NO: 42023 - DNA, 2329 bp, Homo sapiens
gccagtgtcactcgtaccttctgccaattctctggcaatccgtttcagttcatcctgcttcttcttctcttctgctgctatcctcctctcctcttctgcccgaggttttaggtaatctgtttggcggaatgcaggagaataaaattcactggaaatgctgtacaaaaggaactgagtccacaggtcaaggtatcttcagcgacgctgtaaaccagacgcacctgctgttcccgctctttatgttaatgcgagtcaacgcctgaccttcaccctgacgagtccaacccagaggctacagggcccctgctgcccacccgctcacgcactggctcactcgtcctctgcgaacagggactgcctcccatcaagacctcagcactcgaacagccatttagcacccgttttcaccaagaagcagccgttttcgagtcccccgcccgggcctcagaagcctgagctttgggtgagctgattccactatcggggtcacgctcggtggaggacacggtcctgcagcctcgcatgcgtcccaagcccccttccagagctggagttctccaaatagcacaggagctccacaggaaagccgagcagaccccgccccggccccgcccgcggtcactcactgtagcgcgtggctccgtaggccacaccgaggaacagggcggagtagcggccgagctgcgaaagaggttggtcagaggcggcgcgaaacggggctcgcgggacgggggtcgcgggaggagggggggcggggtcgctgggcagaggtcgcaggaggggtgggggtccggtcgccgggcgagggtcacggggcgaggatcatgggggcgggggccgggggtcgcagcccgcggggtcggagctgcggggcgggacacgggggggcccagagcactgggcggcggctgcaaagcctggatcaccttgatgagcggagagacctgcaccggtggcaccatcttgtccctgacctccgcaccggaagcacaacctgcagacggagcaggatgccgcacaagccagcaaagccttggaggcaaaggcggagctgggcgcacgcatgcgccgtcagcggcgagagagcggggggccgcgccccctggcgaccgaagggtgactgcgcgcccccgcgcggcggtgacgtcacgtgaggcgcacgcgcacaaaggctggggagtgcgcggaggatcatcggctgcgcctgcgcagttgctgcgtgaggcgggatctgcgccgagtgggcggggggtttcctttccccgcagggctgggggtccgctgtttccccgcgctgctgccgaggccccgccgtccgcgtcctggccgtgtgtccacaccccagactgcgggccggggcgcactctgtcttcttgcgcggagcgtcggaggcctgaggtcagggcggctcgggcgggtccagccccgcggaccgcgcccacccgagggtggcctgggcagggacctgggggtcctgggagcggagtgtgagccgagtgcaggtggctccccgggcaggtccttctcctacaaggcagtagtgtctgtcgccggccgggccgcgttggattccgcggcccgcgggagcatggcctccaggcccctcttcctgcggctgctctgcccgggagcacggggcgcccttcatcccggagctggagcttcctcaccccaggatgccccatcacttctgtcccgaagaggggctgggatcttcttgggaagaccagcccccaacagaggctgctccctgggtcccccgactccaggcctcaggactccacggctccaagggcctgccccggcccaggcctggggaccactgagccccacactggtctttgctggcctctgtccacctcccggtagctgtgtgtctcccacagctgcccagagatggggcctgcggtgcctatgcagcctccccgctgtgcccgaagtgctgacccgccagccccatggacaccaggcttggagtctaggcaggagcctggcaccccctccacgttctgggtcttcctggcggcagccatgctgcccgtgctgggccaccctcgggccccctttggccccatgcagtagtgacgcaaggcctcctgtgtcccctcctggccctgcactgctacaggcagaagcaactggagaactatggctcgggtctcgctaaggtgcagcatcacaaactccaggactcttgaagcaagcatggggaggacccgtgatcctggcggcctgggctacctgtccgggcctaagtcgcctctgccccctctcctggcttgctctggggtccagggcctgggcctctctggctgagaaactaggaagt

SEQ ID NO: 42024 - DNA, 1883 bp, Homo sapiens
cacagcgagctggacacggggccttcctgcccaaggagagcgccaccctgcctcccccgagggcgggcacccagcgcagggtcagagagcatgccctgaccggggaccagcctggggggcagacactgaggccaaggacctggccagagcccacaggaccacgagccctgcccagaccagacctggcgctccaaggcagggaaaggtgggcgtgacggggtctcagctagaacctctgggactgcaggccagccccacccaaggccagcctgaccttccctcctgcagggcccaggtgtttgggcagaatgttgccagagcgggcaccattccccagccacaggcattatcaagtactagagctcttcaccccacggacgtccagcacacagcacaagtgcacgctgcggccgaggggaaggcctcctaggagaggtgagactggctcatccctgagggaggccaaagtggagcgggtcaccggggctcactccgggaggcaggaggccgtgtcactcaaggtcaacttccatgagtcgactgagctccaggccacaccctcggacacagcagccagacccaggctccgcccggacaaggtctgactcagcccacgggacaggacagggagcttgggcaacagccgccctgtcttcctttttctgcaggacggggccaggcacagaacgagctccccaggcccagctggtgcctgcctggccgagcccgggagagaaagcccaccctgcggagccgagcccgccgctccagcctcagccctgtcctggttcctcgggggcctgagtggggcccacagctgactcactgagaagagatgcgtctgaagcgtgcggggcaacgtgggaggacgatctgtctgactcccttcctcatctcccagcctcgaccctgcctgcgctcgcccccttgggtcctttgagtctcatccagagcactgggctgccttccggggtgggtgttgacccaagctctgctccgcctggccctcatgctgctggttggaacccgggatccctggtcactggctgcagatgagtaacctccagcctcaagggcacttggctggagtgaacatggtgcttacggctcactgtggtgacccaggcagagaccatgacgactcttggtgtcagggtgagatttctgtgtgctccatgatgactcgtggatattaataaaacagtgaagaactgcagcaggaggcccttgactgtccaaggaacgccccacacctacgacacccactgactcttggaccatgaaaccagccctgcaccctcagacactccacccaaagccagttatggcttccccagtgcctggacatggtgggccaggacgccaagccacagcagtgagttacggctcgtgccagcattgtgggcagcaggcagcccctgggcccatccagcagatcccgggcctgtctcggccagaggctggccctccatacccagccagcaaaggaggaggggagaggccccggggtccacctggaagagccctgacccaggcctgagagtgactcctgcccctgcccccgagcttcctgaccatccccgtgacctggcgcctccctgagctgtgggtcctgctgccaactctagctgttcattgcacgttggccagatactgcctgaccagttcctgaggctccgggggatggctgatgagggcacacagggcgggaaaggctgcagcgtgcaacacctgaagggggtgggggcaggacggaacccagcccagcccaggagccgcccctcactcagagtcaggtggaggggagggcggctccaagcgcgcctctgctgtgtgcctgctgtcctggggctgggaggcgtggaaggagagagggccaacgc

SEQ ID NO: 42025 - DNA, 1601 bp, Homo sapiens
accctaaccctaaccctgaccctaaccctaaacccaaccctaaccctagaccagaccctaacccctgaccctgaccccacccctaatcctgaccctaaccataaacccaaccctaaccctaacccctaatgctgaccctagccctaaacccagtcctaaccctgactctaacccctaaccctgaccctaaacctaaacccaaccctaaccctgactctgacccctaacccgacccctgaccctaacaccgacccttaaccctgccgggagggcgctcagtcccggctcccacaaaggacagcagcacccgtactggacggcacccccggagggacccgggcctgaggactctgctgctccagcgccccagctcacgatcgtccaggacccgtcgggtccctcagcacagcgcggccctgtcgctctcctgaccacgcccctcatggccccgccctatgcctcgcccctggccctcgcgccccgcggctccctccgccgagtccaggcccgacgcgcctgcgccctctgaacacgcccctccccgcccctatccccaccccttaccgcctggccccgcccacgccccttgccgcggggtgggagcccagacgcacaccgcgcatgctccgagcgcggcgcccccgacgcggcgctcggctcggctcgggcatttccgcctctttgttttaaactccggacgggcttttttctcctcctcttgggggggacccagagggagcggcgccccctcccccctccggcgcggaccccgcgtgcgccttgctcgcccgcagccccgagaccgcaggtcagtgagtccgccccgcctggcctgggccctcggcgcccgctcctcaggctgcggcctcggcccgtgtccggcccggaaggctccgaaccccgggcccgcgctccgtcgtccccgtcggcctggcccgggaagcccttggcaggcccgggagggccggcaccccagcccagtcaggactccgggaggtcgaagaccccagcccaggcaggactccgggagggccaagagcccagcccaggcaggaccccgggagggctgggactccagcctaggcaggacgcagggagggcaagaccccagcccaggcaggactccgggaggtcgaagaccccagcccaggcaggacccagggagggctgggacagcagcccaggcaggacgcagggagggcaagaccccagtccaggcaggacgcagggagggcaagaccccagcccaggcaggactccgggaggtcgaagaccccagcccaggcaggacccagggagggcaaagaccccagaacagggagggccaagaccccagaccaggcaggaccccgggagggccaagaccccagaccaggcaggacccagggagggcgaagaccccagcccaggcaggaccgcgggagggcagggaccccagaccaggcaggaccccgggagggccaagaccccagaccaggcaggacccagggagggcgaagaccccagcccaggcaggaccgcgggagggcagggaccccagaccaggcaggaccctgggaaggtcgcgaccccagcccaggcaggacccagggagggcgaag

SEQ ID NO: 42026 - DNA, 2573 bp, Homo sapiens
caaagtgctgggattataggtgtgagccaccgcgcccagcctgtgttgttttttaaatcatttccaggctcatggtgtataccttctgcgccagtcctaggtgaatttctcctggttggtgagttttcattgtttacctctgctcacacagggactcgaggagggagactaggactcagagtcctccttcatcttgtcacttctctaaacaattactttttgttgaagacgccatgtaagctggaattcaaagccatctctttgaacaactgtgtgaaataatcgtgctaaactgttattctcctttaatcgttccaaccaagcacccacgggggccattattcctctcctacaactgcaaggcagtgcctcaccaactagctttgttcctgaggcaagcggcaggaacccctctgctttcctcagtgagcaagcggcccctgaccctggcgagtgagttttctcttcacagccccctgtccctgctgcccactgagccagccagcccgagggtggaaaagtcattctggctctaagcttccagcacagtccgggagaccacacgggtcctggggagggtggctaagcccgaggggctttataggatgagtcacaagaaagtccatctggtgggccctccctgactcccctccactgtccccggctcacggcgaggaaggcaaggctggtgggggggacaggaaagggctggggtctctccccacctccactgccaacgccctgcagacccccaggccacagcctttcccggggctcccccaaggtatgggaggtggggcgggtccagtttacgctggtttcaaagaagtgagagcgccccgccgccatgtcatggagggtcccgcgcccccaccccttgcctggggtcgtgtgtgggcagccgcagaaagcgccccgacggcaggagcggggttccaggctgagaccgggcctcggcggcgccccttcctgccgggagtggcgcatcccaggacccacagacaaacagggccagccagggtcacccggagcgcgaaggccggctatgggcttagggtggggtctggtccctacggccggcctagggggaacgcgggacaggagaaggtctgggaaaaacctgcttccgaggcctcggcttcggggcgtcctcctgagctggcgccagcccgcagcggggccgggcagggacgccggcctaacggtggggaccggcagggcctgggggcaggacgagacaagcacacaaccgacggggcggggccaggcgagggcacggggccgaagaagcttctgccaggcccgagacccgcacttagttacctgagaaggcgggaaggtgcggccgcggggtgagcggcggactgacccagctccagcgcctctgcagaggcttgcaatggcgtctctcgggctctgattggtcaggcctccacacgtgagcctctaggagccaatcatgtcggcccacctagcatgcgctgattggctcaggctggccaggggcgggcgcggtccttccacggcccggtccccgctcccttccccaggcccggaggccccgcccgagcggctccgctgggggcggttctgctggagaggacggatctgctggggagatggatatcctggaggggcggatctactcggggggcgggtctgctgggaaggccggatctgctgtgaggggcgggtcttctggaggggccgatctgctgagggggccggatctgctgcctgacagggcttcctggcctggggaggaggccgtgtctggagcttgaaagccggccccgctgtgttcaagatacagtcaaacgttcagaaggaggagactccgggggcagggtggtgcccagccagtgcatggggccagggccacgctggtggcacccaggcagcgctgcctcctggctctcgaatggctgttctctgcccagaatgctctcccacgggacacgcgcctccctccgggtctgtgcacgtcactctgacagagaggccccctgaccactcatgaaatagtaaccctaaccattgctctctgctccctgtcctgcttgattttcctccagggcaaacaccgccacttccatgtttatcatctgtcctccatcactaggaaaaccagttccaggagggagggactagtattcccagcccctagaacagagcagcgcatatcacaggggctcagtaaacatctggggaggagtgccattcccaggaggcctcagaccccgtcacctgagatgagagctggatcccggagaagctcaggtctgacccagcattcattgctgtaggaagggctcgtctagactccaagggagccgggtgcggtggctcacgcctgaaatcccagcacttcggaaggccgaggcgggcggatcaccaggtcaggagatccagaccatcctggctaacacggtgaaaccccgtctctactaaaaatacaaaaaattagccgggcgtggtggcgggtgcctgtagtcccagctactcgggaggctgaggcaggagaatggtgtgaacttgggagcggagcttgcagtgagccgagatcgcaccac

SEQ ID NO: 42027 - DNA, 925 bp, Homo sapiens
gccatccacagcgggaagggcagcagctccaggcacggaagtggagggagcatgtgctcttcgtcctgtggggccaggggtgtgctggggagagcgatgccactggaagctaggtccggccagagagcctccctccagccaggggtgtgggggtctgtgcatgtggcggcaacatgtgtatccagcccaggaggctgtgctgcccacagcaaaagcactcaggaacatgtgtgtgctcagaggagcatgcctgtaacggcggaacatgagttgtgtgagcaaaggaacctcccaggtcaggggagtgacccttggggcttgtgggaccctgtctgcaaacggtgtgggatccttccttctgggcccaggaaggagaccccaggccctgccaccaggttgtgggacactcggagcttggcctgaagtgccagttgctgcagtgaggctccaggtcattctgaggctgaggtcacgccggacttggcctgagggccagggtcactctgccgggaaaacaggctccggggctgggctgcacaccagagcctggcttccacgtggtctggctgagacccagttctgaggcgtctgctccagagacaaacgcccaggcacacccagccccaggcccaccgtgatgctgggcagcagctctccaggaagtaacacctgaggatgggagtggctgctgggggcgcccaggaggccctgacacgtctgaggtgagaccctgaaccctgaaaacacggtattcgtgagaaaaaagggcagtgggtgctaatcaatgctgagaaccaacaataggaatgataggaccaaacagccagcattcagcaaccaggtggacacctcctagccgctgtgggagctgcggggggtagggggatgcaatgtattgagggagcctagtgggccctcagaaggc

SEQ ID NO: 42028 - DNA, 2265 bp, Homo sapiens
gtcaactgtgtttagcccataaacttcacagccagtgaaatatgacacacctccaggcaccactggacaaaaaatgtaaggaaaatccacaagagagaatgggacccactggcactggtgatcgattccgtgtgaacggagaggacatccagggagctagaaatagcatgcagagacaaaactgactcaagactgactcaagaggacttaagccgagtgacctgtccactctgcaagttctatataggtcacaaccactggctctgcttcctgtactacacacggaatcacacgagtagatgttcaccgggaagagaaacactgaggtgttgaaagacgaagggggatcacgagacacagcccagtctaccctcggccaacccccccaccccccaggctacaaccgcaactacctgcaacacgtgtgcacccaccaactctcaagttccctggactgtagaagaaccagccctaacctccaaagtccagtcctgtccctgcctgctcaataaccccagatgtccggcaaaaggccaaggcttaaacccacctcctgcaccgctcacctcctgactccagctgtcggccttctaggcaccgtccctcagtctccgctgtgggtccccacccaagctccctgcctgccaccatcccccacctcaccgtaacatcttcccccacccaccctgagggggttccccaagccccaggccttgctccgacttgaccctactcttatgacaagaaagtaccccgacccggtcccagcctcgccctccgcaatcaccgccagcaggcactcacctacgcccgcgctatgaccttcgcctggccctgacccacgccctcggcagagaccctcccctggccgaccctgacccacgatcccgctgggaccctccccagccctaacccacgcccttccactccgggctgacgctgcccccagcgtcccggagacaacactccgcggccgcacccgcgctgccgacccggggcctcaccttcggccaggacccgccgcacccgcagccgcagctcgcccagttccaccgtctgccccacgaagtcactctggtcgcggccggaagcaccgcccagggagcctggacccgccaagaagtcgagcgccgactgcagcagcgacatggcggtggctgcgccgcaccccgcggcagccggagtggtcgggctcgggctcccgctccctcgccgtccgggtcagctcagcaaccgccggcccggaggtgcaccatcttccgcctcgacgccgtgacgtaggcgcccgtgaggacgcgtcgcgtcaggcggcgacccggcctagccccgtcccctccgccgcggcctcacttcctggctgcgcgcgcaggcgcggaggtctgacggagacagcgcgtgcgcggcgtcgccgggcttgcgatgaacttccggctgtcaagctcccggccgggctgactcaagcggaggcgcgcggaacagtcgccgaggcgattcccgcccaggtagttcagcgccccagtccagctcccggtaccgttccccacatggtctgttttgtgggaggctccttctcaggtgtctccggtttaagcgcttcgccatcctctgggtggagtcagcctcccgtttgctgttagcgccgcgtttgcgaatgggttcgcgaatttttctctcagttggctaaggagcaaggagttagcgtgcgttaagctttcagtaaatacttggttttcgtctcatggaggtcggagtttcctgtgacgcttagtgagtaaggttggcagccccctcccagcagccaggcaggcagtttgcaggggaaacgctgctgcattgctctgtcttccgaggagagggccagggtctggcctggggcagtgaccagtagtgggagccgtgggctagaaaaaccttcgtcctgggcaaccacaacactgcagagactgccctgtgaccctcaaggttcgttctcaccctgacattttccaaggcaaaagcaaatcctcatgaaccacttggaagggttcgtaatgcccaactatttggagatgaaatggtgactttccttataggataataaggaaatggctcacagacaatgcatttttagtttttggcccacacagtatttgggggttgggagtgggtagcaggaggtgaattagttgctatcatttaaagactgatgccaggcgcggtggcttacacctgtaatcccagtgctttgggaggccgaggcaggcggatcacctgaggtcaggagtt

SEQ ID NO: 42029 - DNA, 1490 bp, Homo sapiens
tttttcaatgttttcattttgaaaaatttcaaactcacagaaaagttgcaataacagtatatagttttcacccaggttcaccaactgttaatattttgctacctttgcttttatctcagtctctgtatgtaatctaaatttattgttttgctttaatttccagagcaactttggttacaaatctattgattcttcacctctaaacccttcagcatggatcacaaatgaacaaaaaatctccattcacaaccgtgatgcaatcattgagtcgtttaataattctggagtttgacccagcgcggtggctcatgcctataatcccagcactttgggaggccgagacaggtggatcattcgaggtcaggaggtcgagaccagcctggccaggatggtaaaacgctgtctctactgaaaatacaaaaattggctgggcgtggtggctcatgcctgtaatcccagctactcaggaggctgaggcagaggttgcaatgagctgagatcgcaccactgcactccagcctggacaacagagtgagacttcgtttaaaaaaacaaaaaacaaaaacaaaaaaaattctggagtttatcattggtagaattttgttgcacaatgtacaaggcatattccaaattgtgaatgtccccatcatgcactttgtaataatttttcctgacccggatccattccagcaccgtgcagtgaggacttctgtctgtttttgttttgttttaccttcctccagggaaggtgtacttttctgtccacaggtgtcccggtgagcggctcaccttaattctctcagggcttgaggtgatttaaggctggcttcagtccccacaaagacaattctgttgctggtttacctttgcttttaggggatagaactttggggtcccaagaaaaacccaaagtctttaccaggccccccgcctgagcctcgacttctgtcctgtggccacagtgtgaggaacgaacgcagcagcgtgtcgccatgtcttgtgtggctgggatacgctgcaggggtgtggagtcgccgccccaaagcgggccccgccccctcccggcttgtccctgcagagccccgaggcctcagaggctcctcagagctcccagtgccctggacggttccgttcagcgctctccagttctgatggttgctctcaggaggcggctggtctgaaacaattcagtttccattgctgtgtcctgcaccacggtgtgggactggtggtttcttactgtttttctcagttctctgacgctttgaggaattgtttttaaagcgagttatccatcattttagttgttttctctggggtcgttggactgagggtcttaccccgctgttcctggagacagttctgtacttgcatggtttctctcgcctttccctccctttcttactttttagtttcttaatgaatttttttgtattatgtttttcctccttgctaatttggaatatatacacactatttcacttttaaat

SEQ ID NO: 42030 - DNA, 2241 bp, Homo sapiens
atgcatacatggactacacatgtactacagttgtcccatggtatcctcggggtattggttccaggaccctcccagataccaaaatttgcaggtgctcaagtacttgatataaaatggcacagtatttgcacattacctacgcacatcctactgtgtagtttaaatcaagattacttatagtccctaaaacaatgtaaatgctctgtaaatagctgttatactgtattgttttaaaatatgtattatttcgtattgctttggctttaaaacaatattttcagtctgcttggttgaatccatggatctgaagccaagtgtaaggagggcccagtgtgctcttctggggtaattctccttcctgctaaagcgcacgctttactcaggaggctggggtgagaaaatcgctgaagccccggagatggaggttgcagtgagctgagatcgcgccactgcacctcagcctgggcgacaaagcaagactctgtctcaaaaacacacaaaaacagagaaaaacaagacagtaatggctcaactcacatagcaccaacgggcgaagcgttcttctgagcgctttccgagtcatcggtcctcagagcagcccctgaggcccgcaaggaagcggggctccaagccctgccgtgctcccggctccccgaggctccccgaggccacccaacccctcccacccggccatcgccccctcaccaaggccccgccccgcggcggcggtcacatggggtgcgcgcccagactccgacccggaggcggaaccggcagtgcagcccgaagccccgcagtccccgagcacgcgtggccatgcgtcccctgcgcccccgcgccgcgctgctggcgctcctggcctcgctcctggccgcgcccccggtggccccggccgaggccccgcacctggtgcatgtggacgcggcccgcgcgctgtggcccctgcggcgcttctggaggagcacaggcttctggtgagcgctccgcggcctccgggaccccctggccgcacggggagagctcgggcgccccctgactgcgcactgtgagagcttcagagaccggagctccctcctctggggccctggctctcccgggcccgccccccgccgtgtttgtgggtgggtcctccacctgagtgggcgccggggcgtgagcctgggccgccccctgcagcccaggccgatgcccgggatcctgctctttgaggtaaaccaggagtctcccctgggagtggacggccctgcagcgggacctggcctgcctgtcccattccttccacctagagctgaggtacccgccttcctggcagggccagggccagggctggcgttggcccctcgtcttactgctgctgccgttccccatgaagatgggacctccccacattcctggccctaagggtcattttattagtcactgaacgcacgggcagcgcctggatcctgcgcccgggcagtcctgggcttgaacgtgtgtgtcagccgcgctgccagccatgctgaggctcgggactgagccgcccctttgttgtccccagccccccgctgccacacagccaggctgaccagtacgtcctcagctgggaccagcagctcaacctcgcctatgtgggcgccgtccctcaccgcggcatcaagcaggtccggacccactggctgctggagcttgtcaccaccaggtgggcggcgggcagggtctgggcgtcccagagccccttacagaggcacagatgggaggggagggctgggggctgctcggaagaccccttgttcccccacctcccgccgaagcaccctgttggggagagcgtgtccttgctggctgtgctggggtgagggctgtgtgctggagggagcccctgcatggggcacggtgggcttcctgcaggtctccctgcaggctcagggttggctgcgccgcacctggctcctggtgcacccgtgagcatccctgtgtgtgtctgctggccaggctgggtagggccactgcacctgagggctgagctgaggtctcatcggtcacagcaccctgggccctgacgctggtgcaggtggccaccctgtgagggggaggcacgaggtgtgaggggcacttgggtgtgtggggccttctggaaacacagagaccctcgtgcacttggccagagccgctggctcctaccagcagggtgggcaccgggcaggcctgggcatagggagtcctcttggcaccttggaggctgcatgatggcgggggacc

SEQ ID NO: 42031 - DNA, 3165 bp, Homo sapiens
ggacgtatagaggctgtagatgggctgcagcccggccagcaatgagtaggcgatggcctgcggcaccaggatgatgccgatgaccagcccagacatgacgtcgcctgccaggtactcccgcgggcggtactgacgcagccagcgcgtggcggggagcaggtcctgcaccagcgcccggacgcacagcacactgcacgagcagctgcaccacagcctggccttcagcatctcacgcagaccccggggtgctgggcgctgccgtcggaccggcaccggccctctgccctgctgcagaggctcaggggactcgtccatcctgttgcgtcaggtcccgtggccgacctgcggccgagaagagggcatggtcacaggagcccccggatccagggccaaacgacaaggtccccggcagcaacgggccccttggggcggacccctcgcccacccagggccggggattggtgctgggccttctcctggcagcgcgggccccagccccctgcccggtatggatggacgctgggccctgctggatccagaatccatcgtgaggtgagatgggattacgacaccaagcccatgccatggggtgtgctgaggccagcagtgctgaggggcggcgtggcggcaccctgtccaggctcagctccggcctattggctctgcggttcctggctgaaaaccaccctgtagcctcctgaagctcacctccccaacggggcaggaacaggctgggctgccaccacgcacatgtgcctaccgtcagaatgtcacagtcactggacacaggtgcaggcaagcctgagtccagctgctccgtgtccacctccctggctccccaggttggcaaacggtcctgctgtccaccccatgcccacaccagagccctccctcccccatccaaaccatcgcctgctctcctggagacacctccacccacccctctgtcacctgccctgtgggtcctggggctggcggaagtctcaggaagaggcctcctatgtccctgccaagctttgtgggtactgggaccccaagtctgctgggggagcagcactcagacactagcctagcccatccgcctggacttgggacagaattctgagaatatgcctggacgggggccccatcagggccagctgggaggggaggagggtgactggcgtctgtctcccctgcccagacagttctgggacgtgaggcgccctttttcccaggctgcaccagctcactgtggaacggccatgacacactgtcccgaggcagcaccgagagggcccagcccgctgcacacagtcaccctgggccggcagagccggaagggcacctgacctttcccttgatctcggaaaacaccgtggcgttagggaggcggtgcttagaggcctgactggtcccacgtgaggcctcgggtctgtcctgtttgcagactccaatgtactttcactttaaacattcttctcagcgacgttaggcaaagactttgctcccaggacaccaggtgcccaggacaccctggagcctgggctgagcctgctgtttgcacgctggcccagggtgtgcgagctccagtctcctggcgggtgtgttggggcagtgagcccagcctggtaggttgacacatgcaggctgggcacagcacccctggggcacagagcgggggtcctggccctcaggcaacattgcaagagttgtgtccccttccctggaagaccccaccacactgggtccctggatgccctgaagcccaccccaagcccctggggtccaggtgtgtggaatggggacagtagggccacctgccttgagcctgagggtgcccctaagaaaccacgagtccagggcatttctggcctcggctcccacgcccccctctgctgcagctgagatctgggcccaggatggttcttacctgagggagtcctcacaggcgcggagggccctgggatgacgaggggctggcaagaccaccgaggaccgcagggccctctggctcccgcgagcagcggggagagtgggggtggtggcgccaacctgcaggcagtggtctgtgccctggactctgtagttcaattatttacctacagattgctgagtcatgggtttctccagccatgttacctgatcggctgatccgggagttgaactgtaatcaggggcttgtaggagttagagctgtgtgggcctctgaggagctcccagcctcccaggagccgctgcagctgtggctctgcggccctgccgggggggcttagggaccagcgggaggcgggggctcaggggctgagcacaggtaaaccttcagctctggggtctggggtcgagtgcagcagccttcaaacccaggcggggctgagggaggcttggtctccgtgtccagtcgccggacaccctcctggtcctgcaaggagccagcctggtccaagctggagcagggcagaggctgacagccggctcagcccaaggctgccggtgcgtgcatatgcgtgtgtgctcgcgtaagccctgtgtgtggtgctcaccgcccagggcgaggactgccggggtcaaggtgccgtgactggccaggagtcctggtctgactggacccagcaccgacccacagcgcctggtcaccctcacggctcctctgccctcccctctaccacagaccaggaccggcagtgcctgcctcatagggctggggtgaagataaatgatttttttaagtgaactaaattaggcccacacgtgaaaataagggtaagctgctttttaaaaggaattattagccaggcacgatggttcactcctgtaattccaacactttgggaggcctagacaggaggatcgcttaaggccagcagttcaagaccagcctggtcaacatagtgagacgccccccaccttttctttttttttttttgaggcggagtcttgctctgtcacccaggccggaatgcagtggtgtgatctcggctcactggaagctctgcctcctgggttcacgccattctcctgcctcagcctcctgagtagctgggactacaggcgcccgccaccgcgcccggctaatttttttttttttgagacggagtttcgctctgttgcccaggctggagtacagtggcatgatctcggctcactgcaagctctgtctcccgggttcaagtgattctcctgcct

SEQ ID NO: 42032 - DNA, 1003 bp, Homo sapiens
caagactgggaggcaggatgaggggaggccatggggcggctggaggtgcggcctgggagccctgcgtgctgggccctgggcagggacggcaggcgaggcgtgtggaggaagagccgcgaagagctgggcgctgtcttctccacgcctccgtttcttcatctgctcctggggccgcctgcccggtagcggagattgaatcgcatgttgacgtctattacgatgattaatgttcttgtcattcccgtcactagcaggtgagaggctgggaggcctcaggtgggaacatacctttggccaaaggcaccaggtaacccgaacgccccggggaggacccctgcctgcatcgccgcggccgtccccccctaccccgtccccagcagctccggctgggcgaggccctgcttctcccttctgctcccgaagaccccccggggcgcagacctggaagcctcgaagctcccgcggccgtccagtccgcccccttctgagcaaccagagagcggtctgggcccggcccggggctgcgcagaggtcagactgccgcgggcagggccggagcctgctctgggggtcgcggaggtgtctcgagagttgaggacccgacccgggcgcgcgcgggcgcaggtatggggagggcgcggcggctcctggccggtcctaggagcctgcggggaccaagggcgcgcgggcggggccgggggcgcggcgaggctcgggttggggcggggcgggggcgggggcggggccggacccggggaagccgcccgcccgcggggacgtccgcaccgcgagggttaaggccgggagcccggcggggcgggggcggtgtgcgcgcgcggattggggaaaagtttggcggcggggcggggcacgggggagggctgacgcgcgcggattggccggaagttgtgccgggggcgggtcgggggtccgggctcggcgctcgctccgggagagttgacaaagccccgcagggaaggacgcctcgcggcgcggcgccccg

SEQ ID NO: 42033 - DNA, 1145 bp, Homo sapiens
cgccgccccgggatcccggccccggcccccggccccgcggactcgcccccgccgcctgcccggtccgggaccccgcgccccgagcgcccgagcccggaccccgacccggcccgagccgcccgcgcccaggtagcgccgccccgccccgagaccgggcccgggggcgcggggcggcgggatgcggcgcccggggcggcgatgaccgcggagcgcacgccgcgggcccggccctgaccccgccgcccgcccgctgagccccccgccgaggtgagccccccgcgcgcgcggccgcgaccccaggtgggcacacgggggagggcgggggtccggggcgggggcggggaggggcgggttcggggccccagctgggcacgggtcatgcgcgccgccgccgctcctgcgggcccccggcctgccccgcccccgcccccgcgccccacgtgggccccccccagcgcaaatttgtccgctaatggcgcaggcgattatctgcggggcgctgagtgttgtgtgtcctgcgggcagggccggagttacaagcgccaggaatccagacggtgtttggagagggggggcggcgggggagcccggtaattagtgtaaaccctttgtctgcctttgatacccacagcttctccccgctgcggcttcctccgcctggagcgcgggcggggagggcctgtggggagggcggccagacccctgatccccgcggcccgggaccggggagggcggtatctcccagttccacgtgttagtgacggcgcccccaatgtccccaggtccggacaggccgagatgacgccgagccccctgttgctgctcctgctgccgccgctgctgctgggggccttcccgccggccgccgccgcccgaggtgagttctggcgcccagcccggccagcctggcctccgccagcgccgcccccttcccgcccggccctgaaccctgccacagtgcccgcctggcacgcgccatgccccgcccctgccgccccgctcgccaggcccccttccttccagggccccctcacccatgggctgtccacagcacccaccggggctcccctagctggctggaggggttcccctcatgcgtgcttgctggccaggtgggctttagtcctggctccccaggacatgct

SEQ ID NO: 42034 - DNA, 1578 bp, Homo sapiens
acgtgtccactggcacagagcagtgatgcacagacacatttcccaggctgcctgagacctgggtggccgcgtgtggtgctttgtggctggggtgtgccctaaggggtcaggaggggctgggccacaccccaaagggtccacatactgaggacaaagggagctgtggaggaccttgtccaggagaggcaggcttcctgggtgcggtgtgcaggctgcatggggagcagggcgttggtttccccgactgcagccacagactgagtgtgtccatccccacagctcctgccaattccaacactgagagtctgtgtttggacgcctccagtgaccactggctccgcgagtgatgactcacacccatcactcatccccttcctgagtcagccgcgggaccctctgcagggaggcgtgcgagtcatcgaggtgatgcaacccctgcttggtcacttgctgactcacggacaccccccgccccagcccagggcctccccttccatgccggacgggcctggggtgagctgcagccgggcaggaacggcagagcagggggcagggacctgggggcgggagaggcagccggaacggggtggccgggagcagggctgctctgaacgcagactgctggccctggctccgcagtactccctctgctctcttgcttggtttgagggaccctcttaaaccctgctctccaagcctcacgtgaattgaaccagccaccacgtggtccccggaggcgctgagctgcgctgagcccggcccctctcatcctggtgttctggcgccaagccccccaacccaccctagttgcaggtccgagccctccggtgcctgatcgcaggcagccccgggctccatcgggcttaaggccacatttctcagtgtttctatgagggcagaaaagacatttcctgagagtggattcctgaggtttctgaaggtccgtaagtccaagaaccacattctttccagccctcctgagttcctgcagccatgtttcccttcccttggggaaaacgcagctctgagggtctggagcagatgaaggtcccgtaagtcctactctccccagctgccagggtaggtgcctggtgctctgaaggtcctggggagccccagccccttgccaggcatgtgaggccttcccagcccacacgttccgtgaggacggagccaggtcctgtgttgctttctgctgcctggatgactgggaacggagctggggtgtcctctgctctgctggagctggagctgccctatttaaggcaattcctgcgctgtgagccctggtggggccacctggcgggttccgccaaagcaacctcactgccatgggtgtttttctgttcctgcggtcatatgggctcttgtgaaagcagttttccaagtaaatatggtgatgatttaagtctactacatttggaaaaatgagggatgaaccctgcagccctggtcctgtctcagaggcagctttggagaacatctgttgctgcctccggaatcacctggccctgcctgggggcagccactggcccaggccagctcctgagctgccctcctgccagactcggagagggg

SEQ ID NO: 42035 - DNA, 541 bp, Homo sapiens
ctctaaaattcaaaggtcaaatataaaattacaaagcaaattgggtaaaaggttaatatcctgcacactgagggcttccacataaatgacaaaggaataaagcagataatttgtagaaaaaacacagaggaataaattgaaaacactcagaatcattaatagtcacataaatgcaaatcaaaatgactttttcctttcaaattggcaaagaggaaacacaacagacacagcgggtgttctgaacgtgtccagggtgccctcagcctgctggaacggaaacaagacggccctttgtacctcagcatatattggaagtgttttagagttggtgagttccccgtgccttccagaactgaacgctaggaggagcagccagtgaggacagacgtctatgcagaaacatggtgaacctctggaaatgacacactctccgggcacagggggcttagacaaggtcaaccatgggatgaaacagaaagaagctgttagatgtggccctgcgggaagatgcaggagacagcgtgtggggagatggcctgtg

SEQ ID NO: 42036 - DNA, 619 bp, Homo sapiens
ctgcaggaggaggaggctgagagcagacgggacacgggggcccctaagaagcaaggttgggaaaggaggaggctgtttcccaatgcccgtgccggccaccagagggcccttcagtgcagagatggtcggcgcggcctcaccgcggtcaggagcagcgcgaaaccccctgtgccctcggccgcctgcagcatgagcctgcacaggagcccccgacaccccatggctccggggggccccaggggctgcggggctctggtcttagacgcagttatcagggacgcactcagcctcttcttcgagctcggggcaggggctcccgttgttggcgggctggacccggacgtagcgagtcctgctcttggtcccgagcctcccacagtggcctccgcacagtccccaggacgaccacagggagacctcgcagtccagcggcgtttctggaactggaccaagcaaaggggagaccgaggtgaacgctcgcgtgaagaggcgcttcgtacaaacggaagccacctcccaccaacgtgtgcattcatcagaggccacgcccacccttcgggggcacttgcgtttctccgcacagtcgcagagtgagcggcaagatgggatggcaccatag

SEQ ID NO: 42037 - DNA, 2724 bp, Homo sapiens
ccccgtgagcgccccctgcccccaccgcatccccggaaccgcacaccgcaggcgctcggcaaacattctggtgttagagtctcccgacgtcagcacgccccagactgggaagcgccgccgtgcagctgtgcggggggctccggcgccgcagccctcctggtggagcaggaggcgaggagggggctgtacttacccagcagcgaagaccactgcgcaggggggcggaacagggggtactgcttggggaaggccgtctggctccacttgcccgtgaaggtgatgctgtatttggccagggctctggcggaacagatggactctcccccaagaggctggccggcggcgccgagagtggccaggaggagagcgcagagggccttgcccagggcggcggccgggctggggttttccatcacctgggagcacagaggggagcagccgcgcgctggcaccgtcgtggcagcctcggggtggaaagccgagagggctgcggcactttgggctctgaggacggccccgagcacccgcgaccccctccctgctccgcaaagctctcctgcggtgcttccgagacccccatcagcggaatggacggcgcggggttagatcgcccgtgcgcctgcgagcgaccaggggtaacgggcaggttttcagtccgagtccctgcagcttgccgggccggtctgggtgcggcctccgggatgccttcgccgtcgcagggacccggggccttggccgactggctgcccccgggactagacccttaaagctcggtcgcagccagtcctgggggtccctctggaggtgccacaaggttctgggccgcggggaaagtgcaggaggcccgggccctctctgggtgtcccgggggcacgcagtactcacccggcaggagcagcgggagcgcggccggcagcggtcgggtcccagccagagcccggagctcctatttaagcccgaggccggcgccccgggccggccaatgaggctccagttcctcctgtcttcgatgctgcacggcctggcctccagcgagaggcagataggacgtgggagaaaggaggagaaggggctgcgggggcggcgggggctgccgctttcccaactcgccctgcccagcgaccttccccgggtcggatcaccctcttcccctggcagtgctgccgcacccctttctttgtctgtctgtcctatccctcccctcccctccctgtcccctcccttcccctcccctcccctcctcccctcccctcctcccctcccctcctcccctcccccctgtcctcctccctctccccgtttctctcccgttccaacaagcgccttcctggtgcctccctaggtgccactgaggggagttctttgccccaagcctttcgggaaagctcagggcgtgggggcagaggggctcttgttttcaccttctcgaaattagagccagcgtgctacaccttcttgcgcagggtgtgacctggagagccctgtgcgtggcctgacttcagtctacatgctggaagtggctggggaagctcctggctcccggcgcaggcatccctggcctttggggccctggctttaagtctctttcctggcatggcctaaagctgcacagaacagcctagcggtctgcactgtggccagagggcatttgcaagccatccctcctggagggaggtcagagtgggctgagggtctggggtggaacgcgcagggagtcaggaagagccacagaaagggggcccccctccccaggaccccgcacagggctggggctgcaggccggcggtgtgtgcggtgcagagccctcccaggggctctaggcttccctgcctttgggatgaagctaacagatgctgaagttgatcctgctccatgtcaggaaaatatttataggtccccagtcatgggatctggaaacagagcggaggaaggagctcgggaatggtcttgctcaatccttcccggcctctgctcatcggaatcacccagagggcttttaagcttagacaaaacactctgatgtttggaaccctgttaatgtttcacagattcaaaaagagagaaaaaataaatagaagcaactaggacagaatgcaaacagaaacaaatgatctaacctgtattttaagcgaaaaccacagatcagccactcaatgcagtatttagactccaggcccccaggccaaagacaaatttccacctccgtgcttctcaaatgtttttatctgaggactccttcatactcttaaaggtcactgagggccaggcgcagtggctcatgcctgtaatcccagcactttgggaggccgaggcgggaggatcacttgagcccagagtttgataccagccttggcaacacagggagacctcatctctacaaaacatacaaaaattagctgggtgtggtggagtgcgcctgtggtctcaactagtcaggagactgtgtctgtggtcccggctactcaggagactgaggtgggaggatcacctgagccaggggaggtcaagcctgcagtgaactgtgtgtgccactgccctccagcctgggcgacagagtgagactcatgcctgtaatcccagcactttgggaggccagggcgggcggatcacttgaggtcaggaactcgagaccagcctggccaacatggtgaagccccatctgtactaaaaatacaaaaactagctggatgtggtggtgcacgccagtaatcccagccactcaga

SEQ ID NO: 42038 - DNA, 1193 bp, Homo sapiens
cttcattcattcattcacacacttcattcattcattcacaccattcattcattcattaaccacaaggtgagtattccttgcatctcagagatggggacaaaggagtgaccccactaggcccaaggttgcagggggctggggtggagtggatacattttgtagattggattctcttattcagtaaagtgtttagtgaattggttgacagcaatgccagggtcctctgaggacagggccttcctggaggtcacttgagccacttgccccaaggtggttttcaggagagtgtggctcaaggctgtggctggagccagtggctgctgcctgtctgcagctgggcagagcagcccctgtgtccacatccagctccacctggctgccctgccacggccccagcaggcacccccttgtctttgacacccccttagtgcctgctgtggttgggtaagtgtagaccacagtgtgagtaatcagcgcccacactcccagggtgttggcaatgtttaaaagttgtcttaaccaaaatgtgttgctaaggttggacttttggacaaccgcaggtgctgtgaagctcctttcccagtcaggcatcgggggtggagtctgtgctgcttaaattggatctgagcaggcgggtgtggggtttccatgggtttgtttgtgagccgcgtggagcagacggcatacaggaatgcctggcgagcctcccctaactgccaccctgctctgtttcgcctcaggctgtggccctgccccgggccccagaacccaagatcccttcagggggcaggggtcccagctgagaagggagaggccttctttacctttctgcatgggttctggcatgggggccctcagggtctggcatgtcaacggctctttcagggcttgcccacagcccctccctggggcgcggcacaggcacccaggcctggcccagcagcatggagctcctggccacatctgctgacaccacaccagctgactcagacgcggagtacccacccacgggagcggccgtctcctccagagcacccagactccaggatcagtttctggctcccccaagggaccctgctgcgcatttgaaaacccacctgaaaagtcctgtgtttgccagcccacccagacacatcacacttgcttgtccactcacggacatgtaccaagggcctcgctccggccaggcacca

SEQ ID NO: 42039 - DNA, 1636 bp, Homo sapiens
cctaaaagtaaaagtcgtgagttttggcccacaggagtagacggacagggttgaggagccagtctcccagtgaaggtgctggaggctccttgatgctcttccctgacagttcagcctagagtgcactccttgggatgatggcgcccctcctctcacaccttggctcagaactcagcactgaaatccactgggaaggccaggggcaggagagacctctgcctagtgggagtgcaaggacagaggcctcctcgggctgtgtaggccctgcctggaggggacaccagaaccatagggtgtgtgcgaggcagcggttggatcagtgtggagagagggtggaggaggtgcccacaagttaccaaggtttgcagtgagttcctgtcattctacattcaggtacatagctcccaggacagccagcccctccccataggcctacacacccagccttcaggccacacccaggctggtggccgcagaccacttgggtccctgtttccagggctctgatgggatagaagagactcagccccatgaggatgtgggtgcccctcatctctccacagcaaggaggggccagaggaagccccatgctagcgtcaggggacaaggattccagctcaggcctgtccacggctgtgtgacccggcatgggttaagctctctcaaggcctcagtttcttcctctgcagagtgtgggatgggggtgacctcaccagatggccccacatgctttagcacagagataatccctttcctcgtgacccacagccagccaagcagctctactgagtgtgggactctgtccaagctctgagtcagccctagggctggtcttggcagccctgtgctggctggccagggttggctgtggagccaaggaaagggatttggaattcagggatttatgctttaaatttcacattttctttttcccaatagagtttcctactctcaatctcttgacacgatggtaaagccctttgctgtagctaaactcagttgccattttcggattggcattagggtgagaaggctgagtgctcacagggaagcctcttcccagcagcacccctgggctggaaagggcagcgggagcagcacagagcagcagagggtggctcaggctaagccggagctgcccggggcaaacaaagagggacctgcctccttgtttcttagcctcttaacacagaagctcgcagcctggattctaggaaggcttggggggtacggccatcctgctggaagcctttgctcctttagcccagagagcacttgccccagccccacatacaccccagggagatgccaccggccaaggagaggcttgctgaggccacggcccagcatcaagccctcacatcaggctgttccagcagccaggggccctcagaagcaaggccgagtggaaggaggtgccagggagggggcagagctcaatgtccactgcagcagctgctggggtcccttctctgctgccacctcatctggcacagggtggggcatgggatggagacatctgagtacccaccaggcccacacacatatgtggacatgcatgcatgccacacacacgtgcacacacttgtatacgtacacatgcccgacacagctgcaccatgccagatacacgcct

SEQ ID NO: 42040 - DNA, 1471 bp, Homo sapiens
tttatctttgtattgctgagctgtgagagttctttagcacactggtttttcactaccttaccctggagccgatacacatcctttctgctcagtcattagccagaaatgcagagaaatgctactgtgtgaccccatgacctcagcctgatgtgcaggggtccccagaatattagacgggcactgactgtctgcaggatacagacccgggagggtggctttgcactgctgatctgaacacagcctctcactgattcaaaacgtccttttggcgtgtctgtaatgcctgcgtgttcaccgttcgcattgttactgtgagcgacccacgcaccagctccacacggggctccctaggtgcagcctccggtgtgtgttaaaacctggtggccacggttcccttgttcatcttttgttccagaatttccttagttttcttacttatttttccacgttaacttcacaatcaatctacctgattccagggttctccggtgttttaattggccccgctgtggcagccggccagcacgagggacggcacctcgtgacgcccaggacagaccgggcttgttgctggtctgtggtcctcagtcaggcctcagaccctctataacaggtatagatgtgcccgccgtttgctcctagaaatttacaatttttgttgctgttgggaatggtcccttttctttcttcattgtctctcctaactggaagtgcttgaatttgaaagatgctgattcctgactctgaattttgtgcacagccaccctccgaaactcacctctgccttctaatcagttttccgggtctatgaggagtcgcagcaggctgtgctcgggtgcagagcctctctccagccgtgtgcatgcagctcttcccggggctcttggctgtgaggcctggcctgtccctgtggctaaggcggaagacccagctgtcccctccctgtgccctcgccacgccctccccgtaacgctgaccagactttgcacagggcagggccctgggggcacatggacaggaactggctgtgggtggagacagcacccggctgaggtcctggggaagaggccatgcccggagctcctggacacaggaggtggcgctggctgaggcccgatgcctgaactgggcatggggggaggcacctttgagctggggcctcctcggagcagctgcacccaggggcaaaccctgcccctcggtttccatgtccacatctttactagaactgcagctggcatccgtggagctgtgggctttgtccagggagagccgtgcccagcacctgggggaccctgcagaggtgctaaggttcagggttaaaaacgaggatcctggcctcccgcaatcctgtccccagaggccccatcggagccgcctggccttccctgccagcccaagcatccgaggcttttgccagcagtgcctacggcagccttgggaagggtgggggcccagggaggggcatcat

SEQ ID NO: 42041 - DNA, 960 bp, Homo sapiens
ggggcacctgacctcgcccagagcacaccgggggtcaggtggcagcagtccggcccgacgcccatgcagcccaggtccctcgacttgatccgaggcagtgcctcctccacacggtcgcaaagagaccggccggcttcactctgccgccgacgccaggaacccctaccaacctgacatctcttaatatgggctcagcttccacgaccatgaattcgacttttcaaagctttttatcttcaggatccccaggcagaaccgcgtcctgtctcggagcctcatcccacgtccttaattgtctcgagccaaagtgctcaggcttctgatccgcggcaatcactgaagcctgcgtcggggtcaaagtcttactaaaaatcaaacacaagagacacattaaaatgccatcgaaggtccgaccagaactcacagactccagggaacgcctcagaagtggacctcactgcatctgccacacccgggactgctgtctgggacctacctggactcgggggcctgctgacagccaggggccccggctcctgccgcacacacgaagggcgctcaccctgaggttgcagtgccaggcccgaggccgcgcccctgtggccccgaggcctactcctgggaacagtcccccagggctgcggccacccccacaggctctagccgcatccagatgtccccagtgtccaagaaccaggggacggagggcacagggtgtgtgctgtgggcagggaaactgcggaaaggctctgcctcctgttctggaagcttctatctcatgtcactgattcccgggcctctgtgaccaggcaaggacgtggaacttcccaggagccaccgggagaggtgctgctggctttccagcatccagcctggcactgcctgcactgagccgcgccggctccacctccgaccctcagtgcatcctggcgacgctccctcaattctcccaaaaaaact

SEQ ID NO: 42042 - DNA, 3973 bp, Homo sapiens
ctcagaccaggtcacattctgggggtactggccgcaggaagttgagagggcaagtgacagtcagaggagaaaaaccagaaaaactgccaggctggtggggaaccaggtgtggcttgacggccacctctaagccccgagggaagagactgggcctctcgagcctggggcccgtttcctggagagcatgactacttctgtccagggttcctccagaaaaaatttattaacagaatgatggttaacagttgctgtctgcttacactacaaatgtccaaagagtggggggctcccagcccttgggggaggcagacaggacgagccagcacttccaatcccaccaggacatggcagggggccggctctgcgccaagcccacaggactggaccaaggctcgtcccactcatcagagggacaggaccagcccacagtcctgtgcaccccgggccaagcctctcctcccccactgccacgttctcaggttaatgacaagcgagtaaaagggaagatcctactcgctgacatccccaaccacacgcccacctctcagaactaacagctgccctggtcaaggctgacaggaagaagtgcatgttggggacatggcagacaccccaaaaatggccgggcaggcggacgaggcacccccaggagtgaccagatgccacccccagtgcgtgtccctcccagagctctgcagaggacgcctgtatggaagcaggtgctcaaagatgggcaacagaatcacagagagcaaaaggcgtctgcggagccgacagccccaaccaggagccaaacccagaccccagagggaggtggccaggcccgggcaggcaggggagacctgggaggccgggtgctgaggcccagggcagagccacgccctacaaagttccaggacacagaaagggggacccccaaaccgcagctgtcatcctcagctgcaacggcaaatagttaccccacggttctcccccaaccctgccccaagctgcagacgggtacacagacgcgcaaaggccacgcgctaggagctcagcgaggacggccgcggtgcgggcccagccgccagcgccgttttcttcccgagggacgtgtgctccctgccgcgctcctacagaaacggtggagaggccggggagggggggggggctcgggctcaacggaacaccctgcgcacccgccgcctcggccctagctccaggccctcttgccccaactctcagggtttcacctccccactcagggcaccgggaagggcgcgaccgccttcccttttccccactggaagggaattctgtcccggcaatcacggagacgacagcaaaagggatctggcccaggccgggcttccagacaccggcgcccttggaggccgccagagaacgctccagtctcggcccggggctcaggcgcacggactctgcctttgcagccgggtcgagggaaagagaggctccgcgcagcggctcgggccggcccaggacgcgggcgctgcaagatggcgatggtggcaagcccggcgcccgcccgtgctccctgcttccgcggccgcagcccgcgaggaaggcgccccgggacctgggcgggcccaggcaagggcaggtgggggcgctgggccggtccgggacctcgcggagttcgcgggaacggagaccccgggccctcccgcgtcaccgccgggggctgcgctttgggcccggtctgagggcagcggcctcctccacggtcatacccggcacccgcgccccgtccccttcccccacagcgcgcggccacggtcgccggcggcctccccgcgggaggcgcgctcccgcgagtggcccgggagcgcgcgccccaggacaccccgagctgcgcacggctcccgccccatcccggccccgcaggcccagccacggggtcatgaccggggacggggtagcggccggggatcgggacccggggtgccgtcccgggtccgacggggctggggtcggtggagctgggggtccggcggggcagcccagaggcccacaggcccttttgtgtcacctgcacgggccgcgggcggggagagcagactgcggcgctcgcgcacacgcagcggcccgcgcatgcgcaagacccttcccgcggtcccgcccccgaccgcggccacgcgcggacgccggcgcgcacgcgcactcgcacacaaagccggcggcccgcgggcgcgcgctcggtccgcccccgcgccccccgcccgcgcggcacccgccccgccccgcccccgcccgcggccggaaacgcgcgcgcgcgcggccttaccaagcggcaggcccttgttgagcaagtgcgagctgcccatcgagaggcgcgagcggccgcgggccccgaccactccggcgcgctgcgccgccgcgagcccggcgcgtggggcggcctcggcgccgtccgctgctccgcccgcccgcctgcgcctggccgccgccgtgccgagtctccgccgcgccgctgagccgcgctccgacgaccgcgcgggcggggacacggcggcgcgcgcgggcggggcctcgcggttggtctcctggttcccagcgcgggcggcgcacggactcacgcgggcggctcagggcccgcccggccgggacgcggctgcggggcggggcggggcgggagcctggcgggaagctcgcggggctgcagcccggcggaggccccgggcctggtgttccgcacgttctaaaccgcctgtccccgaggaagtcgggcagggtcgggccggactcagcgccgctggcgggagcgccgtccgccccgaggaccctgcgggcccggaagccgagacagggccgcccacgtcagcgcctggcgcgggcccgaacgtaaatggcgctcctccgcgccgcagccgcagccgccccgctcccttcccgctccgccagctgccgccctcccgcgctcgcttctcgccccgcggcctggcccgtgcgcctccgaggctggccaggggcaccgaggccgcgggccccccatcgcccccacccgagccctgatttaccgtccgagagccggcggcacatgggaccccgagaggagaagcgcgcctgccccagtgcgtccccaggcgggggagccccgactcctggagggaccgcgtcctgcccggcccgggaagttcagggctggagaaccccttccccgaccccatttctcttttaacaagagtagggtttgtagctaaccaacgtcctgacagctcagctctgctttccctttaagcattaatatcaaagccctgcctgctaccggtgaagccccgacccgggagggcccgaaagtcccttcagggagaggccgcactgggcctgctcacccaggggctgcccctgcagactctcccgaggggcccagggatattcctcgcgccgcgagtggacgcttccatccaccccatggggagggcctctgcgcgtggctactctgagccctctggaatgccgagatagttgcataatttcagaaaccacggcatggagacggaatgatgcagactcctatccgcgagatacctgctgtaatttcgctgtggttcgtgaggacgcgtcctgggctgccctgagaagcctacgtctccccttcgaggcccgggaagacctccaaccccgctgacaatgctgggccctcagccagacctgccctgcgtgccacgttctgttctaagatcgggctgccgagctgtggcctggaggaaacctggcaggtgtcaccagagctttggggagggtgaggccctgtcggggaagcccagtgggagtcatgaaggagggaacacgtgtggagcccttgtagggggaggggcagccctgcagagatctaagaaaaaattccagaaaaatgagcagcaacctccaaggccaggcatcggtgcaggggacaaggggtcgtagctggaggggcctaggtgaggctgccgggaagggacgatgtggttggtggagtgcacaggcaggg

SEQ ID NO: 42043 - DNA, 1798 bp, Homo sapiens
ctcttccgttgggaagtcggaggttccacatcaggattccagcagctgtaaatcggtcaaaataaggccaaagaaaaatagctggctacaggcgcatgcggccaggcgttttgttggcgttgcccttggtaccgcaggcacgagggacccacaggggaccaccccgcgggagccccaagtaactggacggacgccaagtcccccagcccgctcggccccagctccacccgcccgggccgcagcccgcaccccatcggcccgccccgggccaggagcatccccagctccggcgtctgcggcctgaacccggtagcgaattcaaggtggaaaccgccagccggggctatcgttgattggctgaacgagaggaaacccggcagtgattggttcgcgccttcttccgcctccggccgactgggcggatacgattggtgcaggggcatcggcccgcccccatcctgctccggccggcgcgtggcgtcatttcccggcgtgcagcgcgctcgcgcgtcccccgcccgctaatgttttggccgcttcaagatggcggtgcaggagtcggcggctcagttgtccatgaccctgaaggtccaggagtacccgaccctcaaggtgggcgcctgcgccgcgcaggctgagggcagcgaaggcgtctccagccagtgccctcgggccgcgaggggccgccccgggagggccagcggcgagggcggcgggagctgggcgcggcctcgcggggccgtgcgggcttctcaggggcgcccggtccgcgccgggcaggtgtggcgggggcggcggctttggccctgccaggcgcccgactgtggcccctctgcttgaagagctgcgtgagccgagccagcgacgactctggcagcgctaagggtggcgaatttggggctggggtggaagccggagtttgcggggcgtggggtctctggcgcccaggcagacggagtgcgcggcgtgcccagccagtgcccggccgccctcccgggagcccagggctgggaggtgccggctgcgccggtcgctagttaggaactgtagggagaaacctcacggcctgatggcacccagcgacctttttgatgggcgtcaccaaacctgaaatacagctcttgccgtccggctgccggttgcgtgaccttgggtggtcacctagccacgtcgcacttcttagaatgaaatttgtgctcctagtagaaggagccgatacttgttctttacctagttagtagaggatttgatatgaagcacctgggaaggaattccttaaaagatcaaggtcatagctttcctagagctgcggctgagcttcgtggttctgtgttgccttcctggagagctgcgtagtttctctctcctcccagagcgccctggtgttcacgtccgtctgaggacggacggtgtggcgacaggtgtggaggatgcagtatggccaggttgctgtgcgttcccccagccccagggcagttcagcgaagggctgaagagcacaggctgtgagccatcctgctggggtgtgaatcaggcttctctgtattcgtccttactgggagacatcagggcccggttggtgactgtttattcttgtcaggtttaagcagtggtagcgcctgtgtcacctcagggtgaaatgagtgaccacgtattgtttcaaacagtgcctagcattcattaaaaggtccctgctacagttagcgctgctgaagtcaggctgtaccctgctgtagctggtcttcataggaaagcagaagcaagcttctcctcctctttattaactagcggtttatttc

SEQ ID NO: 42044 - DNA, 2375 bp, Homo sapiens
atcagagttaagtcagcactcatcccacagtgtgttgaaatcagagttaagtcagcacttgtcccgcagcatgttgaaatcagagttaagttcatactggcctcgcagtgtgttgaaatcagagagttaagtcagcactgaccctgtagcatgttgaaatcagagttaagtcagcactcatcccgcagcatgttgaaatcatagttaagtcagcactcatcccactgtgtgtatcagtcaacacttgagggagttatgctttgtgctgacccttagtgcaaagtgtgtgggtcactgggggatggctgtgggccgatggcacctgcttcaccatggtccacgtttttaagctgtcccaggagcttccctgggagcatccccaggaccctctgctctctgtcttccaggaccttctggaccctgcacggtggcggatgctgatccagcagttccggtacgacaactaccgactacaccagctgggaaacaattctgtgttcaccctcaccctgcaggctggcctctcagccatcaagacaccgtatcctacctcccgtgcgcagtgcggtttggcctggggttggcatctttggtcatattttaacacgctgaccctgcaccttgccactcttgtcctcccaccacagacagccccgagctcccgtgtgctgcacttgcgtggtgtctggatggtcggggtggggccgtgttgaggggcctcggatgcgtcgtgcagccttcactctgggaagtggcgcgcttcctctctcatcatctcagaggccgccatgggcattgatctaaaagcccgattttgatgtgttctggcagccggcagattaccattcagaatagttttcccgtgtgattaccaagaaccttgcctgtgactgactctgtcccgcctgtgactgactctgtcccacctgtgaccgactctgtctgcctgtgactctgtccctgcctgtgactgactccatcctgcctgtgactctgtcccacctgcgactcactgagttcctgcctgtgactcactcggctcccgcctgcaacggacttggtccctgcctgcgactcactgtggccctgcctgtgactgagtctgtcccgtttgtgactgattccttcctgtgactgactctgtcccacctgcaactgacttcttcctgcctgtgacagactctgcccctgcctgcgactgagtctgtcccttcctgcaactgagtccatcccgcctgtgactctgtcctcgcctgtgactgactctgcccctgccctgtgactgtctcacctgtgactgactccgtcctgcctgtgactcagcctcttactgactctacccctgcctgtgactgactctgccctctcctgtgactgactctgtccccacctgtgactgactctgtccccacctgtgactgactgtcctcctgcaactgactctgtccccgcctatgaatgtctttcatgtgacctgcctcaggcccagagggcagtgagtgtttcgcgattgctgctggtacctggctgtgccggggtatgaatgagactcaggccccctcccttgtcccctctttgtggaactctgggcgagagggctggcgtgcttgcccactgcctgttcctaggtgccagcagaacgtccctgctgggtggctcttgtcctgcctggagaggttgcgtggccggggagagggcggcgggcgacggagccactctgtgcctgtggtcctggtgctggaggccggggtgagaaggcgcaggcttcttgtctccaccgaggcctcagtggggctgtttagctgtcgagtgcagcacttcctgtgcctcgaaagacagccccgtgtagtcagcatggcgcccacatagccagaagggcacgcagcccagggcagagtggccacagggggctgggctcaccccggctgccctgagtggcccccaacccttccttgacccgatgctcagacagtgctacaaggaggacggcagctccaagagccctgactgccctgtgtgcagccgctccctgaacaagctggcgcagcccctgcccatggcccactgtgccaactcccgcctggtctgcaagatttctggcgacgtgatgaacgagaacaatccgcccatgatgctgcccaacggctacgtctacggctacaatgtgaggggggcagggcaggggggccaggctggcacgcatcgccatcgggacagggctgtgtgggacgggcagggcaggggggccaggctggcacgcatcgccatcgggacagggctgtgtgggacgggcagggcggggggccaggctggcacgcgtcgccatcgggacagggctgtgtggggcgggcagggcagcggggccaggctggcac

SEQ ID NO: 42045 - DNA, 2855 bp, Homo sapiens
gcacccttttatactaatgagaactagtaacaacaaaaaaaaccacgctgtagaagacagagggaaactgctggatgggtgccttggaggaagccacaggccggggattggatgcacagggcaaggggcgctgagggagggtctggctgcagcttgctcagtgaagcaagaggcagggtgaggaaggggtgaggcggaggagcggctcggggctggctgcaagctaggagctgggagccactgacgcccagggacagaagctggtgctgcagagaggggcggcgcagggagtccctcttcttttcctttttaaaataattgctttactgagatataactcacacatcctgaaacccaccctgtaaaaacacgattaacagagttgtgagctaccaccaccgtaatgcaagggcacgcccatccccccgaaaaagaaaccccggcccgccgccggcggcccccgccctgcacccagccccgggagcccagtcgggcgtctgctctgcgtggcctgtgccgggcgccccgcgagtggggtccacaccacgctcctccgaagccacggtttcccaagcgcggtctccaggtccgtccgtccgcagccgacctcgcactcccctgcgttcgaggctgcggacttcggcggcaggacggacggcgcctctgcttctcattccgcccagggccagcccgggcccaggggtacctgctgtgcgtctggcgccgaggtgggccccgaagacccccaagcccgcccagggattcccttcccgaggccggagcggggaggcgccgcggggttcagggcgccctgcgcggggcgagctcgggggcgggggcccgcgcccgcccgtctgggcggtcctcaccggccctctgcaggtgaagggacctggctgcgagcccgcgggcgggcgtggcgttgaggcccagaccggaacttcctttcggcctcagtttcccggccggccccgcccccggcgcccgtacatgcggcccctttaaggactttctgcgccctcccgcctcttttttctcgtgcgtccccctccccacccccggcagcctgcctcgccctcgccgggagcgcgcctacgtcaccgcgcagacctcggccgcgtctttgcgcctgcgcctcctgggctggggtgagccattggctgtcgagctcagggcacgtgctagggggcggggccttgaccggaaagggtggggcaacggcgagaaaggccgcgtcgagcggtaggtgcagtcgtcgctgtggtgaccccaggtcctgatgcgtccggcccagggccagccaatggcggtagaggtcttgggcacctgacaagaggggcggtccccccgccggaaggggcggggcgaggcgagcggccgcgtcagcggtaggtggggctgtggttacgctgccgggcgggggtcgcgccggttcggtccccggggctctgcgggcgccgggcagagacctgcggccagggcgtgtcccgtgtgcccgagagcgccggcggcggggccggagggcgggccctgggccgagtgacaggccgcagccccccgagcaccgtcgaagccggcgcgcccgcccggtgcagccgctgtgcgagagcgaccccgcggtccaagcctcgcgtggccctgccgggccccttctttccccgagtagggcgcagcttcccagcctccgccccggcctcgcctggcgcttccttccgggtccttcggcctttccctggcggtgcggcaggccctcgcctcatcccaccaggcacgccgcggtgctcggccctgggtatccgggcaggctgcctccgttagggccgcccctgctctccggacgcgacttttcattggtctcagaatttcttggctcctcttggcctctgcagccttgctggaggctgccctgcggaatctgagtgaataagggaaacagcaacagtcacgttggggaaaagctgattcggacagcgccactggttcctttaacgcacgaccctcaatgcagcgtcccacacacgggattgtagaggtcccgagtttaaggttcacttttaaaactgcaatcaccgccgtaaaggccttgctggacacacatatttcccagagaggcacccacagatggaccccagcctcagggtcctcccggagctttcggtttatagtggaacccagtaaacacgttaataacaccgagagctataaaatacagatggtgatatagcatctctgccttacttatttctagatatggatcagaaactttcgaagttggtagaagagctcacaacttcaggagaaccccgactaaatcctgagaaaatgaaggaactgaagaaaatttgcaagtatgtcttagggttcagtaacagtaactgactggcccactgagcccaggacacacacagggccctgccctcctgcccccacctgggagagaaccacccgagggacacacccaggacattttctcggggccctgcagtacccggctctgacgggtggtcatgttctggggtcggggcgtgtggcgttggggaccccactgctctgtggttggtgcttctcttcattcccatttgtgtggtctggagcacatcctgtaggagttcttgagtgcacaaatgtgattcagagagaaacgtgcatctttttctttgctgctggacttttcgaagggaaagaatagagcttgctgatgggcgagttggtccatcgcctttagggtatgtccacctctgttcacttcctccaaggaaaacgccggaggggatctctgccgtcaccctcaggcagccagagattcatgggggaagcaaaacttcccctcggagggtggagcataagtcgaggac

SEQ ID NO: 42046 - DNA, 1844 bp, Homo sapiens
ctgcagacaacgaggctcggaggaggcaagcagcgaaccaaagctcccaccgtcaccagggaagggaggggagggcagggcagggaaggggcggaggaggggagagaagagggggagaggagagaagagggggaggggagagaagagggggaggggagagaagagggggaggggagagaagagggggaggggagagaagagggggaggggagagaagagggggaggggagagaagagggggaggggagagaagagggggaggagaggggtcgcctctcgaggcagagcaggcgggaaagggcgcggcccggctgcgacacccctaggccccccacccccgcaggcgcagagccggggcgctccccccattgcaccgcccgccctccaggccggaatcgaggtccccttcccagcgctgctggacgcccctcccgagcgctcccgaatccgaccagcccggaggcggctgcgcctccaggggctcccgtcaggcccctgccccccctgccctccctgccctggcgcgcccccgcccctagccgccatccccgcccgagggtcccagccagagccccggcccccggccccgcccgcgcctgctgggcgccccctggtggcctcggctgggccctgccgctgcgcccacggccctcgtgggaggcccctccctaccccggccgccctcgggcccccacggtctactaccccatggggaccggcatgtcaagcccctgcgtgggcgcctgcgccacccccccgccctccgcactcgcccccttgtcccagccccgcgtcctggggaggaggcttgggccgcagcccagcacccagaagtgcaacgcgcacgggtggggccaggctcgagtcagccggtgacgcagcctctgtgtgaccagggcggatggcccgacctctctgagcccccgtttccccgcctgtaaaagggggtggggctgcctcccagcgccgctgcgaggcgtgagtgagttacgactcagaacgcccaggtccgaggtgagcacacgcgacacccgcgagccacggccacgcgtgtccccagggcgcctcccgccacgggctggccaggagtgtccgcgctgtggggatacgaaggggcgcggccccagcgctgcggggcccgcagggagggcgcaggggccgagcatccgccccggggcatccacccatcaggcctcgccgtaaacttcctcctaacagccgctcctgcagccggaagatattgactcgaaggagaaacaatggcaggaataaaataaaaataaaaaagttaattatcctttgtgtttgtaatttaattaaagatgcagtaaagttttactgtttttccaggtgatgatgtttagagccccgagaagctatttgtgctggtgagattaaagtgcattttaaaatgttcctccagtactttcacatttgttgatagatttttaaattaaactttaaattgtaatctaaattacctccaacaattcatggtccctgtaatgaactcccaccgttcccgctgtcatccgtcgatgatggagtgcgagccgggagctgcagccccgcggccgccgaaccaaccgcggaggccaggcagcctcgccccagggaccccgcccacggcgccctacaccggcggccagtcagggaggccaacgccgcgagacggaagcagccataccccgcgggccaccagtgtggccagaaaagatctgcagggatgtgagggcagctcagagctgagatctaaggctggggcagaaccggacggcgcaacaagctagggagaaagcatccccggcgcggggtgcacggagccccagaccccacccgcctcc

SEQ ID NO: 42047 - DNA, 1452 bp, Homo sapiens
tttccttttctgtttcgttttaagactagtcaagtgcagtagtgagaaaggggaaagagtggaacaaggagttcgatctgtaatggactgaacaagcaacagagaaaactcactcccttggcaccagccacgagcacattcttgaagccaaactcatccatccgtactgggagatagatgatcatagaaacatcaagtgtgagtctggtttgagtttaaaacgaaaagtgctttagagttatggaaacttagcttcaaagaagaggcaccaaggatgccgcgcgaaaactcacgaggccacttaacacaggctgcgtgggaaacaggggctccgcgactgcgctcagattaacggaaaaagacacccctctagagtccggcagcagcgggcgggcaccggcgccttctccacacaggagaatctcggcgatttacacccccaggctacgcagaaaaagcggcttcggaatccgccgcaagtcccctcctcgggtcgccggggaagtctggcctcccgcgtctgggtccccttcgggacgccccaaggccccgtttaccacggcgactccccgcctctcgcgccaccgaaccacggcgcggggccaccagggcgggcctcgcctcgtgcggaaaagtcgcctcgacgggcggcgcagacggcggaggcagggggacgtagtccacgcgcccagctcggagcgcagggccccgcgcccacgaccgcccgcgccctccacgtgccgcgggcaaagctcggagccggtgcgccgaggaatgggcagcgtggacaagagaggagggggcggcggcgcgctccgcccgggctcggtacctgagcgcggccgcgggggtgcggagcgagaagactgccggccgcccaggccccgctcgctcagggcgacgcgcctcagccgcggcggaacaaaaccgcggccgccgccccgccccctccggccgccctcattggccgcccgcgccccgccgccgccgcgagcccgtcagccgccgccttctccacgccggccctcagccgcgccgcgccgacggagggggcggggcctccaggcgcccaggctcgcaccgcccaccgagtccgcagcgcgccctgtgcgagggtctggccccgcccccggatcgacgccccgccccctgcgcgcgtgcgtgcctggcactcggcggcgtcctccaggcctagaaggcaagacctgtggcggcggcgacctgaggcggcggggcaggacgcgcagcgaggagggcccggtcggcactagccgtggctcaggcggtgacccagcccggggcgcgcggtctcggggcccgaggctcgccgccgccgccttcccgcctgccgtctgcccgctgtgtagccgttggcaggtcgctcgccctctcgggtcgcacttctgcacctgcacagtgtgaattaggccctcgctcatggtcgccgagggc

SEQ ID NO: 42048 - DNA, 2646 bp, Homo sapiens
gagccaagatcgcgtcaccgcactccagcctgtgagacagagtgagaccctgtctttaaaaaaaaaaaaaaaaaaaaaaaagtaacgcaaaggtagtttcttgcatgattccgcgctcagcataattttttccttttggcacagtgaagttgggtccgatttttttttttcctttcacgcctcccatccccaacccatcagcaagtctcacaggtcctgccttcagaagcctatcccgaaccacgcatttccctccaccttcactgctccatctcggccaagtcaccacgcctttcagggaactcaggagcaacaagcccccagtgcgggacgagccaccccaaagcccctcgagaagttttctctaaccacagccccgaaaagccccgccactacgaccactggcacccctgcttatttcctccagaccctcctcggccgtcccaccccatcaagccctcctttcgctcgcatctccaccctccctgcacactgcctaacccagaaaatggccaagcaggtaagccctgtcaactcacttctcctcgggactcgggtgtccctgacttccacgtgttcacgagaagctcgtcagagaccctgacctctcccgggagcacaacacagactcgaactggctaactcgggctgacgccggttcagctgactcccatcctggcaagaggcttccggagtgttccagcgcctcccaggcctgctgcggccgccccagtccacgggccgcgcggagaccaagataaaaggacgcagggtgccgacctgaccgatcccggcaccgcgagagcgcgacgaggtccctggagcccgcggcctcgtcaagggccccaccgcgccccgacccccgggtcccgcgcccacctctcgggtctgcgctcggcgccgcggtgctctgcctcctcggcgtcttcgggcctccagcgcctgccgtcggctctgcgcttccgtcccaggctccatcgcgcgggggacggcgggctgcggggagggacgcggtcggctgggcacgggaggttcgggaccgccttacaacctccgccctcccacaccccggccccgcacaacccccgccccacggggcacgcgctccctcgcccgccgcgcagcccggcctcacctggcgtcaccgtcgcagcggctctgatgcctcggcgggcttcgcgggcggcaggccatggcagcacgggccgggcgcgcagcgcagggccgaggctgaggcggcggcggcgcgggcagagagcgcagagtagagcagggcagggcctgaggcagaaacccgcgtccccgcgccggcgctcacgagctctgcgcgccccgcccccaaccgcctttatgtgggcgccgggccccgcccctcggcctcccgcgcgcgccgggtcgggcgagaccatcgggccacgccgcaggggtccactcagctgtgcgcgcctcgcgagccgactggggctagggcgaggcctcgggaccgcgggcagccgcgaagcccgactgcccggccctcggctcgggagccagatggacgccgtgggctgaggagaggcctgaggaaaaggttgcccccacccgcgggattgaggcggccgggccgccgcgggcctctgcgacgctgataggtcgcgccttggcgggcgggggcagctttggcgggagattcggccgcgcgcgacgcggcgcaggtcgtgggggaagggtaagcggcacgtttctcggcctgggtcgtggcgcatctcccattggttccggcctgggtggagcgcggctctgcttggttcctgcccaggtgggggcgtgtctcctccctggcgggaacccggaacccggaacccggaaggcgcggcctgtggcgggtactgactgcttcccacggtcccgtggccgctgcaggccccgtacgcgccgtctattgttttgagccgcttaaagttttggagtaaccttttaggtcgcaacagttgacaactacactgagtctttccggtcccactgccctggccgttgaccgcacaccggccaccgactgagccgctagtttcggttgccgctgcctccctgcccgtccatgacgtcctccactgtgtcgccggtgcatgacgctcccaccctctgcctggagttgactgggtttgtatcctgaagaatccctggctcagcaggtaggttccacctggaggcgaggtcctgtagatccgcaccatcccgtcccgcttccccgccgtcacagttgcagctgacggccccgcggatccagccaactagaaccccaacgggtgcactacacctgagaacaggttcccacagcttcctgttggggacaacgtgagggatgcaggggagagtggaaccagccaaaagagtgggcagtggggtcaggtccaggaggctgagccccagggatgcttgggatccctctaaggccttacacctctgggagggccggacttttgcacctgctgccctcaggactgtgccttggtgcgtccaccgcccccttttgaactcaaaaaagtcatcctcagactaggacggacacatcctgtccccttcctccccaggccctgggcatcccataaccctcaacactgtaaactaaaaataaaatcctggcagggcgcggtggctcatgcctgt

SEQ ID NO: 42049 - DNA, 1252 bp, Homo sapiens
cgagggagggctatgcgggagggctcagtgactggtgtcttgtggacaccttgcctggtgtcacacaagcccaggagtgttggagtccacaccagctacacccagcacctcccaggggtcgtggcaccagagcctggctctggcctgccatgtgccctccgcagccccacaggcaccacactcttaccagatgtcaaaggcctgcacagcagggttggtgctggccacacggatggtgaggagctgcacgggcaagttcgagtctggcgagagctcatgctgccgagactccgtcacagtcaggtgcacgtcctgctgctgggccacgtgcactcggtaggtggttaccttcatcacccacgtgtctgtcacaatcacacgggcacctggtgcaccggtggcaaacttgtcaatccgccggaactcagtgttgacagaggaggcaacagcctgccagccagactgtgggagggcgtagagggccagggtgcgcgccagtgggtggcaggcccaccggtcacgggaccagtagtagatcaggatgcaggcgatggaggggagggtcacggccagcagcaggaagagccgccaggcctcaggggcctggctgagggcgtggagccgcttttctgaagccgcaaggcacatgcccacatagtagcctgcaaaggacagggtgagcctcaggggaaagtgagtggcaggccgctgtccaccccccgacagccctggacctggccctctgcccgggttccagggtcagctcccagggtaattgggctttacccactctgcacttccccagccggccactctctccctgcctgtggcaaaggcaggatatattagcggaaaaggtttttaatttgctgctttagtttcacacaatacgtaagtgttgaaaaaactacaaaagcctagaaagggaaaaataaacacaatcaggtgtcacctcaggcagagctgacccctggcctgccagggcagctgcctggacaggatctcagtctctcaatctcacccgctctgaggaggctgatcaaatgtggtgcatcccagagctgaaaagttatgtgcgagaaaggaagcaagtctcaaagaatgatgggacatgtccagaggacacggagccagcttcagggccctgctggccagatcgaggacaatttgaaggtccaaataagccatggagatggtgaggagttgcaccagcaggttccagttggcaaaaagtaatagtccacatttggag

SEQ ID NO: 42050 - DNA, 1961 bp, Homo sapiens
cctgggcgcctccacccgacacctgcctccagttcttctgggcccaggcagctgcatcctcaaaccaggatgtggagggtcacccctcttgtatccccagagtggcaaacctggccagccactggccatctgtcctcccagggctgcgtctgcccccgtgtcctccagaggtacccccttgaaatccccctccagccactgcacaccccacctcccacctgtccgtcatccaatcagctgagagagggaccttccagagccccagctagcacctggggcccagcccagcacccccctggacaactctgagcgtcccacctgcactgcacagaggccctccccagcctctgcccctgtggcgcccccaaactggaactgcctccaaatccgcctgttctctccacacccaccttccaaggcctagtgcagtgccaccctccacacagcccctccgaccccttccgttggactcaatcaacagttgccttctcctggccactgcccccaaccacgacaagcaagggctgcttggccttgcaacccccaggcacgtgacggttcaggacttggtgggccggagcatcccttgcccaaggttctgaacttgggttcccgtcacctgcaagtcagtgccggcggcgcccctaagcgcgctcagcccacgccgcggtccctctggatgaggaccggcgcctctccccagctgcgcccaggcgctttcggggcctcggggagctggcggaggcctcctcctgacctcccagcaagccctgcgcaggagaggatgcggccggccggcccgagcagcctcaccgagcggcagcagcgagtggcacaacagcgtggcggccgtgcggcgcaagtggaagggcacgaaggcggcgtcctcgctgcccagccagcccgacagcaggttctgcaccgtgagccccgccgcgtggaactcgttgggcgtgaacacgaagcacacggcgaacaccagataggcgagagtgaaggtcacctcggggctgtccatcgcgcagccgccgggaagctgtcgagctaggcccccgccccggcgcgcggacgaggccgcagcgcccagtcccggacctgtcggttgcggcggccgccgcccggccgcccgcggggcactctaggacatggagtcccgccgcccggccgcccgcggggcactctaggacatggagtcccgccgcccggccgcccgcggggcactctaggacatggagtcccgccgcccggccgcccgcggggcactctagggcatggagtcccgccgctcggccgctcgcggggcgctctgggagatgcagtccccgtgcgggtgcggcctctcttctcggccggccctggaggcggcaccgcacctgtgcattgagcacaggtggggaaacttaggcctgagcgaggccctggccatgaagccccgcccagtagcgtcagttgcggaactcgaaattcatggggcgactgcgagcccggggtctcagcttcagacaccctggcgtgccctccactccggaaacggaaccgtcggcgcccgagcggggggtggggggggagggagggcggagccggcgaggcacagcttcccattggacgcccgccctcctgcggtcctgcccccggccgcgcgctgattggccgcgcgaaggcaaccgtcggcgtttgaaactccggcgcgccggcggccatcaagggctagaagcgcgacggcggtagcagctaggcttggcccccggcgtggagcagacgcggacccctccttcctggcggcggcggcgcgggctcagagcccggcaacgggcgggcgggcaggtaggagagcggctacacggcgcggggaggctggggtcctgggggcgcgaggccgtcccgccccgccccgccctcggccctcgccctcccgccccggccgccgctttccccgggaagcgtcccccacggctcctcct

SEQ ID NO: 42051 - DNA, 1074 bp, Homo sapiens
gtgcttcctgcccgcggtggtccctcgtctgctccggcccctgcggccccgactgggagacccaagcccagaggcgcgcccggccccaccgccccctccgcccgcccgcctccggggctccccgcgcggctcggagattatgcaaatccccggcggctccttaattaaatccctaacgaggcgctggggccgggccaggggcggcgctgaaagccggggtcacgctccagaggggcccggcccgtctgcgaccagggggcccccgcgcccctcccggcctgggaaccacggcgcagcctgagggggcgggtctcccctcctccctccctcccctcctgcccctccctcccctcctgcccctccctcccctcctgcccctccctcccctcctccccctccctctccctccttcccccctccgctctgccccgctcgcccggccgctcccggcctcggtgtccccaccgggaggcgcgcgcggaccctccgggcgccgagggctggggtcccgggcgcgaggccgccgggtcgggggcggggccggcgggggcagcggcccccagcgccccgcgctcccctttcagccgcctgttgttgggccaacagctcgggccgcagccgcctgaaaggccgggattagcgaacattagcggcctttgagcggcgcccggggagccccttccgcccgccacgcccgcgccggccggagccccccgccccgcgccccgcgccccgctcccgaccccgctccgccagcagcggcccggagctgccctttgtgcagagctggggcggcccgtaccgtcgtgcccttcggagagacccaagggtgttctccaggtgggaggggtggtgcccccgctaggtcacggccgccgcccccaccccggcccaccccgccttccacccccaccccaggccccggcttccagcccttcttcgcaaccccagcaccgcctcctcccggcagccagcgggagtttcctgagctcagccccaggtcgctgggtccctgcacgcctcccgtcctcctggaagccctggctccaaggttccataggcaggttagcaccc

SEQ ID NO: 42052 - DNA, 1363 bp, Homo sapiens
cccggctcccacgccctcgagaccgccgggcgcccccgcccggccacgccccctcggatgccccgctccgccccgagggggcgtgccctgcgcccccgcgagccgggcggggaccgggcgggagcggggcggggccggggcggggcgcggaccgtcccccactggctgcggcgcgcggggcagcccaggctcagtgcgcggtggcggcggcgtcgcgggcagctggcgccgcgcggtcctgctctgccggtcgcacggacgcaccggcgggccgccggccggagggacggggcgggagctgggcccgcggacagcgagccggagcgggagccgcgcgtagcgagccgggctccggcgctcgccaggtccgtgcttggggccgggcaggctcgcggaggggtccaacggtgctcgcggaggggtcggggcgcggctgtcgcggaaccacagaggtccctgcagcgggccgggccggggcgcgggcttcccgctccggaaagtttgccgccgccgccgccctgggagggctttgcagcagccagggagggaagggggaggagggagggaccgcggcggggaggaggcggccggcgccaggcggcccgggagccctgggcggcggcggcggcgggcggggcggctgggggtcggaggggtcgggacgcaggagccggccaccgccgctttcgtccctgtccgcccctctaacgagctgccttcctcctcctgtagtctcccgagcggcgcccgcctcccgccggtgcccgcgccgggccgtggggggcagcatgcccgcgcgcgctgcctgaggacgccgcggcccccgcccccgccatgggcgcccctgcctgcgccctcgcgctctgcgtggccgtggccatcgtggccggcgcctcctcggagtccttggggacggagcagcgcgtcgtggggcgagcggcaggtaagaagggacccactaggcacgggagaggccggcccgtgcgggcagaggcgttggggacgggaaccggccccgggtcggaggggccgccgggtgtgagtgacgccccggggttagagcccggattccgctgcctccttgccggagagcgcggccagagctagcgcggcgacttgtggtgcgcccggagccgcagctaccctccaagtgcgaggccaccacggggagccaggctgggggttggcgtccgcagccccgatcccctgcgactccctagccctggcctgtcgggagggcgcggggggccccatttccacgattcccgctgttgttattcgggttctgcgcagacggaaagttcccattgttggcgtccccctcccccgggccccagtttgtggccagcttcggccaaggcga

SEQ ID NO: 42053 - DNA, 2000 bp, Homo sapiens
cgtgggccgggccgagagctccggtgccgccgccgcgtacacccgcagccggctccggacgggcgaggggggcgcgcacagctcagcccggcggccgcgcggagggaggccttggcccggtgagctcgcgccccacccgggccgaggcccgaacagccgcttctttgtacctcgacgcggccacagaccgcgcattgatggcggctcggcggctcgcggggaggtgtgagcgaccgcgggcgcggcgggccggggagggcgcctggagggccgaggcagatggcgtccgccccgcccgcgcccccgcgcccctttctccgtcggcggctgcagcctcccggaacaatgtcattttttttatgaatgaaagtggcccggcgcttgaatgtgcgtgtcattcagcggcgtgacaggggccgtcgggaggtcagcgcgcgcttttagcgtctgctcgggcggccccgcttccaggggtgccggaggggcggccgcggggggagcttggctttcgcattctcattcagataaagatattactccctacggcccgggaatgtcagccagccccggggaagggcggcggccaggctgcggagcctctcctggaccccctgcgggcgcgcggggcctcccccagtcgctcctggaacgccccgcccacccctcccccggggcggcgcccccgcccgcactggagctggtgaaacaggtagtgagttgatcggtcaataaacttaatccggttccttaacaagatgggccgggcagtaaaaatacaaagacctcgtgaaatggactgaggtctaggctggcgcttgcccgggaacataaattatggagccttggctcgcaggggtcaagggcggtgggaaaggttttggccactggactgccctggccaccccaggccctgccaggacagcccccatctccccagggggccgtattcctggttgggacctggagtgaccccccagggtgcagggaggtacacaaggtcggctctcccacagtcccaccccacccagcaggggtctgggggtgcagggcctttcccgaaggtgctggctgcaacctcccccactcctcctctgcagggctggactttgagccgcgtgggcctctgggtggttcattaacctgggctgagcctggcctccaggtccttgtgtgagcctaggaaccccttgttacccaccccccagctccccagccctcaggtctcacttggggctagatctggggctgtggcaccccttgttacagctgagcttgagtgggagcccaggggcttggggtctcctggaggacggggatctaaagtcacctcatctagggaggcatgcagccctcacctgagtgattcaggagtgaatgagccaggagtggagccacctttggtggggtaggggtcagcctggacctctaggctgccagctcaggctcgggtgccctcttcgaacctcagtttccttacctgtccaagagaaccgataatggcaggctgtttgaaggattaggccagataaccctggcaagccctctttagcctgcccagcctccagatcccttttttccggactttattgtgaaactccaggtggggagacagggaggctggacttttgggggccccctcctcttaggctattttatagctcctacctggcaatacctcctgtaccccagagagctgcagagaacttcatgtgcatccgaaaccagaatgtgttgtttcctgaccccaggccctcatctcaccccaaaacccaaataaacccctggggcagccagctccggaagcgagtctggatttgatccttgttctctggggtcaacccgaggggcttatgatggagcaaggctcccccatcctctcagccatgctccctcacatgcactgggcctccactgcagagacccagagcctggagaaaggttccccaggccagagtttggccgtccccagcaccctgcctaatggacatcagtcttggggc

SEQ ID NO: 42054 - DNA, 695 bp, Homo sapiens
ggctgtggtgccctgggcagatgagggcctccaagagcagggacgagagcatgagcagggtgccacgtgcagcccacctacaacactgtgggtgtggaggtggagatttggaacctgcagggcaccagcagtcacccaacagctgtttcattcgcccagaagggactcacaaaacggcagctccctcagccactgctgcgcaggaatctgggacatgtcgggcacagagaaggccgactgcccgagctggtgtcattactgagcgtgggtggggtcaggaagagggagaggcaagagagagcctggtaattagaggaaacagaagccaacagaggtggaggttggagcgggaggagagggggctgtgggaagaggaagaggggccaggaagggacgaactgctctcggagaggcagagactgacatgccagagggttcctggctgggactgctggtcaaaggtggagaggcagccaggcagaggctacaatgtgccctttggagccagaagggcccagctcggatccagcaaagggaccagcctccctatgtgagtctccgatccctctcccgcgcccaccaccccactcaccccgtgggcatgccgttggccggggccagcttgccagcctgctggtccatctccagctgcgagatcaagccatcgatctgcccgatcatttgctgcacccttt

SEQ ID NO: 42055 - DNA, 2284 bp, Homo sapiens
atggtggctcctgtaatcccagcactttgggaggccaaagcaggaggatcagttgagccttggagttcaagaccaggctgggcaacataccaagaccctgtctctacaaaaaaactacaaaaaaaaaaattagctgggtgttgtgtggcacaactaacaacttgggaggctgaggcagaaggatagcttgagcccaggagtttgaggtgcagtgagtatgatcgcaccactgcactaattattttacttgagtccctcttagcaagttttatgtttattccaattttacaaataaggacatagactcaaataagttggttaattagagagagagaggaggtgggcacaccctgggacagcattcactccagacagcacctgaggctaggggggctaaagccacgcaccctgaggaccctcagcggctccggagtccccgtgttccccgggtgccggtcgcggcctaatcacaccacaggggtttgtaggtgctggcatcacctcatcagtgacggaccaggaaggctcctgcagcccagcaggtcctgctcgccggtgtctgccctgcccacccagtctcgtctccgggaccccaaacgtgaccaaagggcacggccgtcctcgtgcgtggacacgttccaccaagcttactcgcgcagggcgcgccagggctgcccagcccttcagaattttcccactgtctctgaggcagtgacccgggggacccggccgcctaaggtcacaacacacggcagaggcccagcggctccgcccggcgctggcggcccagcccgcgacgagacccggggccccacggtcccgcaggggctccggaggccgggaccaccgggctccccgcatcgccgtgacaaccagcccgaacccgcgggtcgtccgcgctcccgacccaccagccgggagccggccccgccctggggtgcccgccgcttaccccgcgggacggtgtaccgaggcggcggcgggaggcgggcgggcgcccggccgcggcagctcctcagtaagatggacgccatgtgctcgggcgcggcggccgctccggcctcctgcgctgcctccttctccgcggcggccgcggctcttcgccgtcccggcggcgcttcagacccggcccgcgcggacggctgacagaggcggctggcctcggacgggaggcgctctcctcaaggacccggcaccagcggcggccttgtcccggcacagacgtccggaggcgcggggcggggcggccaggccgcggctcccattgggcccctcagcgcccgccgctggccaggtgaggggcggaccgcgccaccgcggactaccggttccggcgtgcaccgggacggcctgcacgctggggtgcggactaccgatcccggcgtgcaccggagcggcggactaccctgaggcgcggactaccggtcccggcgtgcaccggggcggctggctcctggggctcgctgcatcctggttcccgtcgtaccgtggacgccggggctcgcagcgtggcggccgcaggagctgagggagtcggccgcgcttgcgcggggagtgtcttttcgtctccgggcggcggcagcagcgcgtgtgtccggaacttttctgggactaagtcctgcacccacgagtagaaaacggctcctgggagcttggggctccaagggcaagtcaggggacgctggggatggaggggcgccctcgacgccctcggccgcggtccctcgccggcccccctgctctgtggctctgccctcggcggtctgcactctggcgcgcgcagctctgagtgcctcttccctgcgtaccgggcggcgctccccagatacggcgctgctcggcgtcgggagtccccgtcaccactggggggacgggagcgcagggtcccgccccgaaggacagggccatgccggcccctggaggcgagggcactaggccgggtggcggcgcagccagcatagcggccccccatcccggcacaccgcgtcctcccgtctgagcgggaggggtagatatgggtcctgcgttggcgcggggggacccctcgtttcgctctggcctaagcagcccctggggtcccgcgcgccgcaagagcgccagacttcctaacctgggccataccctgtccgctccacttcccagtccaagaaggaacagccgaagcccaggacgccaaggacctggctcgaagtctccagaattcccgccagagctgggctgggctcgcggaccgctcatgcgccgtctcccaggagcctccccccagcccagtttaatagccggc

SEQ ID NO: 42056 - DNA, 2425 bp, Homo sapiens
tccttggtggctggaggtgggtccggggaggcaggacctgggctgaggtgtcgttctatagcccgggtagcgcactttcacaaagctctccttgaccaaactctcgccaggctcccctgggcccgcttctcagcgagggctcaagctgggcctgtaaagctcgagcagacactaaggctcaaggccgaaggtgttcccggctccctgaacctgcgtgacagaaaacccaaggccgccggctccggcagcacctggaggcaggagccgaacttccatgggcggcgggcagcaaatcacaccggcttcaaccgcccggcccgcccactttttgcagcgtctgacttccccgctcgcccgcgccgcttcctcctcctccctgtgccgcacgcagtcgcccgcgccaccccctgaagcccggctctaccgcagcggcgctggggtagcgcccctggaccaggcgtcctcccctcgcgagcggtcctcccgcagccgcgcccagctccgggtcggaccctcgcccgggggactcgttcacgccctgcggccgttaggcgggaagagcacgacgccctgccctgccccgtcgtggcgtctgaccctctccgccacgtctgttctgaggctccgggcccgccacggcggggcctctgcggcggtttccccacccgtccccgcactgccgctccgcgaggcggacgccgctagcagcctcccgcgggccccaggccccgcgcccctctcacgggacaggagcttggggacccgcgcgggcgggccgcgcgcccaacgccagcctccgcggccgcgcgcccacggctcgggggcgccggctccggacggtgattgggcgcggatcgtgacgtcactgagcgcggcgcccgcgggcgccgggtctgggccgggtgcgcgccgccgagtagcgggagcagggcgcgcgcccggcgctactctgaggcggctcgcggggcccgcggcccggccctcccggcgctgccagccccgcccgcccgcgcggcccccacccgccgcgtgcctgcccgccccgcccgtgcgcggccccggcgcggatttgaaaagcccggtccgcgggccccgcgagcgcggcagccaatcagcggcgcgcacttttcccgcggcttctgcgaggcggcggcggccccggctgcggcggcggcggcgggcgggaggcgcgggggcggggtcggcgccgcgcgcgagagcctcggcctggccgcgctgcgcccgccgccgccgccgccccctccccgcctgggccctaccgccgcacggccccggccccctcccagcctgccgctccggagagccgcccgccgaggatgcgacgcaccgcaggtcactggggcgcccgcccaacagtcgcgggccgccaaccgccggggctggggccgggaggccgggctgtgggaggcctgaggggcggcggggaggaccgcggaggcctgagggggcgggagcgccgggaggagtgggggcactgaggaggcctgaggggccggctcaggggctgggggaccgggaggccgggcggcctgagagggtcgtggggaccgcgaggaccgcggaggcctgagggccggcgggaggaccgggcggaccgcggaggccgggacgagtccgggcaggggaggggcggcggcctgcgggcggcggcggctaacggggccgggcgggcgggcgcggccatgttgggcccggccgggccctgcggctgcacctgtgcccggcccggccgaggcggccgcctttgttcccgcggcgccgagcgggtcgggccggcctttgtgcggcgcccccggtccggggcggccgcggtgggaggggcaggttggggtcccggggccggcgccggggccaggggtcgggccgagggtcgctttttgtttgcaggcggtgtctggcgttgacactcgcggcgcccgggcgttggtcagcgcggacgctcccccgggaagccgggccgcggtccggcccttggcaggtggaggcgggggtgagccgggtgtgggtaccctgctggggggctgcgcgccctcggcgtccgggcctccgcctgggatgttcccctcgccccaggatgcagattgatagtccttgaagcctcagtgcatgagatgggacctggcgacttaatggctggttttgctccactcacaggaaccgtggtttaaaatctcggcgtttaaaaaatgctggtcttaagtttcggtagaaataaaatggatgagggtattgtataggacccattgcagcacgaatctttctgtgcccacgatgggctttgacattcaagtggaaacatagtatcaaaactgatgtggtgacgttaatcgtttttaggtagataacgtgtattttgtgtgtgtgtgtgtgtgtgtgtgtgtgagagagagagagagagagagag

SEQ ID NO: 42057 - DNA, 718 bp, Homo sapiens
agagactaggccatgttggccaggctggtctcgaactcctgacctcaagtgatctgcctgtcttggcctcccaaagtgttcggattacaggcgtaagccaccatgcctggccaaaaaaactttttttaattattctgttgctatctggcactccacatctgccttagattttctccatagcacatacctccaacattccatgtgaattcctggctgcattgggtcatctgtgaaggcagggacttttttccttttgcttggcttgctgtcatgtcctcagcacctggaatggtacctgagtgactgtcaggcattcagtgactatttgaatacatacacagccctcagtacttcgtatgccttagggggcataatatgtcccagaaatggtgtgaatgaaggggagtggtgtgagcattttgccttgatgtggagttggaaaggtggagggccatgggctggtggcagaggtcacagaagagccttatgcaccattagcagggctggagaactgtgacttaaccaatgcacaggaggcaaggctgggaaggtgtggacaggtgggagagaatgagcagaggcagcattgcccggactgggccatagcgtgagagtggtgcaggagagggtccttggtccaatccttacagatggaaagattgggtagttgctggtactgttacctctctgtgaaccaggggaagggaaagtgggcctc

SEQ ID NO: 42058 - DNA, 825 bp, Homo sapiens
ttttgggtattattctgttttcctaatgatttttatttcataaaaatgtgaatttctagatttttggttaaaatatgtgttagaaataggaggcttctgtgttctttcccctccaaaattcggagttggtgtaatctttgtagagccttgctacacaaatctttcagcagcaaagcatcttcttctcattgaatcctcacagcaggaaattgaatcccaaagatgtcaagtaactgatccaaagtcacaaggctgtatgtgatgaagttagaactcctgcagggcctgacctctgattctgtaccctgggaacttactttgttttgcctcttggaaaactaacatacagcagtctatatgtgcatggaagactgagccattatatttctgccagtcagtgtggcagtgtacttctgcctgatatttcttcattcattgagtatcagttgtgtgccaatgatgagccaagacctatgtcctcgttcccatgggttttataggcctgtaatgggatgaaatggggagggacagtgagcaaaggtcatatctttgaaaaatctgtgaaatactcctgccaaaaaaaaaaaaaatcaaacctgagtccagtcaagctcctatgtttaacaaccaatctacaggaaatacaggggcaagagaaatactacagagttgccattggcaacactgagaaatgtgggaaactataagaccagtaagccatactcatcaacagggaaaaatgaaggggactgatgacaagagactggaggaacatggactaatttttattgtagggcttatctgtgtttgtgtcagatcagtttg

SEQ ID NO: 42059 - DNA, 2972 bp, Homo sapiens
aacgtttaaacaaccatggggcttcaatagtctgcaaaactactcggtttatttcgcacggaaagcgatacaatataaagtttaggaaaaaagaaaacaaacctcacacacccacttattggaatgacgcaaaacggcgtgtagaaaagagtaaaacggacacagagcgctccggacggccggggtctttgcgaggtgagaacaagaaaatccagtcagcggacactggagctaccgagcccaggccgccccttcctcacgcgggggtttctctcgggatccccgccctcgcccaggtcaccagggctgcgtccccgacgggaaaccccgatgggagaccccgctggggccggcgcacccccgctccaagagtcggtcgcttcggcacggtgggggattagggtggtgaggaccgaaggcgggggaggcgggggcgggtggggatgagtacccgggggcccagggaggggagtgaggacctgggggtcgtagcgagaacccggggcccggcggggaggagattgaggatcccaggggaggtgaaaacttgggtaggggtgaggacgaaaagtagggaggtgaggaccctagtgggggattcccagggggcgaggaggggcggggggtcctgaagacccacggtggggatgagaaccgaggtgggagatgaggatcgaggcgggggatgaggacccagggggaggtgaggactggagggaggtattcggaggagcgaggagggggcgtgagggcgggccgggggggttaacagtctgaagggggatgggaaggttgggggagggagcgaggagggtccggagttgggtgtgcgggtcggaggtgggaaggttgggaatctgggggccgcggggcgccacgcctgccttacctcgtccaccgtgcggcgcgggaggtgcagcgtcccgagtagcaacttgagcttcactgccgacgagaggccatggaagcagagacggatgttgtcgatgaccgcggccgtgagcagggacgcgatgctgggcggcgcccacagctcgtccgtggcccccagcttgttgtgcagccacaggcccgtgtcgctctcccgcatggacgccatcttgggggaaagcgcgcgccgctgccccggcatcttatgaagacacctacgcgtccctcgctaggaccccaacatggcggcgcccgtcgggctgcgggccgcagaggcggcgcaggtggcgcggtcccacgagcggggcttcccgggagagcgcttctgggtggcgaccgcgtctccgggtagcggccgcgtcttcgggaagctttgtggcaaagccgagagccggaaggacggggtgccgctgagcaaggactatcggcttccgtaaaacatcatggcggcgccctctgctggctctcgggaagaccgcaaaaaatgacgtcacgagcaggcgcgcgtattcgcgtcttgggagcccgggctgcggcctggcattcgcagtgcaggtgtcaagcgccgcagacttgctgctcgcgcggtggggcggaggctccctgtggcacctgccccgctgtccgctcttcgctttttccccgcttgggtctcggcgcggaccgtgtggacgccccgcccccgcgggcccagcacctgcacggagaggagccgcggccctgcggagcgagcctgcgggatcccggtcgcagcgctgagcttccgtcccccgctgagcccgctctgcccgtggcgcgccgccgacggggctgcgctgagcatgcgggtcggagggcgctcgggagctgtccaggggcactcgtgaccccacagtgcagggaggccccggcccccagtcgggctggagccgccaggcaggagccagtagtgaacttttcagttttaaaagcttgtcattagatacaaacatgagtaaaagttaaacttcattttattaaattcgttttacccttttgtctttttgacgaggccttcctatgttggccaggctggtctcaaactcctgggctcaagcgatccgcccgcccgcctctgcctcccagagtgctggggttacaggtcggggccgccttgcttggcttctgtattatatcttttttttaaaagatcttttccttattgttccactgccatgctcctgccgccgttcacagctattgccactgggcggtgggaacgccgggagaacagggctcagcccagctgctagcagtgccctggccctggcggcttgaacttggcagtcctgcggaagtcacacgggggaaacccgcaaatgctacaaatcagtgctggagcggtggttttgttgattgcttaaactgaagaaagtgatagagaaaatgttgatgataaagattaaacttaaaactgtcatgtcgacaaccgttacattgcaaatagcacataaaatttaagagaatattttttaaatgattcaaaagtgtcgaattcagcaaagacaagttattgactaatgggtgaagttgtgacatcagtggggctagtgctgaaagaagtttaatgattaggccggtcacggtggctcacgcctgtaatcccagcactttgggaggccaaggcgggcggatcacctgaggtcgggagttcgagaccagcctggccagcatggagaaacctcgtctctactaaaaatacaaaactagccgggcttggtggcgcatggcttgcctgtaagcccagctactcgggaggctgaggcaggagaatggcttgaacccgggaggcggagtctgcggtgagccgagattttgccattgcactccagcctgggccacaagagcaaaactccctctcaaaaaaaaaaaaaaaagtttaataattataatctgagggtaagaaatagtttaacagtggacgacatatcaaatttagtatgagaagagtgaaagttacttcaagttgtgaaatcatgattgaaccgtaaacattagttggttgaaatgaaaatttttgttca

SEQ ID NO: 42060 - DNA, 426 bp, Homo sapiens
gagttgccagctcaaccggctgtggccccactgatgccacctggcatagaaaggtgtgtgatggaggaagagcggtggaggcagcagtcctagccgaattaagctgaaacactttgtttttgacatgtttacaaaatgtagaaggacgtgagcacattgcagggcctctcccaggaccttgggacggccagcgtcagagtgagtctgctccagctggggcagccaagtgccccgtggagagcactgacccctgagggctggtggccagagaggcatctgagatcccagctggctcctgagcttttgatgcttccttgacatctcttacctgccattctctctccacccctcctcagttactgtgttaatgcctgcatgcttctagactattctcaggggtggctttgactgcatctcaaatctctt

SEQ ID NO: 42061 - DNA, 1411 bp, Homo sapiens
catgatatccgagagcgggataaatgacaggtagtcgtagctgcaatgtttgatgatgataaagagaaacagaaacaattaggctagttctcagaaaaccgcaacagtaacgaaaagtaattaacaagaaagtggatctatttggatccattttatctttttttccaaagataaaatggtttaaaatgcattacactttatagagcagcatttgtttttaattcaaaataaatggatccaaacaaacccaagccaccaggaggctaggcagcctctcttccctgccctccgtacgtaagaagacgcaaataagcatggcacatcttctgaagatcaactaaatatttacctcaacgtctcgccgggcaaggctccacctccagagtccaccaccgcgacgcggagaacagcaggagcagcagggaagcgcgcggccacaattaagggtgcttcgggccggccttcagccagcgctgaggcagccccgacgccagggccgcgcgaaccccagaggcagcggcaagccccagggatccgcggccccaaggccgcgatacaccagacgcgccagcggcaaaaccttccttcggagggtcacccagctgtgacacctaagcacgctgacaaaacaaacgcacaagcccaccgaatcgccgtcgacaccgagctgcagaagacgggggtgacaggccccgcacagcccccgccccagctcctcgcccagcggaccgggccctgatccccgggcagctgctggagcacctggaaggagcccccaggagcgcaggaaaaaaaagaggcacctgggtgcagacggggatcgcggccactcctccagccccacacccctgcgcccagaaccgaggcccgcgtcagtcacctcaggaagttccgcttgcttctcgcaggagcccgccgccaccgccctccgtgccccgcgcgcctcgcactgcctcacgggagcgcctggacgcgcgcaagcgcacaaggcgacggcgtggtcgtgggggatgactgtttgcgcaggcgtagtgtcaaaagaggcggagtcggcgaggctggactatggggtggagctgagcaggcggcgctcggcccccggccgctgcgggcatcctgcctcctgggcggggcgcagggcagagagaggcggggtctgggccgggaagggcggggacagggcctggacaggggcggggcctgggcagggggcggagcctgggcaatgaatggggtgcagaggggtgcagaggggtgcggtggggcgccctctggggagctgaagctgcgggcctgctctcaacggagccgtcagttgtgcttcaggcctgccctgccccgtacttcaatctagaccctctgaaggcacttttgaatggtacaaagagcagcgcaggttggtggttgggag

SEQ ID NO: 42062 - DNA, 2739 bp, Homo sapiens
cgggtcagggacttggtttggagagaagcggcagcgggggccgggcttgctcactgaggaggcctgaggcaatggttccctcgtcacactcctgtccttccccaaactgtccccagtaggggaccaggggctgggactcagggacgggtcccagccagggcagctggagactcaaccaattcctcgcctggctcaggatgccacagaaatgggtccctacaccagcctttcggattccctagaacaggtggaccacaggaatgagccatgccctggggctctgaagccccctacaaacgcagctcccagcctgctcacacaaaagggctgggccaaggtgggcccagacaggaccaggtgtgctatggtcctcacagcagccaggagggtggaaatccccggggagccccggcccagggtccccactccccacgcgggggacctgtacgcaccccagcttcagggcttctgctgcctgaacacgaggtcaaggtatggagggcgcagctggcacccgtagtaacgacttcatggggcccctgccctgcagcctgccccctcctcccgcccccttaaaaggcctctgtcttaaaaaagaggacccccatactggtggctggagtttcgctgtgtcaggaggctgggcagaagcggtgggcaccctgggaggagtgagggcccaggacagcgcctccactcgcttctctgtctaggctcctgggggcgggggaaggtggccgagcagcagagttcggctggcagagccagtcgaaaggaggccgcccacccacccgcggagagaaggggttagggccggcagcccccgcagaccctggctgagcctgtttccccagacccacggggcaccggccagcgcccgctgacaacttttctaccgcctggaaaagtccagaacaactcgggggcggggagcgggcgcgggagcggaccccggcggcgggcgctgtacgcgtggcactgtttacgcgagcggcccgggaggcgcggccgcgggaagatggcgacggcgagggcggggccggccgggcggggctgcggccgcggcctgcgcgcctcctcctccaggctggccgccggggcgcgcggcggcggcgctgagggccgcgggccgggaatcggggcccggagagcacgctccgggcgggggcgggggttcggaccgggccgggcggggtcgggagcggggggcggtacctgttgttcggggccttgcgcaccaggccggccgcctttgttttctccctggcgaagtcgccgtcgaagggcagcaccgaggcgtagccgtgctcggcctctgcggacacacggcgcggtcagcggcccccgcccggcacggccccgccgcccgcccaccgccgcgggcgcacaatggggtgcgagcgctacctcgatccctgcgctccaggtactcggccgcctccagcaggatcagcagggagttcagctccatcctcccgcccgcgcccgtccgccccgggacggcggcggccgctgcccggcccgctccggccggctccgctcgccgcccaccccgcgcgcccggccgccgcacttccagactccgcggactccggcgctcggccgccaccctccgcctcaggccctcaaattgacacataagggagagcggcggcccgcagagccaatgggaggcggcgttcgcgccccgggggcgggcgccgggccgggctggggccaatggggacgggtcgagcgcctcgggccgggccgagaatgttgacagatgcagagctgggctgggataggccggccgcgctagtaacaatttagaagcccgagcttagcaacagcacgtggtggcccggcccccgcgctagctgactggcggccgccgtgcatgttaagtaggcgccgcgcgccgattggccagagcggcctatgtaaaacaggcactgcgagccaatggccggtggcggggcgcgcggccaatgagggcgccgcagccggacgcgttgccgagaggaagcgcagcgcgcggggaccgcccgccgtcctgggggcccgttaggacgcaggagcgtctccgctacgagagcgaagcagggcgctccggggcgtgcgccgggccgggccgggccgccgggtctgagcgcgacgaaagcagtggctgcgtggggggacgaggcctcgcgctctgcccgggggtcttgcgtggggccgtgaacgactcccctccccgccgggcgcagagtggccccgggaagggccgggacctcggagagggacgcagacgctctgatcctaagagccaggcgtctctgagggtgtcagtggggaaacaggcccagagcgggcgggctcctcagatcgcccagtggacgccggagctgagggagggcccaggtctggggaagggacacagacgtgcggccagagtcgagaggctccccggagtggggggctgcatgctctgtgtctggcctgaggggcagggacgttcctagaggcaggcgctggccacctctggccgaggacgccctaagtggggacgggagtgaacccttcatcaaatcccagctggcgggtctccctagtgacccctgaccctaaggctggcccagactggcctcggcaccccccaccctctcgcagattttttttttttttttttttgagacggctctgttgcccaggctggaatgcagtggcgtgatgtcagttcactgcaacctccgcctcccgggttcaagcgattcc

SEQ ID NO: 42063 - DNA, 491 bp, Homo sapiens
cccccagcccccgcctccccttgcctcccaggatgaaagcctaggacagaaggaggagcagaggtttggccaccagcaggtggactgaggtcggcaagcaggacacagatgatactggttgggggaagtggctgctgttctgcggtcgcctgtactcgggcaaacacgggcagcagactcagtgtgaaagtcccgaaacacagtatgcctggggtgcggcctgcggggagggtcacctggggtcacctgcacactccaggcccgacctttaagaggaagtccagccagggctcaccggctcattgacacgggcatgagtgggcgggtggcttggtgccacacctcaaagcactcgcggagaactttttacaaggacagcagagctgttcatttgctgtgagtgcccttgggacaaggagacacctgtacctgaggcaaaggctcacagcgccctgcgccctggtggaaacaaggccggctcgcaggatctt

SEQ ID NO: 42064 - DNA, 684 bp, Homo sapiens
gcatatatgtcacccagctcaggtcacctgtgggagtggcatagctcagataatccctgcaggaatgttctccagggggcctgggatcaacccagcactcccagctttcttgcttgctggtagaacgtgctgaggacgcggcatccagagatagggagggactgcccagaacagcctggaacttgtccttgaccctcccagggactgtaacagcttgagttagggaggaaccgcctgggctttgcttctttctccctggaagcagggtgtccttcaaagctttgccctgggggtcacgtggtccctgagggctctaacctgcggctgcttgcagggccctttagccctggtgcaaagagaagcatgtgcagtcagcaatccatctgccctgggcagccttcccgacactggggactggctctgtcccttgcttcctatctgtaagtaatcaacctgtgttgcgtaacttgtatgtgagcatgtaggtcaccagcgcatggaggactaaacagtagcccaggatgcagtgcccacaggcagaagttcctggtatttggctatgacgatctttgctgttctccacgaagtaggagtcttctcttgggactggtaattagcgaatctgctttgaagtccccaccaccccagaggaggtaaggggctgttccccaatttacagaggga

SEQ ID NO: 42065 - DNA, 2709 bp, Homo sapiens
cgaggttagaaactcactgtaaggtggccgggcgaggtggctcacaccagtaatcccagcacttttggaggccaaggagggtggatcacctgaggtcaggagctcgagaccagcctggccaacatgatggaactccatctctactaaaaatacaaagaaaattagccgggcgtggtggcaggcgcctgtaatcccagctattcgggaggctgaggcaggagaatcacgtgaacccaggaggttagagcttgcagtgagccgagatcgcgccactaaaacaaacaaactcactgtaaggaaacaatgtaacccaaggcatttggggtgaccttcacgttgcctgagggtgccgagggaccagagatgctggccatggactaaggtctgggtattctcaggcagcagggacaaggtgggcttttttcctggttgctaaacccacgtcaaagtcgagctcagggactggagctcaagaaacccaccgcccattctccagtccgaccggggacctgcatgcacctctgccgtgctgccctgagtcctccaatcctccacactcttcctctgttatgtacacgtctccacccaggcctgcaaaagtcccagcttcctcgcaggggcagggacccgcacgccggcccagggcttggcacgcggggatgctgaaacagggccaggcctggtttccagccgatcgtcagagtcccaaggcccagcaaccttcctcacaaaggcctcgttaagaggcgaggaaacaagagccgggagaggggcgcggaacggcgggcgggacgaacgaccagctccgcgcctccggccagctgcgtcgagccaggggcaccgcggctgttgtgcggctggaaatctaggaatgggaaggttcggggcctgctcggctccggaggcagctggcgggtcgtccctggcggcgttggagcggtcagtggcagccgggcacgggcgaccgggtcgcccgggtcgccctcagaccgtgactcccgaaaaaccttgcgggcggggcgcgcccgcgccgtctcttgccggaaggtgcgagttagtgcgctcgattgtgggcgggggcggaaagaggcgcgttttaaagtggtaacagatggttttcttatccaataggattaaaaaatttgtccttacccggccgaccgcggaagtagagtaggcgggcggccaatggggacatgatggggggcggagccgaggcctccgaagcggaagtgggttgctgttgaggcggcggcatctttctcgaggagctctcctgggcggctgaagaaggagcttcttctccggagtgcgccggcggtggcgcctgcggacctaactagctccaggttaggccgagctttgcgggaaagcagcggtaagtcagggccttgcagatgcgaggtttaggcagcttcgcggcctacagaggcctcggcccgcgcctcttgggggagccgcgctgcgcggcttgacccagccgaggctttgcagcccgggacctcgagccagctctggtcgctcgcactgccgtccgcgcgggcgcaccgagcccggcttggcgcgggcaacagaagttaggaggtctgcgtctgggtctcggctcaccctggggggccgcggccatggggcttagttcctagcctaggaagggaaactgagactctgggaggggcaggaacgcccccaaggtcacttggaaagtcgggcaggatgtgctgttagggggaagacccgggcagggtttttgttccccgctgacgacgcctcctttgtgtgttcgcgccgccgccccgccatcgtggggcctgcgagtttgccggggtgcgtgggccgcgtggcggggccttttgtaggtcgggaggatctgagtacgggtgcgggcctgaccgtgggggcgccgaggtcgcagtctaaaacttagtagggcctcgatttccgggcgcgcttccgggccccggctggtggttggtggaacgtgcgactgtgaggcttgcggcccagccctgcaccgctcgggcccttcaccgctctggcgcgcctatagacaggtgtatgaagattctcacgacccgaaacagagttgctagtaaacaccgcttttccgcctttgatccatcgagggaagagggaaaaggatagagcttgggcaagccgttttggtagggatttcagcttttgtctttcacttgtcagttcccatagacgttcacaaacttaataatcttcgttctgtttctgcaccaagttcttgagccagacgtagggtctcagctctggagcctggcttagactgtccaactgactggggagactgaggtccagaaaagtgaagtggtctgcccaaggtcacatagccagctatttggcagcagatgaggttaagtcctacctgcaagatttgggttttgaattcattgaccaggagttttgggaccactgtcaataaaagagacattgaagggaatcttttgttactttcttggtgatttgctttttaatggacaaggacatattgggttcagttttatctgtgagtttgaggtgaaatagaggcattcgagtagcaagatatattgctggcttttgtattgcctgaatttgagcttccaaaaatcttactttaacacatcgtttattgatcttttcttgaattactacctttgtaaggaccttttgtaaacattgtttttctaatcttcatgaaat

SEQ ID NO: 42066 - DNA, 2907 bp, Homo sapiens
tctcaggttctctcctgcccaataaaaccttttgtctttggggatactggtgacatcatgaatcccaatcctgtgcaatgtgctatgacaaaggaaaggacaggggttgaggcaaggggcagggacagcctatgacactgaaaaagaggccagaaacgcattcctacccgctctctcaaaatccatgttcagtggcaggatcatccaagaccctgatggggcggggggccttttttcgtctaggatggtatctgaatggctttaagggtagctttcttctgatcacatgagatttctgcttgtgtcatgaagaatgggtcagaggatcaggaggctgtggctgcagctggggcgggttgcggggacccaggacgaacagtagagctcggttaacgctgcaaggggagcctggcaggccgtacatcccaatgccaagcccgccgcctctcggcctgacaccaccggtggaaccaaaaaggggaaatcatgtcctttgtgcctctgtgtctgtggtaagcggggccctccagggggcggagccgccggcagggtccccccgtggcccgggtctcagggcagagctctgcctggggctcgcagatgtctgcaaggccgcggagggaggagggtccagacgcaagcccttatttctgatctggacgtctgcgagggtctgacccggctagtcgtccccgaggtgcgtgagtgcgagggtgtgggacacggccggatcgtcctagggccccgtggattagcaaggcaccgggaccactggagagggcttaacgggatagcagggagagggcgggctcgggaagagcaccctttaggcgaggggttctcggggaaccgaccggcgtgtcccagccccaggcccggtccaagattcgccggctccgccgctgcctccgcacccaggcggaccccaccgcaccgcgcccggctttccagcgctgcccgaacccccgcccagcccacgaggcagggattctgtggtcctcactgagtcatctggaccagaactagactagcccaaggtcaccgggcgttcctggcgaggccagggccgcgccgcgccgcccctggtgcatcccgggagccgcgccggtctgcggcacctgggcggcggacaggggcgcgggcgaggcgggcggggcgggcgggcagcggacaccggtcagagaggcggaactccctgccgccagccgtgtagtttgcctcgcgggcggcggcgcggcctcctgccggcctagccctacgcccgaccacaacgcccagaaggccgcgcggcgcgggcgggacctgcggcgacgagcgaggcggtgacatcaccgccgcatccagctccctggccccagctcctcccagcgcccgggccctcggcctcgcaaggcctgacgggaatcgtggtccacccccgggtacccccagctgctgcacgggcagcacggacttcagttcccggcgtgtcctgcgcgccgaggcacgttaacggcaggagggggtgggcaagcaaagggaaaagcagagccggggggcggagtaaggcggggtgggggtggggggtgggggcccacacccctccccctccccgctgctccttccccctcccccgacgtaaactgggatccctttccccttgtgtccgccatattggactctaactctggtcagccgcggcgccgggactgtggactcgcggttcctcccgcccagcggcctgccccgcagctcccgcccgccccagccctccccgacccggacgcgaccccgcgcagcgccccccggctggccggagcgcccgccgccgcggccgcctcagcctccccgccttccccgccctccgccgccgcccgcggcccccgcgcccgctctgcgcccctctccccgcccgccatgagcccagccgacgccaagcgcggggccaagcgccggaagaacaagcggggcggcggcggcggctcgggcgggggtaacggcggcgcgagcagcggcaaggccggcccggcggcggcgctgcgcggttcccaggccgcgggcctggcggccccgggcagcgcggcaggcctggtgggcggcgcggcggcggccaacgggcctctcggcgcgggcgcgagcgcgggcggcgccgcccccggaggctacttcgaggtaagcggcggcagcgggcaggggtcgatggcggtacgcggttgccgttccctcgcgccttggcggagctcggcctcccgctgtcggccccgggcctgggagcgggatgctgcgggcgggcggataacgggtcctgcggcgctgcgcttgccgaggtcccggggcagggcggcaggtgggccgtgctcggcgtgacgcggcctctgtcagcctcttgagaggagaacctgagcagaggcggcgggagggctacaccggggccgccgctcacggcgacgggctggtccgcaggctggagcagcccctcaacgggcggggacgtctccggggtgcagctccgcgcacggcgcttcgccttccgctggacccggcgggtgatacccgcgaggcccgggcttctgtcgtggcgcctcgcccgctgcggcggttccagagcgactgcgattccgggagtgagcaaagctgccctttcgctcccagggctttgaaatgtttctctggccaccttcgttattccgtgcgcgtgatgattgagaagggcctcccggaagttttcctttggtcctcctatgtggttatttgaaatctacctgacagccacctggagctggcagccctggcccctcctcccccgctttgttaagttttcaggggtatttagtggtttggttactcaggtatgtatttagggttcgaacttaaggaatttgaaaggtgatttttttcagttttgtttatgaagacagctagcacaca

SEQ ID NO: 42067 - DNA, 482 bp, Homo sapiens
cccccaaattaggacttttgtttctgagtggagattgagaggaaggatttgagtggaatttctttcccctccttcctggcttctggtcccctccctgagttctgcgctactgtctttgcttcttcgggctctttcagatcttttcagtgattgcctcatgagtgccacggagaaagagcctgcaaagtaatgcaggctttcccagtttctgcagttgccagaaattgtcctgacagcctgtactcagcctttcgcaatttgtcttttattcttgctgaactcttcttactagtgtgtctgattgtgtctaccccaggtgagtgtatttgttttctttccctgaaggcacttaagattatgggccagtgtttgttctgtaaccacagctctccagcaggttcagaaacagtcatggatatgaagttagtctggctgttttgcactgtaaggttgagcattatgctgtcccaggtctcttcatc

SEQ ID NO: 42068 - DNA, 816 bp, Homo sapiens
ggaggctttgggggagaagccttgtcccgtgccccagaagactagagactgctggagtgcagagaacacagtgtgtcctccattcaggagcgtccagcatcggggtacccacgatggtccaaggccctgagacgtcccattgggattcactggaggcctctgggacgccttcctgagttttcagggtactctccaccccaggctcttgccctctgaccttgcaggtggtctgaatccagacttgaggcccagctgaaccttagaggctgatgtcataggccctgcccagcacccagtcccacctcgagggaccacctcctggtgctttctacgctgcacccattttacagagcagctcacagatgtgtgttgaggctcactggctggctggttgttgaagggacagcaatagttgacctatggactctgtcccgtagcaggtccaaaccgggggcctgtgctggggcagccgttctgctggagaccagggcacctgcctttacatgcttgttatttgtccatatattgacaaggcacgtgtgctggatttagatcagctctgagaggatgccaactggccagtgtgtgccagcgagtgtcctgatggagttggtctctcctctgctcccgtgcaggcccacagctcactctagacactggactgcaggacccatccacgaggtggctgctgggtgctgctcctgacatacacatggagaaggatgttaaataatttttacttgaattgtcaaatgaaatttttaataacataccattgttaaatttttatcataatttttaagtttttcaaaagac

SEQ ID NO: 42069 - DNA, 2778 bp, Homo sapiens
cccagtgtgaattatgtattagcagtgattcgctgagtgagagtttcctcttaaatggaagctgcccctccctgttctgtagagagcagacactaggcccgctagagaatcctgaggcagcacgatgacacccgtacgcaagcagcatgaacggaggtggactcggtgcagctttgctgtcttagaaaatggacctcctgctgctaactcttgcatctcctttactgacttgtggattaattttagggggatggagatggacaggacatgtcccgtacgtcgttttaagcaaaaaagtccagtctctagggactgtgtgtatcaagtcctagtggccagagggcggggggcgactctgggcatcagccaaggaaagaaccctcacttacagtttgtaagccatgtgttcttctcaaacgaaatgtgaaagacactcacgtgagtcaccttctgttttaacagtcgattttcttcctgcaacttctcaataacactctggacagaggtgtgcccatctgtgtgttccgactgcatgaggaagggacagagagaagacactctgtcacatacagcaagaggggagaaagctagacccagaggctgaggccacagattatcactgcgtcccccagtgcagcgggtagtgatcattcatttggtagagaagcaaagcagggacaagggaccaccttctccctgcccaggcccaccccacctggcccaggccagagcccggatgggaggtcttcaggccacaccacctttcacactgtccttatcccgtcccacctaccagtttgagctgtttgtcttttaaatatttggaatgtaaatattctaaagccataatgtctgcagggattggcacaccagacatgataaagtcttctcattgccagagatttgccattatcacagacagcagggaaggcaggaagctgaatcccattgtaaaccagaggatctccagtgagggggcccccagctgcccagggtgggcctggccatgcaccctgcttacctcctttggagcccatgacactgtcctgtctgcagacaatcgggttcaaccaggtgattctggacacaggaatctaacctctgccccacgcagggtcaggagtcaccgaagccacaacccaaaccaacccccactaacaactacagagctgaatgaaaagtctcctgaaactcgtgtgtaccctacaattctgactgtatctcagtgacataatttttgagaattcccctcaaatgacaaaggaagtgcacgtcctaacacagcctacaccgggaagccccgggtgactcagctgagttcagggctgagaagtgacacttatttagagactgtgatgagggcctaccctgccactggccccacccccgcctcaggctcaacactgtgtgtggctcctttcaaatccccagagggaaatgacacagtgactcaaaatcagaccagaacaccctgcctccgcccagacggcacttttcctctggtttctgaatgcagctgtgtcctctctgaggttccccgcctggaatccacccagctgaggtgggcagttctcagaccaaccttctccccagtgggcgcctcggtgaagctgctgatgggtgcgggatgtactgtctgccacagaacatcccagcgcgtgtgtttctgcatgaaccttggtgctgcctcagagaactgcctagaaaggacccgagcgagaggccctgtgcccggcagtgcgagtgagatggggtctcagcctaggtgagatgtgcacggagtgcctccattcccctgcctgccacacacagaccaccacaagcaccagcaagatggaaggtgcctggcacacagatgccttgggccactgctcccctacttttctgcctaggagccccctggtttctcctgatgctgaaactcccacggtccttctctctcccactagaccccacagagagctacagcccagatccagcctatcctggaggtccagcgaacccttctttggccctcactgtcacttggtgccgctgcccccggcccttgctttgatgatgaggaggctgtggccctgagccaggtctccaagcttgcgggaggccgtgctgctggcaaggacatgcctaaagccagctttggagatggcggttccagctgtgcctgcatgcactcagacacactgagcctgaagaaggcgggcactcacggtccttccaggagtttggggtgtggaactggaggcactccccatccccagcagtaccacctggctctgcttcagtttcctcggatggaggatgtgactacacttcctccaggcagctctgccaggctcagctcctcctcctcatcctcagctgaggcagatgaaagccaagtgccatctcccacctgggagcggggtcggccacaggcctggtgctgggcagtgaggtggctgcctgctttcctattacattttgcatgttccatcattttaaaagaaacccttggatgagtgagctttgccccgtcagctgactctcgttactgagaacagaagtgggttctggggcgcccccccacctctgtgatcaggggcctgtaggcgatgctcccagcacacagaggtcttccccacactctgcttacactgtggcctacctggtcaggacttctctcccccacattcctttgtgcatgctgtcgttcatccagacacttggccagatgctgacacatgtgggcggtggcggtcagcgtcctccgcagctgatgggtctcgttggccaagg

SEQ ID NO: 42070 - DNA, 1364 bp, Homo sapiens
aaaacacccctaagaaccaaccggaacatacacactacacaatacacacagaatacacacagcatacacacacccccctcggaatgtgttcccacacacgaacctcaaaatacccctaagagcccacctgaacatacaccacacacacacagaacccaagaactgcaccaacccccctcctcagaacccagtgcctcctcaccatcccccaggacccagtgccctcccaaccccccaggatccagcattcgcttatccccttcagaaccttgcaccctcaccccgcaggacccagagccccctcacctccaccagcacctggtgacgcctcaaaccccccaggacccagcacacctcagcccgtggtgtccccttatcccactcaggacctggtccccctctctcccctaggacccagggtcccctcaccccccagaagctgttgccctatcacccccaggacccgacggccccttacccccaggacctagtgtccctcaaccccaggacccggcaccccctcaacccccaggacctgatgctcccccaacccctcaggagccggggccccctcacccccaggacccggcaccccctcaactcccaggacctggtgctcccccaacccctcaggacccgaggccaactcaaccccaggacccagtaccccctcaacccctcaggacccggggcccgctcgctcacccacccaggacccggcggccgccacacgcactctcgctcccgcagctcctctggtacccgccctcgtacctggcgcatctgggcctcggcggcgccgccctcctgccttcgcagctgctcccggaagcgcgcaacctgctccagcagcgcgtccactagggacggcgcggcgtccccctccagcgcggccaggcgggcgcggaggcgagcgatgagggcgtcgcgggcagcgagctggtcctgcaggcggcgcagccgctgtccggcctcgtggtacagggtgcagagcgcggcagctgcgcgcggggcctcctcccagccgcccgaccccgggtcccgggacatggctgtaggcccgcccgggaggccgcgcggccgccggcaacttccgcgcccgggccccgccggctgccgcccttcccggaactttccccggtgcgccccgcccacccacaacagcccggccccgccctcccccacgcagccccgccccccgcgcagccccgcccttccccgcgcagccccgcccgacggcagcccgcccagccccttctcgcccggccccacccctcccaccgcctacagcccggccccgcccctgccgtccgcacccgtccgggagagttggcctggcccccgaggctgtccacaccccagct

SEQ ID NO: 42071 - DNA, 4995 bp, Homo sapiens
gctccgtcaactctgagcttggcatctgaggccagccctgtacaccctgccctgtagtcaggccctggcggggccgcaccgacgtttggctttgctccactcccctcccggtctctgcccctttccccagctggtcccctgggaacaggacacttgctgtgacccaatggcatctgctcatttgtccatttgctcctctcgtgagccacaagggtagggacttccttgtatcatcttgggtccccggggtctggtgtggggccaggcatttatttagctgaactggacatcagggacatcaagatgtacagccccaaggtcatgagtgttttgtcaggagccttagaccagtctggcccagcctggagctccctccgcatgtggcctcttacaggagtgacgcagccccatgcggtgctaacagtggcagcactgaacgtcggatggggctgagcccagccacttccacaatggctgtagttcctatctcttcctccctgctaggaaaatgtgaaatagcccagagtggggggtgggcagaagagttgcaggctacccaatgctgggatgagcagagttgagacctggggagccaggcccaggacacttacaggtggggatgtgagcaggcaccccagagagtgagcaccccagccagccagcacccatctactccctcactggggtctaagttcagccccgagagctaggctgtaggtgggtagagtcacagccccagcgccggtgtgaggggtggccctgggccaggtagagtgagtatctgcctgctgtcatgccccatccacttctgccgcctccccagtagaggaccccctccatttcacagatggggaaaaggggccctgttgtctgaagactctcccatatcctcccctgcctctgccatcccctgctttgtcccttcccttccagaggccctgccttggtcctggtcacttcctggtaggcactggctcttcctctatgcctgggctcagggcctggccacctagttttctgactcctcccacttactcccctccccagttaacctctctgatcccaagtgtgtctctccagcagggaggagggctattgcagccagggatcccctttctgaggcttgggacccattattgggcagctctgggacaggtggacggtgacttggcccacactcggtccagctgcaaccctgagaacccgcttggtttggctgtgtctcctggaggccctcaggtatttcaacctgtaggacccaaacccagtccttcacctgctgcagggccagccctggacacccctgcccctgcctgatttggagcagccaattcagcccctgtcattggactctggcctcttgtgctcagtacagagggtcagaccttggccgcctgcctggacagggccaggtcaccaccacccacccccagctcccttgggttcccagcaagatcctgtccttcctctactcacagcttcctgggctctgggacctggggtccagtccccactcctcatggggaggagtccccccacgccccaagcagttgactcccgcactggtggggggtccgctcgccctcaagctctgcaggcccagcttggtctccccagcctcttcactttctccacggctccctccacctacctggccctgagagctccccagggaagccatttcctcccaggaagcccctcctcttctcgcccctgcccttacaccaaggcatctgggcctactcttagggagagggtgatggtggaggaaagggagcctcagaggaggccaagtgtaaagcacccggtctcctgtgcctcccagccccaagacgacctctgggccaccggagtccagacctggtccaagaggcgaggtccccctgggaagtgcctgaaaagtaccctggaggacatttggaaacaaagacaaggtttcctggtgcccagcaagccctcccccacctcccctgctcctgtcttggccagggcctaagtcgcactcacggggcaggggtggggccgcccaggatcaggaccacggggctgggggggtggacagcgccctttccacctgggtcgctgggcactggggtgtcactgggagggacacgcaggagggacagacacgctacctcactcacgggcgagaactaagcacctactgtggacccggcgtctaggcccgcgacaacgccagtcttcgccccccaggggcctcgtcccggggccgcggaggccacgtgcagttccccgcccaccctgaggtaccggccccgccccacgcccagctcggacctccaggattgcgggacccgccggggaggggcggggccggggcggggccaggaggagggcggactgggcgggcgcgggcgggacggagctgcggcggcggcgggtcccgcgggcgggagcgcctggcggccgagtcaagccgccgcctcgacccagggcccgcgggccaggagagcgctcggcgggtaagcctcggcggcgggtctcggcgggtctcgggggtctcgcgggggggcggtctccgcgtctggaaggggctcggcgggccttggcggtctgggggctctcggcgggtctcgggggtctcgggggagtctcggggtcccgacaggtctcggcgggtctcgggggtctcgggggagtctccggggagtctcaggggtcccggcaggtcttggcaggtctcgggggagtctcagggtcccggcaggtatgggcgggtgtcgggggtctcgggtgcgcagcagcctcccccgggccccggggcctccgtgtccttgccaaaggacgcacggggcctgggcacggcgggcagtgcccgagggagcgcggcttcggggcgggggccgggtgtcccttgccgggggctcaggggtgggaggcggtgcgacgcgtctgtttcgcacccctcgcgcccctctggccccgcggcggggcccctttacgcgaccctccccacaagactcaaaggctgcggcgggcactcgctctccgcccttcccggaatccaaacttccctctgcagcggccgcgcttcacggagggcaagaaaagccgcccactggcgctgattcacactgaagtgtgagtgactgatagccgggcgtctgagactctcatgggcaacagggaatctcaggggtggcagagggactggaggagttagggggcggggacagccccttccacctgtacgctggcctccctgcagcccagcactttcccgctgctctgggcctcggctccctgggggtattgagggcctgagccctgctgtggggagccttctgctggtgctcctttccgtgagcacctcctatcccctctctgtgcctcagtttgctcatctgttgacactggggacagctgtgcctcctggtctagtggccacacttaagtccttcgaattggctgtggccaggggcgggtactccgtgtgggctgctggggtggacagcctgcctggatgacatgtgtgtggccttgcaggtgacatgggccggtgatgcaatgtgtagaattgtttccacaaccgcctgaaggcagggcccacagcctcctccttgccgaagcaagcctctgggttcaggtcagccctgcaccaactccatgagcctggacaagctcctgccctcactggctcaggccctgtgggaccagaggaggggctgggctccaccccctcctggttcttcccactctgtccactgtctcctctacgtagacaccgtcgaagggccctcttggagcccaacctcagggccccactccaggcactccactcctggcaggacaggaggcctgggacgagggctgcaagggagtgaggattctgtctatcccctctccctgccacccgccaggctccctttgcctggctctgtgccctgcgttaggcacaccctggagggggcaggcagaaggaagacagataggcagccgtgtctaggaactgccagccagggccatctggtgagaggggtgctgacaggggacctggcctttcagggagtccccaggcctccaggatcatgggggagcccaccaaggaggctggcctgaagaggcagacagagggaggacaggctctgggcctgccttggccctttctgcccacatggacagaggaagcagggtgctgagtcagctggagctccccaccccccagggatgcacgcacacaagcaggcccacagacgggaagtccaggggcccagagagacgagatggccagccttggttcctgaggggcagggaggaagggcgcaaactcagccaggatcttgggtgtgaactcagatgccaccagtttccagctgtgtgatcatggccaggaggcttccccctgccacccctccgttttctcatccatgacctgagggctgtgaagcactttgtacctggtgggtggctatgagtgtccgtaggggggatggtggtggtggtgacatgtgcttggtattcagtgacagtgggtcgctgagggtgctctccctggtcctcagggccgctgtatgtcctgttttgggtgggggcagggactggcctggagaggcctgggtaaaggccaaggctcccaggttcctgcccacattggactaaggcctgagtccatcaggagtggccagtgttgggcagcccctgggtcttcctgcgttctgtcctcaaaagctcccttgtggggacaccccaggtcagtgactatgtgtggcaggctctgccctcctcactctctgtcctctcttgacctcatgatctgcccacctcccaaagtgctgggattacaggcgtgagcccccacgcctggcagagtatatagttctttaataaccgggtggcttggccatcactgtgcagcctgggtgggtgaggagaagggcaggctggcggggaaaagacggggaatttgccacaaggtgagagctgtcctaccccagacgcagtggagcggctcccacccctcgggccaatgaatac

SEQ ID NO: 42072 - DNA, 2318 bp, Homo sapiens
gcacagaggagccatgatgggggccacgcctgggccccagcgtcctttgccctgacccaggagcttgtccagataaaacgccgtaaagtgcctgggctgagcccgaggtgtgtgcaggagctgcatggttttgtgcggtccaagggaggccgccaagaccgccacggtacgaaaagtaccacggtgatgagtgaaagggacaggcggcgcagggctctcaggccacttactgctatacggtcccaaggcccaccctgtagggcttacacagctgcctacacagggtgcccatcgtggtggctcctgacctctgccgttggctctgggtgggagcagtggggctgggtttctctgactggcgcccctactgcatgccaccccagcaggagccccagggcctcggcatctccactctgttcccttgttatctcgccctggtgctgggatccgggataagcagggtgctgtccacttccagggcctagggacccagtgctgggccaagtgcctatggcagagtgcttgggagctgtctggtttggtcctcagagtcctgttgctaataagcgtggagggggaggacggagcaaggctcagggagtgaagtgacttgcccctagtctccagcttaagggaccaaggctgggactggagcccaggcgtgaatggtgcccaggagctcatcccagggaaggtctgagatgctgtctgcctcacctgggcatgtggcctggactggcagttctaactaagacccacctctgtctctcatgtcagaaggtgggtgccttctcttacctgcaaccccagggcctttgcacaagctatgctctgtctgactctatgtaatcccatgcttggctaactcatgtggaagattgctcccaggacgctggcggatgtgtcaacgtgtctgggtggaacagatgtcacaaggatgtgagtcagaggtggctgcctccctaacagattgggagcccagacagagggtgacagtagcttggatcccgggtgcagggtgtggcgtttgcctgtaggtgctgtgcctgagtgcctcccctgtgcccgataccatgagacttcaggccgagtggagtgacactgtgcaagagagacagggtccggctgaccagcctcaccatgactccagccgagcccactgaataggtgggctaccttccaccattccctggcctcggtttcctgctctcggtttcctcagctgcctggtgggttccactgcaactctctgggggtctccttctgtcccggcaccgcctgctcctgttcctcatccgagtctctgcggatgcgtggaccccgccctctgtgcagcctcagcactaagtcctgggtccagcagctccgggactgccccagttactcctggggaaactgaggactggagctctgcttctttgcccgagttttctctagggtgagcaccagaccactctttcttcaagggaaccagcagcattgagcgggacccaaaagggggctgtggcctgggagagcttcccaaccagcctccccaggggctcttgggatcagtttaaaacagaagcagctcctaactcctcaagggtgggctggagcccctgcttccccaggccttcctgtcctgctgagctgggccctgcggtagcttcctccctgtaccccacatggcgtggcccaccctgtgtcccctggcctcctacccagagccctgccccctccacagaggccagggcccacccccactgtccttaaggttggtgggcttccttctgagagtgggcctggggtttctcctctccttcttacccaccccagagccaggctcagcaggaaatgcctggtaggggccctgccagggccataaggctttcagggcaccctcaggttgtgttgtaggggtgggccaggtggccccaggctctgggtgacactagccacgctggctgggtagccaagcgttgcagctcactcagcctcgaggtcctaatcgggagaacaaaacgagcagttggcgatggagcgggcacagagctggcgcactcagaacacagtggacatttccttgggggctccctgcccctcccttggtccagcagcctagccctcctatcacaagaggtgactgtgggcagggaagcacccccaaccttcacacccactgtgcccgtggcccaggcgtcccacgcatcccaggagggtctggttggcgggagccctctgcttctgcttcctctagatgaggaaggtgcccggcagatttcctacctaagcacaccccctgggcccggagggtcagcagccaggctggtgtgggc

SEQ ID NO: 42073 - DNA, 606 bp, Homo sapiens
tgggtacagggtccctgggtgccagtccccatgccactgatccctagcttcctctctgaaccccagagatgcagatggcaacaggactgtcctcttgggctgtgagccttgagatgaggcaggtgccgtgaggcaggaggtgccagggcagggtcagctccgtggtggctgcagacaccacccactgtgctgggtgtttgccttactcctgagcgggctgaaggctcccagaacccagtgaaagctccctccctcttctttttcaggctgacccttggccctctgcctgccctgctggctggctcccactcatcctggtaagtgccctgtgtctggcatggtgggaagtccccaagcctggcagtttgaggcaccagctcaggggcaggggagcagctgcaacttgggaaggatggagagggacaccagggctgcccattgaggcggccccggccatgccccgctgcacacaccccctgcttggatgcaggcgtggggtcatctccatggttaccggcacagggtaaatgtcaaggagtggccatggctgaggaggggagaatggcctgtgtttaggaatatgaacggcagtgtcatatgccgcag

SEQ ID NO: 42074 - DNA, 2323 bp, Homo sapiens
attatgtttaattttttgaggaaccactctacggttttccacagcagccacaccattttacattcccgtcagcgatgcacaaagggttccaatttctccgcatctttgccaacacttattttctttttttcctcttcttcctccttctccccccttgaaactttttgttttcttctcgtttttgtagagaacagggtctccttatgttgtccagtcaagtctgccaactcctgggctcaggctatcctcctgtttctgcctccctaagtgctgggattttaggctgaagccactgcgcccaactccctgcttcttcaactgccatcctaatgaatgttaagtggtatcccacagtggttttgatttgcgtttccctagtgattaactatgggaagcagaagtgaatgagacagaattgtgatcttgtcagaaaaatcgtcttggaaaagccaacgtccaacagaaatggttagaacaggggtcgctggcttccatccagacagtatccctgacccttgttggggcaatgtcacagaggctcctgctgagcagggaggtctggattccacactcttctgccactgcccagctctggacctaagctttctatgggtgtcaagaggacaagcagccgtgcccatttgtctcgctgcttgtttttttgggtgtcagatgcgccagcaggagggacagtgtgcgggaaggtgctggtctgaggctggtcctgccaaagccccgcaggctcactccctggtcgtgcggaggtggctggtgctcgctggtctcctcagcacccgcaggccgggcccgggggccaggcagttgtcctctgtggagccttatcggggcccacaggccctgctgccttgaccccacccgggccccaaaactcggcctggggactgcacaaggcggggctacgcggggcagggcccgtctgctgggggagtgcgctgggcggcggcgggagggcagggtccctgggctccgacagcccctccggcggaggtcaatcacaatgaaaccgtgtccagcggacccggcaggggctcgccgcagtctacctggccaccgtgaagccatgacctggcgcccgaagctgccggccggggtgtactccgcgcgggaccctgggcctccgcaggccccggcggggtcgccccgaggcgggcctggcgagtccaatcgccctgcccgcaggggacccgcccctcatgggtcccgccaatcgcagggtacgttgctcggcagtgctgcgcggcttggcctatgggacggcgcgttgttgggctgcagcgccgcaggccgcacccaggtcgggcggtgggggcgagcggaggggctgaggggcggagaggcctggcgggccgctgctgcgggccaggggacgggggcggagccggagccggagccgacgggcggtggccgcactgggaccccggaatcccgcgcgctgcccacgattcgcttctgaggtgaggctagctagcgggggcggcgggggcccggttcgggctgaggcggcggcgggggcgcggggaactgggccgcggttgcggcgggcgggggccgcggggcctgcggcggcccgggcagcctcgggggcggggaggccgctgcggcgccgagggcgtcttggaggggtccccgcggggccttcggcctgggccgagccggggagcgagggcgccgcagatctttcatcgggataggaccccggggactaggcttttcccgggccgctcgttcctggccggcttgtgggctgcaggggtgggggcggaggaggacgaccctggctggacgctggtcagcatcctgcttgtgagaccggttccgcggtccgcagcgctggtggctgcaaggtttgtgtacggacgcatctgtcggctctcgtatttaaaaacgacggcttctgccaaaagagaaaagccatatctgccgacggacgctcgagagataatcgtggaactttatcagcgatggggctgttggtcacctttgccctccctctcttttcttttttcttaatcttttattttcgttttttgggagatgtcagagggcctttccctgttaggatgacttttatctttgctcttgtaatggctcaagatagttgggaggtaatttgcattcactttatgcatacccaccttgaaaaacgtattttggttcgcctgaaactgttgttggtttgagcataatttatgtttagaaagacaaaaagcaattgtcatatctccaaagaccaaagacatagctgatagctgtatgcattactggtaagttaaagaaagattttttgtgtgaaaaattgact

SEQ ID NO: 42075 - DNA, 951 bp, Homo sapiens
atgtggtggagatatgtgtccccctgcaaataccaagaaagacagttaattagtgtccattacagaatgttcttctggtgtcctttttaaagagattcagtcagtctttaaagatgatgctattgctgctactgctaataataatagtgatagctaccacttactgtttactatgtaccttgtgctaaacacttgacataagttaactcgtttaatcttaaaccaaggaagtagataatgattctcattttacagatgaagaaactgaaatagacagagatgaagaaatgtgcctaaggttacgcggtttagtgaactgggatcagaacctgggttctctggccttagactataaaccatagataggaattgagcacatttattaatcagcattgcaaggctggtggaattttgataaacacccaaaccagattcttttctgcactagtgataccagacagattttggaaatataaacaggatagggtgcattaaagttcactcacatttgttcagttaaacagatggttggcttatctttagttgcttcactcagtcatttccaaaaccacacccaaggccaggcagtggctcatgcctgtatttctagcagtttgggaagctgaggtcagaggatcacttgaaaccaggagtttgagaccagccttggccacgtagtgagaccatggctcaacaaacaaagaataataaacatatttactattatgggacgtctatgtgccagacattgtgctagacattttacatttattatttctaattgccccaacaacctgggaacatatcaccgagtgtattttattacaaatgtggaaactgaagtacagaagacaataagcctatgaagtgatcgtagggcgttgctggtacaaagtcaaaacctgcatcattgggccctgcgcctctatgtctgtggggagaagggattgt

SEQ ID NO: 42076 - DNA, 788 bp, Homo sapiens
ctgatatactgtaagtggagttctgtcatgcactgagagaattttgtttgttatctcctgctcttcgtatttttcagtctctggtgccttgcatgtaaggtggaaggtgtctccagtgcaaatttattatgcgccaggagttagtagaaataagggaagatactgcagagatcacctctcttcttggtctcctattgacaattccaaaggctctctggagtcgggtgccaggtggccaaggacattaccaggggataccactttcattatctcctttttcccacggagcagtaattcattattagctgacaatcaaagagcattagaaatctgacaagatcctttgggtcctctagcaggcattttacacggaggctttctttaatggctctcttcttcctagtttcagccgtaagttttcatgttccagctttagggattcaaaagtaaatcatgtgaatgctgggaatagttacccttagcaaagatgtctgtgccagaagggagatgccaataaataattgaatctgtccaaaagtttcagaattccctcattatatatttgagagaagcaaaaatttgtctggtatctgacctgaggtttagttacacattaataaagatggatcatcccagggctgcagtacttctgctaagaaagaatattccagcataacctttgttatttccgagtcagtaaataatgtactaggtagagtggtgttttctgggacattagaaaagagacgttatttggactaaatagtgctgttcagtcaggattttct

SEQ ID NO: 42077 - DNA, 629 bp, Homo sapiens
tctcctctcttcaggcattgtcttagttactgaagtagcttcaaatggatctttaacctgtttgtgagattgtacagaaggttctgttctacctacttgattctttaattaaaacatttgctatgaggtgtgataacaatttccagcattcgaagttgttactgagaaatggccagtctgagcaacgtggtgcatttctgcagttccgcacgggactttggtcagtgcgtgttttgggtttcagaatttgccttttccatgactctgactgcagacagcctcttctgggcagtctgttgctgttggcagcggccactcccgagtgcccttccaccctcgctggttcaactttgactgtaaatgtcatgaatgtagccactagaggtcatatcattgaaagatgtcatttcagaggaatgggaattcagacagtctttgtcagcccttgataaaatgtatttatttgtacctcaaaaaaaaaaaaaaaaaccctaaataacatttttaaatgccacagaggagaaagacttaggagagtctgaaacccctcactgtgattccctctgtgtgcgggcatctagtatgtggagtaggtggaagatctgtctgaacccacccacgtagaagga

SEQ ID NO: 42078 - DNA, 4296 bp, Homo sapiens
gcacagagccagccatacctccgaacaggacactgttgtacctcttctccactggcatcccgatggcggtggcaaaccagtccaccccgccctgccaggagccatagagggggtcctaggggatgaggaatcacgataagggctggggaggtctgatgggcctggggggcagggggcactgtgggccgcagggcaaggactcacgtgggcacggccgtggctctccaacagcccgggcagcaggggcagcagcagcgtgaaggccaggaggtccagcaggaggccgagaaagacaacggtgaccacgcggcgctccggcggctgctggtggatgggtgggcgcggggtgcagcctccaccccctccccatcccatggtgggctgctctgacctggcctgggtggggtgcggcgggtcgggttagcggggaagccgagtcctccggggcctggcatacccccacacccgacagccggcgagcaccctaaaggggctgatggcaggggctctggcctacggacgcaggggccgttctggcctgcgcgatgcccccgccccgaacccaggcagcaggaaacgcaggcttcggggattgcacaaaaaatagccgcaaaggcaacggtcctgagagaccagggtgagcacatcgcggacctggccccaccccaccccacggccgcgcctcccacgccctcgtaacagcgagagaaaacttgaagccgcggggaacccggatcccgatcccgatcccgatcccgatcccaaccccaaccccagccccggcccgcgccccgcgattccggcccctggcccggactcggtctccctggcgggggccatggggtgcacaccggacgcaggagcacccccaaccccgcgcgcctcccactccgccatcccgcgtgcgtcccggtcccgcccccaccccgcgcgcccccggtcccgccccccaccctgcgcgtccccggtcccgtcccccaccctgcgcgccctctaacccccacgccgcgcgcctcccaccgcccccaccccgcgcgcccctggtccagccccacaccccgcgcgccccctactcccctaccctgcgcacctctcacccgccccacccccgcgtaccccgggtcccgtctcctcccccaccccgcgcgtcccctgtcccacccccaacccgagcgccccctacgccccccaccccgggcgcccccggtcccgccccgcacctgccgcggctgcgcgctcgggacggacggtcgcacagacgcggaacagggcaccaggcacgccgccaggggcgggacggccacgcccggccacgccacgccccggaagtgacgtacatctctgcacgttctcttccggccggagtcagtggcggggttctcgccggtcctgcgggtcgctgcttggctgtgggttagcagcaccctgagcggagcggaagagctgcccgccgccgcgtaaccccgaggccgagactcctggcctggcctccttgggcccacgacgcctgccccgcggagcggacccatgggcctgaggtttgtgtgcggggcctcaggcgagcgctggcgcagcctgtcccccatcgtctgcgccctgcgggcctggccctccccgtggaaggaccgcgggcttcggggccccacgctggggggctgactcctgccacacacacagcggtggccgcgggcctggggcggcagcacagccattctgctcgggctgcgtgagctgaccccgctctctgtgcacctacttttgctgcgtttggtgctgagcctgaagtcccaggacaggcggctgagggggaaagatggtgtgaattgggtgggcagagacaactgaaagccacaggacccggttggcacctttttggccgcctgcgcctttgcctgcagccccgctccctgggtcacccgaaggaggagctggcgctctttccgggcgcagaagcacccgacccacgctggaggaaacggtccctctgggcaggagaagctttgggcctggctggagcacactcacggaaccacgccaacgcctggcctgtagccagctcccacctcccctcccaccttctaaaatgcttgcggatctcacgtggccgaccctaaccagatacacatggggaaaggaatcaggtggcacacataccgcctttactccatagagaacttccaattgtgggtaagaacaaagccccacctcttcctaatagatgcagttttccacctgcagccaaaaagacaacctgttattagcttttttcccagaggacaggcatctctatgaaactgccattgcaaaatttgccgacagtgagataaccagctccattttgcttctaacctccatgccctccttgtttactgctgcacgcaggttgaactgtgggaggaacttagtttaaaacaaagatgataacagccctttcccaaaggaaacctttcctggggattagcctgcttttgtgggaccaacagattagccacaagattagaaactacggttgaagagtcacgcagcgggaggctacaggattctgaccctccccaaactgctcctggcgataacatcaccatcgtaaagcctaagatcagcacttggtgggtcacctggcaccacccaggctcatctgatgttgtggcacccaggaactgactcagtgcgaaaacagcttcgactccctgtgatttcatctctgacctgaccaatgggtacttctgactcactggctgccccccacccaccagcttatctttaaaaactccaaaccccagatgctcagggagaccgagtaataataaaactccagtctcccacacagctagctctgcgtgaattaccttttctctgttgcaaatgccctttcttgataaattggctgtctaggtaacagggaaggtgaacccactgggcagttacacttttatccacccttccagctggatcacgcgccctcttcaatgacatgacacgcagctagagtgtatgagcttgctgccggcaccttccgtcctggatcgcatagcaaggcctcaatggacagccaggtgcctggtccggtcccacttttttttctgtcctgttctcgtttcctctttgcttggccaaagagggttgggccagggtcctgagtgcaaaggcttggcttggtgaattaaagtggcagtagccgtgtggcagagaaaatttgtagatgggtgaaatcctgggcctacacagtgacaaagtgtatatagacagccagcctagttggtggatgtgacaaccccagactcttctagatttgtggatccgtgcacctgccagacctgtctctgagccatctggggaggctgggtaagatttcccccgtcagggcctgagcctcatctccaagctgctggcttcagcccagctgccaccagcgctgtctctgtcttgcgctttccagagagagactgactcattttgagctccaggcctaccaggcagcccaaccgcggcagtaactgcctctcacactgaggatggctcatgctctggtccagccatggcttgaacacctcccaacaagaacaaagccagactcattctccctagcatcttcttccttgctcaaagatcccacaccccgttagaagctggaactgggtccttgtcaccttcctcacctccccagtcgtagtctggttaatccttacatctcaccacggtcaccgtggctagatgtgacctccgcgatgcttcaggcacgtaccagggcagcctgggcagggctggtcactgtgatctcatgaggtgtgaacttgaccccggccttctttcctgggatgccggctaaggacacaagttcagtgtttgccctggcttgtagcccagcgggggctccgtcatcccctggggaatgcctcggcctgcaagaccgcataccgcattggaacagggaaaccacctacttcagcacctccctcagcaaggtggcaggtcccaacaagccttgcaccacgaggaagtggcagtggcattcgggatatggctccctggccagcttgtgaagttcaaggggctcgttacttcttacagctcacagtccctcccgggtccagcacacctgagggctgacctccctcttgattagtgcaggggaaaagcactttaaaaagctgtgtcatgcgtaacttgcacatcttctgattctgacctgaaactgcatcccaggtcggcacagacgcaacccagtctcctcccacctccgagagtgcagtgtcctgaatggagaaccccagcacccagaagcatccactgaaggac

SEQ ID NO: 42079 - DNA, 1883 bp, Homo sapiens
tccgctttttctaacagcattcttaagagtctacactcacttctgccatttcctaaaaactcggccataacattatggactggaggtggtgggagaaacagctcgatttgtggtacagacgttgttgggggcaccactctgtgtggcagctgcagctgacagctccaaggcactttccatattaactcatttattcctcacgacaggtacttctttgatagtgcctccatgcatgcagaagatgacgtggagagctccgcgcggcacagggcaggaagctggtgtgcactctcatggatccgaagccaacacacgcctctcaactgaggactctgcccctctggcattcttccagccaccagccctgggggccaggagccactgagtgggtcacacagccttagagggcaacgagggcaggagctcgccctggcggtccccatgcagacaagaggtacacactccctggcatgcaaagccacccaactgggtttcactgaagggtgaggggcggggtgtctaccgtgctttccaaataccgctcagtcacccagagcttgaaacttacaatgagccaccccatcccagccacaaatctaaaggggttcacttgtttcaaaatcaacttgtttgtggttaaaagtcagtcccagctctacagtggctggagcggcacgtgtgagaagccggcttgcgctgtgaggctcacaagccctgggtgaccacctgcccacttggcatgctgacaccatcattccacctaccttagtaactctggaatgtatttttatgactctaaatgggagaaaaattgttctgcttaaccccacatcccagatgacacaccatttttacttacacaaccaacttatcaatgactgtgaggtctggtgggtcatctgtagccaaatcgccaacgtattccaaaagaaagccaaacagtttctgcaggaacatgaattgggaaataaagctcagtgctcagcaccaagaacaaagccacaggcacacagcttctggatcacgtacattctggtgacaaccaggtggggcaggggagcccagggtgacagacacgagcagccttctaaaatgtaagcaaatacactgctagaacttgctaagcactagaaggtgtaggggggagaaagctaagggcaaggcgcatccttctacagaacagctgacaacacaccactaggaaagcacgacgaggaacacgggcagcacggcgtcctcctcacaggcaatatccaccattcactgaaagaggcacgatcacagccacctatctgccacagcaaagtctggctctgccacacgctggctatgtgaaccctagtgtcctcccctgtgagatgaaggtgaaggtccccatgcctgcctctggctgggtctggcacgaggcctagagaggggccaaagccaagggaggcctctgccggtgccataccaagtactcccagccatcatcataggtaaccatgtgacgggctggccccatctggcctgaggcacacatggccgttgcacaacttcacacaattctggcattcatatacggggctatgctgacactcccagcgctccacacacactcaatccacgtacttctaattttgctttgtttccttctgcgagactcgggtggttgcacttctgaattctctccaccaccaaaagctgctcttccatcgatcttcctaacaacagagatctcagttcctcataggattcaggggctatcaaaaacacaaaacatactgcacatttaacatttatatatatgtatatatatttatttttgagatggagtctcgctctgttgcccaggctggagtgcagtggtgcaatctcagctcactgaaacttccgcctcctgg

SEQ ID NO: 42080 - DNA, 2296 bp, Homo sapiens
gtgttttgattcaaagaccatccagcttgcacactgtgatgaacagagatcaggagctcatgaaggcaagggcaagtcttatttacctttatctccccgaacctagaagcgaggtcaaacagaagcgctcggggtagcaagaaggctttgtagatattgaaatgtgaatgcatgcccagcccttaccaggtgcgtgaccttaggaaatgcacttgtcctttctgtgccttaattttttcaccaacctgctaatgtatgttcctcagtgaaaatttaaaaaaaaaaaagttaaaaaaactaggaagcaatgagtttccatagagttacttcccaaggaacaaggttacgcgcttcgggagagagccgatgaaacatcaaacgcagcatcctacacagcccctatccaccgtccccaaacctgcagagctcaaagtaaacgcggaagggttaacaagcagcttggtccagggcgccgcccgaagtgactgactcggcctgacccggttggaggagtcgccgaaataacacgagtgcagggtctccaagacggcgagagtttccaggtcactccagctcagagaacagcagaggctttcggactatcaagtcagtgccgtgtgcctgtcacggcctgtgccgctcaacgaggaaaccgacgcaccgagaaggacgcagccggccgagagcagcgtggggtccagatcctgccttccggctccccgtgcgccccccgcttaccttcctgagggcccgtgcgcgagacaccccgggcagtcccacgtcgtggcgcgtcttccggcccaggatctggaacttctgcctgttaactttcacctcgaacggattggagttggccttcgccgggccccctcgcgctcccgccggcgccccggaggccttccttcgcgccccgaccttcttcgccttcgccatggcgcgcgccccgctgcgcccaagggcccgagacccgaagagagacaggcgcgcgctaccctaagacacgtgccgggccgcggaaccgcttcctcgtctcgcgagaacagcgcagcacctccgactcgcgagaagtaaacaccgcgcccgcaggctcggcttactcgccgataggctcagcgactacaactcccagcaggccacgcgccgcggcccgccgtgtactcttggcgcagggccttctgggagctgtagtgccccggccgcggcggcgaggggcgctccctcttcagctaagccgttagcgccgagcccgcccgggagcgggtcgccggccgcggcgggcgcccctgccagtgagcccctgtccgaagtgagccacggcattgactcggggctgcccgggggcagggcactgaggagggagttgcgcgcgcgaggcgagggcgatggggccaagaagaaccggggcgatagcgcggcagcggtgacagctgggacccgccgcggtcgggctgccccctcccctcgccccgaccgctcccctgctggtgagggcctgcggaggcggcggcggcggcgcccttggtggcagtggtggcggcggagcagcctcccgggatcgtgtccggagctcgaggagagggtggtgcccggcgagctatgcacgggggcggcggcgtctcctcctgttccgcctcctcagtctcctcggtctcgcagaatccgccggcggcggcggcgccaggacatggagctcgagaacatcgtggccaactcgctgctgctgaaagcgcgtcaaggtgggtgcgcggcaggcgcccccgaccccccccccagagaaccccgaatcccggggaaccctggcccccctgaaggaacccgacatccccggagaaccccgatttccctggagagccccgacacctcccactgggggaacccagatctgcacggagccggagccggggtctgtgcagtgtggtcaggctgcccgggccaggtcccagtccccatctcctggcccagatgagagaagtctgcgctttgctcttcttagtcttgccctgtgtccttgtcctgtcctctcggtgtgacctcggtgacagtgttgcttcaggatgcggcaggcagtgtcctgcttgtgttggacaacctgtcccaccaaaaaagaacggcgtctttatggtcttaagggggacaaagaatagcagcctgggaactactctgggcgagaaccttccgataatgattgtagggcaatgttatttttaacatagctgcttggttttgaggtttgatctgaggctctatggtgtgtcaagtgtgctttagcacgacgtggtcacagatggacaagttg

SEQ ID NO: 42081 - DNA, 1324 bp, Homo sapiens
ctcaccactcggccagagatgtggtggtccaggaagagagggggcggccgggcctccctttccccagggcccgggtgtcagacagtccgagcccgttggcattcctgcatctcccgatggctgtcccgttgccttgtgcccctcaccgagattccttcggtttgtgtgtttgtggccagttttcattttctctgagcatatctatctgcccttgaaaggggcggctccccatgaccctgcagtcagggcctggcggccagggctccagcaggtgcgcccggcatgcggtgacagcctgcaccgtgggagtccacgtcagggcccccgagaggccggtactgtgtcagggatgaggagcccgccctcctgggctttagtggcgcttaggagcctgggagcttcccgtggaggttaagggcgctgaaactgcacaagctgagagctcacagcagtgcgtggtgcctcttcagctggggtgctcacccgcggggagacgtggctttgtgcgcttggcgaaccccacgccagggcgtagcggaagggtgtggaccggcactgaagcccgcggaggcacccgtgcgtgtgccagggcatgaagatttcccagggggcgacgttggagctgggcggggagcgaacaggagggacagggagggctgaggccccagagctgaccctgctgagggccctcgctggcggccttgaagctgcgcccagatccttagagaaggtgcggaacttgggcctttttcctgaactgtgcttcgcaggatgggccggcccggcgctggctgcggcttccgcagggcagggcagcacttgacatggtgagggctggttcagggaggagctgacggggacaccagccgggtgccttcacctccgccccatccattctccactgctgtcagggctgcctggagcctgcagccgggatctctgtgctgcctgctgcgtgagaagccagggcacaggcctcggtgactttgaaccagacagtgacacatcggacagctgcgcgcgggagaggaaccacagtgcctgagggacacagcgctccctgggccgctttcacaagagcagcaggagcgaccaggcttccaggcggacgtttcccttgcatcggggtgtggggaaaatcagcttccgcaggtgcccaccgccggctccagcaggggcactggggcccgtcctgggaggaaaacaccagcggggatgtcaccatgaggttgggagccttctttgtacgaggggaaggggaaggggacgttatcttggagacttggggtctttattctttgggggaatggaaatagctttgctt

SEQ ID NO: 42082 - DNA, 866 bp, Homo sapiens
accaggaccctgcccgccacggcctgtgtcccaggcgtgagggggtgccccacagacctctgctgagctgctgctgaatgacgccccttgggggtcctgccggaaggtcagagcaggggtgcactcccataaagaaacgcccccaggtcgggactcattcctgtgggcggcatcttgtggccatagctgcttctcgctgcactaatcacagtgcctctgtgggcagcaggcgctgaccacccaggcctgccccagaccctctcctcccttccggggcgctgcgctgggaccgatggggggcgccaggcctgtggacaccgccctgcaggggcctctccagctcactgggggtggggtgggggtcacacttggggtcctcaggtcgtgccgaccacgcgcattctctgcgctctgcgcaggagctcgcccaccctctccccgtgcagagagccccgcagctggctccccgcagggctgtccgggtgagtatggctctggccacgggccagtgtggcgggagggcaaaccccaaggccacctcggctcagagtccacggccggctgtcgccccgctccaggcgtcggcgggggatcctttccgcatgggcctgcgcccgcgctcggcgccccctccacggccccgccccgtccatggccccgtccttcatgggcgagcccctccatggccctgcccctccgcgccccacccctccctcgccccacctctcaccttcctgccccgcccccagcctccccacccctcaccggccagtcccctcccctatcccgctccgcccctcagccgccccgcccctcagccggcctgcctaatgtccccgtccccagcatcgccccgccccgccccc

SEQ ID NO: 42083 - DNA, 1446 bp, Homo sapiens
cagtcccgccccgtcccttcctcgtcccgcctcgccgcgacacttcacacacagcttcgcctcaccccattacagtctcaccacgccccgtcccctctccgttgagccccgcgccttcgcccgggtggggcgctgcgctgtcagcggccttgctgtgtgaggcagaacctgcgggggcaggggcgggctggttccctggccagccattggcagagtccgcaggctagggctgtcaatcatgctggccggcgtggccccgcctccgccggcgcggccccgcctccgccggcgcagcgtctgggacgcaaggcgccgtgggggctgccgggacgggtccaagatggacggccgctcaggttctgcttttacctgcggcccagagccccattcattgccccggtgctgagcggcgccgcgagtcggcccgaggcctccggggactgccgtgccgggcgggagaccgccatggcgaccctggaaaagctgatgaaggccttcgagtccctcaagtccttccagcagcagcagcagcagcagcagcagcagcagcagcagcagcagcagcagcagcagcaacagccgccaccgccgccgccgccgccgccgcctcctcagcttcctcagccgccgccgcaggcacagccgctgctgcctcagccgcagccgcccccgccgccgcccccgccgccacccggcccggctgtggctgaggagccgctgcaccgaccgtgagtttgggcccgctgcagctccctgtcccggcgggtcccaggctacggcggggatggcggtaaccctgcagcctgcgggccggcgacacgaacccccggccccgcagagacagagtgacccagcaacccagagcccatgagggacacccgccccctcctggggcgaggccttcccccacttcagccccgctccctcacttgggtcttcccttgtcctctcgcgaggggaggcagagccttgttggggcctgtcctgaattcaccgaggggagtcacggcctcagccctctcgcccttcgcaggatgcgaagagttggggcgagaacttgtttctttttatttgcgagaaaccagggcgggggttcttttaactgcgttgtgaagagaacttggaggagccgagatttgctcagtgccacttccctcttctagtctgagagggaagagggctgggggcgcgggacacttcgagaggaggcggggtttggagctggagagatgtgggggcagtggatgacataatgcttttaggacgcctcggcgggagtggcggggcagggggggggcggggagtgagggcgcgtccaatgggagatttcttttcctagtggcacttaaaacagcctgagatttgaggctcttcctacattgtcaggacatttcatttagttcatgatcacggtggtagtaacacgattttaagcaccacctaaga

SEQ ID NO: 42084 - DNA, 543 bp, Homo sapiens
tgaagcaacacatccaggttctgcacatagcagccaaagtgaccttaaagaatataactgggtcttgtcattcccttatttaaactcttgtacccatttcccagtgccgtttagatagagattccagactcgtcaatggctctgtcacctcagacaccctgcattgactcattagtctgattagagtcaggtttttcttcctcctgatggtttttttttcccccttagttctcagcggaacagtcacttccttagggaggtttccccagccaccctctgaggccgtgcttgttgccagactctgccactagagggcagggctgcaccactcctggcacctcgcacccggcctgccctgtcactctgtgtgttgggtgaattcctgtgatctgtgactcactgctctgtgtcctacacattcggcttttcttctctccccacaaccccattttataattctcctttttcaggaaagctttattcccatttaaaaatttttgtttttaaaatggtattttcttacacttattttctaattaaaaa

SEQ ID NO: 42085 - DNA, 1498 bp, Homo sapiens
taaattttgatctctcatccagtggtattggagatatagtttgacttgggttcagggctttctgttttgcctgatgattttgctggagcttaaataaggaacccaggagatggccagctgtgcaagcccccagcctgtggaaggagctagtgtggttttatgaatgagttgcaaatctttctttgagctttttgaactgatcttccagcattgccctattgacccctccctgactcctttgctggaatctgtaggcttttgaactttgacagggacacatcctaagacccttgcaaactcccagatgtgagaatggcactactacttagagtcttttcgactcagcgtgtgtgcagaagagcatcaaccgggctgtgttgcgaggcagggccttggctgacctctcagtgtttacatagctaagccagttagtgtttgccacggcctcacaagggcttcagattcacacagccaaagtatagattattaaaggcataggtgtttggtttcctggacttggagggtctttggacagaaaatcagtaggcaaccacacccagtactttgtgctgggaagcttggtcatctgtgagagggtcagagagtatacccatgcgtgcatgccaccgaagggtcagtgagtattcctgtgtgtgcatgtctcagggccggagagagtatgtgtcactgagaggtcagagtgtttgtgtgtgtgtcaaagagggttgcattgtgcccttcactgaggggtcagagggtgcctcgcgtgtgtgtgtgtgtacgtgtgtgtgtgtcactgaggggtcagagtgtgcctgtgtgtgtgcttgtgtgtgcgtacatgtcactgaggggtcagagtgtgcctctgtgtgtgtgctcatgtgtgtgcatacgtgtcactgaggggtcagagtgtgcctctgtgtgtgctcatttgtgagcgtatgtgtcactgagggggtcagagtgtgcctctgtgtgtgtgctcatgtgtgagcgtatgtgtcactgagggggtcagagtgtgcctctgtgtgtgtgctcatgtgtgagcgtatgtgtcactgaggggtcagtgttcctatgtgctcatgacattgagggtcagagtgtgcctgtgtgccaatgaaaggcatttcttatatttttttatatgtggtcatagtagaccagttaatttattttgactcctgtgttagaccaaaataagacttgggggaaagtcccttatctatctaatgacagagtgagtttacttaaaaaagcataataatccagtggctttgactaaatgtattatgtggaagtctttattgtcttttcagatgaatcaagtagattattcttgagaccaggaatgttgctgttttggttatttggaaagttttatcattttcaaattgacttttgaatttgagtcaccttttttcagaagtggtgttaaattataggagccctaggttttttttctttttttagaagtcatcacaaaatg

SEQ ID NO: 42086 - DNA, 1011 bp, Homo sapiens
atcacttgagctcaggagttagaggttacagtgagctatgatcgtgccactgtgctccagcctaggtgacacagcaagacgttgtctctggggaaaaaagaaagaaacggaaccacgcggtgtgcagccttctgagtctggcccctttcggtgagcagtgtctaaagttctgtcgcgtgttgcccacgcgtcggtggctcgctccttgcaactgctgagcattgtatggctaggctgtagtttgttttcacttcaccagttgggaaacagagaaaaggcactttttaaaaagtttaaatctgtagaattttggtttttaccagttctcttctaaatcctgagggattacaggaaaagttgttgtatttcagaatattcttagcttgatgtgacctctgtccccgttaaggccctttgccgcaatgggaaggacgtcgctcggtcagaccctgaaggtcagaggggcagtttgggagtgtgtcaacattttaactgtatggactagagccaagagtctcaaggtttataattcccacgtattcaaaaagaaaaaaacaataaagtgagaagtcagtgtagagtgaaataacctgtgttagtggggaagaagtgtttttaaacaggatttccataacgtataacatcaacatgtttagagtggtgatgtttcattgggaaacgaacagtaaaacatgaaagcagggaggttttcattctggcagttggcaactttcacggcagatggagaatttcaaaagcaattgctcaattatcaaacatagccagtgtgagttctgaaataaaggtgctgattgaatgtgcagctttatggtggattttgctattcaggcaagcattttaattttctgcctgttaaattctgttttctttagtttttcatatgtggtttattgtagcttaggaatagataactgagagtatatattacacatacaacattctgatatggcaatatttaaaacaacttgtctgttttagaactagaattaa

SEQ ID NO: 42087 - DNA, 613 bp, Homo sapiens
ccttataggtgggtttactgcagaagtgccataatagaaccttcctacttttaaaacaaccagatctcactttctaaagagtaaaggatgaccggcaggatcacgtctgtgacgtgagtggaggcagtttgcactcctggtggctgtttgagaggtagcatttagaatgcctgtattcactgtcctgtgatgagtgggaaaataggttatcaggtttatcttagcaaaatcaaagcatgtcatctaattgctaaacaagagttggcaaatctgagagacattactcaatccttggcatgcaggacttacatctgcatcctgttgccattttatgtcttcaaagcatttaatcatttagttgtgtttgcaaagtctttgagaagcctttgtcagaaatccctacatctcctatgtgagtgtatttccatgactgcagaataagttaaacttttacctttttccttcccttgcggggcggggtggggggcagggattgtgtgtgtgagagggagagagagacagcagagaaggagaatataattatcatgctgtgtactttgagctgaaactgcaaaaaaggaaaaacacacaaaaattattatgcttttcagtc

SEQ ID NO: 42088 - DNA, 2469 bp, Homo sapiens
ctgagctccggcgatctgtccgcctcagcctctcaaagtgctgggattactggcacgagtcaccgcgcctggcctcttccctggctctctctgctgggtcatcaagggctggctgtgtcccttggccataggtcgcagctcctgttaagtatctctctctctttgtctggcttcctgtaaccgctctggccgcgctccttcagccctgcaggtgaaaacagttccctccctgctgttacctgtcccaattcagcaccgccctgtggcttcccggctcccggaccgcgcctctgccagcgggaaccctgctggactcttaattaattgtcccactgagaatgccattggtttcctcctgggatccaaactaatcacacaagactagatgatggagagctgccaagaaaccatggggcggtggcggggacggaggggaagcgttttgagcccatcaaggcaggtgacaggaaagaagcaaacccgagaggggccgagtccctgggcgggcggcagggctggagcgtgaacagcagcgacggatgcgtctcgagggaaaaacgcggcgggagagaatgaggggaaggcaggaaggaaggggcagggagacccagcgccggggaaggaagacacgaagagggcgaggaaggaactccggcctaaagggtgaaggcggcggctgggacagggccagaggcgcaggccggggccgggcagctcctcctctcgtgccagcggtgcctccggtcccgccctcgctgctgcccgcgctccgggaggggcagacccgctggacgccgcagtcaccgcgccgccttcgcgggcgtcccggggcccggagggaacggcctttcctggctgtccccgtggcttcgccgcgggaactcacgccgcccccgaagctgccgccagctccgggcatctgcccagccgaaaagccagggcgccggggcctgactccccacagccaggtttcccgggcacagagacccaacgggagcgggacttcctcggacaccgacggcgaaggacagagacagcccaggcaggggcggctcctcccggccacaccgacctgcccttcgcagggtgtcccgggccagcggaggcagagaaaaccagcttgcgggaacgcagtcgctcccagcaccagggccgggccagtgcgggtacacaccgtgcgcaccagcgccgccgcgcccccaacggaagtcccgcccccggccgtggaggccccgtccctcgcttcttctcatccctgcttccctggcagtcccgttaccacgctgtcccgacgcgaaggccctcgccccgccccgtgccccgcccccgcatcgccccgccccaaccccacccccttggccccgcctcaccaggttcgccccgcccctctccgtccccgcccctcctccggcctcggccccgccctcgcctcgaccccggggggcggtggctgccgaggcgaccgttgcgcgcgcgggcggtggcgcgggccgaagcgcccggagcgggagcgagcggcgcggcccggtaggtgtgcggggccggggccggggcgggggcagggcgcgccgcctccgctctttctttcgtctccggggcgcgcgcccgcgccctccgcctcccggccgatcccggccagccctgcgcggcgcccgtcccctcggggtcgccgcccgcccgccctgccttttgttcgccggcctgactcaggctcctggtcccgggcccggcgcggggcggggcggggcgggggcgggggcgggcggcgcggggcgcgggcctgtggggcctccggccgggcgggtgcgcggcctcctggggccccgcgctgtgaggcccgcccgggcccttggcgggacccgcgggggcggcgccgggcagggggtcccgcgggcgagatgcgcccgggagcgctgggagggttccctcgtcggactccacgagcggccgctttgttagggcagaagctgccttccgagacccgaactccagacgcactgcagcgacctggggtcgcctcagccgcggtgccgcgattgtgcagtgtagacagaggggtcccagagccgtgcggtgtagacagagaggggcccaaagctgtggaatggggacagagaggggacccagagctgtggagtgtagacagaaagggcgcccagagccatggagtataaacagtggagtgtagacagagagggggcccagagctgtggagtgtggacagagagggggcccagagccgtggagtgtagaccgagagggggcccagagccgtggagtgtagacagagagagggcccagagccatctagtgtagacagagaggggacccatagctgtggagtgtagacagagtctcatagccgtgcagacagagaaggggcccagagccatggagtgtagacagtggagggtgaacacagagggggcccagagccgtggagtgtggacagagaggaccacctggcct

SEQ ID NO: 42089 - DNA, 2124 bp, Homo sapiens
tgagctagactggggccaggactcccttcataacctggcttccatacgccccctctttatagggagaacgtggtagtgctttgggtccacagatagtgtccattcataccctaagttcaacaaaaccagaaagctctgggcactcccctttccttaacacactacttcccaagcaagtggccaacagccctatggagaaagactggggaaatgactattgatgacacatgccttggtgttacagggacctgcctaattctgttctggcgttcctttaattagtggcttccaggtttgagaaatggctcacatttttcaaattggacaaaggatcatgactttatgggggttgctgccctaggccttgattctttaaaactgtgtaaattaagcaatacccttgctggctgcccagccagcttgccccaggaacaccttgttttcctcccgcaacatgggaagcctggtggagctgagaattccacttattggaggctctgctcacctttacaagtcctgagtggggctctgccatgtctgccttctggctgtaggggattagggctttattagattctgccaggtacacacctgcctttcacattttgtctttagttggtacttaatcatactgggtgtgttgatgactctctctcccaaatggactttcatgtgatgccacactcagtaagtgcattcttcctaagcccttggaacattaacaaaagctgatgaacctgggcattacatgtgctggaccgtaaagcaagtctcaaaaatattcaagcctgtcctgcagaaactgtttcctgccacagtgcaggtacactgtaaaccaacagcaaaatgtgtttgctaagtaagcagtccattgcaaaataatccagagttcacagacgcaatcacaatgggagctagaaagcgttttgaaacaaacatcaatgagaatactacatatctaaacttgtgggatatagctgaaactgcacgtaaaggagagttcacagctttcagtgtatacattagaaggaaaatagaatgtcatctcaagaagttagacaaaaagttgtagaacagaattacaggacgtcaaagctaggcaataataaaaggtaaaagcatcaaataatgaaacagaaaaatgacaaactaacaaaaaataaagaaagattatttcccaactcattttatgaggctaccatataaccttggtatcaaaaatctgacaaaggacataagaaagggaaatcataggccaagcttgctaataaacatagatgtgagaatcctaaacaaaacattagcaaggtgattccagcaatttataaaaagggtaacatacacatttgtttcaaggacacactattttttaacatttgaaaatgaatcaatttaacttactattttaacagaatacataaaaaaagtattatctcaacagaagcaggaaaggcatttggtgaaattcggtatccatttatggtaaaacaaagttaaaagaattaaagggaaattccttaatctgataaggatatctaaacactgtgtggcatcataattaagctttccctttgccatcaggaacaagagaaagatttcaatttaaatcgttaccggaagtcctggttagtgtactaagaaagtaaaaacaaaagtttaaaaagcttgcaaagaagaagtgaaaatgttactgttctcggatgatgtgattgttactgttctcagatgatgtgattgtaacagaagatccaaaagtcccgtggtggctcacgcctgtaatcccagcactctgggaggctgaagtgggcagatcatttgagttcaggagtttgagaccagcctggacaacatggctaaaacctgtctctacaaaaaatacaaaagttagccgggtatggtggtatgcgcccatagtcccagctgcttgtggggctgaggtgggaggattgcctgagcctgggaggtcaaggctgcagtaagctgcgtttgtgccgctgcattctaggctgggggacaaagtgagaccttgtctcaaaaaaaaaaaaaaaaaaaaaaggaaaaaagaagaaaaagaaattccaaagtatctgtagatcagttattaaaatgaattaattcaacaag

SEQ ID NO: 42090 - DNA, 2982 bp, Homo sapiens
ttcttctcataatctcaaaggtatagattgcctgtgatattatttatttattttaagacggagtctcactctctcacccaggctggagtgtagtggcacgatctcggctcattgcaacctctacctcccgggttcaagcgattctcctgcctcagcctcccgagtagctgggattataggcatctgcttccacgctcggctaatttttatattttagtagagacgaggtctcttcatgttgaccaggctggtctcgaactcctgacctcaggtgatccactcacctcggcttcccaaagtgctgggattacaggtgtgagccactgcgcccagccttcctgtgatattatttagattgcgacatgattgtggatgatttattgcgggcatggaaggaatgacagccttccaaaatgtgtatgtcagcatctgtgacgtggctgccccagagcctctgataaaaaccagttcctgcggctgagggccaagggccacatggtggcttcaggggtgtgtgctctttccccttcctggccaatgagaggacagtgaagagatggatgcaggctgctgtgtgttttcactactgggaagtgggttggggggcaggaccctccgaagctggccccaggtggtctcacacagtgcctgtcagggggcttactttgggtgccagaggacagactctgcgggggaggaggatgcgcatagctggtgtaggtcgcagggccagggctggcagtggaccccggatggccaggctgcgtcggggcatggttgcccttgccggcaggctgggaggcagggctggggccctgtgccgaggttggggtggtcagacaggatgtgcagaattccagtgggtgtaccgctcgtgttaaaacccatacagtgtgtgtcccggagggccacacggtaggggcagcagctggaagccctggctccttttccttggtcccctcccccttgggaggttcctctgggcctcacttgtttggactttggcgtgggggggtcttaaagccccagtgacctccacttctcgggagtggccaggaggtaccaggttgcccatcacggcagcaccttctcgttcgctcccctggccctggcagccctcgccttggcagagaggaggacagaagtgggtccttgccaggccgtctgggaggtccccgcaggaaggggttcctgcctagatagcagcagagtgcctgcccagggatcagatcaaacacgggtttgtccagcctctggagctccattctgctcaccccctctcacttcctggcatccgtgtcccctggtgagccagcctcttctgattcctctccttcctgggctgagtcctgggcttgtcccgtacctgcctgacggctctgcgccctgggcccttcctgccagtgcagtgccaggtcgccctgatcagggctcccgttggggccgccgtggcttcctgttcttttcggcttcctcctggctcagctgactgtctcgagttctcggcctcctcctggtcacgctggccttccggtaccgcctgccacccctccttcataacttgacttgtctgttcttgtccctggtgcctttaagccagccaccctgctctcctccagccccttccactgttccaagccccttcctcggaggcgtctccccaaccctcctgctggtggccgctcttgcactgcttgggtgggcgggcaccagatccggggcttggctctgggcttgactcctctgctgccaccctgagtggtcattgcgcctctctaggccccgttccactcctgtgggagggcagtgatgctggagagcgtgaggggcggcgagtatggccctgggtggcgtcatggcacacaggcactgagtggactgttggtggctgcccccgagtgtggtcctgggtggcgtcacggcacgtgggcactgagtgggctgttggtggctgcccccagtgtgtgtgtcacttacagggcatgatgctactgaagtttgtgaagttggtttcattgacgctgttactaagactgtaatgtcagacatgttgggatctgttcttttcacatgaaaaggatgacttcctcttgttgggtgtcacctagtttgggcggagtgggagccgtgactcttgactcattgggccgtctggctttcccgggacacctccacctggagagtgcctctgagaacctcccagagtctgccccttgtgttcctcagatggacttttcgtttcctggagttttgtcatgaggcttaattaactcatgtctctctctcttttctttcagtctgcaactgtgtctgatggcggtaagtcacaatttctgatgtatatattttttatttttcataaagttttcaaattgtgaaagtgtatttgccatttgatgccctcaggaaggacgggttgtttgcctttccctgtctccttgtgggcgggttctaggtgagttaattctgggggcgctttctgtgacacccaggtggcctcggcgtgtgttttggaagctgtttgttaagagaactgccatggccctgaacaccagtgtgatagagcgctgtgtgtctgaggagtgcacccacccgcctgcctgtgtctgacaagttaaaacgtgtttttgctcttcccttgttgtataaccagcttttaaaccagcaagttaagatttcaaagtgctttctgaatttgagcaattcaggaaatttgggtgagacccagaattttctcaagaaaagtataatagacgaattgagagtgtgggatgaagaggaatcaaaaacttactttctgtgtttaaagaattttgtgcacagggattcttttcatggactgattgaaaaggaagtaggcaggaatgtcttatttcactgaagatttctctgatgtcatccttatcattttggttcaatgatttaaaaaaacctctccaaagtaaggagagttcctccgaaatattcctcttttcttctaac

SEQ ID NO: 42091 - DNA, 1297 bp, Homo sapiens
tttgtaacgtaacctacatgtttgacccaccaatatatacatggcggcttttccaattagcagcaaatctaaacagactttaaactctttttcaccaggaaagcatttctttgactcagatgggtcagtcgaaagaaaaaatcccacaacaataccgtaaactggaccgtgttctctaaggtggtgttgggatgtgggctgtgttttgtggatctcttttcttctttggcttagatcacaagtgtgggtttgactcacgtgttcagcaccagagaatcaggcaagccactgcaagcaggccagtgagttacagacgtggtggcatccctcccgcgttctggccttggagctggggtcggaatggtggcttgtgcaaggaattttattttaggtgagtgctgctcagggttcaaggtcaggccttctgtgactgtgcactattttccacgtgacgagaacaactccagagcacatgaaagtgctgtgaattgtgaaatccataattgaaagtgagtgttagagaggagacgactttccgtgtgtgttgagccacgtagcaaagaaaaatggtgctcagggggctctgcctcgcacctggctctgctgtgttcctctgcaagtcacctgcatgaattttgtccagatggaatcgtaaaaattcaccaggagagcttatgattgcaagaattccgggtggacgttttccggtagccagtttttgaaaaacgtgtgtgttgctggagattccactgtcctttgcgaatcgctggactcagtgcctggactcaggagggtccacgtgcccagcaggtcccgtctgtgccctcgggaagctgaggagctgggtcatgagttttctgtcctgatccttaggcaggggtggcatgggcagccggggctgtggcccagaggcttctctttccggctcctccaggtaatgtgtctgcttcctctactctccaggctcctgtgcttgagttgaggcccccgcttgctgtggcctcacactgggaggaattactggagcacaattcctatgtcagcagaaagctacaaaatgagattgtgtgaagggggcgtggctctcacccccagcagtgctgggagcaattggcaaggtgacgcctcctgtctttgcaataccagagaagagcatggactgcaacctctttcccttccttggaaatggtttatttgcagctaaagcaactctcacttgagtgggtcctggagcctgggcaggcccaggagagggtctggcacccacaccgcccccaagccatgcctgcatctgctc

SEQ ID NO: 42092 - DNA, 2481 bp, Homo sapiens
gaagccaccctaggttgctccccctcctcccctgaagtgtctgccttccacctgaagttccagccaggtcttgcagagtggaagtctcaggcctgcaagtgactgtgacctggcctacccccatgttccctccaggactggccacctgtgcccatctcagcccgcactgctggagctccggcttgaagcccctccctggggtctgccacatgcactcctgtgccctcagtcacccccactcccctattccccactcccctattccccactcaccacactgtgcaccctgctgggcgctgtccactccctcgccaatgcccagcaaatatttgaggagctctatcccagccccagcccatcacacacagtcatgatcctggctggggacccacacggacagggggaccttgggggggtcacactctggaactaaggttctgggggtgctctcgttcccatgggggcccatcagcaggagtgcacaggccttagcaggagcccgtggggtgcgctgtggtgggaaggctgggaagggaaggggccttgggagccacagtggattgtagggtccccgcctctggctcccctcgctccccccttcctgccgtgttctcagtgtgagccggctcagccttgcctgggtgtccttgtgccctgcgagcttccaaggggcgctggggaggcttcacagaggaggtggctgcgcttggcagcacagatgatgtggagcatggaggcagaggctgagcaaagtgcctgggggacggggtccctcggggggcaggaagggcgggcagtgggagaggtgccaggcctgggtctcgaaggagagcctgggagagttcaggccatgcccctgccccggccaggccagtgcagcccctgctcccgctgtgcctgccagggttcctgactcagctttgaggaccagggtggggcggggtcctgccccaggcctaggccagagcagctggcagtggctggcacagagacattcatggacaagtgtctgggaggcctgggggcgaccggcagccggtgaggggcctgcgcatgtggaaagaggggccttcctgctgcatcttgtggggcctccagcaggaccccctcctgggaaggctggacagcacagtcggagccggcaggaccagccagccgagggcagggagccgtggggcgccggggagaggttcacaggtggcccaagcggcagggaacaagatcccagtgtggcctcaggtctggatgtttggagatgtggcaccaggagtgagaccaggaggccaggcccctctggaggtggtgcaggctctgctgggtcctctgtgttgccatccctgccagggaaatgctgggcaagaaggtgctccccgggcaggccctggcatgtaggtggtgaggcagcgtgctgctcagggcggggccaggcagctgagtcacaggcctggggctggctgccctgcacaggagggcgaggctggctcccgtaggcaggaagggcctggctgtggccccctccttgtgatgtggacatccttggtccatacagagctgtcctgtctccagaaacaagtgtttctccatcctgagcacactagcttcctggggccctcaggggcctgtcctcccatctgtccatgtggggctggcggggtagagccgggcttctggacatgtgtggtgttgcaggccccttcagagccctatgaacactccaggcaaatgcccaaatgcccacggtattgaccggcgagagggggcaaacccctgcctctccccacacgatatctcccagccctgcagcctggcatctggagccatgcggacctggtgacaagaaggagatgggcagaactgtccccttgtcccctgggggcagggctagctcctagccctggcagaacctagtaggacacttgttgaatgagcagaggcctgactgggagaagtttctagtctcagctgctccacatggacccctgggcctccagatggcatctccaccgggcctggctgagtaagacacacaggccccacacagctcccacatgctggctgggctgctgcgtcgaggccaggatgagggcctctggggccactgctgggacctgttcaagagaacgggctgggcacgctcaagaggggagtcacaccttccgcccgcagcccggacttgttcacagatgcctcatggaggctgcttccggaagcttggactgagggtgaggaggggcacgctgggattggggaccttggtggccacggagccgctggggcagcaaggaccctgcggccatttcagggacctcagaactgtagatcgaggagggtcttcaccttcccaggccttcgattcacctgtggagggcagcagttggtagcagggaccccctgtccctggttctcatgtgccgggggctggctcttcctgcctcctgtctgctgtgggcccaggcctggggctcctgccaccccataggc

SEQ ID NO: 42093 - DNA, 2676 bp, Homo sapiens
cctctcctccctgtgcctggccttttggccagccctggggccaccgagaggatgcagcaccgaaccctccaggagcccccagtgctgccgtctgtgggacagggacaatcccatccccactgctactgtctgtgctgtgctgggcacagagctggacacctccaaggcccagcgcccgtagtggctctcatcatggacaattcacaggcagatggtggccagctctgtggcctgcagggactgggagcggcgccagaccatctaggccccaacctatctgcattatcctggaagacttcctggaggaggcttctaagctgaggcccaaggaccatgtcaggtctaggactaggaccagtgcaggccgaggccagagagacagctgggcttccaggtagggtcaaagtgaggtgggcagcaggtgtgggggccaggggactcggggacttcctctccggctgggcccgcctgacgtgggaggcagccagggttaatcatttccacgaagccttgaccccacctgccttggccgctctgctcccgcctcccactgcccctcaggccagctcaggagccatggggcgctgggcctgggtccccagcccctggcccccaccggggctgggccccttcctcctcctcctcctgctgctgctgctgctgccacgggggttccagccccagcctggcggggtgagcactgaccttgtcgcagtgcgaccagaggttcccagtggctacttggggtccttgggaggaggccagagggagggtcgccacagagcgtggggatttgagggggcgggggtccgagcagggggcttacgttgaaagctggccctcacagggcaggtgggtgctggactggccttggaggctggggcctgggctcacggagccccacctgggggctgtcatccctgtgcggcctggcctgggcccctatgggtctgggggctgccccctctctctggacctctgttgggtctggatgcgtgaggttgggggaacctcccagggcctcctagctgctcccatcaccaaaaactgacgtcagggtttaagcttggtgggtagcagtgcctgggcctgggcagtgaccctgagcaggtgttaactaggggccgagggcggggaaggtgtcagggcctggctgaggcctcaggaatgtcgtgtgtcctcctggaacctgctccgagatctgggggccccagtatggaaacaggctcagggctgtgacctcctgcccggcaggacctgagtgtgagggtctgtcccacactgacaccctttctgctcctcctagaaccgtacggagtccccagaacctaatgccacagcgacccctgcgatccccactatcctggtgacctctgtgacctctgagaccccagcaacaagtgctccagaggcagagggaccccaaagtggggggctcccgcccccgcccagggcagttccctcgagcagtagcccccaggcccaaggtgggtcaggtgggcctgggaggaggtgtcgtgcttcaccttagggctgggtgggaggagcatggctgcggctggaggtcctgaggggctcgggtgcccctcgagggagccctgaccctgccaccccctccccacagcactcaccgaggacgggaggccctgcaggttccccttccgctacgggggccgcatgctgcatgcctgcacttcggagggcagtgcacacaggaagtggtgggtccgggcagccggggcacccgagctggggtcacctgccccacgctgcctgcttttctgggagccgggcacacagtaggcgctcaccacgcagcaggcggacccagtgaacccagagaccctccagggtggtggggtggggtggggggcctctgcctgggacccccatgcacgcaggtgtcgccccccaggtgtgccacaactcacaactacgaccgggacagggcctggggctactgtgtggaggccaccccgcctccagggggcccaggtgggtgctgggttgggtagcctggggcgggcagggggcactgggccaggccagaagggccaaggggaggatggggcggacccgggcaggggtcctggctggaggggagcagaagaggagctctgggattaaccccggtgggtgccacttagggccagagcctctcccaggtgggacctgcgtctcatggtggctgcgcggccatcgctggggccaaggcgccgcctggtggtgaggccgggccctgcagccacacaggcgtgccccaggcaggggacaggtgggcagggtctgtggggtgcggtgccagccgccctgctcacatgggtcctgggacacatgggaggggtctgctgcctgacagtgtgggtgtcaggcttccaggaagccacgtgcacagctgggccagtggcccaggtgttgagtgggggacgctgggaggaaggggaggtctgtgcccctcccagggaccttgcaccccgaggggcgtagagagggcccctttgctctcagagcccctcactggggcctgatggacgccttagcaagcagagaatgtcacagagggaccctgagcctcccagtccgcccctcacaccccctcccgcatgtccccagctgccctggatccctgtgcctccggcccctgcctcaatggaggctcctgctccaatacccagg

SEQ ID NO: 42094 - DNA, 2543 bp, Homo sapiens
cctatttctccatttgcaaccagcaaccctggctataacttctggggaaacttctggctataacttctgaggcacggagcggggcaggagcttgcccagggtcacagcgctctcggccagtctgggagtggcagccaggccacctcctcctcctgcaggaagcttcctccacctttcagcagccctggagccgcatggagcagggaagggagttgtctaccctccggcatcctgtgtgttccaggctgtgtgggagcaggtgcagctgccaggcatggcaggagcctgggcccgggccagcactcaggaatgcagcagggccctgcctctccctgtagggataagcaagtgccaggcgcccagggcagcggatgtgtctgtggctacagccccaacggcccccgcctccgcaccggctgtcctgggccagccccttgggggcctgggatgtgtggggagcatgaatggggctctgtgacccagcaactgttctgcggaaggcggctggtggctgcacaggtgactgcgggggtgggtgggggatgcaaaattctgcttcctgggcctggtgtcccccgccttgcatgaggccctgacaagacatcaccgaagcaccaaagccaacccttgtggcccaccggagacctgtctcttggatcacaggggcagtggggaggggcgcccagggctcccgatgcctctgagccctgctctgaggtcagccgatgtggctcagtcctggctgtgaggcctcacgctgccctgattccatttgctcctcagtgcgaggcagacagagcccagcctagggtctggatgggatgaaatgaagacgtctcctccctaacgggacactgtctaccccttccttcttctcccccgagaaccgtcagccccgtgaggatggggtctagggtagggcatgtggacggagctttgctgtttgtccaggtgcttatcttctagggtgccatcgcccctccccactgctgttcccgtatctgctgggtgtccccaaccccagggtggtggaggccgtctctcggatggggctgacacccaaggcacggacctgccaggtcccccaaagcacatggcctctctgcagaagaacctggatgtgacatctaatgcccaggccagagcttggggacagctggactggagccacagggtcaaggagggggagtccagaagcgcaaagtccacccagctgggagggctgctggcaggtcctttacaaagcaggcagctcctctgcccatcggagccggctggcctaaccagggcctgctcttgcctgggatgggggcagaagaggtggagacctggggccctgaggcggcactgtgggtcctggacccgcccacctgcactggggtccctgcaggcttttaatgggaacagaaatggaggaagagacagaggctgccaggggctccccgacccctactgcctgcctggggaggggtcacctcagtgtgggggaagcctggggatgtgagagcatcctaggcctgggctgcctgtggccagtctgttgtccgggtgtctagtgacccctggggtaggggcagatgccagtctgggaagccggattgtttgaagaccaactttaaagttgggagcagtgcccagagcggggccgatgtctgctaggtggttgtctctgctttttgaaaaagaagtccccgcccgacccccgccccgccaggcgctggtctgagcgtctgagcccagatggtgcgcttgctccagagggcgggcggctccagtggccgccgcgggacggtggggccagaggggcccgtgggggtgggggagccgcccgcaggagaaggagccccgcccgcgccggccctggagtcgccggtgtcgccgccctgcccgcgggcccgccctcctggcccagcccagggccctgcgagctattttgaaagtgaccctgggctggggcgccggggcgagcgcggcggcgcggaaccatgacagaagatgaccgaggcggcgctggtggagggccaggtcaagctgcgggacggcaagaaggtcggggcgcgtcgggggcgcggggggggggggcgcgggcgcgggcggcggctcacgctcccccctgtccccgcagtggaagagtaggtggctggtgctgcggaagccgtcgcccgtggcaggtgagcggggcgggcgggggacggggggcgcgggggtagcgacacgggttaccgaggcccggggcagtaatgccagcttgcccaaaatcgccgccgctgtcaccccgccgggaaacccgagagccccgtgcggacccggaccccccggcgcccctgggagcgcaggtgggggccctggacggaagaaccctctttccagcagggcagactgaggcccgaggggctgcctggtggccctgtaggcggaggggacgcaggccctgagccccccagcagagcagcaaggggccccccagaagcaaagccccacatacctgagggttgagctgtgcttgtggaaacgctcagagcagggcccccgaacccagcctc

SEQ ID NO: 42095 - DNA, 1670 bp, Homo sapiens
gaaaacacccatttcaggtgttttcaggaacacctaacaaatgaagcaaccgtatcttaatgaagagagcagctggcccagggtcacgcaccaattaggaagctgttgtcccggggggccccaccggccgagccaccttgggggtgccctttcccctcggggcctccgtaccctcatctctcaaatgaaggagaggtcaggtgagcgccctgttaagactgactttcagcattcccaaggtcgcgttttatgtgctctaaaccgatcccatctcctcacctcctcatttctcgctcaaatgaacaagcacgggcttgctactgggattccttctgtccctggacacgtctttctacccaacattttgtttttcttgtttccccacatagggagataaggttgagggaacaggcaaaggctcgggaggcaggagacctgtgatctagcctggttctgtccctacgctcgggtcagcaggccgcccaggctggggagggcgacactgaccctcggggtgccggccgccacctgcttcacacggcgtcgtcgccggcacgggtacctttcctgctgcagaaggggtcggggcgccccacctgacacttgggggaggctgtgccaaggacagggcgcgtagggcacaggtgccccggctgcgcccccctccgcctccgacccctgggccccgctccaacgaccccaaccacggcccccgcccccaggccccgctccaccgaccgcgggccgcgctcactcgctgggccttctcccacagctggttcaacttctccatgcggaactcctctccggactcgcgtttcggggacggcttgggctggttcttctcccgcgagtacttgccgccgtggctcgcagcgggccagggcccgaggaagagcagcagcagtagcagcgccgggagcccgcgcagaaacgacctgaccctccgcggcgccatcttcctctgcgactggcgctgcgcggagaaaacctagcctgccgatgccccgcccactaccccgcccccacccaccgcgcggtctcctgggaattgtagttcctccgtgagcggccggcagcggcgaggccgccggcggactccagcgcctaggaagccctgcgcaggcgcaagcgtttcccaggcaaccacgccgcggcccgaggctgcagactctggcaggggatacaactggagaatgagggtggccgggtgggagcagggatcaggcctcacccagagcccggagcctggagcccgcacgactcgaggcctctttccctctctgccccacagaaagagcggaaagcccaagaaccgggccgcgtttggctgagcctgataatgctccggcttcacgcgcactgacgccgactcttgcatgtccagtgccgttgcggggttggcactgcggcccgggcctggcgctgaggagcctggcccagcccgcttctgccctccgcggagcgcctggccgtgggtaagcccaggccaggttgtcccggggacgcagggccgcgcagacgtccccctacgtcccggggcccctgccccaacccgcgtcccaagcgcctgctctcgcgcctgctgcaaggcaggacttcgcgcgcttttccccaacccatgacactctaggaaattcacagagccaaagttagcatagaccgctcgt

SEQ ID NO: 42096 - DNA, 810 bp, Homo sapiens
tgcccctgagtctcctctcattccaggaggctgagctggactccccggagccttggggtggggaggggcttggtgggggagctgggggcggggccagccttccttctggcttggatgcgcccttcccagtgactccatcacctcatcagcaaagccagggaggcagtgacacaggtgctgctccatgcgtgtgggggcttgtctcatcagctggcacaggcatgtgaggacacgcaataggacaggccggtcgggtgaggtggggtgagtctgggacaggcgatgggggcccctcggggcctgaatgttggccgacgggcccctgggacaggtgcagggggcagtgcatcctctccccgctccccagtgcagccacagaaacagcaataaaagcctttttgttgcctttccagcccagacaaaatcaataaattctggaaacatgagaacagctgacctttgagatttctagcaaaccttcaaagaggaaatgtggttcgggctccggctcagagctcagcaccaagtccaaggcgctgggaacctccgcataggcccaacttgggtcctgcactgtcacaggggtgagaccccaatcctgcacgtgcttctcaggcaggcctcactcatgtggattccagaaagttccgtggatggaacctgctctttctgtggtgaacgccagtattgctttagctgtgtctcagctgttccttctcctctagagagttctccagcagctgcgaatttggagcatgatcggctggggcgaggacagcaccactttgcagatggggaaactgaggccct

SEQ ID NO: 42097 - DNA, 617 bp, Homo sapiens
tcttgagctttgagtgtgaagctcggagagaagtccagcccagagagaattttgggagccctgagcacagatggggcctcctgcaggttggtgtcatctgcagtgccgagaaatgcaatgctgctgttcaggcagccgctcccttccccgggagaagcagaggccacgcagacccaggctggcagcccagggccacaaagagggctggcgacgtgctgggcacagagctgagtggccacctgctggtgctgcctggacagccttctgcattttcactgtgccaggcctggctgcagccaaggctgccagccaatcagtgctgggggcaaaggttcagctcttccatctcacaaccactccctggcctgtttccatcgctgcagtgctgtgtgccaggtccctcctggaaagtgggtttctgaacatccaagcagagagagaaagaggagggtaggcggggctccacaagtagggcccaagccttttttgcaccatccctgcagagtgggagagagctgcctgccctcaggagagagccccagggagggaaggagcctcctgcagccttgaccaagcaagctgagatgcctggaggcccagctggcctcctcccacct

SEQ ID NO: 42098 - DNA, 885 bp, Homo sapiens
ggccctcctgtcctcagagcagagatgtttcctaccaggggacaaagcccaagaaatcctctgcattcgtctgctcgggctgccatgacaacacaccacaggcagggcttggacaccaacattcactcttatggttctggaggctggaagtccacgatccaggtgcaggcatggtcggattctggggagggtctcttcctggcttgctcacggccacactgactttccaccgcatcttcacatggagagagctcgggtgtctcctttgtaagggcactggtcccatcataagggcctcaccctcaggccctcatccaaacaagtgccccactccacataccatcacctggagggttagggcttcaacctaggaattctggggtgacaccattccgtccatagcattctgcctctggtcccctgaaattcatgtctttctcatatacaaaacacattgactctattgagtcccaacagtcttaacacattccggcatcgactctaaagactaaagtccaatgtctctatgtaaatataatccaaatcaaacatggatgagactcaagggtgtgattcatcctaaggcaaaattcctctccagctgtgaacctgtgaaagcagacaagctacgtgcttccaaaacgccatggtgggacaggcatgggatagacattcccattccaaaagggagaaatcagaaagaaagaggaagtgatggggggcacgcatgtctacagcttagcaaggccaattgcattcgctatgaaggctgcagaatccccttcggctccacactcagctctccgggcccgctggggaggcagcgtcaccgcaccactcggcaggcaggcttgacacgcgggtctctgaaaggcccctgccccc

SEQ ID NO: 42099 - DNA, 582 bp, Homo sapiens
gggaggctccgttacaacccctgcacaagaggccctgttacaacccctgcaccagcttcggagatttggaacctggtactttgctctcagcctttgggtctttggctgaaatgtcaaggaccccaaggctgagagcaaagtaccaggtgccaaatcctggaaaagttgcattgatcatcctggcacaagatcctggcttctgtgattaacaaacacttctttgtcggggaattttgaaaataatgactcgcgtttatgtcgggatggtcgtgggccccgcctcctgataagcactttacaagccttctgttgttgctcatagcagcccagtcatggccccatttcacaggcgagaaaccagaggcccagagaagtcaagaatcccaacccacctctgtctggctccgacccccgcagacactgcctcctcccagggctcctggtagcaaattgtgactgcatctgactctgaaggtagggaccacacttctccatcttcctggatggagaactcgatcaagttttgaggacgtggttggatgtagtgcagaggccacggtgtcttgattccgatgtctcggg

SEQ ID NO: 42100 - DNA, 1394 bp, Homo sapiens
gacatcagtcatattgggatcgggctcccctgaatccagtctgacctcatcttactttaaataattatgtctacaaagacccgacctccagaggtcaccatctgagtttccaggcagacatggagtggagggggacagtattcaccccagaaccctcccgagcccctgtccctcacctgcccggggaagctcacgtgtccccacctcctgggccgtgtgtccttagggaggggtccaaaggggctgcctacaatcccccctgggcatccttcctgcccacctccctgaagagttccagagctgactcacgtgtgtgtgtgtgtgtgtgtgtgtgtgtgtgtgtgtgtcggggccaaggggtggggggcgggtgcatgcacaagtcagagtgggaaggggccttcctacgggccatgccgtcacccactggcttgctcctgagatccaggaaagccgagcaggggcggctccaccccgtgtggccacgggcctccacccacttctcctgggctttggggcctggcgactctcaaggaatgtcctgcagtgacctgggagccctgggcacagctcagtggaggtcactgggaccggctggacgagtcccttggcagcaagtcccagaggaaggtcagccagggttgtctggagtctggcttagtcccagaacctcccgatggtggaggaccagcctcacagggggcttgggccacccagccctctgcccagatgggggtcctgcaacacaggcagcccagggagcccaggcccctgactggccgatacctcccgcagccccatccctcagctctggaaagacgctgctaagctgagccaccgggcagtgtgccaccagggagggacgaatggcagagctgctcgggaagctggctgcaggcccaaccctcggcgaggctgtgtgctgtgtagggaggctgccctgttgaccccacgaggctgttctggaaggctggtgctgggttcagagtgcagacctgccggcgaggccgctgagcctgctcagattctctgcaggaggactgggcagtgtcccaggctcagctctctgggctctgccccctggatgctgccccctgcctggggtgagaaatggaggttggggttcttgcctgatgcgtggcagagaaagccagcggctccccaggacctagtttcccaaggctctgctccccagccttgggagcctcgtggaatgcattagaaattcagacttcagggccctgccccagaccccgaatgggcggctgtgtgatgaggagctgctgaggcactgtggagcttccagtacggaagcagggctgagcccgcctggctcctcaagatcccagtttactccgcttcccagagagcacacacaagatcaaaactcaaac

SEQ ID NO: 42101 - DNA, 2070 bp, Homo sapiens
ggtccacatctgaggttttgggcctttagatgaccatcggaaaccctgggaagcatgttcgtaatattctgggatatcctcaaaatgtatacatcatcatgcctgggcatgaggttattcgtgtttttaattttaaaaggtaataaatggacgtggttttaaaacatatgagataaaaaatatccaaaatgaagtatctgtctcccatccttaacctcagatctaatccccagaagcaaccaccacttacaatttctactgaattcttccatattctatgcattcacaggtgaacatacatcacaagttacctgttttgtacccaaatggcggcataccatagtgttccacacttccctttgaaaatcatccccattggtacatacgagtcgacctgatgtgtcaggtatacatatacccaaatttacttaaacagctttctgctgacgggcaaggcagatatttccagtaattcgctattacaagcaatcctgaagtgaaacactgcgcacatcattgtacactgcggtacacgcatgtttctggtaaatccttaagacttaaaactggtgggtatttttaattttaatcgctatttccaaataggtgtcaaatcagctctccagagaattctgaagcgcagctgaaatgacgatgcacagcactccgcgattctaaggatcttccctgacattaaatattcgacttgcaaagccgaaactcagtccttccagactgggccagggctgccggaggccggccgttttccgacgcctcgcctctgagaacctcggggcggcttggtgcgcgcctcacccggcccggcgtcaccctcgcggtccagctgggcctcggcgtccggcaggaggaggaatcgccgccggagctgctgccgggcccgcgaggagtccatcttggtaccgccccgaaatgcgacggaagtgacgtcagacacagcgcttccggcgtccgctccgggtctggacctcctggcgtttggattggagactgtgttctcttcgctgtttagttagcgagcagctagggtggagtcggcctcaaaggttccgctctcatgtcggcaagtgtgatttgaattttaaaacactgagctttgccggtggaagagttcccaagtttattccgacctacggaagcccaggaggaccaggattaccgctgccgctggatgcgtccagggccgggatgcgcgaccgtgagacgctgcgcttccgaagccctcgcaggcttccgggtgccagagcaggagacataccctctgtccagccttccactctcagcccccagtttttttcctacttttgcttttcaggagtcgtccagcaagacttgaaaggaggagaaaggcctgctggacaggatgctagagcctggcagtgaccacttgggggccctgggcattaaataaacttcttggggcccgtttcgttattacacttggctctagatttgttgtgcgtttcagtgagaagtacctgtatgtggttcatgtgagcctcctcctcgccacttgtgaaaaatcctcccagcctgaaccgagggaactaaattgctttcccagcaaactgcggttttccacactgctcacgcccacaaactgtgtgttacgagttcacaactttttcttcgtcaataatcccgcgtattactctcccagccgtttcccagcgtgtcatgtgctgagaaatggtgggcttagccacgcaaacgtttactgagcatctactatttggtaggagctgttaggcaccatgctagcagtggagataaagatgagtaagacatggccttgcacgtgaggagctccttgtccaaagaaaaccacagaggtatattacaagaaaactctatttgtaaatgtatgaaagcatttcatcaatgcagccaacattttctgagcagctgcatgtgataaaatggtgaggacagaagaatctagtagaggaagcagcttcaatacagtgccataataaaaacactgtacatggggcataatagaaacactgtacatataaagggcagtttattctgctgcagtgtgggagagca

SEQ ID NO: 42102 - DNA, 1366 bp, Homo sapiens
agatgccaaaaggcttaagaggtgttacgcagggacactaaaactgagaaattctatgaccttaacttttttctgaaacctgcaagagagactaccgtttcaagttcagctgtataatacctccctgttcagtataaaatcagtctgagcggggctatcctatgacattactactatagtatcctgattcaaatttgctgccaaatccccaaagccatgctgttagcaactgctcagtggaaccgaatctttccctacctttgatctacaatggacagaagtcggcctgaggtcaccgggaagggaggagggcagcaaaggtggtatttcaacagctcacaatacccgctctgtggccaaacaaaggcctgacctcctgagcgatgtgtgacctttaaactctgacaaacatatgtatttactcagcaattacaatttaaactacccaaggggcagtttaatcacttgtatcagagggaataaattaaagcttccctagatcccataacagcaacaagaaatgaaagtagcatttgcactcaaaagaaaacaaagaaacttctcttttcaccagtacataccatttttctttttctcagaaatcgtctgtgttgtaatcgagacagacagtgagaagcagggtccaaccccaaattacagaagctgttaaatctaatgataagtgagccgagagcaagatctcaagtttcttaaatatgaaaaggacaggggaaggcagatgctattctttaagctggaagaaattactgttccgttttatttttaacatcatccaagactgaaatccgctgggaaaatggagtcaccattttccacagttttatcatccagtggtacccggtgactttggttgacagcatccaataagagagctattttgaaaagataaacacagagatggaaatgggagtaatactaaatttcggtgcattttttggcaaaataaatgcatataccctcaaatactgagggtggcagtataaactgctaaaaagccctctcaaaactggctacatctgttaaagctgaaatataccctatgacttagtactgccacctgtgggcatatactcagtagcaatgagaaagtgtatgtacacactaggagatgaggagaagatgtcatcgatttcatgagaaacctagccaccctgaaacagctgaacattttattgattgattgattgattgattgagacagagtcttgctctgttgcccaggctggagtacagtggcgtaatctctgctcactgcaacctctgcctccctgattcaagcgattctccagcctcagcctcccaagtagctgggattacaggtgcgtgccaccacacccagctaatt

SEQ ID NO: 42103 - DNA, 1095 bp, Homo sapiens
cagcgccgcagctacctgcctctcaggcttcgcggtgcagaattcgcttctgaaccacccagcgcgcctgcgcaccgcggccacgccccccccagtggaagtgacgccaacggaagcaggaaggcggttccggcaagccaagggggcgttgtcgtgatgattccgcggccagcggatcgctgcgagtggccttgaaggcagctgctgcaggtgaagagtaggcggcggggcagagagcggcctccgagggtaaggtggccggccttgcgaaggcgtgcggggctggcgctggtgggaatggcccggaagggaagggaggccgggcgcccgaaggtggcccagaagggcatggacccaccgctccttcccgtctctgggcactcgaggatacccggggggttggcggctcctgcgagagtcagcgagcatttgctctgtgccgggcatcacaggggacgcggactgagacccagacggccaggttccgggcctgggagccgggccttctccctggtgcagcttcctcggcctggaaaccccacccgcgccctctcatctccaggctttgcccgctggaagccagcccggcccgcctccgctacgcgctgcccatctctcggcttctgtttccttccacgctgtagttgagagtagcgcttaagacgacagagcccacagcctagctcagtttcattacggtgtggcctctttgtgcctcagccccgcatctgtaaagcgaatgtcatagcggcacctgcgtccctggaaccttgtcgtatttcatgagttggtgcatgtaaatcgcttagactagtggctgccacttagtaagtactcaataaacgttagctcttctcagcccttaaaacagggtctggcacacagtggtggtcactaggtgtttgttgcttaaatgaatgaatgaaagttgagtggaggatgcacagagtattgtgagaaaccttcactcccaaggtgtgtgtatatgggtgataaggtttcactctgaaagtgagcagtgttgggcctggaatagaaggtgtattagtttgctaggactgcaaacaaaatactgggtggcttaaacaacagaaa

SEQ ID NO: 42104 - DNA, 1073 bp, Homo sapiens
ccttctgcccgatcctcttgcagtaacacaataaaaattaggaagtcctgctgattctgattgctttagtcattgatactaccatgctagagctaccagtgttactgggagtggccgctggtgtctttagacaatgactcgggacagtggaatgaaacagaagcatgctgcatcaacctcaatgtggggagaggagccgtactctgacatatcagttgctaaaacacgtgcagggcatgccacaatgcacagacatggcagtatccttctggtgggagggagtcaccatttgctctgccctgccctctgctgggtgctcttacaggtgctactgcatccagcgcttgagacaattctgtggggtattgattctgaagagatcactgatggcagtgatttcttgcctcagcttacaaagatagtaagtggtataaattcatagccaactctgtctagtcccaaagcctatgttctttcatcatccctccacaggatgagagcatcaggtgattacgaatatcctcactgctagccttcctctggtccaactctcacacctacaggctgctaagtcacgcagctgtaaaggttaacatgcttagctcaccattgcctgccagagaaaggcaaaaatcctcagacaaacaacccacactattgttattctagctatttcctttatgaagagtggtggagtgcattaaaaaagaaagaaagaaaaaaaaagcccaacacagaaggtaaactcttcttaaatacaaacgtattctttcttaatgaagagacagagctgtacacattttttgtctagcaaagaaatggggcaatggtataatatttggggaaacgactcatttccactaatacaaggatttcatataaaccggtgaaaacctaagagatttttaagaaacttctgccattatttggctgtaggacgggaatatgatccaatccctctttacattcctttgttggcttctccgccccagcctccctccagtggagtgtaccccagggtggtgtccatgaccccttctcctttctcgctgttcatcatgtttctagagagc

SEQ ID NO: 42105 - DNA, 539 bp, Homo sapiens
gaagacttaagtagagtgcctagacaatgtcagggtgggcttcctcatgttttacgcgaaacaaaccccacaaagccagcgtttcaaccagagcagtttgtgaggatgatggctccgaatctaggccctggattggctctactggcccacggtggacactgtccaggctccccctccggctccagggccaggcgagggcaagaaaagatgactcacacactccccagtacaaggtctccttggtatggggtcaggatagctcgacctccaatttgctctcagaggcacaggctgaattcccaggattactggacaatatgccaaggaggagcacagacttctgttttctaaaatgcttataatgcaccatcagggcagaaaaaccagggggagaaatgtacttaatcatcactgactgatcaggccctggaactagaacatgttactttattacaacatgtgattaaaaccgaaaacagcaatgaattaactaaatgtctattcactcattcaatatcacttacgtaacgctatgcacc

SEQ ID NO: 42106 - DNA, 2065 bp, Homo sapiens
ctatataagctgtaggccccacaaaacctagatacctccttggtgtcacgaacacaaaagggaacaagacaaacagctctccccttatggagttttctgtttaatgggaaagacagccatttgttcattcactcattcaacaaacatttactaagcaatgctatgagtcatgcattctgagatgaaaacaacactgtccctgcccttaaggaaaaggttcctgttcccagggagatgaagggacacctgctctgatcagggaacagaaagtagttgaggtgactgtaacactgtgtttgcgaaagattaccctaaacccgtctcaagaggaactgagtcctacttattgcagagacaaagggaagaaagagttcggctgaatacagtttttaatctcaactaggggtgggaggcagacaagtaaatagaacaggcaaatatggtgtggtcagtgctgcaacaggaagcgaaggactgtcaggaggtttcccctgagtgcaagtctgtagtgacggcgaactcatgacctcacaaagccgcccatgcactttccagatagagatttctgaggatctcctttcttgtcccccaatccctgtcgccgcaggagaaatctgttccccaatatgcgtcccccttcctcaaaataaggctgttccttcccccaaaaagctgtagggtctctgaggccaactcttctgtcccccttagagccacccccttcacacaatgcttacgggacggggtctggtttggggcccggggtccctgtcgcaggactgccccctcctcaacccgccgtttccatagcaaccagctcaccacttcgcgggcccggctggagaagtcgcccttgggccgggggctccggcggaacagctcgtcccggctgccatcgaccccgccgcccaccgccactcccagcgccttgttccgcgtcttcacggtcttgacgctggcccggaatagcagcgtgatgtccaccgccatagcgacccgcaccctcagccccacactaggcccgcccacgtaagcagccggcgaccgcggcgcgaacccggccgctgaaggactggtcctgccccacacgcctccccccggcaacggcgacgcgagaagaaaggttccggcctgcgccctgctaccgcggcgggaggaaaaaggttccggcctcagccggcgcacctggcggaggaggaacctcgcgacgcgctctcgggcatcggtttctcccagcaaagcttggagggtttagctgcgcggagagctcagcgagctcttctgtgtctgtttggggcgtgtgggctccgggagcgtgaggaccgggaagctaggaggctccttcccttctggcggctccctcactgagaccgggcggtttggttgcgggggaagtggagacgagccacccttgacctttgactgcaagaactcaccttgagcaggatagaggcacgtggacggtgaccctcgggatgcaataaatgctgagacagatcaggtgtgcaaggcacagagctagaggccagaggcctttcttctccaaccttcagtcacctctttttaaagtgaagccagcatcctcctcggggtttactgtgaaaattaagtgagctgacgcgtgctgtgttttgatgttgcttggctcctagtaagtggccaataaatggtagtaatcgttaataatgttattattataatcactgttatttgtggtaaaggaagaggctttagagaaaaggcgtcacctgtgcagagatttgaaggatgaataggaagtttagatggagacaaaggtgaaagagtggccctaatgccgctggattctcttcatccttcatgcatagtttttaattgtaccgtcttgagccatagctattaaaattgacaactcaatcaatgagtttcttctgcattttaggttcatgttctgttttgtgttgttttttgagacgggggtctactatgttgcccaggctggattgcagtggctagtcagaggcgccatcctagctcactacagctggaacgccagggctcaaacgatcctcccggactcagcctc

SEQ ID NO: 42107 - DNA, 1162 bp, Homo sapiens
aggggagaagctcaggctgtttctcctccaccagagaatgccctcctccttcctcccccttcctcccaacacacacacacacacaacacacacacacacacacacacacaccagttttctcccggaaactgagctaatccagccacgccccgacagacatttgcagtgattttacacacacacacacacacacacacacacaccagttttctccctgaaattgaactaattcagccagggcccccctacaaacgtttgtagtgattttactcccagcgtggactctcctgcccggtcagcttcaaggattcctttggtcccagaaatagccaaggtggcggtgaagggaggagctgtttcatttccgaaatgaaaaagtttaagataattacacagacggcttgagcctgcaatggacaaaaagtttcattattggacccctttggggaaggcgcctcccatccccaaaggagcgggttaaccgctcggctggcgcggccccgcccgggtcgccgtctgagagggacggtcgcgccccctttgaagtgcggccgcgcctaatgagggactcgctgggcctcgggatcaagtgtcagcgccgccccagacgccgcagggcagacaaagggcgcgggccgcctggcggcgctgggaggagcgtgcggcccgcggcgctgagcgggacaaaggcggagacgggcgcgcggcggggtcccacgggcagaagagcctggcctccagcgcccggcgcccggttcgctgcctccggagcccccaagagcctctctgagggcgggagcggtagcgcaggccacgccgacggcgaccacaacgcgcctgcgccaagccccggccccagcgtaacctcgtgggtgacagtgtgacctgggttttctccgatacgcgcgatgtgcccgctgagggcaatatagcacccccctcgcacctcacccttaggcgtgccaggcactcttctaaatccgagcttctattaacccatttcctgtcctgcatcactttgcaaggtgggtggggtgagtagccccattgtccagctcactccattctacagatcaacccattgtatagctcaccccactgtccagctcaccacattgtacacgtcacttcattgtacacatcagccattgtacagaccacc

SEQ ID NO: 42108 - DNA, 1046 bp, Homo sapiens
gcctggaggactctgagaaagggctctgacaaatgaacttccccaaagcaaaccctctttcccgtctgtgttaaagttggtgaagataaagatggttttctagatagtggctctggggacacactgaagactcaaagattaaaatgtcaccatgtttcagcctgtttcagcttctactcagctatgacactgcttttatttaccactgcactgttttcttcattgggctgtgagggtgggcatggggacctgttattcatttctgttcctgctggtgcctggcatgtaatgggcacatgttttttgggtgaatgaatggataactgaagggacggaagggggagggagtgtgtgttacctctctttgctccctctaagacctccccacccgtccatccttgctttgccagacccttggctaagaaaatgccagccaacactgtgttctcaagtgactctcagttcttagaaacaaaatgatggaatttcagtattggaaaaatgcttagacatgacctcatccctacccaagctggttcatgaatcatccccataaaattcctggcatgccaattaaaaccattcagctgttcattcattctttcattttgctgaacatttgttaggtacctatatcgttctggaggcaaggaaggatgacgatgacaatgatgaccttggcctcaacgagtctgcatttgtttagatatggattaagctgatgaaccaaaggaatccccaaattcaaaacatagtcatgcattgcttaatgacggggatacattctgagaaacgtgtgttgggcaatttcagcattgtgcaaacattgctgcacaaatcatagagaatacttacacagccctaggtggtgaagcctactatatgcctaggctgcatggtctagcctactgctactaggctacaaacctgtgcagcatgctactgtactgaacaccataggcaactgtaacacaatgcatttgttaacacaaagtattcgtgtatctaaatctatctaaatacagaaaagggactataaaaataag

SEQ ID NO: 42109 - DNA, 1013 bp, Homo sapiens
caaatcctggatcctgcccatatttaaggaggagcggatgagaagaattgggacaagaaagcagaggaggaattggatgggctttgcagaagcaggagaaaatcatgtcatggacgccaagagaatcaggagtttgtaagcagagcgggctgtgtagagttggcaggtgacagtctgcagtcacgtggcaggtggaaggcaggtcatctgatggctccaaggggaagagcagggtgagagcctgagggtgtcaggcaggtttgaggtccctcctggcagggatgagaggaggagcagcatgtatggggtttactgggaggcaatggggccctgagatggggagccgcattgatgaggggtgttcatctgggtgcaggcttcctcctggcagagccagaccgacaccgcagttgaggctgacagagtttcatgatcttgagtcacagcaacaaaatcatgggtttctggtgacactaacccctgccccctcccatgcccagtccagccagaagtgtccatttcagcctctcagaggctgagccaagatggaggcaacctcagccgtggagttaaatggacctgaaccaaatccgggctttcactgggtccatgacctctgacaagtgacctaactcccccgagcctgttcctacacctctagatacatactttatcatgatatcaaatgtgtgaagcacagagcctggcgaacagcctgtgggccatgagggaaagttgctccgattcctagtgtcattgtccttagagctctgactggctgtgatgactcaattaaacctcctgcattctaagccacttgggaattcccagctctgctcctgataaaatgagggggagggaagattttaaagcaaaatgttttcatggtcagcatcctctctgccatattaagcttttgtacttttaggacaataactaatatttaaacatctgtttatgcttttacttccaggaagtatttaatcccatttaaaattgccaaagcttccatg

SEQ ID NO: 42110 - DNA, 2103 bp, Homo sapiens
tttgattacttaattacctccaaatacagtcacatgggatattggaggttagggcttcaacctaagaattttggagggagacacaatttagtccaaacagtgtccttcaaaacgtcatgtccatctggaacctcggaatgtggccacacttggaaataagggctttgcagatgtaattggttagatcgcacagttggttaggtcctactggattcgggtgggccctaattctaatggctggtgtccttataagaaggccatgagaagacatagagacacagggaaggaggctgtttgaagacagaaggagggactggagtgatgcagccacaagccgaggaacacctgcagccaccaaaagccagaagagcccaggaagggcccctcccagagcctttggagggggcgaggctctgccaacaccttggtttcatactaatgccctccggaacggtgagagaataaacttcgttgtcttaatgcacccagtttgcggcgctttgtcatggcagccacaggaaactaaacggaaggcgatctttgttcagggctagctcctatcttaagtgcctcttgagtatttgattatttaattctcatgagattcatgaggaagacactgcattttccttccttcccagatgaggagtgaagaagtgttttctccagaaatgggtaggatggggctcaatttgtcaaagccctggggcccacagacaggaaaggaacaactttgtccccagaggagtcaagactcacatccctggctgggcatggggaaaccaagttctaatcttcctctgagtgctaacatgctgtgtgaccttggctggttacataacctgtctgtgctggcccatgtatcttgcccaggttttacacagctagcaagcggggaaggtgagatttaaaataaaggctttctaatgttagtgctgatgtgctcaccccaaccatgctgctcagtgttgacggctgttgtgaaacctcgcttcttgtgtttttagtttaaaagtatgtaaacaagagaccacagtaaaggggatgcagcacagagcaatttattgcaaaggagaaagaatgttctgaaagttaggtgcagaatagacaggatgccctgggagatgattcagagcagatgagacagccttgacttaccggggaaactccctttctggggagtcttatgtgattattcataagggcgtgggaagaagcattattagtaagcatgttgtggagggcggtgggggcgggtcctctgagtgcccaggcacagtagctgtacacacttgttcatacgtcacatgtctcattagcatcttaagtctccgtccaaaggtgtgttttttactattataatggcgcagagggtcagtctgaggacagataaaatcaaagtgcacctgccgactgcaggagacgttgcctactgcagataactgcttgaaagagccagactacagtgtaaatgctgaggcttactgtgttgatggtttggtcgccgcatcccaaggacatggtcacttccttgactacctatcctgccttacgtgtgggctgtggagcataatggtgaagcccaggctctggagccagacatctggggttcaaattcccagccgggccacttatttcccctgccggaggtgagcccaggtggcccagaggctatgggcggcgggggtggtttcagcagcattctcctcctcaccccctatggtagcttattggattctcacccatcctctctaaagcagttctcaaaccttgctgtgcatcagaatgtcatcaagattaaggaaattgaggtacaggttagatcacttgctcacaattacacaaccaggctgacagcctgagtaaaaccctatcaatgattgctgcaaagggtaagccaagcagtatataaatgtaaacccagaacatctgagacgggtctcagttcatttagaaagtttattttgccaaggttgaggctgcgcgagcctgggacacagcctcaggagggcgcgtcctgacgacacgcgcccaagggggtccggacacagcgtggttttatacattttagggagacaggagacatcaatcggtacatgtaag

SEQ ID NO: 42111 - DNA, 762 bp, Homo sapiens
aaagctgagtcatgcaagaagctgcctttccttttgttcctaagcagagagctgcagagaaaaggttaagcatctctacaggtagctgctccatgttcaccttatcttatgtaaagtgttgatttactgagcacaagacaattacataattaggactattcccctacctgctccgtttctctcacaacctgtggattcagtcatgtgaccacacaccccctctttcccctccagcccgcttttcccctttaaatattgaacccctcaaaatcatctttggagaaaggctcagatctgtctccagggtacattcttaaccttagtaaaataaacttctaaattgattgagagctgcctcagagactttttgatttacatcagccactcagctggcgaggctgggacaaagtcctgctgcccatgccctctttacctttgatcagagctgcatgaaatgagtcctgatggctgctgtggaggagggaccaggtgacagggacactgctgagccagaagggaacaagccctcgcccctcccagcaaagggcccacagttacacaccaaccgaggccagccctgtaaacagacatgaagtagccactggtttcacgcagtcactactattagcctctctgagtgcagggcactgtgccagcagcttcgagtagctggatcccagggcaccatccagccctcatgagctcacagactggtgacagccgtggggaaggcagcctaggaataagatcgactgcaaacaa

SEQ ID NO: 42112 - DNA, 1818 bp, Homo sapiens
cggaataggcgctcaagacgtgtgttaatattgcaacagcaaatataatgaatctgcagttggggacgctgaggccggagtggtggatgaaaggtggccggagccttttccacgggtccaaaccacctgttacaggagaaggcgagcggcctcgctaagcaactggacgttccgcgggcggggcgggggcggggccggggcccgagtccgctcggaaactttcgctgtgggcgagccggacccgccttctggcccctcgggcccaaccacgcagggggagtgccgggccgcagctaggcgaggcgcaccgtgattggcggagatgtggagtgattggcggctacaccggccactcagcaggccgagctggcgccgcatccggggggccgcgtctggagtggagggaggccgaaggccccgcccctgccccgccccctcgtgcagaaggccgcgctagccggctcttcagcagcgagtgcagattgctcccccgcggccgcagatctcccgtttgcgccgcgttcagctgctcccgaacaacttttctgccggcccagaggccccagggcgtcgcagcgccgcgtgcggcccactcacgggccggtgagtacttcggcgctggggcagtggcgcggtggctgtgggcagcgcgcaggaggcgggcaagagccctgaggcactgtcctcttcgggcctcagtttccccttccgagctgatgggtggctggccccaaagtcccgacaaggtccccgaagttggagggccgggggtcccgcccgctctgcaacgcgcaaggcgacccctgttccgggcccgaacgggtcacccggggggcgcgccccggtcccccgcgcgctgtcgcctggagccccgccgcgggcgggacagcaggcccgagaggcggagcggccggcgggcaggccccctccccgcgccccgcgccatcccccccgagttgccccgtcatgcccctcccccgcggtcccgggacccacggccgccctcggtgcccgcccggccgttggaacgcgcctgggcccccgggaggtgttgtgggggggaaggggggttcagtcccccagggggacccggcccgcccgaggggcagcttaggggtcattctgaatccccacagcccacttaggagcgctgtggcagttcctctctctctcggggcccctcagtagagagttgaggggtttcagtggcagcacctggaccctgcctcgtatgaactccaccctctggatcattagctttttgtttgatcaacgaaaactttctggagaatcctacccagcccttttggatgtgatggcgccctggcctctcacccacttagcagatgatgttatgaattccaaggaagtcgcatttgtgcaaccccccaccacccagatttaaccctctcagtagccttaggcggagaagttatagtccccgtttgacaccccaggaagctgaggctcagcagggtttggtgccagcccaggaccacgaagctgatggggcagagcctggtgtgaggcctctgccctatctctccagaagcagccccgtctctcctcaccttggacagtgacccctggcatttggcccagggctttgcagtttgtaaagggctttctcttatgccagcatccatcactcaaggagctgtgccctgggtaccccatgtgctggctgcctgttctctgcagcaggagagggagcccacgggaagcccagaggccacctttgtcactgtcgccacctgtttacttctgtgtccaagggtctgtgattcccatggggtctccgttgtatccaaccaggga

SEQ ID NO: 42113 - DNA, 1004 bp, Homo sapiens
aaaaaaggagacagtcccataacaagccccccatggcgccgcccagatggggtttcgacgccagggagaggagggaaagggttatcagggaaggttcctggtggcagagctcacagggtccgtgctgagccgaattttgcacggtagcctcagagtcccggagccgagtccagagggcgggatgcaggtattgcgaagaggcacacgctccgagaggaaccaccagagcgtgggctttgggcgaggaggggtctcctctggttgggggagatctggcaggcttgggggagatggggctgaaaggatggacagggagggaaggccagaaagctggagacggggatggagagctaaaccgcaaagagcaggcgccctgccccgctgagggccccgcgcctccagctcctccttcccgagcttcccggggtcggcgtccagccggcaaccaatgggccccgcccccgcccgcagccaatgggccgcgtccccgcccgcgcggccgccccgcccctcgcggacccggaagtgggcctggcaccttcccggcctgccgcagggatggggcagctgtgctggctgccgctgctggcaccgctcctgttgctgcgaccgccaggggtccagtccgccggccccatccgggccttcgtggtgccccacagccacatggacgtgggctgggtctacactgtgcaggtaggtgccgaccacgccccgcgcgcccctgaggctgcagcttccctctccccgcgggatctgagtgtgggtttgcgtcccggggcccgatgccggcgcagaaggaggctcagtgggttcaggaccccacgctgccattgactggttgcgtcgctaacttcgggccagtcacttcctgcctctgaacccccatttccccttctggagggtggtgcagattggagggacccctgcattcccggctggggaggggcttgggggttgacagtggtaacccattttccagggaagcctggagcaggagaggg

SEQ ID NO: 42114 - DNA, 896 bp, Homo sapiens
aaattgcacactcaaggcccagcttgctcacccctctgagaaactgtccctgacccctgggctgggagggcacctgtctctgcccatgtagggtgtctgtttccccgtccctctcccccaggagagcacgatcccatccagtggggagagcctggtatggagcgagtgcctaatagctgtgtggggggtgagcagcagggaaggaagggcagagcccccaaccccatgcagacacacctggcgaatggcaggggccccagggacacttggtcttgttggaccggggctggcatgatgctgtcccctccccaggaaagcatgcgggcgtacgccgccaatgtctacacctcagtggtggaagagctggcccgcggccagcagcgccggttcatcgctgtggagcaggagtttttccggctgtggtgggatggcgtcgcctcggaccagcagaaataccaggtaatgaggtcaccaggtgacacagttggcccagtatcctggcaaagacccaggtggaaaactcaatggggcagttctagccagggccagggccaggctggcataaaccacagggccaaaaccccaccgggctattcacagccttgtttagatcaaggttcacggtgagttccatgcctgggagagattgctttcaatttaatcctgaatttctgtctattcttgaaaaaactgccagctctggcaacccagctgtgcacttccgtgccagctggcactaagtcagcagtgccccctgacaccaggcatcccaggtgtccccaagccctcaccctcttctctcatttgtgttatctgcctggcccccgggcccagggtctggtgacccttgatgagggtgcgatagtccctgtggtttgagggtaggcagcaggttg

SEQ ID NO: 42115 - DNA, 2210 bp, Homo sapiens
cccggaggtggagtttgcagtgagccgagatcgtgccactgcactccagcctgggcgatagagccagactctgtctccaaaaaaaaaaaaaaaaaaagtaaataaaacggctgaggggactcaggtccccctgcgtgaaaggaaggggctttaagcgtccacctggggtagctgcattatcacgtaggatcctcctcttctagtgtggaaggccctttttaattttcatttatattttatttatttattttgcgacggagtctcactctgatgcacaggctggagagcagtggcgcgatatgggctcactgcaacctccgcctcccgttttcaaacgattgtctcagcctcccaagcagctggggttacacgcgtgcaacacgacgcccggctaatttttgtatttttggtagagacggggtctcgccatgtcggccaggctggtctcgaattcctgacctcaagccatccacccacctcgcctcccaacgtgctgagattacaggcgtgagccaccgcgcctgggaagtgcgggaggcctttttaaaaaatgtaaactcgcgtgctcaagaagccctatcggagggaaacacccagaagaggccaccctccaaacacagggtaaaacaggggtgacgcacagaggtaacgggaaagcaggaacgagcgagagcgtgcggtcccgtacctgcgcgtgcctgcgtgcgcgtccgtgcggccgcgacgccgccgccggtgcctctctttctagacgtgcgcgcgcccgcagctcgcccccctgaccgtaaagaggcccggctgtgtcgtgaaaggggccgcaacgcgcagagcgctggttgacggccgggactccattttgttcgccgttactctgcgcgtaagtcgcttgtccgtggcttctctgagaagaaaagttgaaaaagggtaaaagttttcaggaatattcgggctctctattgctaagcatagcgagtgtcggttttctctctccaacagacatcgctattgcggttccgaggcagtgggaagagatgcggcccctggacatcgtcgagctggcggaaccggaggaagtggaggtgctggagcccgaggaggatttcgagcagtttctgctcccggtcatcaacgagatgcgcgaggacatcgcgtcgctgacgcgcgagcacgggcgggcgtacctgcggaaccggagcaagctgtgggagatggacaatatgctcatccagatcaaaacgcaggtggaggcctcggaggagagcgccctcaaccacctccagaacccgggcgacgcggccgagggccgggcggccaagaggtgcgagaaggccgaggagaaggccaaggagattgcgaagatggcagagatgctggtggagctggtccggcggatagagaagagcgagtcgtcgtgagcgcggtcggcggtaagtcgggcacccgcgccaggccgaggagcggccccagcttggccgctcttcgagagcgatgatttcatcgagatgcaccggaatcgggggtggggcgggagaataaaggcgtgctcgggtcagggccgatctgggccccgtcttcgtgttttgttttttgacggtggcggcgtgggataatcagagtggccgggtttgggcgtgatgcgtgttcagtggaagggtcataaatctcagagtcgccaaggaaacagaaacggacaaggtcccgggccgtccagcaagcgggggtggaaatagaggattttcggggaagacgttggacaagtcaacgttgctagagactggagtgagtcaggtggtggccagaagaggtggcgtcctgcacagtggcgttcgtgagggtttgggggtcgttgtgcctgggattaacctctcgatgatgaatttcttcccattgtgctttaggtttccagccaatggattctggtcaactggtggagattggctgacaccctggagaagccgaaaccagagagccttttgttttctcttttttcctgtctatgctctgtctcacttaacactacgttttctgctatggtctgtggttgatgacctcaatatgagtttcgattgttaacgtgtttttgtttgggaagtaattttgtttgaaaatgctctcacatacaggaattagggcctagattgtaagctcttgcagcagtcacatttgttcccgggctttggtggttatttctaaatttttgaggtgctttg

SEQ ID NO: 42116 - DNA, 1670 bp, Homo sapiens
atataccaatcgactctgctggggccttggagaacctttgtgtctagctcagggattgtaaacgcaccaatcagcaccctgtcaaaacagaccactcggctctaccaatcagcaggatgtgggtggggccagataagacaataaaagcaggctgccggagccagcagtggcaaccggctcaggtccccttctattgtggaagctttgttctttctctctttgcaataaatcctgctgctgctcactctttgggtccacactgcctttatgagccgtaacaggtctgcagtttcactcctgagccggcgagaccacgaacccaccagaaggaaaaaactccgaacacatccgaacatcagaaggaacaaactccagacgcgccactttaagagctgtaacactcaccgcgagggtccgtggcttcattcttgaagtcagtgagaccaagaacccaccaattccggacacattgggaacttagagcagtgcttgggacatggttatcagcgtcagatatttccttaaactagcgtgaagtcgactttaaccttccagcagtgtgagtgagggccctgaccctagaatcaacgcccaaagagctgtggcgctacagcgggcggggacatggggtgcgcatgcgtgcgggggggtacgcgtgcgtgcaagtgcgcgtgcgcgcgcaggaccgctgaggcgggagccccgaatgcggttctcgcttgctgcgtggcggtaaaggaccgcaggtgtcgtaaaagggccgcagtggcagcgtcctggccgacggctagtagcccattttggataccgtcctcgctgcggaaagttggggcaacctgttgctagtctggtcgttggtgacagcgaggcttccgcgctcgctgctggtgagcagccccggcgtgccccgcgggctggaagaggcggcggcgtgatgcggcccgtggacgcggacgaggcgcgggagccccgcgaggagccgggcagcccgctgagccccgcgccccgcgccggccgcgagaacctggcctccctggagcgcgagcgcgcccgggcgcactggcgggcccgcaggaagctgctggagatccagagcctgctcgacgccatcaagagtgaggtggaggcagaggagcggggcgcccgggccccagcaccccgcccgcgtgcggaggctgaggagcgggtggctcggctgtgcgccgaagcagagaggaaggctgcggaggcggcgcggatgggcaggcggatcgtggagctgcaccagcggatcgccggctgcgagtgctgctgagccggcgaggccgcgcgggtctggagcggagcgcggcggggagtgtcccgcgtggaaggcgctgggtaggcagggaggggagcgcagagccgtgccacgctctccgcggagttggtttcattcttttttcataggtaattagagaaaataatttgatatgttgttgtaaagagtcatgaccactggaagtattttcaggacgtagacctggtgggtcactacgtggggggagagaggtgtgaagcggaggtacatgctggaaacgtgtgaatgttgttacgagattggagcgtttgcgatgaccttcctgcaggtggaagcattgtgcacaggtggttgggtttgtttgactcccggatatgagaatatcaagctc

SEQ ID NO: 42117 - DNA, 944 bp, Homo sapiens
ctctttgtattcggcaagaccaggctccgtagccctcagggaaacattcgaccacaactgtggtgtgtgggccccgctgtttgctagagagcctgagagatgagtcattggtttctagcctggagaaagacgcctgcgaggcgagactgtcagggtctctgccgccctccccaggagctgtgtccctgaggtgagacgccacccctgccctcacagctacccggtgcatgacccctgtgtccagcctgtccctgagaaactgatttcctcacctctctcagcctcctccctcatcaaatatttgtcggaggcattatcaaggatcaaaccggtttgatccagtgcagtgcaggaaacgcgggcagggtggaggggcctgggcttgttgaccaagttcctcgctgtgagcctcggtttccccttctgcaaagtgtggagatctcatcaggtgatgagtgaggcccctcctcctccttcagtttcctgctcctgcccaggcctccgccagctcccagtgtccttgggcgagtgctgcggggaccctgaaccgcacatggctgggggctcctcaccctgcagcccctcactgcctcaccgtgcacatccgcgtctcacaccagcggccatgtgggcctcaaaagggcaaacctgacggtgcctcttgtggctgataactctccagaccattgacctggcacaacaggatcacctgggaggtgctgggccagcccagccactgaacgggcagctctgcctgggtgcggcccagcaagagctagttcttaaaatcacctaggagctcggacgtgtggctggctctgcgaggcccagaactacaggatcaagcccctgaggggccttccctggttggtgccctcctccccctccagcccatctccaccctggacccccgctgcccatcccaacttcttgattccccagag

SEQ ID NO: 42118 - DNA, 739 bp, Homo sapiens
ttaaacaccccagccccatcctgggaacttgggcttggggctcggggtgttctgataatgatcaaagtatgagaattgaacccatgaggactttgatccaagatactggggtgtggggaggggcaggcacaggtgtcctgggaacacactttgagaagcaatggcaaagctgggggtccagctaatgtgttacattagaatcacctcggggaggccctgggtgcccttctcagccctccctccggaggctgctgaagcccagcaaagccggagtcagagaacaatgtccgcctgagggcagggctgggctgggctggccttctggccctatctgctccgtgcccaacccagcgccccgcacagtcggagctttgtaaatacgaggtgactgtctgcctacaaactttgtaaacatcacttgaaatggccgcagggtattgtgacatggccataccactatttgtttgctattgaatttgtacttccctgccttacttttgctattgcaaaccatgctgtcactaaggtcttcatgcacacagttgtgtcttggtcagatgatatgtttctaccaattttaattgtgtttctttccacctggacacacagctctctggcccagggctgggtcatcagcacaccctgctgctgctgttcagatctgcatcctggtcccgcttggtcccacagtgagaacgctttgctatcacatgggcaggctctgagagccctgccggcc

SEQ ID NO: 42119 - DNA, 2289 bp, Homo sapiens
gtcatcaatcactgaccataagggagactgttacatcggggtaaaaaacatacaaaaacaaaacagagaaaatgacaagctgtttcagtttcctcaaggtgtcagttcatccttaccagttgactacagtcctcagctgtgaacctaaagcacaattgggagaaatttaccatgaagacattgactctcaaagttccatatcctgatgttaaaaataaatgtgaaccacccagaagaatgccacttctttgagacacggtcctctgacatacctgtctcatagaacaatctggaaatttcaggtaatggcctctggctttactctttatttctccttccctgcgttctcagcctgcgttccactgtgctctatggcctaggtcttctttggctttccccaaactcccttagtgcctagacaggtctacttctggcgactgccctattagaattgacttttatgtttcacaaaaacaaaaccgaagttactgttatctttctctaattaacagcgtgggagggagaggccacaaaaaaacggtatactaacgcctaacaaaaccagcacgcattctttcctcttgaccccaactttgttcccaatgctcaatttttgatgcaataaaatgggggatgcaggcctagaacataactttttacagggcgcggtttaaccatgcttagggcgactactgagtttcatccaagctccagctagtttccgaccttaccaccgatctcctccttcaagaagactcgcttctctctattcgccagacgagctcgaccagcatctctgccatcttcgcaatctccttggctttctcctcagccttctcgcacaactccgacactctctcgtcggcttcgccactcgggtgctgcacgtgattgagggcgctctcctccgaggcctccacctgcgttttgatctggataagcatattgtccatctcccacagcttgctcctggtccgcaggtacgcccgcccgtgctcgcgtataagagacgcgatgtcctcgcgcatctcgttgatgaccgggagcaggaactgctcgaaatcctcctcgggctccagcacctccacttcctcaggcgcttccacctcgtctatgtccaggggccgcatctcctcctgccgcttcctcagtaccgcagtaggggcgttcttctcaccggaaccctccaagaactggagatcagcagttactgctggaggctgagcgacccacacgctttgtcaattgtactcccgaattatctttatttttttttcttccttttaattgtaagcctttcgcttcacaactctgcgggaagaatcgccgtggatgcacacaaataagcggcctacaaaatggagtcgcagccgtcaactcgccctcggcctttttgcggccctttcacgacagagccgggcccctttacggtcacgccttcggcaagaccaggtagcgggcgcgtgcacgtaaaggggcctcgggcgcgcgcacgtccatcaccagctgcttcccggcgcccctcctcgccctctaatttagatcggtggcggcaggtttgttcgcgtcttcatctaaagcttcccttcagcgggcttttacttttattattttttaaaagtaaaagtgaccctcccttccctatatttgaataagactggctggcgttcacagcgcttactatctaagcatgcacaagcttgaattaacttatatgaattcatttagccctcacaacgaacctagaggtaaaaaccgtgctaaaagtcgtgatttgagcccagagcaatgtgggtccacagtccctgctcactgttttagaatggaacacgtccttctgtcctccccacccctggctcatacttttgtcctggggggaaattctctcgctgccttgggtgattctggccggtggtttttggtctctcttcgccagtctgtaaggtcctcaaggtaaagggctacttctgtttcagttctgtcctccgcccctcctgtcagcctggcgtcaagcagggtcttaggggatgctttagagagaggaattcttctctagtacataagtgcttctaccagactggaggctgtttggggacaggttctggtcttgatcacctttatgtccctccacacacaggacctgaaaatcagcagggacctagtaaatgtggctttgatggtcagtacattttgatcactaacctaatgccattgtggaatggaggaagtctgttgctaggcttagccacccagtgccacactagtagtaatatgagtgtgtgtagaggg

SEQ ID NO: 42120 - DNA, 1762 bp, Homo sapiens
gctgaggactttaaaaatcatccaaagtcgtcaaggtccatcccttttgtgtttcgtcttgcttatctcatttattttactataaacagcaaaaagaaatgaaggacaggagggagacgttcatgggtgctggacatgtcctacctgttggtctggatagaagatgcatggttgtatggatgtgtacaaagtcatcaatgtgcacacttaaaatgtatgcactgtattgtattcctgctataccttcgcttaaaaaagaaaaaaaaggttgaatgtgagttcgggcgtgagaaaacagcagcgcgcatgcgtgagcgtgagcgcgcatgcgtgagcgtgagcgcgctgggaggccggaaacaaaggtggatgcgcgtgaacagacgccctcgcaggccgccggaagcaaaggcgtgagcgcgcgtgcgtgcgtgtgcgggtgcgtgagcgtgagcgcgcggaggccggaagcgagcgctgcgcagtcgggtggtcgcgggccatggagggtagcttttcggatggcggagcgctgccggaggggctcgcggaagaggccgagccgcagggcgccgcctggagcggggacagtggcactgtttcccagagccacagcagcgcctcggggccgtgggaggacgagggcgcggaggacggcgcgccgggccgcgacctgccgctgcttcgccgcgccgctgcgggctacgccgcctgcctgctgcccggggccggggcgcggcccgaggtcgaggccctggacgcgagcctagaggacctgcttaccagagtggacgagttcgtgggcatgctggacatgcttcgcggcgactcgtcccacgtcgtcagcgagggcgtgccgcgcatccacgcgaaggccgccgagatgcggcgcatctacagcaggatcgaccggctggaggccttcgtgaggatggtggggggccgcgtggccaggatggaggagcaggtcaccaaggccgaggccgagctgggcaccttccccagggcgttcaagaagctcctgcacacgatgaacgtgccctcgctctttagcaagtctgctccctcgaggccacagcaagccggctacgaagcccccgtcctgtttcggaccgaagactacttcccttgttgcagtgaaaggcctcagctctgacggcctgaccactgcggcaagaggaccccagctggggtgcttacctccagtatgaagtgaattgcaaatcctgcttatggacatatatgatgttggagtgtgggattttaaagtttactttctacaaactctccgtagtatattcatgattcagtgtagaatgtatagactttatgtcttccaagtttaaaaaaagagacagggtcttggtatgttgcccagactgttcggaaactcctgggctcaagtgatccttccacctcagcctccccagtagctgggactacggggtcgccactgcacccagcctgtgtcttccagctctaatcagaaagctgcttgtcgagggcatggggaatcaaactgaatgaacttttctctgcactgtggcaaaactgttatttttatggattttactaaatggcgttaccttttcaagatttatatgtttgtataatcataagaaaattgagccattaaagccttgttattcaatcctaatagtcagttttctagaacctacttttagggtaaatggtacattatttaatattatattaaacctcctatagcgtggattgtagaccaaaggaaatggtacaattt

SEQ ID NO: 42121 - DNA, 2440 bp, Homo sapiens
agagagggtaagacacctgcccagggacaccctgttagaaggtggcagggccaggactcagccgcaggcctgtctgggggcccccatgcacacggtgcactggtcttcaatgggtgcacaggtgggatctcttttcttttcttttctttcctttccttttctttctttttttttagatggagtctcactctgtcacccaggctggagtgcaatggtacgatcttggctcactgcaacttccatctcctgggtccaagcgattctcacctcagcctccagaatagctgggattacaggcgcatgccaccacgccctacgaatttttgtatttttagcagagacagggtttcaccatgttgaccaggctggtcttgaactcctgacctcaagtgatccacctgccttggcctcccaaagtgctgggaatacaggcatcagccaccgcgcccatgggtaggatcatgggtaggatctctgatcctcccggttcatggatctccagatattacgctccaaatccaccttctgctttcttgacatcaaacctaagaaacaagggcccacgacactttctgcttaagcctaaagtgctggtaaccagaagggaccccgaggggacccccaggtctctctgcatcctgaggggctgccgctgtggtttctccccagtgctggggacggggggccctgtctgacctagtggcttctcatgaaggtgcccttccagagagccaagcaccgaattgggccagcccaggtggtcactcggctctgctgaggcctgcttggatctcagggtgactggccccgtcagggtgactcagctgttcttgcagctgggcgtgggctgatggctgggagctctccaggcagcccgcagtggccaggccgcaggaaggcaggcgggagcagcccgggaggactcaccaagttcttattttgcttttaaagcctccagctcctggcccagggagccaggtacagtcaacctgttggaaaagtgcctccttctcagggaagcctcgggcatgggaaaaagctaggatgctcagaaccaaacaggaactgaaagtcagcccagccaagtccttcatttcacagctgaggaaactgaggcccagagaggctgacctgcttggggtcacgcacacgtagggtggtgcaggcctgtgatctttgcactgggcccccagacctctctggagagacgtcacactcctcagaaccagcaagctgctgggtgatgccacaggactccctgaaaaaccggcccgttgaagaccagcacagggtgggcaggagggtccccagacggacctgaggcccagtcctggccctgccagtttctaacagggtggccctgggcaggtgtcttaccctctctaggcctcagtctcccctctggccacctgctgggatctccaggggagttcagtgagtggcagtgtgcggtcagcccggtgcacacggggttccctctgtgctcaccaaacctcagaggaggtggccctggagccttgaagaagaggacgcctcctgcctgccgctgctgggggaaagcccacctggccctccgacgcacatatacacacggacaggacagcttgagagcacgcggagaatttgcttctcctgagagcaggctggagttcaggggtcagagcgggtgaatttgggctttccctctgcaaaactcacgtgtgaaacccactcatttgtgcaacaaatatttgccgagtgcttgctgtgtacaaggtcctgccccagggcgggagacagagccatgaccaaagcaaacagaatcctgccccatcgtccttacttccagagggcgggatcatcaacaagagtcacaaatgatcaaacgcacatggggagtaaatagtgattgcggagcagggatcggagagggatcggtgccaatgagaaaagagttgagcagagcaagggactaggaagcgacggggatgggaattttagaggggacccagaaaggaccagcccgagcaggtgacctctgaacacagagaggaatgaggtgagggcacaagccatgacggtttctgcaggaagaactttccaggtgggggaacagcccctgcaaaggccctgaggcaggagccccgtgtaacagcagctccagcgagcaaaggacggaaggaggggatgaggggaggaggtggaggacaccatgtgtgggtgtggattgggagagaggaccgcccttcctcatctgtggtgtcggcttgttctgtttcagggtgatagaattgctcagcctccacgaggtaggaaatcccagaagacaaggaggtccatgaagcgggggatgagaatcccaccagtttgaaacgtgccacgttggtgacgctccttccttgaggcttctttgtccccctccccaacctcatttcacactctgctcctcacacaatagagt

SEQ ID NO: 42122 - DNA, 1403 bp, Homo sapiens
cactcctgcacttgtgtgagtgctggcaggcttgtccccctcccagctgagctgtgggagagtgagggcaggcgtgagaatgtgggagtgtgccagggtgctgcattcctgtgcgagcgatggtgcgtgtgcatgaacgtttgttggtgggcgggcacctgtgtgcttgcctgggagtgagagggagttgttggggtggctactgctgggagcagggaggaggggaccacagcggaccgcgggggaccttcccaagctggctgcccgcccaggcttccgtgtgttttggcagggctacgcaggcccaagggccctcagcgtccaggtagaactgctctgtccagacattgcccctcagcacccttcttccctctcgcctctctcctccccacactctcagtctcttgctttgtctctgtccatgggtctgtggtcctttctgtttccatctttccccctccatctccctctatttctctgtctcccattcacccccggctaaggatcctccttagaggccctaggccctgccacgccttcctggcaagcacagcccagctggcctgggagccaacaaccttccctcccaggcaccagtgtgggtcgggagggcctccaggaagtcctctctcctcatctctgacatggctcactgtgactgcattttatggggccttaatgagtccattcagacagacagagctgcaccaaggtgtggggacagacgtgataattaaagaggttgccagtagccaggatggctggcaccagggtgttcagaagtgtgactaaaaaaggcggtgggtggggccttcagagagccagagccagggtaacagccctgagtgtgcaacagccttgctatctgctaagtcctcccaccaccgtgcctcctgggcacagatctgggcagactgtcctctcacagatggaaaaactgaggccaagggagggtcagtggacggtttgaggccacacagcacagcaagtgtttgcatggagaccgccctgcccctgggctatccagactggggagagccccacccaactcctggcagagaaaaaggcctaggaaggggacctgagccaagaagcacaggaggcgagggggaccgtccgccactcagacagcaaacgcttcctgatgcctccatcaccacctaagaggctcgactaggtgatttcccgaggtcgagttccctccctgcaaagaattctggggcctgctataaggataattaaatattctccacctcacttcgttcctgcactctttcactcattccgtgcactcactggacacctagggccccaaggcacctgtttgaagctggggagccagcaatgaatctggacctgagaagtggcacaaggggcaggtgctgaggccatagggcccctcc

SEQ ID NO: 42123 - DNA, 2539 bp, Homo sapiens
gctcactgcaagctccacttcctgggttcacaccattctcctgcctcagcctcctgagtagctgggactacaggtgtccgccaccacgcccggctaattttttgtatttttagtagagacagggtttcaccgtgttagccaggatggtctcggtctcctgacctcgtgatccttctgccctggcctcccaaagtgctgggattacaggcgtgagcccccgcgcctggccccatgtgtcagtcttaataataacatagcaataacaatagtaacagcagcagcaaccctttgcagatgagcctcggggttaaaatgcactttctctaattctctaatattatctcattggctgctcttgagagctctgagaggtaggaattctcatctgctttgacagatggggaaaatgaggcacacttcagccaggcacctcctcacactacagggcagatccagcccatgcaaagctgggcctagttcctgggtggggctgtgtcaggacagctgggcacggacggagctttcacccacgctggggcgcctgctcagcgaggctgcctggtggggcggtgactgcatgacaaacttgctgtgtggcctggacgtcagggcgggagtaacagctccaggaaggccagagttcagcccagtcagcccactcggccccactgttcgggctgccctctgagcatgtgtcatcctgccagggtccctcccactgcgacctgtcttcctggcagctgctgttcaggagttctgcaccccgccctgggtgtcctgccaaagccaaggtggccgtgcggtcagaggcagcgtcctctgccctccctgtctccctgcctgtgtgtgcccctccttccatggccgggagcctttctcctttcccttctcattttgccagactcccaccctactgtcacaacctgccaaagaggcactgctccaggcagctcctggactcgcccagatgcagccagaccctctgctgcgctcactgcatcgtcgtggatgtagctgtctctctgcctttctggacatcctgactgtggcagaggtccccagccccacgggaggtggggtgggcagggtcggggggtccatgtccccttttcttaggtgaggggagtcacttgaagccagggcaggtgtggggatgggggccccagacttgagcacgtgccaggcagagggaaagggagctccggagaggtcgagtcagggtagggggcttgatggccacacccaagccagagaggaagccggaggctgcgagccagccctgaacccggcagcctctgccgtgatgaaccagggcgacccctctacccagcggctcagccgacaccctcagaaactcaattttatttaaccagcacatatcatgtgcactctggaccaggagtggttcacttactcctcacaagcaggctgccagcagcagggacacgggcacagaggggctagggaacttgcccaaggtcacactgctggtcggtggcagaactgagatcggagcactgactgtttggagccacagtccaaagcgctgctgcccagctcttccccagggagccactgcaggtggaaactgaaccccgaagagcagggggctggactggggtcgagactgctggcgtgaacctgacggatcgccatggcccaaccccttcctggctgtgtggccttagacgagttgcttcacctctctgggcctcagatgtctccattctagagtaggaatagtagcaataaccatccattcagaatttgttaagcaccttctgtgagccaggtcctattctggaatccgggaccacagctgtggtgaggacaggcgagacctgcctcacggtggggctggggtggtgaggaccacctgagacagggtgtggacaaacaccttcgtctacttgtggctggctctccttaatgctccactgggccctccacattgggcctgatggcgaagacttgggaactacacacccggaggtgaaggagattccagggcaaggcagtgcaggagcaagggccagggggctgggctgggcggggcagtgctgggacagcgcttgggtggcgcctggggccgagatgtccctgctctggaggctgtgctggaggtcccgaggttggaatgtcctctctgtgtcctggggtggggatgggtgacaaacggtagcatcaggccagcaatccctgggcacatcttgaggtacaggaacatcctgtctgacagcttccaccgtgagttccctgacctgtgagtagttcaggttcacctgcccagctgggcccaaagcacgaacacccacgggcgtgggctgggaacatcttttttttcctgagaatccctttctttctgaattcaaaagcgacatttgttcataataaaaataagattggaaaagctaggaagataccaaaattatatgaaaaaaaaaatcacaaaatcaccccatccagcccccctgagacgaacgctagtaatatgttggtgaacagtcctctggctgtttttctgtgcaactttcaacct

SEQ ID NO: 42124 - DNA, 809 bp, Homo sapiens
tatgcatagaattttgtgttgggttctttttgtttaacatatggtatgccatcacctagaattatgtttatggtttctttctgattacaaaattaatatgtactcactgtgaaaacaaatgaaacaattatagaaatgtggaacggtgagaggccagggtgaaaaagaaagtgaaactcccccctaattcccagcccagagacatcgccgtgtaaactgtaaacaggtaaacactgctgtgtaaactccccgaggagcgcagaccagcagaggtgtttagagcacaggcccaggatcaggttggcctgggaaccaatcctgcctccgcaggcaaagccttagctgacctctctgagccttgattttctgtaagcgaaattcatgagagcagggcctacgtcacaatgttgctggaggaattaaggaatataccaaaagcattgccatcagtgagttacaacaggcaaagtgctcgaagcaggacacaggaagtgctggaatcatgttaggttgtactgtaaacacccgacagaaaccacaaaggggaatgcacaactcactatgcgccaggtaagggctttgcatctgtctcatttaatcctcccccaagctctgtgaggtaggtactttgattatccccattttacagatctgagaaacaaggctgagagaagttgagtgtcatagaagcactatccataatagcccaaaggcaaatggagcccgaatgtccatcgacaaatgaataaatccatcatgatatatccaatatacataaaaaggaatgaaagaccaggcatggtgggtaa

SEQ ID NO: 42125 - DNA, 1380 bp, Homo sapiens
cttaaaaaggaatggaatactgacatgtgctacaaaacagaggagccctgaaaacattatgctaagtgaaaaaagccaatcagagaagaccacatgttgtatgcttccttttctatgaaatgtccagaataaggaagtccacagaaacagaaatagattagtggttgccagggaatgggggaaggagggtgtggggacagactgcttaataggtaacggggtctccttcggaattagagatggtggtcgcacagcgttgtgaatgtactaaacgccaccgaattgctcactttaaaatgactaatcttgagtttaacctcgattaaaatttaaaaaatgaaaaaggaagaaagggtgagggacttgcccaagctcgggccacacagccagtgatggttctccttctgggcagaccggagaccacctggcagagccctttgtttgtagtgtttctgcccatcaccatgaccccgatttccagagtggagtcgccaggtcagaggtggcaacctgtacatggatgacacactgggggactgggcctcgccctgcggggggacctgggtgggtgggaatgccagctgcccggccagaatcccacgagactggtcagtgcagttgtccccagagcccagcggggtggagggcggggctgccctttggcctgcactttttggttaagcctgtgctttcaacacccgcctcctgcctgcctgggttatatttaatcctgctcgcttccggaaaccaggactccgaggacagcgtggcctccttctggctccagagccctgtggggtccgccacggcacggacctgcctttggtcaccgtgcagcctcagaaccctgctgtgctttctgagccccagattccccatctgaaaacagatgcgacaatggcccaaccacagggaggtttcgatgggaggatggacctgcggggccggctcagagctaggcctattcagatgaaggcaccaggaaaggaactgttcgttcacttgcccctaagatgttccgggtttctcttgcggtaccttggaaagttgattgtggacctagaaatatgtccaaggtctatcattacacggaaaagcaagcgcaatgggtgagggggcccctagcagacactcaagtgggagctattattatttatttgggcttttgatgtttgttccatgtatgtttccatacacagggaacatttctagaagacttcatgagaaactgtgaacagcaattagttccttctggggatgggcaaggaatgagatttttcactcaatacctttctgttctcttgaaagttttcaccatgagcatgtgttacttttatagtaatagtttaaaataacattaaactcggaaataaaaaatgt

SEQ ID NO: 42126 - DNA, 1227 bp, Homo sapiens
tctccctatttccttacctgacactttaaaattaagatttcagcctcctaaatcaggtacaaacttttctgatgatggcaaagtccctctcaggtgaagagcagctgccgctgcctggaaggctttagaacccaaaggtctggtaagacagctcttatgaacccattttgcagatgggaaaaccgaggatcagagagatgtaatgctttgaagagcaaggtctcacattgacccttcagagtctagaatgtctgtgttgacaccagtgtcccacatgacacggctttgagtcaggctgcctgggtttctaatcattcctaattcataagtctgaattaatagtttaaaataacattaaactctgaaataaggaatgtttgttattatgaccctttcaattaatggaagaggaaaatggcacccagcctcacctcctttgagtcaggctgcctgggtttctaatcattggaagattaaataacatagtgcagtatacagaaggcacttaaggctactgcctggcacaaggtaagcacacaataataactaccattagtggctgttggtgtgccattgcagaggcagatttttggggtgtgtatggcctttattggtgacactcccaacatgtgtccatataccccttggaagcatcagtgtctcatcaccctgtcccccaaccttccattgcaggaagaggctccaaccctaccttagaagagctggggcctctgtgagctccacccaccctgggggcagcagctgacctggctctggccctttggcctgctgcctgcacatggtcagtgctgccagagagcctggcctgcccagagagggctgaccttgacctctaaactggacctaggggatgtcttctgggcagaccttcaaccaacagcaaacatcatttccacgtgccttcaaacaaacaagtacaaattacactcctaaattacagagactgggaaaactacctcctcctgctctggtttgcttttgaagaggtatccttggaatcatgatcttcaaactttctggactcatataagccttaaacattttcggtggctaggcatggtggattgcttgaggccagcagttcgggatcagccagggcaacatagcgagatcttatctctataaaaatttaaaaattagccaggcggcacatgcctgcagtcccagctactcaggaggctgaggtgtgaggattggtggagttga

SEQ ID NO: 42127 - DNA, 442 bp, Homo sapiens
caatggaatatgatgcagctttgaaaaggaaagaaagtctgacacatgttccaacatggatgatctctgatgaccttatatcaagtgaaacaagccagtcacaaaaggacaaagactgcatgattccgcttatatgaagtccttaaaagagtcaaattcatagaaacagaaagtagaatggtggttgccaaggacggcggagggaggggaatggggggtgaatgtttaacaggaatagagtttcagttttgcaagatgaaggtcctggagatggacggtggtgatggttgcacaacgatgttaatgtccttgacactgaactgtacacttagaaatggttgagatggtaaattttatgttatgtgtatttcacaattaacagtttaaaagaaatgaaccaacttggctgggcgcagtggcacacgcctgtaataccagcact

SEQ ID NO: 42128 - DNA, 2183 bp, Homo sapiens
acaaatgaccccaggtaagtcactcctcccattggacctctttcttctaagtaatctcccttccttttccaggtccatgatacttatttgcttttttagaacaggcctaggagtcacatttagggaaggtaggtggctgtgaagacactttgattaaaaggttaatgcacatttttggtttccactttcgaagcttccagaatttatttttgcctagttaataaaaaaagagccatgtcacatttctttagcttgtcttctgggttccttaacaacaacaacaaaaaattaaagtctttattttaagccgcctactccagccatcccaggacgcggcgaggagggggcgcggacaggtggcgcgcgagcccgggaaggcgggggctgcaccgggccgcgggcggggccgtgcacgccgagccccacttccccagcgcgggccgggggcggggcgcggcggcagagttcgggggcttctgccgagggcagtcccacgtgcccctccgcgggagacgtctcctctccgacgcccagcacgctggggggctcccgcttcctgcctgccctctctactgcttgccctctcacctcccagcggcttccgccgccccggccaagctgcacggcgcgtcccgggccctagacccccacccgccaggcaccagccccggcctgtcccctcgcgccgtcagcccgcggcccaccgcccgcgcgcgcccgcagcccagccggagggaggggcaggggcggggaccggccggcgctgatgtaatcccggcacccgggcggaaggatatggagcgcgcccctggttggcggggcgctgaggccagttgccgggtaacggagcggagcggctcccggcgcgccgcctcccgccctccgcggagtggcgctggggccgccgccgccgctttacgtaaggcgcaggccagggccgcccggcgctcggcagccgcccgcagcccctcggagccagaggagaggcgcccccgccggccgccgcgccgcccggcagcctcggcaggtactgcgggcaggcggcggggagggagggcgcggagcagcccctcggccgggtgggcgcgggccggggaggccggacgctcgccgccgtggggctccggggccagcccgagggaggccgggccgcagccgaaggcttcggggtcagcccaagggagacagggccgccgccgtgggctctggggccagcctaagggaggccgagccgccgccgagggctccggggccagcctgagggagaccgggccgccgccgggggctccggggccagcctgagggaggccgggccgccgctgatggctccggggccagcctaagggagaccgggccgctgttgatggctccggggccagccgagggaggcctgaccggccccgatcctggtggtgcccgggcgtgcgggtgagctgtgggccctgggacccccgccccgaccccaggacgccgggacaccagcttgcggctcttgcgcccgggtgggctgtggacgatgagtccgcacaatgggttgccgttggctgcctcctgcctggggcaggtgtcgccgcgccggggcggctcttctaggggagacgaggcgggggtgcttagacttgataggacgtagagccccgaaagtgggcgcgggaggaaggcttcggccggtgggaggcgcccggcgtccccggcagcggggtcaggccggcagcctgggccgctcgctcgcgttccctccgttcccctcccctccagcattgtccttttggggccccgggaagggaaaaccgccgggcgggggaggagggccgcaggcgggcggggccgggaggccggctgagcgactggcgcgccggcctatggcgcggggcgcggcgcggggggcgggcctggcgggcggggccggtgcggcgcaaggtttggcgaaggttacagctggagctaggagtgacaggcccacagtcatccgtgcgctgcgcggcaaaccctgtcgcgagggcgccccgagttgctgcggggcctgatccggctcctttccaacaatacgcgtctgcagccggcatttctagagctctctgcttcttcccgctggagaaaccagtgtgtgtcgtgttggaatgcttcgtcttgccctagaattcagcttgcgtcttgtggtgcgcaggtgacaggacctgccg

SEQ ID NO: 42129 - DNA, 550 bp, Homo sapiens
ttggcctaaattggcttacgggggaaaaaagactcaaataactaaaagtccagaagttgggctggcccctgttaggtttgattcagagcttcccagtgtcattcaggcttctgctctgcctctctgcctacctctttttgtcagcttggttttgcagccagctccttgtagggtaaagggtggtgacaatgagcatgcttctgggatcatattctcacacactgtccagaggtcatgttccccgcattcccagcaaggaccatgaaatgtgcatttctgattggccacgtgcctctctctgagccaatctttgtggccaaagggatgatgggggtagtgttaatcccatgcagacacattgtggttttggtcatttaggcactgtgaggcaggggcgtatgctcagcagctagcctccagtgactgctggtgtatttccaagtggcgtgtgctttttctcccccagttcccaatctcccttttgataaagacagcatggaaaagtcaatcagaactctagccttacgtgacctccctgtagtgtctagaa

SEQ ID NO: 42130 - DNA, 1231 bp, Homo sapiens
atctcaccattcttccacccaagcatcaccataaatttgatgtccttgcttccatttttagcagaattcatgttgctctgataggtgctcttttcaaacagtcatacccttcttagtgcctcaaagtagatcttaagacatgttataacaagttagtacaagtttattttggtgcaaaaaatttttgaaatctgtgcatagctcctttttggagacagtctcactgtgtcacctaggctggagtgcagtggcatgatcactgtcatctcaaactcctgggcctagtgatcctcctgcctcagcctccctaatagctgggactataagcacacctcaccatgcccagctcattttttaattttttgtaggaacagggttgcccaggctggtctcaattacttggcctcaatccatcctcctcacctcagcctcccaaagtgctgggattacaggcctgagccattgcacctggcaatagcacaggccctaaaggatgtagttggcccaccccccaacaccatttttaaagtccttaccccaccgatttgcaggagtgcagtgatgtcatctcggttcactgcagcctccacctcccggagctcaggcagtcctcccctctcgggccaggaattctgacaccacagctaagtatttttagaacagcccggggtggagtgtaaaggcttctgcctttttcactgaaagtgctctggccactgccctgtgtgcctgctgctgctgccactacagatgccactctggccatgagtggctgtggcagtgcccaggaggcctgcatctaccagcagtccaggaacagaaaggaagcccctgcccctggttcctcttgaaagcagccagtcggatggcgtcacaagctggccactgttgtgaacgcagagattaggaaatgagctgtcgtttcagagcccgctgctagccttgtgccactggtgtggttaattaatagcatgttcagggacggttgcctcaattatcaagctggtaatgatgctgccacctaacgtttggttggcgttgctattgtctgtgctagtcatagtcaacagctgacactgagggcttactggctgccacgcattctaagcgctcttgagtgttaactagcaaccctatgagggagctacagctgctctgttttacagatgagtaaactgaggcacaatggggcattaggcacttgcagtctcacacttggtggatgctggag

SEQ ID NO: 42131 - DNA, 3878 bp, Homo sapiens
gcaggcatgtgccaccacgcctggctaatttttgtatttttagtagagatggggtttctccatattggtcaggctggtctcaaactcccgacctcaggtgacccgcctgcctcggcctcccaaagtgctaggattacaggcatgagccaccgtgcccagcctaaagcaggcatgtcttacgtggccggagcaggaggaagtgggggcaggggatgtgccacacacttttcaacaaccggctggcactagaactcactattgcagagatggcaccaagccacgagggatccacctccatgacccaaacgcctcccatcaggccccacctgcaagattggggattacaattcaacaagagatttgggcaggaacaaaatgtccaaactctatcatagtccaagggttgtgttactaaggtttactttcagcttgttgactaggcagcaaggagttccatggcccagtttgaaagtatttagaagaatgaggtagtcaccgtagcccctctccagggttaggccccaagctgttacatacagggtttggaaacttttattcaataacatatatcaaggacctactacgtactaggccctaaccctgatgctggtaatacattttatttttctgaatcagtcaccctccctcagctctagttctctggcaatgatagcatcacaacttcctctttaacctctcctagataaactccagagggcctccccagcctgcctgctgcaccctctttctccacttttcaggagtttgagggatttgggctgaagccccactctctgcatgagaagatgtgtcattatcttgcccccaaattccccagcctggtggccccccaggagcctcatgaagtcagcaggccgctcccggctctgtcctgaccagcagcgtggggcagggtgggcaaggagggaggcacagtcagggtttatacactcagggtgcagcccttcctgcagaataagtgacgcgtttcatctggaggagacacagaagggtccgtttccaccccatgactctgcagatgcgccactgacagtgtgtggtttccttcttggcagcgtccagctctccggcaagtggctgcagatcaaagaaagcagcggaaacctctaggggacacagcctcccagggactgtgaagctgaacagggcgtggcgggaggagccctggctgacagaaatgcaccccctccccttttccagggtcaagccccactcccagccctgtgggaggagggagcaggaagaacccagtgtgtggcgccagagtgcctggctcgaaattaatcctggttcccactgtgtggccttcggcaggtcattcgccctctgcaagccacccttttctcctctgtaaaactggagttttagcacccgggactgaggggcctggcacacatgggtgctccacaggtgccagtttcttcctcggtgccccctaaaatcagctgctcaagccataccagaagtatggtctatcagaatgtgaacttcagtgtcacagctgggtttggctgggatgggtatggcgatgtgggaagaaacgagaatagagggatggctggggcaccttgaatgcttcctggcggcatctggatttcaccctggaggcagcagggggcacaaaaacgttgtaagcaggggcaccatttgtgtcctgggcaagcagtggtctccgaggtgagggatttcagaatctgctggtgcattctgggtaccacggctcacacctgtaatcccagcactttgggaggctgaggcaggaagatcgcttgagcccgcaagttggagagcagcctgggcaacatggcaaaatcccatctctacaaaaaatacaaaaaaatttagctgagcacggtggcacatgcctgtagtcccagctacttgggaggctgaggtacgaggatcacctgagcccagaaagtcaaggctgcagtgagccgtgacagactctgcaccccagcctgggggacagagtgagaccctgtctctaaataaataaaaacaaaaaaacaaatcatgataaaaaaaaaatactgcctgttgaacaggtctgggaaaaaaaatccactgatgcatagcagagaatctgctagaaattctgtagcttttcaaagaagatcaccatggtattttcttccttctcacagttggatgagctcactgtacaaatgtgaatggagcactgggctgctgactgggcatgggtttggcctggtgcagggatggctgagctggggtcctgtgcaggccactgccctcctctgccctgagtgtccttgtctggagaaaatggagatcacccaccccagctccagcgtggcagtgagtttggttactcattcatggaagggaaggccctttgtaactgtacacgaggaattagcaaagtcatcgttgcaatacactgaaaaaaaaaccaggtctcaccactgtgcaaccctaacataaaccacgtgcggtatgtggcctttggacccagatttaacaaactgtaaaaagacactgttagagaaacactgggctagcgggagatactgaggaattgtcagtgttattagatatgctggcagtattatgactacacttccaaaaaagtctttcttctagagacatgtacagaagaagctgaagtatcttcatgtgaactgacgtatctgagatatactctaaaggaatccagggaaatttacaataggaagaatatggggaggaggtgagaagagcagaatattgatcactgttagggtaggcctcaggggttcattatactgttctctctactatgtatgtatttgacattttccataataaaacttgtttgaaaatatttttttaaatggctttcgaagtctaaggctggaagatctcttgaggctaggaattcgagaccagcctgggcaacatagtgagactcctatctctacaaaagaaaacattaggcagacatggtggctcagaaggctgaggcaggaagatcgcttgagcccaggagttcaaggcttcagtgagctatgattgcaccactggactccagtctgggtgacagagcaagaccttgtcttaaaaaaaaaaagaaaaaagatttttaaaatgttagagatggaaataggttttctggccagcaatggggcataattctagagaccccaggtagaatcagcaggaaaagttgcagcagatgcttggatctcattctcacccctcacagcctggtggccgtctaggggagggaggaggagacagggacgttgctggtacccactgcctgggaacccctggtgagttctccaggatcccacagcaatccccaggctgcggggtgctgagcacgcaaggcaacccctctcccagaggcagatggaccggggagggttctccatcagtgcttcccaataaaaggcctcccgcttcagagggagtgtaaactcagcatccacgcccctcccagggttgccggacaccttgctgaacttaacttaccagctgggcaggtgtggtagaggcacctctcccaccgtttcagagcttgggcctcccaccagcccctgagctcctgcggagaagcagctgagggctccacggatctgcacgggcctcctcttgccaccagagtctcacttccctgcgccatcctgtatccgttggggtgcagcttagcacctttatggatgacttcctccttgcctgtcaaatttgaaaataaatgcccgccatccatttctgattgagccccaacctcagttagcaataccagatcgtctcattaaaaaaagaattggctgggtgtggtggctcacgcctgtaatcccaccactttgggacgccggggcaggcggattacttaaggtcaggagtac

SEQ ID NO: 42132 - DNA, 3547 bp, Homo sapiens
ctttaaaaatctctcttgcttctgcgtcatatctcatagatgctcagggtttttacagccatgagctggagaggagacccaagttcggggttccctagcccatccctaacgaccgcagtagagacaaatcttccatttcatgcttccagatgcttcctgtaatgcggaaactcctcctgcccctgacctttctgagtggctgagtcttcccttagattgggctgcagtcagtctctcccgggtttcctctctggtaatttatctgccagtgacaaccctcagggctcctggttggcaggagccaaagccaagtggaaatccaggacttctggctcccagcgctgggtctctcctcttgccctcaagtccccagagtctaacgacaacccaataacgtcaaataccaactatttgccaggcccagggaaaatagcagtaaacaagataagcccggctttcctcatggaacccacagcctagaaggggaatggagacccactgcccgtcaacaggggctcctcacatactctctaccagctcatggagggctctggggcagggaacctggcttctgcccctctcagctactgacccacccgggtccttgggcggagggcttcatctctgagcccgtttcccgctttgtacaatggctctgatcatagatcccgtctctggagtttgtgcaatgttgaggccaaatatgcagataacgccaggccagtggcttccaaacccgcgtgcacattacacagcttcccaaactgatgatgcttccatctcatcttcagagactgtgacttaatcggcctgggcttcagaatattaaaagctccgcaggcaatactaaagtgcagaccagtttgggaactacagcgccaggcaccgtgtcacagcgcgataagagagaacgttcggaaaagccctttatagattaagagactgaggctggctgggaggacgccacggcgccgctcccaagaccaccgcggcggggcctgagctccggtgtcacgcaaagcttcccttccgcggcggggcccgggccgtctcccgcacaccggccggggcaggggagccccatcgatgcgctccgccgctcggctccctacgcctgagccctgcccgctcgagccccttccccctcccggccgcttcccacttccaagatggctgcgggtggagccgaccaggtaaggggccccctgtcggatgtccgtgggggccctgcgggcacaaaggcccgctcaaggcagctcctcgccactccggttggttctccggcaaaaaaaaagggccggcgacgccgctccggaggcccgcggcgggcggcccccggaagagggacagccgggcgagcgccgagctccagacgcggcggcacgggcggaagaacgggcgcgggccggcagggggcggggcgcaagtgcgtgggggcgtgcccagggggcgggcgagggggcggggcgaagcgagggtgcgcgccgctgttcgccgcgggctgctcgcgcgcacctgcgggtcggacccgctgcctaccgcgtgcccggcgtcctcgtcgcgcgagttgccggtcccgcggggcctgggctgcgggcccacgggtcccggggatggcgtcggagccgcgctaactccggtactgagagcctcccgcgagggccgggccgcgggccgcgagggagggcagggcgcgcggggccgccacctgctgcagcgccggccgaggcggggagcggccggggcgaggcaggtcgccgggcgcgggtcctgctgggtgtccctcgccgcgcggccgcggctcctgcacgccagggcagcgcgtgcgtggcgcccggggtgccgttacggggcctccggggcgggggcgactctcgggactcggcggccctcgcggaggcgcgcgctgtgtcccgctcctttacggaacttgacgaaaagttttcctactccgacgcgaggctcccggcctgagaagaggcgcctcggtgcgccagaccccgaccccggagcccccttccacctcggaccctcagtccccaggcagcggaccctcctccttggagcccctgaccccgctttcatctctgacccctctacccctggagcccctgacccgcgaaaccccctttcatctcggagccctgacctccttggacctccacccacgcgaaccgtctgtccctgggctagggaatctctctgcctccgccttggagcctcccattaccgggccgcgaagaccctggcccggggactgtctcggggccggggtagctgccttgaggagtaagtccggggactcctggtctccctcccgccaggagtctctctaggctgtgggttgcggtcctgatgggaacagctggtcaggaggataggagaatgaccctgtggactccagagccagcctctgcgagccccggggtgaccgcgcctgaccaggccacgtgaagtcgtttctgtcctaaagttgcataggacgccgttttctctagcgtggaattggaagctttgcttgggaaggttttataggcaccggtgcgttttgcccctactggaggtccctgggcatcaccttggttatttcacgcactgaggctagatgaggagggtagtcgtggtggtgtcttggggacaaaatgctcactgtcttgtccccagtattgtaggatgttggcacctagttgctgtcttgcctagcttttatagcggtgggttgcctgttggaaactggtggttgctttgtctggaccgggctagtccttacagcagtcttagaacacttcctgttgcccagtttatctggccagtaccaacccatatctcagtttgggtatggcttcccccctccgaccaaccctcttactgcttctttgctgtgtgtttgaccccttgagattgtgggctccgcaatcctaatgagatccccagtcctaatgagagcctggcatgaacttggtgctcagggtcattgggcgaaaacaccttttgggaaacatcaagggtgtcagctggtactaagggagacagagtaactggctgggagccacccacatggggagagtcagagatgggattcaaactgaggcaggctactgggccaggctctgctcacctcggtatcctccgctgttccagcactttgcaccgagctgggcctgattcctgtttgtgcaactgagttttcaccgtctgcccccagcctaccctctcacattcagcttgggctttgcctctcctggcttctgctgttcccctgtgttcctttagcccctgcagttcctctgcattgggtccgctgtctccaccccactccccgtttagtgggtgaattcctgtctttcatgcctccaccttccctcctctactctgggttgattgcttagctggtgcgctatagaaggcctctctcaaagtggggacacagctagtcagagcagcttgtttgaatctctctctcccgttggtcagagcttctaaccttgagtcccagcctcagcacaggggatgcctgccgtgcaggtcgggggttgcttggggagtc

SEQ ID NO: 42133 - DNA, 1218 bp, Homo sapiens
cctgtcaaggcaggaattttcactttcctgaccatcatgtgttgacagcgttcctcaccatctggtctagcccctaaccagtgtgtaggctggtcactgctcagctgctggtgtgcactctccgggaacttgatggtaggggatttcttcctcgtagtctcacctccagctctcaccgagttcttggaacataatccagctctcagcagatgtttcttggctgggactgtccctggaagctgcccacttaagaactcagttgttggtagtaattaattcagcgagtagatttttgaaaccttaatccatgccaggcatttaaccagagaatagttcccagaaatgatgagagctgtgtctgcctgcagcatagaatgcagtggggagagagacaggagaacagttgtaaaatagctgtttcaggtggggtgtagccaaaaggagcccaggaggaaggaggcctgggagctttctgggagaggcagggaaggcttttcagaggaggtggcctttgaaagcaccaattgagtgtctccttgtgccacaccctactgggactctgaggccccgatggcctacctgggagagcacctcaggtggtggtgcagtagggctgagtgggctggtggtgggggcgggtaatggctgggggtgactgcacaaggctggagaggcaggcagagacggatcaggagggccctgtgtgtcggcttggggaattcaggcttagtttgtcttttataaacgtggacttggaggcaggccatctgcagttggtcggtctcctggctggcgtccagagtccacccattagctttgtctcagaagcacacaccttgtttgtacaacttcccctataaagggtattatcacgcggtaggtggcctggagtgcggcttctgccctagtggcacgaggcggaagtgcttgaggacaggtcgccttggcccttgcagagtttggttttacggtatgttgcaagcggaagtactttttcctttttaggtttatttccctgaaaactgacgccctgttctgaggtttaaggaacttaactggaattgggatcaacaaagacctcaaaggtcactcaacttctccataggagaggccactgggctgctgtccctggccccccaccgcagaggagaggagtagaaaaaggttttctttctctacttaaagccagatggctttgggctctgccagacctcactt

SEQ ID NO: 42134 - DNA, 682 bp, Homo sapiens
atcgtgagtctttgctgagggcagggctggggctagagctggtcctctggggttcccagccctggcttctgagccatcctgtttccccactttgtcccctcactctcttgccttctggtttccttgtcctcagtgaatcagtctctgggttatggaaggacgtgtgaacagtgtagtctaggagaacatgctcggagggaagggtggagacgggcagggatgaccttggctgcttgatgaggtgggagcaggggagtgacaggagggctggccaagcctgaccacagcctcccagaagcgcaggcccggcttgcatttgtccttcacccacactgtaatgagcacttctgtcccagactccagcctgagctttagagagagtccctccccttatggcgctcatagtctgatggggcagacagataaggcatttcacgggctatgggggcgggcacaagtgctgttactgtgggtggggagggggtggcaccgcagccgagagtgctggttcaggagttcatgctggctgggtttctcgtgagtcctcctatttaatcgctgtgggccttgggcaagttacctctctgagccttaagtaggggataaaactactgtataaggttagagatcaaatagagcatttaacttcttggcactccggaagtagtagctttctgtggtt

SEQ ID NO: 42135 - DNA, 584 bp, Homo sapiens
ctgaggcaggagaatcccttgaacccgggaggcggaggttgtagtgagctgagattgcgccacggcactcccgcctgggcagcagagtgagattccgtctcaaaaaaaaaaaaaaaaaatctaagctgatgttagagagtggatccctgtttacttttcccctcctgtatttaaatattagagagtgtttgaaggagatttcaaggagagtatgacttcagggagaacactagatcttgctttggactcagtgacttcatcagtggagacgttcgtggcagagtcatttcagggttagttaatgaataccttttaatgcagttctatctggcaggttttatgtcagaccttggggatacaaagaccaagtaggaagcccgcctgccctacaaatgcagggggaggtgaggtgcaaataacaaaaatgcaatactcccagctctgtgtcagagataaatgtggacgtgctttgggagcacagaggagggactgcgtggggagggggcacatgagcccaggaaggctgcacgggagagtggtttgagctgagttagcatgtattgaaattttatgtaaaggagagc

SEQ ID NO: 42136 - DNA, 2609 bp, Homo sapiens
tgagatccactcattgtaagtgttccacgattttaataaatgtatacagttatgcaactatcattgcaatctagtttcaaaatatgttcgacatccaaagttttatttttcatcacccaaaaaagttccttcgtgcctgtttgcagttgatcccactctcacccccaggcaaacatgaatttgcttcctctctagagatttacctttttaagaagtgtcacataaatggaataatggaattttcttgtctggcatctttcacctggcctagcgtttttgaggttcatccatgtaggcccatgtctcagcagtttcttttcatggccatttccctgctgctcatgcatccgcggttggtggacgttctggttggcgtggacaatgctgttaggaatgtttgcatgcaagtctctctggtcgtatttctcttgggtgggttccagggagtatggtaggggatgctgaattatagaagaagctgcaccattttacactcctaccaaggatttaggagaattccagcttctctaagtctttgctatcacttgccattgtcctttttattttatcctggcggccgtcacaggcttcctctgatggagacctgtctgccggcgatttggtagttctgaatcccaggagatctgcggggggagccttgggctaggccccgtcacgggagagcctcgtgttgtcgcagaccggacttgctcagccctgggacctggggcccgcggctgaccagaagtaattttgacccgacgtagtccttatggtgtagggtcgaagtttaaagactgtttttaaaaacctgaggtctcatcgacagcgtaccgcgccatctgaagggcgctgtcccgccagcttccgtctccctcccggcagccccggggcgcctgttcggcttctctgagtgttttgtgtgctccctgacgttttaaacccacctgttaatactttgtgaaaaacaggagccacggtagcccgtaaaaactgctcacaatcaccccgccacccagagctcactagtgcgactatttttgtgcaatttcttttggcaacacgtttctcagctctcgggtgatctttaaggcagaagctggctctccgcctgtcggcgcgcgtccccggtgtttacggccggtggggccgtaccacggggacgccccagccccgccccttgtgcccgcccctcgccgctcatcagccccgcccccttgggagtctccagccaggcctgacgcgccgagccggcagcgcggatcgcctcgctgtgtctgcgcgcgattgagcggcctgccgccccgccccgccccgcgagtctgaggagccgccgcgtccgcccgcccgcccgcggtccgggagggagggagggaggccggccctccgctcgctgggcatggagcctccggccgcgcgcctctaaggccccggcgttcatggtgagtcggggtgcgggccggtgcctctccctgcgccccaggcctgcccggtcccgtgggcctgtcctgtcctgggcctgccagccctgcggccccgcgcaggtggagggtgcgagtgtgcatgtgtgcggttgtgcgggtgtgcgagcatcacgtgtatctgtcctcaacagccgaagcttgctgtgcatgctgctgatgcgctctcctccctggtactctttgtgtctgtgtttccacgtattttcttctggttcacgtttactaggacgacgagagacagcgtgagcgagcacgtcctttgagtcctccttaccctgttttcagagccgggccaggcccagcagcccccttagaggtcagaagggcctcgcctgcgatccgatgagcctttgtatggagatgagactgcgctccgagctctagagcccaatgaggtggtcaggttgcaacagcaaccgggcgtgttaaaacctagttcctttgaatatgtttcattcaccagcccgcatattaacttttgatgctctgggaggaatatgactattagaaaaggactcctgagagtgcttcccagaatgccaacattcccagtaacttagagaacgctttccaggaggggactgcagcttgttaaagaacccaggccagaggaaccactcagatgttctcagtggctttacttactgtgaggtcaggcttcaggggttagccggggctgccttttggaaggtgggacctttctaagacctgtgcaggccattcttccccctcaaaatggcaaaacagcccctcccagatgctaaactgggctcccccctccaagacaattgcttttacaaatggccaagtgtgagaccagccgcggtgttgcggacactttcagtttcgtgcccttttccacaagcaaccctcttagagtggaatgttgtgaagagtaatttcatagtatatagtgacagtcatactcctatcatttctgggcacctgctttggctctgcagcttatgctggttctcatttaatcttcaagtgtaacagatgaggaaacaggcttgtggatggaggaggagctcaaggtcattctgctggtggtgctggctcagaccaggcctgccgctgtcccccagcgcttccctgggtcctcagcctgtgcagatgtggtgg

SEQ ID NO: 42137 - DNA, 538 bp, Homo sapiens
ccaaaaggcccttccccaccctccacccacggttcacgtgccccctcaccaggctctcagagggatccaggagaggcagctttctggaaaggagttttacctttgatttcaaacaaatttgggcttttatcacagattgccttcccactagctttgggcaaatccatctttttgagccttagtttgttcatctgtaacagggtgatcatactggcctaacagggctgttgacagtacttggcagataacagtgctttttgttattaaatctctttgaacgtaatttgaaactgaaagacaactaaatccaaccagaggtcaaagggccatatcctaccaggtggtggcagaagtgtgtgatgaaagaggtggtgggcggaggccaaagaagtttcttcccaggtctttcattccaatgtagagatctctcagccctggtagaaagtagcttagtaacctttctaatgagcagagattgagtttactaaaagaaagcaaagaacagttgagggggagagtggagaactgtgtccaaaag

SEQ ID NO: 42138 - DNA, 873 bp, Homo sapiens
ctggcttttccctgtgttttcagagcatttctcagcccttgtctgttcttcactctcttctctgccaacttcttcatggcccggctgagtcctcatatcctgctttccagccttccctgatggccctgcccttgagttttatttccatcagtgcctccgcctggccctcctgaattccctcaaggggagaaatggtatcttgggcctgtttgtttccaaagtgctgtccattccttaaaggacccgtcctaagcacccggcctgtgcaggccctcgctgggtatagaggtggcctgaggagcaagggcagcgcttgcctgtcaggagctcctggcttgtgggagacacgtgtgtccatggacactgtccacgtgagatgagtgccgtcttggaaggcaggaggtcctggacccagcacagggttcagagtacatagagcgaaggtgacaagtgcatgtgccattccagagtcagcgggcactgtagccaggtctggtggggtagaggttgaaagtaaagggcagaggacggcaggcgatgaggtggggaggccaggtcacggtggctcttagacccaagctctggagcttgggcaggattgcggggccagggggagtgggagaaggcttctgctgaggatgagggtggggcagatccagcggcgagttttaagttacctggaaggcaggagagcctgggaacagagagaccaattaagggggaaaaagctgaagtaggtggagagaaggccccgtggaaatattgtgggtatgtcagagaatcatggtcagctcttgactgcggttggggaaggggtttgctgatgccttcagctgagaccaaagacaaagggagaagattcggccagggcag

SEQ ID NO: 42139 - DNA, 617 bp, Homo sapiens
ttttgtagagatttgtttgcttttttgttgctgaggttggtctcaaactcctgggcccaagtgatcttcctcccttggcctcccaaagtgctgggattgcaggcatgagccaccacgcccagccatgagctttttcaaaatgactaaatgtttatgttgagccagcaaccccatttacttcaagatgcagggggactttatctgccattattccttttctgcaccttaattgaaaccaaaatgcttttacttttaaatttgtgactcaaagtggcatggttcctggccccaggcaggtagcactgtgttaccaagattctcttggtttcacccttggactttgagcacgtcacttccgtacatgtctgttgttcaggcccctcatgttggggcattagccttccagagtttgtcgcgtgggctaagcgggtgctgggcgcgaagcgctggcagagttctctgcttggcgtggagcctgttagtgttgctgcaattgctaagcagccacaatggcgtggaatatcttttaaaagaagggtgttggcctggcatggtggctcaagcactttgggaggccaaggcgggcgtatcatgaggtcaggagttcgagaccattc

SEQ ID NO: 42140 - DNA, 793 bp, Homo sapiens
ggtagcagaggtgcaaacatgaaaggggccgggatgctttcctgagtgctgcagcccaggggagaggggctgatagtttacaaaccacccccgagacgtggagcctgccaggcaggaaggcacaaagagaacggaacgctgcaccagtgcggtgtggagaggcagtgtggaccttgagaccagctgtgggtcaccggggagccaagggaaggggctggccagcagagggaagcctcagagccaagggccagtcctcagatgggtccgtgttaggacgcggaggggcttgcagggttcccagggaaaccagtggatctgctttgtgtggtacaaacacaaagctcaaatatttgctcatatgactcaggcccttgcctgcctaccaggaacctggccacgaactagagtggccagataggtctttcaggcccagagtgctggcctgccccatgggctcccgcgagcatcgcctgcagccagcctgctctggcagcaccggccagggccacaccaaggcactgtttcccgagacttgctgccaaagccccattttccaggatgcctgagctgcctggggttctatgtggagtgaggggaactgccttctccctaagcattacaacaaaaggacttacttgtcaactcagaagcatcactctggactccagaacctcacaaagtttatcctcaaacgttgttcctccagcttcttgccctgctctggagctgctggtagaaactgctccaaccaaaaataaatccaagtttaaggtgcagtctggccacaggttaa

SEQ ID NO: 42141 - DNA, 352 bp, Homo sapiens
aaaaaaaaaaaaaaaattgaaattcaatgtaaaataaaatatgtacatatttaatcattggtgatttaaaagtagacagtcctctggagggaatattgcatggaagtaggaggcatgcagtcagttgaaatggcctcctgcagccctttccattcatagcatttgtacgattcatcactctgacattaagactatctgaaagttcaaagcacaaaaagcaccaaattgaggtgcaataactctgatatttcatggacaggcaccccatgccagtggagaacaaaatctaaattatgactacagatgaacttattataaaggaagaaagcatatatctctacttagataaatt

SEQ ID NO: 42142 - DNA, 2073 bp, Homo sapiens
ttcgggctcgggctggggctcggccggcctccccggctctccaggcccctcctcgcccgcagcctcggctgccgttagccctttcggggcctcggcctgctcgtccgcggcggtgcctccctgcgaagccgcttgctcctcctcctcctcctccggctccgactccagctccccgggttcgggagaggtcggagggccagagctggccttgatcttggacggccgcgcggccaggctttccccgtctccgccttccccgccggggtccttagtgtgctcagagctgacgtccatctcctcccggctcggccagcgcagcggaccccggcaggacgctgttaggtttcccggggcaacagaaggcgcgcgcgctgggcccggcgattggccaggcgacaggccgtcgtccagcgccttctccccgctgcccggcgagagcaagccaatgggaggccgcgagctgacgataggcgagattgattggaagcggccgtgggctctcgccgcgaggggcgtggcgcccccgccgggctttctgcctgcccatttcccaccgccgggcctggggcggggcgttcaggaggctctgggaaaggcggcggtggccggcgcggggggcgcgcaggcgcagagcggcgggccgggcgtccgcaaggtggcgcccgcggggcgcctgcgcgatgcggcggggcgacagctgcggcggcggtggcggccgggccgggccggacggcgcctgcgtactgaggggggacgcggcccggctggctggctctggcggcggctgggctggggccgcggtggcggcagccgcggcggcgggcggcggttgctcgtgcgcggcggcggcggcgggtcccgcgggcggcggggcgctgacggccgggggcgcggcggctgcggcgggccgggcggcgggcggcgagcgggggaagatggcggagctggggaagaagtactgcgtgtactgcctggccgaggtgagcccgctgcgcttccgctgcaccgagtgccaggacatcgagctgtgccccgagtgcttctcggccggcgccgagatcggccaccaccgccgctaccacggctaccagctggtggacggcgggcgcttcacgctctgggggcccgaggccgagggcggctggaccagtcgcgaggagcagctgctgctggacgccatcgagcagttcggcttcggaaactgggtgagcggcgcgacgggggccgggtcccggctagggcactggaaggcccgcgcctctcctgtaatcgggcgcgcaggcagcgctggacctgctcgctcgctccgcaccccagaaggccccggaggtggggagggcgacgctgccggtttatagtcgggcacctgtcggaacctatgctctgagaggctgtgacgcgcccaaggtcacacagccgagacggggccgagtggggctttgaacgctggcttctgacagcagagccatttccctcaccttcagggacgccttcacaggcgtttgcggagtgcagacgttgggcaagactcggtgccttacctgagttcgtggagacaggcaggcccacagactcgacagaaagcggtgggagcaccagggaaggagagcggtgggcgccctgcggcttgtctcggggtctctggggcggccccgtttgctttctgtcactgtatgcatgtgccctgtgtggtccgcagtgcacagagtcttttgtgggtagcgtgcctggtttatgcttgggtccccacaacccacgaccttgtgcgaatggtcagtaaagaatgaacaaagaggcctggcctgggaggcctggggcttgggttttgctctctttacctttgaggtttctgtagagacagccctgtgtggggagcggtgagagctggactggatccacttacgctagcaacatcgtgtgctaggttctgtccttgagagaggaacatggttctctctgggcggtctctcagctctccttccactctggaagcttgcatccgtattagaaaggagaaaatctctagccgtattcccgctcataaccaccaaagacatgtggccatccccgggc

SEQ ID NO: 42143 - DNA, 2595 bp, Homo sapiens
aaagcctagttactctgagagctatgactaccagtcagttctcctgcctttccctagttgagcatctttccacaaaactaccattctagagacagaaatgatgctgacttggtggtcactttcctggcaattaattccaatacaaaaccaccaattacttgaccaaagtctttttactcaagtattccacgtgggtcgttgctcttggctcctgtgttgttaagatataatttattaagctagcacttaccccttaatcacctagactgaaagtgatcttcacctcacctgcctgctctccttcaggaaagaactacatctcactgcccagcttttggccaatttggccctcagtggcttctctaatcaataacttggttctaggcacttcctccagcaagtacttgccatactaacttctaaagtagaactttcaaaaagcagaaggggcagatttgaggggaaaaaaaaaaaggggcactgtctcgtggccctcaggcccgaaatgtgcccttgtctaaacaaactcttcgcccagcagcagcacaggttcgactgctcttttgacctcagacgctggagaaggcggagtgaaggaattcgaggtcgagtggaaaaagcccgtgaacgggcaacacgcaccttgcgacacgaagtttcccgagcaccgctgtggccccggcctcgagctgcggcacggaaatgagtaaccacagctcctgcccagggcacacccggcccggctcggcctcgctgcgtgaccttggacaaagctcgagcttctttggtcgcttcttcaaccgcacaagttgcggctgcctctgcgcccgtgagcgccgagaccgtgaatgcgcgcgaggcgtcgccgcaggccctggaccacacgcgcacgtgggccaccgtaccttccgagccaaacgccccccgcgctgcggtcctctcctcctgacacggcgcccgcccgctccacgcttcccaagccctgagctggcagcctggcagcagagcaggccccagcggggcggtccgcgtcccgcggcggggaaccgcgagcccggagatgcccagctccggggccgaggccgggaaggaggccccggggccgggaaaggcccccatcggagcgggaggtcgcgctgccacctccacccagggagaccaagtgccccttacctgagagacaacgccaaagcaggaagactgcgccgcgccaacctcacgcactgagccgccatgactgccactgcccgtcgcagtcgccgcgcacgcaccaagcgtgcgtgcaggcagctatacccacttttctgccctactacttcgcctcagccaatccgtaatcgcttttcctgttatggacaggcaatagtcaccaataattgtgggtcacggaagagcatctttccccaccccccggtgggcggggcctgaggcgtaccggaggccctgaagaggtgaaaggtgaagtgagcattgggaggagcctcctgtgggcgtggcgatgccgggaggagccaatgaggaggcagcgtgagggggcggggccagcgccggggtggggcgcgcgcgtcgcgggccgggagggacttcagagcctggttttgggtaggagtgaggcggcagcttgtcgtttcccggcccgcacccgcccttgcgctgacaccgcgggccttcctttgctctgggaacgagcgtggggagccctgttcaccctcacaccccggctccagagcggcgcggagcactccatgtttgctaaatgaaaatgaagtctcggcgcgagcgccacccaaacggcggcgtagttgcttgagaaccgcggaggcaaccgcttgggagggcgccccgaccccgaagctgcttctccaggcgcccgaggcggagagaaggcactggggtctccgtctccaccagtgatttctggtgaaacaggaaacaaaacccgggaaacaaatgggacgaaatgttggcggttttgatgctggatgatgggaatatgggcgtgtgttttgtacctttctgttatcttcagttttctcaaaacacgaaaaacagactaagaacagcgcatagaaaacattggggcacaactaaagctcataaatgcacacgttttcataacctgaccgaggtccatgctgctgtagcgcatacccccaagaacagagggccgcgtgttcttatggccccggtgccggcccccaagcggggttcccgcaggagatagggcctggctcccgcttcagcaccgcgtggcctggagtgcagttctggcggccaagatctgagggctgtagcccgtgccctcaccaggatcccagacttagagtccctgccctccccgggatcccagggctcgatcctgtgccctccccgggatcccagggctggagcccatgccctccccaggatcccagggcgcgagctggtggcttctcaagcggagttttgcctgcttgttacattagtgaatgtaggaccacttgagtaaaggaccaaacctttattcttttgcttttctgccattgaaaccattcaacccatgctgattaatacctactgtttgccaggtaatatgccccttgcagaaagacgcaa

SEQ ID NO: 42144 - DNA, 1423 bp, Homo sapiens
cctgtccagggccgcagaggcaggggcgctgtgatccaggggcgtctctgcagcggcggcgagacggtcgtgacagtccaacctgtcaatctcccagatgggggcagtgaggcccagagagaggagaggactaaaccgtcagcgggactgtgagttcccggaggcagggctgagtcttttatttttcttttcatgtctgtatccccagcacccagcaaatggcggggcacttacgaggtcttcggaagctgcctggctgcctcgggtgcagtgttttgtgatagaatcaagagttggaacctggacctctgcttcttggcccgctttccactgcgccgggctccgagttaatggcggagagggcagggaggtcctgggccccgcccaccaggcttccaatcaccagtgccccggccccgccctgccccgcccttgccccgaaccccgcccttccttggctccgccccttccccgccctcgtcgcggagccaggttctaccccgggacatctcgctggactcagcctcccacaggattcaggagtgcggggatgctctttgtgctgagaactcgctggtcaggctggtcaggctggtcaggctgcttggcctcttactccatctgtagagtgggctcaggcctgatggtgatcgtgtcttgttttgtcacgctgggattcgtgtctctggtgacattttcctgctgtgtgtagcacttggccacgcagatgactggacagctgccaggagcactggccgtgtgcaccaaactcagcttgaggaagtcctcgggagcaaagtgcaagtggaaaacgctgtgagggaaaagctgtgggcggggagtcaggggcccagggcacgggtccagtcctgtccctgactggctagtccacaaaagcctgtcccccggcgtcagttttctgtgcctggattacatggcagttgagtcctaaacactgagggacagacgctgcctctagttcccgcatctggctcagtccttacagaggagctgtctggaggactggcggggctctcggcttctgttctcccaagctcctccaccctgcctgtgggctctgccaggagcaagcgcctgacgaccctctcctgatgttcgcttccactggggaggtccccctcctcctactcagaggcagagtttgtagatgaggtgggtcgacaggggcctaccatcttccctctgccccacgatgacagacacctgcccaggctgtggaggcccatggtcagtttgtccagcgctggagctcatgttaggcatctcactggcctgcagacagaagccatgttctccaaaatccctttccttagcaataagggggtatcttggtttcccatttgccaagtcctgtgtgtggtttctcccctgagttggaacacagcagaggtgctgttggctg

SEQ ID NO: 42145 - DNA, 620 bp, Homo sapiens
aacgcagaaacagctaaaaggcaaggaggctcagctggggtggctgggccagccctggcctgcctccactcactagctgtgcgttcttggcaagtcacgggagcaattgcaaccttgctggtgtcacacttatggtagagaggagaacggcgccacctcactgccttcgtgaaggttgagcgatctcatcgcctggcttggtgagggtgagtactcaggcagtgctgctgggtccacagctgtggtttcaaagtgagggagatattttgctgagccgacttgagtcatgactagtgttttgcaaaggtcaaaggattcctgtcatgattccaagagcagtttccacggcaaataagccgggcgtgttgggcttcccagttttgtttgctgaagtcgcctaacgttacccatgccatatatttcaagtctatgctttccaggtttttgttttaaattgtggtaaacacctaacataaaatttaccatcttaaccatttgtaagcatatagttcagtgaaattaaatacattcacgatgttatgcagtgatcagcaccatttgtctctagaattctctccatcttcccaaactgaaatatgtccctattaaataacaactcc

SEQ ID NO: 42146 - DNA, 1695 bp, Homo sapiens
gtgacagaatgagactccatctcaaaacaaaaacaaaaacaaaaacaaaaaacaaaaaaacaaaaacaccatgcgaggtaggactcggctggagggatgagatggggacagatggaccccatgggaatgatgcatccctctgcagtcctgtcccctctgccctgccccagtgtccgcgtcttccccaggcctcctctctggtctcctccagcccactaagggtatggactccaggggctcaggggctttggtctgtttcattccctgttgctccccaagcgcctggtgcttagtagatgctcagtaaacatccgaggacttctgaaaggaggagctagcaggaggtcatggatcctgaagctcagaggcctagctttcctgctggggaatctggggagagtcgagtccctctgtcctcgcaaagctggtaagtgaggatctgggctccctggcccactgccggctccacgagtaacctgggaagctctttaacgcactaattaatctccaccccgtggggtggggattatggcacatatctgcagagaaaagagctggctgccagagagacagacagatttgtttcttgcctgagaggagtcctgggcagaggggaagcagtctagcagctgctgactcatggtcgtggctgtgcagccaggtcctggtgacacccacgcctccatggtggggccactgggtcagccaggagccagggtactccgtggtgagaaaacacccattcccaaattgaattagggcatttaaatagcatccttgatgatcccagcctcatctcacccagtaaaacaaaacaaaacaagacaaaacaagaaacccatgagatgggtttgctcagctttcaacaaagacaaatgactctggggtaggttgaaccatgggagggctttcccaggggagagcaggattcgagaaacctgggctttctgacggaaatgactttgcagcatcacccacctgctcgctcactcatccatctatctacaaaccagccccgcacctagcatcacccactgctaacgtgctcatccatccatgtacacgccagccctgtgctgagccttctctctgggccagcttcagaggaatcaccagtttctgagttctcagggggccttctaatggagggagccccgaaaatggcctttgtccacatgtggggcctcgcttttcattctttgtctgtgaatgtcttttcttccaatccacatccacatgtccctttgaggagggctggaaaggtgcagtgctgagctgtgtctgggaaggcttgctgctggcccctccgagcccctcccgcccacacagcctgggccgggagccgacgtgagtcaccgggctgctctctgcgttcacccagcgcctggccagggcccagctgctgggctggagtgtggcggccaccgtggccagacaattcaggctcctggaggcgggcaggttcagtgggctgccccgagctctgagctggggccggctccccagtcctccaggcctgggttccctcatctgcactggggctggcaggatccctccttatggcacatataagtaaaggtacagggagcagggcagatgtctagcgatgcaggagcgagcttcttcagtcccagggaagactgcactgttgtcccctaatcagaatgtgccttctttctctagggggattttatg

SEQ ID NO: 42147 - DNA, 646 bp, Homo sapiens
agttcctgaagtgcaggtgctgatctttgaattttgagatcacttccaatctgtttttttttttttaatcttttcactcacctccctgctgtggggtcgggtttttggcatgatcagagaagggacgaagaccaggcagaacctaccgaccaaccatgagtttttgttgacatcatggattgctgacatctacagggctttggcccaaatttgtgtttgccccagagagcattttgggaggtgttcttggagcgactcacgtatttagcagtgagctatggctctgggccagatcctctgccgggggaaggggtgaagtccatggttgggaccgagcatggtccatgtcctggtgaggttacagccctctgggacgggagcagatggtgacttgggggccccagggcaagagcccatgtcggggaggctatgaaggatgcatgtgtgatgggggcctctgactggggtggcatcagggagggtctctcagaggaggtggcattccccagagaaggacgtcatcagccttgtgtggggccaggtgggtggggacgtttgtggataatgtgaaggctgggcccccggtcatctttggcgcccacccactcacttcctctgtgtgctgagggctgggctttctaccctt

SEQ ID NO: 42148 - DNA, 1811 bp, Homo sapiens
aggcatcacagtgctcagtgatgtctgtggggtggatgagtggatggatgagtggacactgagctgcagacaaaggaacattatttttaaagcacatgtaaccaactcgcctggctcgtggcctctgggtccatcctgcctgctggttccaggggccagagcctgcagcaggaggctcgcaggctacatgcttttacttaggatgaaggttttaaagccacctggaagcaaaatttggcaaaacttccaccactctcaaaccagcaaatatttactgagcatctatgagtggaaggcagttccccagggtggggcagagtggtgcggccgccacaccctccacaaaaatgcccacagctggggccttcggctctccttgactcgttatgtagctgtgtgtgggggtgtgtgacaacacgcacacacaaagaggaaaagtctccaactgttaaatacagcgtgaggatgaagccacgtgggaagcctgtggggtgaagctccgacctgtgggagccgtggggacctgagctgggctcataggggcaaggttcttgaagggattgtgtatttttagggtggcgagggtcgagagtccaggagaggggacagctgtgctggccggggtcacagtgcacggtcccaggctgcctttcccactgtgcagctgggtgatgctggacaggccattgcacctctgtggccgggcttccccaggtatgctggcggggggtgctcttcatgcatgtgcgtgaatggccagggtgggcagagctgccggatgggttgggggtcaggaggggccctcctgaagccaaagtttatctttggaggtttccgagtgggcggacttggcccgagtagaaggtcagattgagcaattagagaaatccccaacgagtagatcctgcattcctcactgcacttggccggctcacctcccatccaggcagttgtcacctcctatttgtgctgcgtaaatggattctaatcgccttcttctcctcgatcacttcaagaatggcctcggtagccataaaggaaattagtttcaggtggaagccttatttttaccgtggcagagaccaaactgttaattacctggaaattgcatgaggatttttgcctgaaaagtttttttcttgggtttaacttttcatagatattaattatagatattggctttagcccactgaaataattcctctctcaagagattaaaggcatttaaaaaatgattccttgagaagcctactgcatattctttgtctctatttatgctcagtgtatgggatggaaacaggacattggggatgtgagcacgattagatgccttttctgcatttaactaaagattgattccagactacatgtgtgttttcagatctctgaagccagtgggaatttgagggcaaagggcaagaaggcaacccttcaatatcataacgatgaatcccgataggaatgtcaggacttgcctctatgatgcccgtactatgccaccttagttcatgtccgggaaatgctgtgctgtggctttcccagcacactcaagataaaacccaaactctttctctggccctttctcattccacagatcttactgcactgcccgcaggcactctgccctgaaacacagtgctcccgtgcactcggccatgctgtgttcttgtagcttctggaatatgctaggcccttcctacctcagagcccatgcctgggtgactccctctgcttggcatgcacagctggctcctactcattttggggaccactatgtctttcttctctgcaccacctatgcctcctgcttg

SEQ ID NO: 42149 - DNA, 938 bp, Homo sapiens
ctgaggtccagtgagtacagtggccagctcaaggtcacacagcttgtcaccatacttcctccacgggagcctgacatgggcctcgggcacgcacggctgtcttggagtaatatcattaaccatggaggtgcccagtgggagactgggtcaggggcggatgaggccttccctagggctggccacctgctggggctgggcagggcactggagcaggtctgcgagctctgctgggtggccttgggcaagctggtaccttctcagagctgtagccttggccctgggccctcccagcgcctggcacgagggctcagcgggcagccggatggaggaggaggagcagcttcctcagcacattgaggaggcctggacaccgtccatcctgctgacttcccaggctgtggggcagatgctgccgctcggaacccacccgtgccctgcagacgtaagcctttgctattgattgcttttctctccagcagcattcacggaccagtttctgctgcatgcaaggtgggggtggggctcagtctgtttcatcatcttgaccataggtcagagtggggaatgattttcacatctgccctgcagctctctgcctaacacaggctggagtagccctggcaaagaaacactgacctcagggccaggagacctcagttaagatcacccacggggctgcttggttgccgtgtcacctcgagcaagtgactccacttctctgggcctgtgtcctcactcatgggaggggtccaatggaggcccagaagtctcaagggtgctctcggctctcgcagcagggtttaggggctgggacctcaagtgggcgttagcagtacccgtgatggtgtctgggtgggcactgtggtgctcattcatttattcattcaagcattcattccacccgcatttaccggtactcactccatgctgggcattgg

SEQ ID NO: 42150 - DNA, 1501 bp, Homo sapiens
tggcccccaaggtcatcgaaggtcagaggtgcagccggtgatggtgggcccctgcctcctcatggggacgctgccgtgggattcccacaagagcacgtgtagcctgattccattttccaacactgtggtcacgcagcttccctgttaagcaagaagtgggatttaagggagctccctctgataggctgtgcttgccgtagccagaatttcatccctcttccctgcaaaaacacatattagaaaactgacaaatcactttcttatcccttgtgcagtagggactcttagaaagcccgaaagatcattgcctggtaaaaatagcttaaattccaaagtgatttctgcaatggggaatccccaggtccagggaggccctggttaggacaagtgtagttccagatgctgctgcctgttttttaacaacccctgctttctggtgccgagaaacaccaccccaacactgcaaatccactcatccccaggctcttacaactgggcttctccaggcatttatcacatgaacagtgccacatctacatggggacacagggcttcagcattgccctctaaatctcattcatcctggacacccaagagtcttaatactgggcctgtctccatttcctcactgctgccagcccacactaccttcgctactgtctcctctcaccaagctgactccagcagcctccccacggtcaccctggtcttccctagcccacttccctccacttccagagcccagctctgcctgggccactgccatccccggtcgcatacttggagccttttgccagccttctgatgtcggttactgcaaaatccaggctgcctgtgctgtgcctgctcacctctgcaaattcatctccatgcctgcaggcctgtgcccgctgactaaccagccatcagaggtgggtcctttccagactggggccttggcccatgctccgacacatctggccccaccttccccaccccattctttgtggccaattcctgtttaccctgcagcttttggttcagatcctgcctccttccacccacctccctcccaaccccagatcagctcaggaccccagtcacgggatctctgctcttccctgcatgcacagaccagtttgccgtgagacctgcatgtgcctgtctggggctctgcatctgtcttccttaccccacagatgcaccccagggcaggaactctgtctcttgcctttctgtccaccggcacctggcaccctgcctggaacatcaatttgaacaaacaaacgcatgcacaaacaaactgattaaagagcaatcattaatgaaacccaatctcaacatgccacggcccacatgtctgaaatgttcactgcaggccaacatctgtggattctgctttgggcagtgagctttcttcctgatttctttcatcatgagcaatgtaggatcacactcctttgtgccaagaatagtaattatattttctgaaagcaaggaggagaacattcctccagatact

SEQ ID NO: 42151 - DNA, 1684 bp, Homo sapiens
ctctggcatttgattattgtgagatctaaattacataaggataagaaaaggctttgaagatgattgtgtgctttatagactgcaaaatgtcctagccacgcaaggattcgttctctttatcacacttttaagtagatagagatgaataaccaactatggagactgagaattggattaactgctctggactagattctgttatcatagtgatcatcactgattcatccaatgagtttttacccagggcttttccatctccagtgcctttaaaaaggatcattcctatgtatgagtcatttgaagcacgttgctttgcaaatgcccagggaaaagtacacaggcaatccccaaggcctctgaaaggggcagtggtttgagctgagacttggcctgccccgatgtgatgccttccttggggaggaaatggaagtgggggcacggtgccccatgccgacgtgaagagtagccctgcacccacgttccaaatgacctatacccaccagcacatttcatgctctgacacctgcttcgcagatgaagaaaatgaggctcagagaggcagagcgacctactcacagacaccaagaagacaagacatggactaacagttcagccagatgcagttcacagtgaagcctctgaggtttcctacaacactagagccggaggaggtgttgagtgaggaggggtcctggagctctgtcactgcccactgtgcccccagggctgctttggggtcctgtaatcagtcacctcttcttcaagtggccaaggtgtccagaaacacttatatgggagaggaatgcataactgactccatttgagaaacagattctcttagaccaggctctcttgactttggcactgttaatatttggggctgagggattctgtgttgtgggacagagctgtcctatgcatcgtagggtggccttggccttggcccactagatgccaatagtacccctctatcagttgtgacaaccaaaaatgtacccagacattgccaagtgtcccttgggggcaaaacctactggggtggaaaactaccactttgggctgaggaagacccagatgatcctgccccaggcaattggggccccactctcctgtaacaggggaagaacctggcttgggtcataactacaggtgagatgccagctccctctgtgctggtgcggtgaccttgagcatctgacagtgctgcctggtcagttcattcccacgcacatgagctgacgtgagtgatgtgccaagcctatgaccggcacagggacacccacgccctgcaccgctatcctgtgcctgcatggtgggtctgcaagttcacctggtgcctaccccagggggcttttggtctggcccaggaggccaactcatacaccccctcaggttcagctttcccaagggggctgtccctggccccgcctcaccctagggcctctagtccacgggcctctggctttaccccaaagccggcccatagagctgtggctcaccttcccaggcccccacatggctaacctccgaggaccttttctgtcctcctgtgccctgccctgtctgcccttggtttttgccctgcccgatgtccctcctgcccctatctgggcctcagcattcctggtcttctctgtgttttgagccactactcgcttcctctgcatcatttgctcttgttggg

SEQ ID NO: 42152 - DNA, 1241 bp, Homo sapiens
gcacctgcccactgtgccatctggggcaagtcctcatccctctccatgcctcaatttcctcacctgtgaaatgggatgacaatagtttccccctccgggtggttgtacaagatgaacaaacggctctccacaagggcatagcccagcacaggtgcccactgaccactcgcaaatacccattgctgtcatcattgtcacccattgggaggcatgacctgcattcatactgcagggccggagccaggcgctatggagttgagactttatttctcactattctggttggggagcagggaggggacctacccgaaccactgtcctttagatgtgtgccggtggccacccgctgaattaaaggcggggaggcttctgtggaggccctggcctgaattctggggataggcgacagtctgaacaaatgctcacatcctcgcaggttaggagcacaggaaaaatgccggctgccaagcccacggaaatggcttgtaattacctttattgatctgtttgttctgtctcactcattcctatccgaggtggctggggccaggaagcttctggcagactctcgggatttgacagtctttattaactcagctcctaaaaagagcctcagagaatacactgtattatggggtgggatggagggcgagggatgaatggattttcacctggaaggtcatttctgaggaatccctctactggaggcaggtggtggtagaaagaaagaagacagaccccgctgtcaggtagacaggggctgtgctttgtctctcaatggcttgggcaggtgacagtggccatctctaaggtggaggtgacagtgctgctcccgggaaccatgtggaagagcataggagaagtgctcgtagggtgtctgagactgtgccagcccaagatgcgcccccagcaaaccacaggctcttccacccctggcccctgcactgacatctttgaaggacagtaaagaaatagggacggctctgggtacatggggctcagatgtcaggaccactcagcacctgaaaccctcacactgttgtcttcttacccatcctcaagcctgctggagaggggaggggagctttgcccgacattccattcttctttggatattgattcttgtaaggctgggtaatgaggtctccattagcatgttgataatctctgagagttagacacttgtttccctatcgacagaggttcctgtgggtgcaaatgtagccttgggaggtagggaa

SEQ ID NO: 42153 - DNA, 1862 bp, Homo sapiens
acagctcagctggttagctctgtgctgcaggttccagattgcacagatggagtttattccctctctgggcataatcagagaatcatgcttgtttatctcatgtgcacgtactgttctagaattcaaagtggtctagtcattcttttaactgctgtgaattccgagggccttgttgcttttgactatcgctaagcaatgtaagtgagaacaattgggctaaaatttaaacaacctaattccaggaaaatggtacttgttagaaattactttatgaaacataagatgtcaggttaatttatgtgagaacaccttcctcctttgctttccacattgggtatttttgcattcccgcaaaagaagcctgccagggaaattgcacagttgttagcttcagcccaggaagacatttctaatggggatggagggacaggtgtctcccggcttcactgagagaggttggcttgtgggccatgaggctgcaggcccagctttaaatcgctgcttttctactgtcacacacacacttgaggccatttgtccctctatgaagtggacattcatattctctctacttctccagccacgctgcccctgtggccccctctaggacaaggtccttccttgcctctcctggttctggtggctggctgactgtccctgcccttcctctccggagagctctctgccttcattgtcacatggtgtcagccccgtgtgtgtctctgtgtccaaatttcccctttctgtaaggacactagtcatgttggattggggcccactccgatgaccttgtttactcagttactgctataaagactgcaaatagggtcatgttctgagggagtggaggttacaactcagcatgtgagtctgggcacattgctcccagtgtactgggtggtggcatgcctgcttcacatggaaggaaggcagctatgggagcgatgaggagctgggcccgagctcaccagccgggaggtggctgctgtgctgggatttgaacccagcatccatcccagttttcatgctgtgcttgtttccacggcagccacagcacaaaagctctacagaagacaggccccatgccacagtcgctgttacaatgagtattacaaacattttattcgagaaagaaaagaagcaaatggtcccaataattccctgatttctaggcagctgtctggcttttttttgtcattgcttgccttagttacctgtatcaacaggcttactttttctgacctcaccacaggagctgaactttggaagtggccactggccactctgaatgagatgcggtgcaccggcaggctttggaaattaatttcctttggatgctcctcctcatgttacgattgaggcccgtgtgttagctacctcgagccaaaggtgctcagagggagggggagcaagggcttcctggcatttctggattctgtggagactccactcgctcaggctgcgtttgtttcctctgaccgaggatcgataagacatgattttaaaaataaatgactagtccctgaagaagtactgtttccaaacaacttccccggctgaccctgagacagaaactcccaccctgctcctgggctcagaagtgagaggattattctgctcttggaataaaagctgtgggttccatcctgaccagaagatgatgaggataatgcagatggtgatattgtgctgatagtagtatggtgattagaattatgaagatgaagatgatgataaaggagatcatagtgattaggatgatatgatgatgctataataatgatgatgaaaatgattaggaaaatatgattagcataatgatgataaagatgatgattatgataaagaagatgatggtgacg

SEQ ID NO: 42154 - DNA, 754 bp, Homo sapiens
gtccaaggccacatctcagtgggactctgtatcctgggacctctacagccctcagggtcacccagacatgaccatcacgggagtgactttctcctgaaacaccaggctagccgccggagtgtgtgctgaacatccagcgagctgtgtgcattcagccacaggggaagcgccgggtggaagaatgctttctgctcattgtgactcacacaagcttggatgagacactctgggaagattctaatttcagatccgggggtggaggctgcagtgtttgttcgcctccgctgtttgcctctctcagcatcaaagccaagttgtctgtaccctgagctgggtgcatctgtctggccaggagtagactgggcaattgggttttaaatagaaagtcaaatccaaatgacaccaatccttagggctaaacttggtaaagggcagaataaaagcatcctccccaggacagagatttgtgaatggaaaccagagttctgcagaggcgagtgtgatccagagctctagcgaggcgagaagtggtttctggatgctgtttgttttccttttctttttttttttttttttttaacttggagagttgagagttaggatatgatgagcttagctgccaggcagactgggacattggcaccaccttttggaggagatgggttggagccctgccagaggaagatgacgtggaccagggaagggaacttggcagcgtcccgcgggccggggaagagtcaccgctggctcctgc

SEQ ID NO: 42155 - DNA, 528 bp, Homo sapiens
ttcttctcccctcgccaagagcggtggcttgttcttccccagatcagcatctcctcctctgggagctgtgtccatggggttcagcagggaactgaggctttgtcccccggtgagtgggggagcggggggccagcctggtgaggagcattgggctgcatctgcagggaggggcccacctgggttctgaggctgtggagggagagggcctgggggctggggagggcccagtaggaaaggactttgttccttttctgcagccgtgggaacaaatggccacaggctctagcttaagcaacagaaacttattctgtcacaattctggaggcccacagtccaaaaccagcgaagatcaaagtgtcagtggagctgcacttccccctgggctctagggaggagtccaaccctgcctctctcagctgctggcagctgccagtatctcctggctgtggccacatctctgcaccttcaggcttcaaatctcctctgccccatctccatgctgcctactgcataagtgtgtgtgtgtat

SEQ ID NO: 42156 - DNA, 1116 bp, Homo sapiens
ccgaggtggagtggggaagtggggtggcctgagatggaatggggtgccggcccctgagggctctgcttacggtggggcaggtggggtggcgggcacctctgggattgtggttgcaggacctggtggatggtgggaaggagggaggccatttactgagaccgcagaggaggaggaggaggaggaggaggaagacacggaggctggaggagcagggctggttgagaaaggagccagcttctgctgggccctgctaagttgggggtggtgcagggaggaagtgaccgtggagagggtgtcaaggagtcaggggtcatcagggcagaaatggggactgagtcacttcctggcaggagaggatcctggaagggggatgtgtggcatgagcctcagagtaggcctgatgtcacccccaggcagcagcgaccttgggactcagcccccgccttcctctgcctgggagtatttatagagggccttctaggtttcaggagctggggcaactgctgggaacaaaacagaccaacccctgccctcgtggggcctcctttctagatgaggatgggggcgcagagcagatgacgagggatgggttagaagctgctgggtctactgagggcgggcggggagtgagggggctgccaagcggcttggcctctgcatggttggagagctcagaatgtgagcttggacctgccatggtggaggaagagaggctagaaaccagggacaggcaccagggcggccccggggagcaatgggagtggactgagtgccgtggtagaggaagagaggctagaaaccagggacaggtgccagggcaggcctagggagcaatgggagtggactgagtgacacaggatgtcctggatctgaggagctagaggccagagaaccagagttctgagcgtagcatgaggggacacgcctggggatccctcccccgagcccagctggcactggcaccaggacatgagggtgtggcggacgaaggcactgcagccccgtcctctctggcacctgggccctgagcacagactctgacttcacagacagggctctaaccctggctttgcaatagcaggggcagggcctctgagccagcggccttagcaaagg

SEQ ID NO: 42157 - DNA, 555 bp, Homo sapiens
ctcaaaaaaaaaaaaaaaattgtgcatgaaagagaccacagaggatgaggcaaaactgtgtcaccatcaaataagactgatgaaatgtctctaagaagagcagaggagtgaggaacagagaaagtaaaagatacataaaagactgcataagctcagcagtgaaaaccaggcattcctggggaataagtcaacacaaactgagctgaaaattacctgcttgcagatcaaagaggcttacacggtaataggcgaaagtccatcctataaacattctggcatttgaaagataaagattaaaaaatctacaggcttctcagcagaataaacagaatgcttacgagggaatagaaggtagggctgagggtcctccacggttctgaattgccagaagacaactgtagagggatatggagaggaaaagtctgtggctcagtttcagtctctgttactcacttgtaaagcaaacagaaggatttgtaggtatttgaaaatgtgtgattcatgcacctttcaagaaagaaaaaaaatcctcaaagatatccccttatccatcaa

SEQ ID NO: 42158 - DNA, 809 bp, Homo sapiens
tttctcatgatttacttgtctgacgttgcatttactgtgccttggataggtctggtatgcttaggtgatgtttttaaaaaacatgtcggatgaatacatggataatcacagtgaccaggtactgagcataaatgatgggctaggcactgagctcagtgtttcatgtattttatcctcagtttttatgaaaacaaaggaattgaagtattgagccatttcctagatggaggagcctgacatccagaggtgaagcaatttgcttaaaggaatgcatggcattcaacaagtatttactgagctggtatcgtctgccaagctctgcacggtgctgtggacacaggcagtgagccaatgagcccctgttcttacgccagtcatgtagaaggcggaaaagtgaagcggggacagcagtgttagaggccctgaactggcaacaaaggaggcacttttggtttttctcaatgcagaatgtgatacggttagtctaacgtttcaaaacttccatctggtggcctggggagggggaagcagagtagaatgaggtgagccagtcaaaaggtgccacagtcccagccacaggcggaaatagggatggggaagagagaaaaaggtggaaacgcatttcctggtaacaacggcttaattcatacggtgacaataattccaggacttgtaagcccaggagaagggcaaataagagataaattttggtcaggggcctttgcgcatgtctcagatcatattatctacgcggctgtgtgctgagctgacctgcccaatgctaaatgcgtcagtcaacgtcactcaat

SEQ ID NO: 42159 - DNA, 1087 bp, Homo sapiens
ccaaaagggcataggcaggggggcaaactcctctttctgtccagcgaaccagctctcacgacccagacagcagagtcctcatcattccgtgatctctgggaatcttttttcttctcctgaggcagggtctcgctctgtcaaccaggctggagtgcagtggcgcagtctcagctcactgcagcctcaacctcccgggatcaagccatcctcccacctcagcctcccgagtagctgggaccacaagtgtgtgccaccacacccagctaatttttgtattttttgtagacacgggatgtcgctatcttgctcaggctggtctcacactcctgggctcaagtgatcctcccatgtcagcctcccaaagtgctgggattacaggcatgagccaccgtgcctggctggggatttgcttgactgtttatttccgatctgtgcccacggatctatatttagttccacccttctctaagggcccagtgaactttggacctctgagcatgtattcctggtttggccaaagaccagcagctgtgctcgccttgttctcttgctttcctcatttgctctggaggtaaatccaccttgagaatgggcaggggacccccttgtgtactcacacaggggaaaacttggggtccacccatggcaggggttctcatcggaggcccgctccatccgccaagatgatttcagaaagctccccgtctgctgtttgtatcatccaaacggctggcttggggtttccaaatgtcctaaggatgttctaataatattcagttttctaagcctacacacgcacacatgaactccagaggtcccggctcacccagagcgggtcacaggacacacagttccagcttccctttcacacctttccttctgaccatggcaacgagcagagcaatacagagaggggcacagggctgtgtgcaggcacagcagggagatgaacctgtgtacaatcagggagggcttctgggaggaggtgacataaactagaagctcagaggatggacaggcaccttctgggacaggagcaagcacacatcacagtgctcagctcaccttcattgcggcacagccctga

SEQ ID NO: 42160 - DNA, 1863 bp, Homo sapiens
cccagcagagcctcagcggggaagcagcccctggtgctcggccagaaattcctggtaaaatcccaatttccagcaaaatactctttctaagttgtcaacctcctaggaggctgtgggtcacattttaaggaagaagagagagagacagtttctaagtcccttccagaatccgcatccaccccctatggcagtgatgacactgccccttatgccccagggccgccgctgggggacttgttctatttgaaaggcaaggcgtggaggagaatcacaaatacgcagacagcacataaaatgactcccgcgctgagctgcgagaaggcttgtgaaagcctcgcaggaagctgacccacatttaatgcagattatggagggagggagggagggcgccattcagctgagcacagggtctggaaggacacagcctgagctccagtgccagcccagcgggtgacgcggggcaggcttctccatgtcactttgcctctatgtccccgcctgtaaaatggggagtcacagctccccaccccaccacctggtgtgaagaggactcacagaggtgacgcggcccacactcagccagtgttatgacccccgctatgctgctgttctctaccagccaccgggcacccttttatcaagaagcgtgagctctttggaaagcataaaaatgcaccatccgcaaaagggatgttttttatcaggcgcagaactctttgttccctattggcctgagaatttgaaagaacccgtggggagacacgctctggggaggcggcagcactgagtgggtgttctgagaggcaggcatgccagtgggaagcccacctcccatctttaccagccgtgtgacctggggcgggtcgtgcctcctgtcttatccaagcaccctcatctgccaactgggagcagtgacatcaccccacagggctttgtggtgtcggagatcaatctacagcctcgctcctgtgcccagtgttgctaggtgctctgtaaatggcaggtattgattttttttttttttccagacagagtctcgctctgtcgcccaggctggagtgcagtggcatgatctcagctcactgcaatcttcgcctcccagattcaagcaattctcctgcttcagcctcctgagtagctgggattacaggcacacaccaccacgcccagctaatttttgtatttttagtagaggcggggtttctccatgttggccaggctgatcttgaactcctgacctcaggtgatctgcccacctcggcttcccaaagtgctgggattacaggcatgagctaccgcgcccggccaggtattgattttcattagacaaatcaatcactccctttggatcccactctggtgagcgccgggggttcctgaggttgccagcacacccaggatatatttagctctctgctggagccctgctgggtgctagcattccagctgaggacatgaaatctcaggccagctcctaatttctcattggcaaccatggattttgctccagagcagaactccctctcttttataaccgtagactaaattatccccagactacacactcatacacacacacacacacacacacacacacacacacacacacacacgagatccctgtgcttgtaacatgtcaataccgctcacagccctagctcaacagtgaaagtccacctctcaaaatagagtatctcagagcaagaggacctggccagccgccggggaggctgacagctgcttcctaatggagtgtccttgagaactagaattgagcaaacccgccactagcatgtccttaaaatggatcagcagtgaaaacatagaacagcaaagcattaggaacaaaggaaaattgcccat

SEQ ID NO: 42161 - DNA, 1179 bp, Homo sapiens
cggcgcccccagctgcaaagccccgcctatcatctcacctctgcgtgcctaggtctgctggggccccggcccttcgcccggaccccaggcccccgcgcggaccctgaccgctttctgcagcctggaacaacccggacccccgtgagaagcaaagaaggggcgccttccagacatcctggcgcagccacgccggccggcgcgctgggaaaggatccccggcccgcgccactgagctacgcgctccgggcgcagggcagagggctgcgctctggcccctcggggctgcaaaatcctggagcaaaagttgggtggagccgctgggtgattttccccggcgttgcaggtgcagcctccgaatgccacccagcccttgcggcgccgcgagccagcgcggggacccgttggtccctcggtccccagcacccacctgcactcatctcagcagccgctcggagtcggggcggcccggcgctgcgacagccagaccctcgggcccgcaggtgccgcgcccgcgctatcctccgcccgcccgccggctccgcgcccgctccttgcgcacacgccaggcagcgccgccgcagccccacggcgcgcaggccacgcccgtgccacgcccactctcacgcccctcctggcggccccgccccgcgcccccgctgccgcccgggagcaccctgggaagtgtaggcacctcgacgccaccgctccgcctggctccccagctgcggggcgatcggactacaagtcccagcacgcttcgcggccagcgcaggcgcagacgggcgacggcggctgaggcctttcgcaatcgttcttagatctctgcagagctgtcgccacggcctgaggggcgacgtggggactgccgctcacggaatccgggagtcgctaggagagcggcgcagggaaaagcgagcttggtgcagctcttcttgagtagtcgagctacaaggcgcctgaagaccttctgggccaactcttctttaccagtttacagagagggaaactgaggcgggggcggtgctcgggcaggattagcccgcatccgtcggcgaggcttgcactggtggggattcgtgcgcaggtttcctgcctccgggcttgggctgtccgcgcctcgccacccaccccaggctcccgtcgctcctcgccggctggcgcccagctggggggtgcacc

SEQ ID NO: 42162 - DNA, 1826 bp, Homo sapiens
atgcatatgtatgtgtgtctgcatgcacatgcgtgtgtgtgtgcatgcatgtatgtgtgcaggcatgcgtgtgtgtgtgtgtgcagtaaatggaagaggaacagagatcagagctgaggctggcagggctgaggcagccggtggctggtggacttccccaatcccagcctggcgggggactgggtgcccctagcctctactacagagcctgggggctgggcagcgggcaggcaggacagggcctggacctcgtccaggaaagagctaatgatcaaccggctgcggtgtctgtgcagccgccctgggcctgcctctccgtcaccggccctcaggcgcagggaggaagtagggcaggaagcagggggcggaggccgctgtgcagtcagcctggctgtgggcggcccctgcctgctccgtccagctggagacagccccgtggggccagccagcgctgggccaggagcggccacctggttcctgcgtgctacggccctgtgggcctgggagctgcctctgaggaacacgccgcaggtatggggggctccggggcaggcggggcgtggactggccgagcaggctgctgtctgccagtcttgccatggttggatctttacactttcttgaggacttttctgacctgtttgggatgggggtggagcgaaactgcgagctgggggcctcggggaggtcgtcggcaccctcagcagaccccactcagagctcacaggtgctggcagtgccaatccgcagtgattgagggcaatgatttcagctttgaccaagcacccttgcttctgggacctggcctgaccccgtgctggcccttggcatgagcggccctgggggtctgggagcagagccagcctgtcgctggattccaagtccagcggatctcaggtgtgaccccagcgcccggttagcttgggccacactaccagacctaccagggcgagcccagcgcctcagcctcacccggcaccgcagtggctataactggccactctgatgccgccacctgggcctcttttccaacaaccaaatggaccagcaactggaccaggggcttcagcctgaaaattccagggagggtctgggcccagccttcaactgcaggtgtgccggggcgtgtgctcctgtgtgtgtacaccactgagaccccctctgggcctgtgcgtgatccccaggagccctgggagccctgccctgtctgtgaagcgggagtttccaaccttttgccgttgacgaggctcagatgagatgaatagcaaagtgacgctggggggtgttagcggtgtcggccagtgccagggccaggggcagcctgcatgtgggccggccactcagggtgtggcctcccagcgccaggcagcggggctgcggctgagcttgtggctggaggcaaggctgggcccgagtcaggtctgggtttaggatgggtatgtgggggctgggctctgaccacctgggttcaaccccacctgtgctgcttggctgtgtgaccttgggcaggcagagtcaccgcagctgatggctcatccgtgaaaggggcacagctgtgcctccctcctccaggtgagccgaggatgctgtgagcaccctggatggccataattatgtgactgtcaacactgttgttgacagtgatgacaactgtgtcccgtgtggggcgctgggccagcgttttttgcatggagacgtcactcactcttccagcaacacgggtgacgatggccgcacaacacagaagagcaaggcagggcccagcagcgcacgggtgcgccggtttcccctgctgccagagcgcaggacacagccctctcggtcgt

SEQ ID NO: 42163 - DNA, 469 bp, Homo sapiens
aggcctcactagcaagataacaacactggtgtgcgcacctggtgctcagggagaaatgccgggtaggcggagtcgtagacggatgtgggtctttgttgcaggaatgatttaggctgtgcttctagttgccttcacactctgccctctgtaatttcactcaaccagaacttgagggaagctgccgtccagtggcctcagtgctgaccgggaaagctgttatttgaaagctgacccacgtgagctcttcctggcacattccctgttccatttggaggaattccaggctctaacggagcctccctggggatcttgcgacaccacccttgatttgagggctaagtgagttagggagtaagaattgtagccacaattccccaagcaccggtgagcagggctgaggctcatcccactgtggacgtgggcttcttgatccggttcttggaggaagtggctcatctgtggctgccca

SEQ ID NO: 42164 - DNA, 2017 bp, Homo sapiens
gggacgcctgaccacatctgcagcaccgaggcggagggggagctcctgcagctggcgctgcggcgggcggtgggtggccagagcctgcaggccgaggcccgggcctgcttcctgctggccaggcaccacgtgcacctcaagcagcccgaggaggccctgcccttcctagagcggctgctgcttttgcacagggactcgggagccccagaggccgcgtggctctcagactgctacctactcctggctgacatctacagccgcaagtgcctgccccacctggtgctgagctgtgtcaaggtggcctcattgcggacacggggctcgctggccggctcgctgaggagtgtgaacctggtgctccagaacgccccccagccccacagcctccctgcccaaacttcccactacctcaggcaagcgctggcctccctgaccccgggcacaggccaggcgctgcgcggccccctctacaccagcttggcccagctgtacagccaccatggctgccacggcccggccatcaccttcatgacgcaggcagtggaagccagtgctattgccggagtccgtgccatcgtggaccacctggtggccctggcctggctgcacgtgcttcatgggcagagcccggtggccctggacatcctgcagtctgtccgggatgcagtggtggccagcgaggaccaggagggcgtgattgccaacatggtggccgtggctctgaagaggacgggccggacgaggcaggcagctgagagctactaccgcgccctgcgggtggctcgggacctgggccagcaaaggaaccaggcagtggggctggccaacttcggggccctgtgcctgcatgcgggtgccagcaggctggcccagcactacctcctggaggccgtgcggctgttctcgaggctgccccttggggagtgtggccgggacttcacccacgtgctcctgcagctgggccatctctgcacccgccagggcccggcccagcagggcaagggctactacgagtgggcccttctggtcgccgtggagatgggccacgtggagagtgagtgccccagttccttctgtgtgccttccggggccactcgggtcagggcacacctggggtttgtgattcagacacaagcggtggtttttccaccatcgaaagtgctgagtcatggcaaacagcagatgttggcaagcgccctggagacaggcagttcccacgcagggccaggccctctctgccctactgggggagccagctcctcccggtttgcccagggaccatcctgccttgagcactgaaagtcctgcatgctgggaatccctgaagtctgggcaacgggcggtgggtcaccctagacataaccctggaagcgaggcaggctccgctgagctgggacttggggcccctccatgagccaggccctgaacgccggtgcttgtgcccatgttatctgcttgacatctcggcagccctgtgcacctgtcatcccacttcacagaggacgcaggggcgggtggttacccaaagccgcagaaaagtttatgcaaaagcagctcgttgtgcagagtgtgccacgtcccacccacaaatggggcttgtggggtccttgggtggcaggggctgagcatgggaaagtgagcttcaggccagagaagccacaaaagggtgagtggtgtgatggcggggcagctcttggccccgggttagggaagcctctttagtctggggccagagggttgagaagatttagtcaagtaatacgtggtgggtgaggggctggtggtgtagcctgtgtgaaggcccaggggtgagcgagtaggggtgagtgagtgggggtgtgatgggggtgagtgagcagggggtgagtgagtgggggtgtgatgggggtgagcagggggtgagtgagcgggggtgtgagcgggtgagcggggatgagtggggtgtaagtgggggtgagtgagcagggcctatgcagggaggtgcagagttgggcgtgggttggttgggtgctggatg

SEQ ID NO: 42165 - DNA, 1321 bp, Homo sapiens
aagaagggggattgtagtcaggggggccctcctggagaaggggacaccaaagctgagtcttggcagtcaagtgtcaagttgtatctaacaaagaaaacagggtagggagaaggacatttggggggatggcatcatcctcacattgaatccatgttgcaacatccaacccaaatcctggcgcctctgctaggaagcctgccagggtgccagcctgcactgagcaactccttcctggagtcccgagacaccttgaatcttcacatcacccaggcagggtggggcggggccggtgtcttaccacctgcttcacagacagggaaaccccagctcagggcaggtgcagtggggcggggccccagacagccaggctgaggccttgctggtcgggtctgtctggagaggaggtgctgggacctgtgctccctctgcgcccagccctgcaggggtggagaactgggaccggcagactcggatctgggatgtccccacccccttgcccagcaggcgcccgcccctactcagcatcacactggcactgcatcggtgctcgttgtgggctggggggccagggcgctccagtccagggactgagctcttgggggccttagaacaacatgaggagctgcggcaaccctaagaccccgccccgtatcccccgcggcaggcctggggctgccagggaggcccccgcccggtgctggggacacctggtggtcagaagcggtccctgtggcctcccaagtcccagccagacggggaagtgccaggtgtctggcccagagggacgctgctcactgctcaggggctggcctgggacccaggggacgggccttccagaggggactttatctctcttagtcatgcctgctgcccactccgcccacccaggaggaaggaaaggacgaagtagtccctgagaggccaaagtccatggctggggtcaaggggcacagccctctgggcctcatggtgactgtgctgtcagcgcaggccagcttcccacagggaggccccctcggaattcccccagggctgctgtctttccaaggccacaccctcctccttgtgtagaggtgccggatccagggcccagagaggtggcagagaaagccggtttggatggggcctggaaggctggcagagaggcaggggtaaatgggcatctttgccgattgcctctaaaatggggtcccctttagtctacatgtgagagtgagccctggaatagggtggattaggtgtgtcctggctcagcctgccacccactagctgctgcacgcactacaggcacatgcaaatgcacatgcacgctgcacgcaca

SEQ ID NO: 42166 - DNA, 1621 bp, Homo sapiens
tgcagtctctacctctgtcttcacttgaccttctttctctctgagtatctgtgtgcacatctctctctcgtttctcttatgaaaacatccatcattggagttagggcccactctaaaccaagaaggtctcttctcaagatcttcaactaatgacatctataaaggtcctatttccaaacaaggtcacattctgaggctctgggtgtacacgaatttgggggaacaccattctgcattcccaggacactcaagtggcagaaggtgcctcctcatagcacacagagccctggcctccctctccagccttgaactcatcctgctgtgtcggaatcacctgtggtgggaccgccccaccccatcctgcctcctcggctgtcagctccttgggagcaaggactgtgacctacttattcctccactctgccccaaaagcaggtccactgcagagcaggtgcctggaaatgctgaatgagtgcaagaaagaaggggctgggggagaggaagcaggggcaggatagaagggaggctggaagtacaaacttgagcttcgaggtttgaagaagggagaggtcactgcatcgggagcctaggaagaactcgagaatgctcaagtgaccatttcctcaaagcacacagtccctaaagctgtcattcctcctgtttcaccaactctgctaatctaggggtgacatttgaaaaaaattatcaatgtccagtatgccaatttatcttttgttttctgtctcttttatctgtctgtccatcccacctctgtccagtcttctgtctgtctgttccatgactcagcattgtctgttcattccatgactcagcattgtctgtccgttccgtgactcagcattgtctgtacgttccgtgactcagcattgtctgtccattccatgactcagcattgcctgtctgtccatttctccttctatccacccatccagcatcattccttcattcatccatccatccatccatccatccatcctcccgcccctcctcccacctgtctacccactctctctcctctcttcacgcttctaaccagctattgctaccacgtttctcttaagaagcacatctggtaggggacacagagtggccagtggtgggacagggcagtatgggggcccagaggtggctcctcttctggtctggtgctggagggagggaggggcagcttcataccaaagagctgggcaaaggctcaggggaggggccttgacggcagactctttccagcctggtggatgagctgaaggccagcaacccggacttcccagaggtcagcagtggaatttatgtgcaagaggttgcgccgaattcaccttctcagaggtaggctctgccagaggagatcgctcgaggcatggggcaggcgtgaggtctgggctggggctgccccactgacctcatgtgaccttgagcttcccagcaaagtgaccgggaaggggcaggtggattctagcgtgtctgctaagccagaggaggctggagagctgaatggtccctagagccctgactgtgtacgtcctaagtcccacaatgtcatttccttcgagaagcagaggctgaagagtccctgttgggctaagaacccactccaagccag

SEQ ID NO: 42167 - DNA, 1211 bp, Homo sapiens
gtggcaggtgcctatagtcccagctacttgggaggctgaggcagagaattacttaaacccgggaggcagagattgcagtagcctagattgcgccactgcactccagcctgggtgacagagtgaaactctgtctcaaaaaaaaaaagaaaaaaagaaaaaagaaacagaaaaataatcacaagtattgagaggatgtggagaaatcagactctcatgcccttccagtgaaaatgtaaagtgacccagccattctggagaacagtgtggcagttccacaagtgattaaacatggagtgaccacatgactcagcaattccactctgaggtatgtacgcaagagaaccgaaaacatcacgtcctcaatgtgtgcaaggctccccgattcacacctccagactcgtgagctcatttggcagtcaacggcaattccccacctctcatgttctggagatgcccatactgagtgttcaacactgaattcagcctctcagccctgacccagcttcgcctcctgcaccccagttccacactgccagtcacccaaggattactggaattacaaaccccagtgtcatgttggaattcccctctccatgcgccataacctcagtacattaccaagtccacagtgcatctctaacaccttacggaatcttctcatttctctccagcctgataaaaccctcataacaacctccagttactgagctggtgctgtgtgcaggtgactgtgttaagcagctacatagacctcaactgtgcccaccaagcccaagtactatcagtagtctccttttccaggtgaggaaactggagcttcttagagacattgaccatggtcatacaactattatcaagcacagctggctccaaatccccagatcctaacaagtacctatgggcccatgccacttgaagtcaccaaccttactgcattatggtacaactgttagagataaggattgtgaagccagactgtctgggttcaaatctcaatgttacagctttctagctgggtgaccttcctaagatctgtgcaccttgggggtgataatacagtgatgctgagagacaggactagctggatttccaaggctgactaagaattcctaagcctagctggggaaggtgaccacacccacctttaaacatggggcttgtaactcagctcacaccagaccaatcaggtagtaaagagagctcactaaaat

SEQ ID NO: 42168 - DNA, 1556 bp, Homo sapiens
gaaataatcagatcatctgtcgcctgagagcacagggggagggacaatgatcaggatataaacccaggcattcaagccgaatcgggcaaccctctttgggtcccctcccgttgcatgggagctctgttttcacgatattaaatcttgcaactgcacacttttctggtccatgtttgttccggtttgagctgagcttttgcttgccatccaccactgctgatggctgctgtcgcagacgccccgctgacttccacccccctccagatccagcagggtgtccactgcgcttctgatccagcgaggcaccggttgctgctcccgggctagagactcgccattgttcccgcacagctaagtgcctgggttcatcctaattgaggtgaacactagtcgctgggttccacagttctcttccgtgacccacagcttctaatagagctataacactcaccgcatggcccaaggttccattccttggaatccatgaggccaagaaccccaggtcagagagcaagagccttgctgccattgggaccggcctgccaccaccctgggagcaaagaccggccagtaacaatgccttgctagggcccagtgtctagacaaggtctactgtctgggctgctgcattccaaatacggcgacacctggctagtgcccagggtctactgtctaggctgctgcattccaaatatggtgatgtctgcctagtgcccagggtctactgtctgaggctactgtcatccaaatacagtgacgcctgcctagtgcccagggtctaccgtctaggcttctgtcattcacatgagacgcttggagcagtttctggcaaggaagtggggcttcaagatcactattctggcaacagctgcctccagtcttctctgcgatgtgaatcacttccctttcgtgaacagctgcctagttcaatgtgtaaagtcctccgaatgcccagcacgtgggccaccggccctcctggcccctgctctgggtaaccctggcccccccgcccgcgaatcctcacagcccccacacccccgggcctggcactttcagtgcccccgctcccgccccgtcgcgtccgcgcccctggcgctaacgcagcctccaccttcgggctccccggtcctcgctgctctgcaccgtccaactcacccagcaggcgctcaggggatgcctgtcggcccgcgaccgactcggagtactgggactagctgcccgcacagcgcagctgtctctggcctggccccactgctcccccgccacgcctctcggcctccgtccgtcccatgggcggggcggagccgcgggcgccctgacgtcatcgaaccgcgccaccctcgttgccctggaaacgcggacgccgctgccacccgggcgggctggaagccacgaagcttcgccaggcgctcccgggcactcttgccttctctgcttttaggcaaggcctggctgaccgactctggcgagtcgctgccctctcggagcgccgtagttctgagatgcagttcacaccgcggcccttcttggggcccactccaaggctactggatcag

SEQ ID NO: 42169 - DNA, 2701 bp, Homo sapiens
tattgttttgttattgttaccccccataaccatgctagaagaaacacctatataaggtgtccccattgtacacatactacttagtcaggaaacccagacccgtccagcccagcaacaattccgagtctttaagtcattctttaaacacataaaccagaagttacaagagcctcctcctttagcaaaacaaacaaacaacctatttgctcagctggctgaaaacattgccagcagcctagacgtttcttcatgttatgtttataaaaaggctaacatgagagaccaatggccttgagaagcaaaagatttaatgcctcaagattactttaactctttccccaagcagatgccaagttcaagcatttggctcttaaaaactcctattattaagaaatactgtgttgcttgctaggaaaaaagcttttaagacccagtaaaaaaactaacctgcttaggacatgacaaagttggcacatgtgcctgtactggtttaacacaggtttgatcctaggtctttatttaaaagatagtttccagctataagagaatttaaaaccctcactgcaagtgtattacataaaacactatcactctgtctcccaaagagactcaaagtaaaaataaaagcgagaactcccactaatttgtgaaaattctcaaaggaagggataaggagaccactactactcctgctgccctcctccctgccaccttgcctagttcataagacaggaggaaaagagagaaagcaaaaagttagaaagaaacaaaagtcagataaatagccagacaaccttggcaccaccacgtggccctaggagttaaaaaaaataataataataacatcaacccccgacctaaactacttgtgttatctgtaaattccagacattgtatgaaaaaagcattgcaaaactttctgttctgttagctgattcatgtagcccccagtcacgtttcccatgcttgctcaatttatcacgaccctttcacgtggacccttaaagtcgtaagcctttaaacaggccaagaatttcttttttggggagctcagctcttaagacgcaagtctgccgatgctcccggccgaataaacctctttcttctttaatccggtgtctgaggagttttgtctgtggcttgtcctgctacagtaggtgacagatgactttcatccctcatgggacaacgttacatcattcttatgaaacagccatggctgcactcagacttaggaaggcactggctgtaatgccagcactaaaagcaaaccagaacccaagtggagaaaagttagctttcataagaggactcatcttttacgttcacaaacttaggctccctgacttttatcggtaatcagtactgaggacaatgcgttccacacccgctggctggctgatgtttgattctgtaactataccacgcccagaattctctcaaaagggaataaaacacaggtcaaattcctcacccacacactccacagttcaacccctgccagggaaaccaaaagcaggaaaggatctccagcggcgccattctcatttccggtcccagcaccccgcctccatgacgtcaacgcgccgcgccaccgggctgcgtcatctcggcgcgccgctgccagggctgtacacctgctggctgccatggctgaggtgggccgtaccgggatcagctacccaggcgcgcttctcccacagggcttctgggctgcggtcgaagtgtggctggagaggccgcaggtggcaaacaaacggctttgcggcgcccgcctggaggcccgctggagcgccgccctgccctgcgcggaggcccgcggccccgggactagcgcaggctcggagcagaaggagcggggtccgggacccggccagggttcccccggagggggcccgggtcccaggtcgctatcaggacccgagcagggcacggcatgttgcgaacttgaggaggcccagggccagtgccagcaagaggaggcacagagggaagccgcctcagtgcccctgagggactccgggcaccccggccatgctgaaggaagggagggcgacttccccgccgcagatctggattcgctttgggaggatttctcccaaagtctcgcccgtggcaattcggagttgctggccttcctcaccagctccggggcgggatcgcagccagaggcgcagcgtgagctcgacgtggttctcagaaccgtcatcccgaaaactagcccacattgcccccttacaactcccaggagggaaatagtcgtgcaaggtaagagtgttttgatagtggacggatatgattagataaaaaagcattcatagaacctcgggtcaatgaaaaagtcctaagggtactagttcctctgcgatgtcctagggaggttgttaggtgtttcatagttttttgagtgggcgcatagaaatgtgtgtccttagtacagaagatgggataattgattggggtggtgtctggaaggcttcaaagagacagtgaaggactagctggatattgcgtaatacctaggagtttagcaggtaaagctgtaggtgtaaaagtgttggggaccagcctcaacaccacccgtagggtactcaaagtccggtggcgacgaaggaatgagacgagacaggttaagagtgcataaagattgggggccagggggccaattgcaaaatggaggctgccaaagcctgggagctct

SEQ ID NO: 42170 - DNA, 816 bp, Homo sapiens
aatgaaagatccagggtaaagggaaataagaaaggaacaccaacagcagcaggggtggaagacctgaactagaaggtgaaatagacagactgtgtctacgccaaaaaaagaaaacagctcgcaccctcttcatgaaggcaacagcaccttttatatacagtcactggagccataccaggacgcagggacatggagtcaaagtgtcctctgggaggccatagcccgtcaccacagcaggatgggtttgcttggtccttagctggctagtggcctcaggcaggggtggaaggaggcagggctggctcggccatagacgaacagggccctaggcttggggtttagtgccctggagttggcagtttatctttgaatctgtgtcttgtgtgtaaagtctaagggagagtggagcatgtgctggggacttggagcctgtaaactgaaactaaaattctaagctccccagctgactgaatggtccctcctcttggccaggggaattccaacgtaaacctgaaaaactagttcaggccaagatagaagtgggttggacacgcctcattataccccctccctttggagtttcaacatgactgaccagcattaacatgaaaacagagatcctgaggctgaccaaacagactccttgtagcaataagataccaaattccaacctgactctagtatagcatcacatgacagatagcaggccctgaaagagatcgaagcagtttacccccagaatgtacctatgttgaaatggccctgcaaatttgtctcttactgggaaaacctacagtctgtagagaatccttttcc

SEQ ID NO: 42171 - DNA, 3392 bp, Homo sapiens
gggcttatcctcgggttggcagcacgcgagtgcctattcacgcatgggcctccaacaccattccaagggaggcatgggagcaaggctggccttatctcaccctgggtgccccacatccagcacagtccccaggaaccagctcccactgaacacgtgtgggataaagaagtggcaggaactaaaccgagggctggtactgactgagggaaggcagacagggcaggggccagacaggctcggcacccatcctttgctgcctcagtcaggcacctgctgagccatggggggtaaatgctctgcacctcacttttctcattaatgagggtaatagaatttttgtcccagatttgctgtaggatcaaggaaaggacatcagttgtctggccccatgttataagatcaagtccccttctccatccaggtctttctggcacacacaagtactgggggacgaaggggaggaggggccatcacctctggccgggacctgtttcatatctaggaaaggtccagtgatggagacaggaagggcagtctggtggaaggcccagcctgagcaaaggctgagaggcaggaaagtacaggtattcctgggacgcagaggcagcacagctgcctgggagatctgcttgtgctggtggagctggggccttagctcagctctgctgactctcgggagatccttccagaacactgaccatccacccacccttcccacgcttgctcaggttggtttagccgagccgagtgtaatgtaatcggttgcagaggacaaagggagagttggggccaagaagagctctcatccttcctgtgattgctgaagtctggcacacgttcaaactgcggaatgactcaatcgaaaagtgaaagtggcagagtgaggaggtcagtggcaatggtttcacagagactcctggaccaggaaccaggctgcctgcttccagcccctccattcattctgtctgtccacctgcagaccttttgtcacgccccatgctccatcgccactgctcttagtcaggcatgggatctgggagctgagaccctcctagggcctgaagacatgttctttcctgataggagaaggctgtcaggggaaaggggagctgagaccctcctagggcctgaagacatgttctttcctgataggagaaggctgtcaggggaaaggggagctgagaccctcctagggcctgaagacatgttctttcctaataggagaaggctgtcagcggggctgggagctgagaacctcctaggggctgaagacctgtcttttcctgatagaaggaagctgtcaggggagctgagagaacctcggcaggtggggtgaggtggggtcttggcttgtaggaagggcaaattctcaggtgacatgtcccctgagctggaggtcattgtggatcagaccccggcccaattgcccagggccaagccctgcctgggtgtcagcatcattagccacgtgtttctggataccaggaggaatgttccagagaccccagaaaaggcctcttcttgctcagactggctctttattgcctttaatctggcaaacctcaggacaaaccttcccccaaggccttgtgggatggaaatggggaagacaaaaccctgggtttacagccctggcctcctgggatggactagatttgggaggcccagggagagaagacgtggtggtgagagcagagggcggcatccagggcgcatgcagggcaggtctgcagtcaggcgtggggtgaggatgcagcttgagcagcagtggggacagaagtggggaatctgaggccaggttgggtctgatccgagggcagtgggaagccacctgaagttcttgagtgaggaagttgagatccagaaacaaccttagtcccttgggcccatcagagttcttcacttacaagtaacggaagctgaccctggccgactggagccaacgaagaaggtactgagagcacttggagcccttgcaggggcgagggagatgctgcgggaccagggtctgaagacagcagagtgagagcagggccccagggaggcaggagggctggagtgtgacttctgcgttctgtgttctctgcctccagattgtgctccagggagggagcacgggggaccagggggagttttgtgtgcccctcccagccaggccagtggaggctcactgatatctcatcaagactgtgggtgatgataagggatgagttcccaaggagatgtctgtggtcccagcaaatatggttggatgtggggcaggcagaagggggagtgctcacgccagtcctcatcctcaccccagagaggcaagtggcttgctcaaggacacaggtgagtcagtggccaaaccgtgccaagtggccagctcactggtgactcaggcctctgtcttcctctgccagtgggtcatgggatgagttgaagacaacgtttgatgaaaacaaaacttctggggatgtataagatgggtactgagagcaggtgggaccagacagaaggaagaatggctccaggacatggccatgggctccgcagtggtgtagatgggttccaaccccagcacggccacttgctggcggtgtgggacttcacacacattgcagaacctctttgatcctctctctaacttccctgaggggcatggtaactgtacagggccatcgtgagcatcagaaaggatgacgtatgacgtgcctggcatgcagtccggcctgataggtgtgagttccttctgggtccctgccaccaggggagctggaaggagccccagagtgaagtcatgagcactgaattcaattcctggcggctttgctgaaattcggctccaacctgtcctggctcccagaccaccagcagctgtgccacacagtgtctacggcctgagacacactcatctgccatccccagcatcacgtcagcaccacggtgtccttgctatactgaggggtcccccatctgtccctcctactcaatgggagccccttgaggtcagagatcacctgtggtcactttttgccaccagcacccaggaagggacccagcatcaccagtgacgggtggatgatggatgaagatgaagcagtgaatgttccactgcagaagagccctggcaagctccagtgccaagctcctctgtgcacacagagggtagtgactgagctgccttaagcctgacatgggatgccctagtgcccgggggtttctagctgcccctagtcctgtttgcaccaaaggagtatgtgtaggattgcacaggagccatcacctgcttggcacctcggtctttctttcaccagaggagaaggaagtgaggagaaggctttggggtcccatgaggctgggttcttggggcatcacctgctctcgagtgttctgcagagcagactcac

SEQ ID NO: 42172 - DNA, 3696 bp, Homo sapiens
cccaaggctggtctcaaactcctgggctcatgcgatcctcccgctgcagcctccccagaccttttattcttaacctggattgtgacatgagtgttagatttatactcagtctttaaagtgtgtgtgtgtgtgtacgggcacacaagcataatgcatatgtgtgtattttatatactcttttgtatgcataatacatgctgccatttaacatggaaaagaaaaatggtaggaaagtgttccaggcagagggagaattatgccaagacagcaggacagaagaaagcttgggtggccatggaattgcaaggaggccaataggggaggaacaggaccagaaagggaaggagtgggctggatgaagttggaggggcaagaaagggcaggtcatgtgggcctgataggtcatggaagttagcctggtttttacttggattctactctagatgaagtgggaaagtattggagggtttttggcagggggaggacatggtgtggcttgcattttcagaggatccctctggcaagtggatgaaagaggagctagacaggaagccaggcacacttggggggcactgcagtggtccaaagatcatggtggacttcactaagcaatggaaatggacagaagtggatggatttaagatatattttgagagtagaataggtaggacttcctgggtgattggctccaggtttgagaacagatggtgttgcagaaagtgaaagaagatcacagaaaactcccagatttcagacataagcaaatggtctgatggaaggaaatgaggtgaggaggggagacaccctctgcttgcgaggtatttatcttctttctgttttctctttctttctggattcacaactatcttactcatagcacggagtgaggatagaatatattatcaatagctacagctatttctatcgatgatgaagtttccagacctcagtgcacaagatactgatctacgtcatccactgactcattcaacaaacatgtgctgagtactgggccctgagctagacacagagataaatggaacataaccctggatctcaaagatcttccatccactggagctgataatgcattgtatcatttaaggatgctcttggctgcaagtaacaggaaacctcaactcaaaatagctgaacaatgaggacacctacagaaatgcaaatttacaggagtggtgagcttcaaggatggcccatctggtgactcagtaatggccaagaatccaggtgccatctggttgcttcactctgctttccataattttgacctcatcctaagacagcatgcactcacaattgcaggatggctcctagtagcagttttggctacatgcttttctattcatgcatgactggagagagtaagcttggcctctcataggtctcttggtgctaagaggaactttcccggaagcttctaacaaacttctctttatgtcctgctggacatagttggggcacagatcccttactaaaccagtgtggaatgggacccatcagcctgtacctctgcccctgaattcctttcctttatctgttcctccctacgtgagtgaatgggaccaccattctccagttgctcagccaaaaaccacgaagtcattcttaactcctgcccttgatccaatctcctcaactaatccaccctcactcatccctgactgttagggttgaattgtatctaacctcacacctccagatttatatactaaagtcctaactccccaaacctcagaatgggtccttatttgaaatgtggtcattgcagatataattaattaagaagaggtcatattggagtaaggcccactctactccaatatgactggtgtcctttatagaaagaggacacaaagacagacacgggtacagagtgaattttgttcccctccaaacttcatatgttgaagtcctaacccctagtacctcagaatgtgaccttatttggagacaatctttacaaagcaaataacattaaaatgaggtcactagagtgggccctaatccaacgtgactggtaccctgataaaaaggggaaatgtggagatagacaggcacaggaggaagatgatgtaaacaggcatggggagaagatggccatctgtgagccagagagagaaggctggaactgagccttccttcaaagccctcagaaggaatccactctgccaacaccttgatcttggacttctgacctctagaactatggaataacacatttcagttctttcagtcactcagtccgtggtactttgttacagcagctctagaaaagtaatatattgcctagcttccaaaaggcttctcaccacttccaccattccaccactcaaccggtccaaactgccatcccctcactggggctaccaggacactgattcctgagccttcatcagggtgctaccagcagccttcagaatggccactatgttctttcttagtggctggacatttacctgacattgaccatttagtcaatgtcaaggctttatgtcctctattggacatttatctgccttttaggctccccagcatcagaagccctcttcccgcctgggagactttcctgcctcagaatcctgagtggggaaacaaaggacacataactacagaagccaaacatgccagacacccgctctcccagcatcctctgcagctggaagtggacatgtgaccaaggctcagccaatcagatgctggaactttgatcaaggtgttactggggctaagacatggggctgaggaggattctccagcagcagagggagctctggtgggattgggtttgggggcagcagcaggggagctgcaatgtcctgtgccagcggtgcagtcaatggcagtggtggctgcagcggagcccataggaccagctctgggagtgatttagggtagtatctccagctacagagcttccaggcctggctctccagccctcccactgatcctgtgagcaacccactcttttcaacaacttttttggctttagttgttccttacaactatggaaatacagaaactctagcaaagcacataaataatctcacttcaccctcacgacaaccctagtggtaaaagccctcatttacaaacaaggggcctgagagttatataacctgcccacagtcacggcttatatgcactgggaggcttttgtggtggagctgccaaacttcagggcacaaatacaactgctccacaaactgaactcttgaacttatgattaagatgtgaaagttaagcagataaacctaatggtgcatttattgatttaagagtaaatattggctgggtgcagtggctcatgcctgtaattccaacactttgggaggccaaggcaggcagatcacctgaggttaggagtttgagactagcctggccaacatggtgaaaccccatctctactaaaaatagaaaaattagctgggtgtggtggtgcacgcctctagtcccagctactctggaggctgaggctggggaatatcttgaaccctggaggcagaggttgcagggagccaagattgcgccactgcactccagcctgggggactgagcgagactccatctaaaacaaaaaaaaagagtaaatatcaactatatcaactaagcctttgcttgggctggatactccgtcagaccgtggtgaatacagcagcaaccacccccaaggagcacaga

SEQ ID NO: 42173 - DNA, 2579 bp, Homo sapiens
gttgatatttttactgctatatttgtaaaataaggggcctaggctcatttatttgtcagattcaagaatccatgaatcacttaccattatctcccaggccaggaacctggggaccaagcctctggacataaaattgaactctgcaattcccagccaagactggcttagagcatctccaaataataaaagaaattgccagacaatgggaggcaaattacctcgtagcccgtttaacaatattaatgtgccttactgattcacacagagcctcccgtgaactcacttggaacgattctcaggagtcctgtaaaaatacacggaagtaacacttggtagctgggccagagtacacacaccattgcataagagaggaagtcatgccacaatgccttagggctttataaagacagtctgcaccactgaacacactggcacagggaagaacgcagtccagaagtccttaaaaaagtacccattgttgaaccaggccctctgaagttagggccccacaagaacaaaattccacaatcccagcagtgctacctaatgtcgcctggctccccgaggtaaggcctcctgtgtagaaaagagctctcacagcacgcctgagacttctcttcctagaaaagcctgctgcagggtaagtcccgggcttgcatctgggaacttggatgttggaagggttgccaccgttcccagatctggtaagagtgactcagtgtacctaaactgtgcaaacagtgtggtttatgctgtctcagtgtggtttatatctgctttctttctgggaatctggaattttctgcttgccaagcagagagtgcctatgtgaccaccccccgagaaaaaccctggactccaagtctctaatgagtttccttgttagacaaatttcacaagagttgtcacaactcgttgctgtggggatgaagcgcgtcccgtgaggctctgctagaagagttctttggagcttgcccctggtttcctctggacttcacccctgcacctttttcctttgctgacttagcattgtgttccaccactgtgatcagtcatagctgtgagtactaccgcattcctgtgccaacgcctgtgactcatgccagtgaattatcctacctgaaggtggtgttgggtgaccccagtacacctcccttgtcctaaggaaaaaactcagctcccattttggcttgacttgagcattaggtttgcaggtttgtggtgttttttcctcctccccaagtgattctcccagaggagcctggctgactcactgggaaagaggctcctgtgcctccagacacctgagactattttgttcccacagttagctttcagaatgaaatgaaacatgatgaaagaggaaacatcaattacaagcaacagccaggcaagtaaggctttcagagcctcctgggtttcccctcagccacctttgcagtgagggggcagccaaatgcttgggtttaattagttgaaacataaagaaggtaagtttcattgtctatttggccccaggcagaagcagagaagtgaatgcactcccaatattattcttattcaatcacagtcctgagccttcctcctgctggaacattcttttgagaggttgcatagctgtgtttacagggaacagtgcattttcgcagacttgagatgatattttgctctcctttttgcatatcctccggttggccggaatgaaaagggcaaattgttttcattaccagtcaattcacttctggatgcttgaggtagcaggggccccgtctgcaacatcaattctggaataactcatttatagaatgggaataagaacccctagcttgtagatgaggccgccagaaggatgaaatgaggtgtgtgaagtcccgagcatgatgtcagcatacagcaggtgctcaataaatttcagggtcttcccctatgggtcagaaatagggtgcttctagtttcacttgtctggtttgttcacaccagctgtgcaactccaacacagccctccaagtttccctacctcccatcttgctggatcagctatccccagctctctggctgcagcaaccactgcccccactgcactaagctgagcttcctggagatttgatgggaccgagttcctttccccatttggctcaacaaaggcatttttcttggagaaactttatgaaatgagaaaattctatatcaaagaggcaggctgtccagctctaatcgctgggacctccagggcatggtgcggggggagttggcactcacagcctgggacacctggacaccaacgccccaggctggaaaaggtccctgggccctcatcagtcagcagctgtgctggctctgatcaaatcaaaccaaaccaaacaatgactcacagatcccaatttaaacaatgcagcagcatctcatattagagaaaaattggaaacaacctcagaggcccacattaggaagataggacatcacaggaggcagctccacactgctgttaaacatcctggtgatgcagaacttccaatagcatagaaaggtgcttacaaataaatagtaagccaaaaaagagagtattaaacagtatatat

SEQ ID NO: 42174 - DNA, 913 bp, Homo sapiens
tgccatggctccctactgcccaagactaaaatcctactcctcagcctaagatcttaggccctcttcttttgactccatcctgcttttccacctcttctttcatcccagctctgcattccccctaggtactggcacatcacacgctactaacttcctaatatgccaccatgtgggcacagccaggcctctgtgtgtgtgcttcagctccccacctccctttgacacctgtggaaattctacacatccctcatgactcagctcaaataccacctcctccaggctgtcttccctgatccccagagttggatacattataaactctcaacaatgcttgctgaatgaataagtgagtaatgggattcctccgtcctcatgttcccatagtcagtgcttgaacccatatcattctatcccaggtgtaagtttcacataactctgctccacaagccatgagtgcaaaggttctcccccacctctcacctggatgttttgatgaactttcaagatgaagcaagagtccaaattcctagccctctttcaaagacaaatatcgacaagccagatccccatcttggaatgacgtcacaatgacaaaatcaaagatcactgactgttggcagtgcttactgaagccatctaggccccctggttttcaaacagtttttagcaacagaaatgaacaatgtcaaataattaacagactttttaaacatagaactgacctgcgcaaatagtgcttagatccgtgaggcacctctgcaaaattccagggctcatgggaacctttgaaactcactgacccaggcttcccctatgttttgtacacaaggatgctggactcccaagcaaggaaaagcctggaaggcacccagggctgtcctcagcctgcttcctgtctgcccccaaaacagct

SEQ ID NO: 42175 - DNA, 740 bp, Homo sapiens
cacctgagtgccgttgtccaagggcctgagactgccgacagccagacagatgtgcacacacgcttacatgcacatactgttccagtctgaggcgtcaaactacaggggctggtccaagcctcaggacaaggacctgcagacgtagagatgcaaggtttggcacagagaacagggcgcctgccttggtgttgtcctgccctgcagccccatctaaggacagccaccaccagtacagggccatagggcagaaacacctggatccctggcaaaggctgacaagctggcatgagccagggcaggagggatggctgtcctcagctggtcagggaatacaggccaagtggacaggggccaggtgctccggaaggcaccttctttgccatcatttgacatatttgtgagtgtgtgtgtgtgtgtgtgtgtgtgtgtgtgtgttgtaggcgccaggccctgacaaagctgtgggggtgcaacagtgaagaagacatatggatccatggttcagggacccatatcagtcaaatcccgtctggaagggaatgcgggtctcttgatggccacttacctgctctgccagtctcgtttgtctcctctagtgccaccagccacgagatagagctttggggctttgagccaagtgatatcagctttacctccagggccagtcccctcagctgtaggagtctgagcaagtgacttgacttttctggggctcagcttgcccacctgtgaaatgggat

SEQ ID NO: 42176 - DNA, 1454 bp, Homo sapiens
cagatgaaacgcctgttctctatcactctttctctttaaacctatcctctgagtctcggcacagataccacttcttctgagcccctgggctgtgctgggcatcgtttctgtgctctgtgccttctttgctcccagccccgatgaccttagaggacacaaactcctccctggtctgcaccccatcagattgggagcacctggtgtgaagtgcccctgccagaggctggtgaagggcaggtgggggccatcttctcctgcctcagctgtgctccccggagccccctgcctgtgtggcccgcctgtgccctccacccgctccccactcactgcacgggcagagggtgcccactgaccgacggtgctgctgcccgtgccatgccctggggagggtgagaagagggacaccaccatgcaagtgcggggcagggcagcctgccaccatagcctcattccatgtacacacccagtctaccagagacgctgttggcccagtcagctggggcttggagagagcatgccaaagtcacacagatggagaagtgcaactcaaactgaggcctccctgcctcaaagccccagatcccccagctacacgctgccaggctggggctgagcactgtcacacggctgccacccaggcctgccttccccacagcccgccagccatgcagaaaagctgtccgtagttacctttcttctccttccacctggcaccccactcctcaggtggtcacactccagcagtgccctccctggccctggaggcccggcgtggctggtgtcatctgtgaggggaactaggcccagttccttggaattcctattttgtttccttgccatgggtctcagtgacccagctgatggctcagtccagggaccccagactctgccaaggcatttccgtgagtgaggaggcagagtccactggaaggagggcgggagttcctgacaggaagtgtggcaatttgatcatgcctgaacaggcaacggggcaacatttttttctctgctcctaagttattacagcaatgaaacagtccaaaaagggaaatctgtcctctccaggattgccacccagggggtggaattttttttttttttcttagcatctttttatttttctctggtaacaaagcctggagcagggtgactgccattaacctaggatacctccctaatgcttggaacagaatggagaggtggctgactttgactcagaagcctgcatacagctctgcccctgactcttccactttttttttttttttttgaccgaatcttgctctgttgcccgggctggagtgcactgatgcaatctctgctcactgcaacctccgcacctgggttcaagcaattctcctgcctcagcctcccaagtagctggaactataggcgtgtgccaccacgcctggctgatttttgtatttttagtagagactgtgtttcaccatgtt

SEQ ID NO: 42177 - DNA, 1593 bp, Homo sapiens
tattctaggcattatggacccagagccaacaaggtgggaaaagtcccatctccagctcctcacaccaagtggggcatcagactaattaaccaacacacttaaattgacgttcaggtaccattatagcaaactctagaaagcagtgtaaggtgatgagagaggcaatatcaggaaattctgatgtgatgggaggagtgggaattaactgaacatctgtagatgtggggttgtgggttgggtgggggtccaggcagaaggagcagcaagggccagggctggaaagagcttgtgtgtgagggtttcagggactggtgtggtggggttgtcaaggcctgtcttgtgacgtggttagggatgtgggactgcagcctaagagccatgggaaatctagatggtttctatatttgggcaagggggttggaggatgatcaggggagctctttacaaagagctgctggctgctgggctgtcagggttggggagaatggggggatggtgacaaggtggaagcagagaccaaatttggcccacataaaagatgatgctcataccaagtcaagtctactaatagtaaactaatccaaggatcacaggagacaagccctgccaagtcctccatgcacacagtccctggccatggtcaacaggagacctgtgtagctactgtcattacccagcccgtgcagctctcacaccctgctggacaggtgacgtttatcctctttcaaaactctccaggaagtatcttgtgggaaggtagtgaaatttggcttcaatggcatagtgaggttgcagttctgatgacctaaccgtgaccatgggcaagttatgtaaccaagctgagtcaccaattctttgttcataaagaaaaatttgagtctctctttgcaggtcgagtgctgcaattaaaaagatgcatgtaaagccgggcactgccgagctgttcactaaaccttagtcctccccaaaaccccacctatgtgcagactcctccctcatccctttcacgtgctgaggagtctctgagggtctaactcagtttcctccttttgtccagggctccatgaaaatcaaatttctgctcttaatggcttattatcacttgctcgagtgtgttatgtgggattgtgttacaggaaagagctaaggttgtttgtcttgcaacagatgggataagtaagttagagcttcggtatgtcacccccactgtctatcagcccggctgcttcccaccttcctgtctccattggaggctcatctatctactcccaggcggcttccttctgactcagatggcttcccggcagccgaagcatgattctagaacaccctcttccccccggctctgcttctgtgaacacactcaaccctcaaaacttagcctcagtcttgccttttccaagaaatcttcagtatctacccagaaatcatctggatgaggaacagtgttttataaacactggactaagatatcccagcctggcttcctctgagcatctggcccgcttaaaatatgtatgtgggacaagcagctgtgtggctgaagccttggtccatgtctaaggggcagacttccgtgttagttaccccaat

SEQ ID NO: 42178 - DNA, 660 bp, Homo sapiens
tttagtagagatggggtttcaccatgttgaccaggcttgtcttgaactcctgacctcaggtgatctgcccgccttggcctcccaaagtgctgggattacaggcgtgagccacggcacccggccagaaggttaattttaattttctgtatttttaccataaaaaagagcaaaaaaagtaaacacacctttttatgagatagtcatataaaaagactaaatctctgggttggaatatcacaaagtccaagtgaggaggtttgaatgaataaagctcactgtcaatgctgtgacatatttccacatctcagtaataattaacacattccatgttgctgactccaagaatggtatttcatttatggctcagaagacccttgagtttgtggtttctgtaatcatttgtctttggaactatttcaaatggagaaatgccgataggtcagaatcttccagttcaaagtgtctctaccttgagcctgactaatcatctccatctgaatgactatccattccaagacaagcaagagactgttactagtgacctaactagtacaggaaacaataatttgctgtgcttttttcctttcaaaaatatcttatcattcatcacctcatttaattttcacagcaatatggtatattactctgttttcacactac

SEQ ID NO: 42179 - DNA, 2155 bp, Homo sapiens
ctctttcatccctaagacttaacacagcattatgtgatataatagacaccagtcataaattaatccattttgggataatcgttcgccagtgaaattagaatgtatcaaggtgtctatccaaagaagatactacgaatgacaagtaagcacatgaaaaagcgctcagtgtcattagtcttgggaaatgcaagtcaaaactacaacagaataccactccatactcactagaatcaataaaaagaaaagactgacatcaccaagtgctggcaagggtagaggggtggggacactggaatgttcacactgctggtggaaatgcaaaatggtacagttggaaaagagttgggcaggttatttataaacctaaacagacactactcacaccaaacaccagcaaccccactcctaggtatctgccctggagaaatggaagcatgtgtccaccaaaagacacaggagcaatgttcacagaagctttctttgcaatggccaaaaactggaaatacccaaatatccatcaacaggtgaacagagaaacaggcaacacaccgcactgcttagtgatagaaaggaacaaagtgcaaatgcactcaacaccagctatcaatcgccaacatgttatgcaaagtgaaaaagccagacagaaaagactacacattgcctctcacttcatatgaaagaagattttagaaaaggcaaccccaatgacagaaagcagataagcagctgctgggggtgagggtggaaggggtggcgggggcggggggcaccctccggagtgacaggaatgttctgtcatgacaggggtggtgcttatgggactatataggtcatctgtcaagatccaagccacacactgaatacagacaaattctactgtatctaaagtacacctcaataaaactaagatgctggctatttattaaatgtctgcccaatccaaccctctcccactccaattagtccttcatattctgacactgacacatccctacccaaagcacctggcaagaaaatgatccacttaacaggcagcccctccaagaccctgttcggtgtacactcacagctgactggggatgggggaggtctcacgctcacatacaggggcacctgcccatcccgccagacagatggcctcgtgggctctcccagcctggacgacctcctccccaggccgtgctgccgtagaaagggtggggctcccatgggccttccgctggggagggcatccagagatggaagatgcctgggcaggggcatgagaggaagttctgcccctaaaaattccttcccctaaatggtcagggctgtgtgtaaaaaccccaaagggcaacagaatcctgccagctgatgaatcactcactctcgtttgtattctaaatacaactgggtcagcggtgggggctgagatactccaaactgcagataatgacttacatctgagtcagagcagcctcctccccagctcctcagctcgcagagggaggctgcttactacacccagaaagatacctcacacccccacgtgtcactcggcctgtgaggctctgtccccatcagctgggtcgagatggcaccttgacaccctcagtgtgcccctctccccccagcctcctccccctccttccatcttggggaagaagaatgagattgggggttgagaagcttatttggggaaaaactctggaatggggaaaacgagacagggagggcaggaagccaattccaggagccccagtgctactgtaggcaaaagttctgtctccccatctccctgggggcctgggggagaccaccatgagcagccttggagttgcccactcagggacacccctcctcccaggctttcttctcatgctgctgcaggctgggccagctctggcagtgggaggctgccgttcagtcctcaccacaggcctgcccagttttccttgccaactcccaacccatcttctcttttacctccaccattttcaatgcagtcctcctgttcttcctgggaagagcgataactgctttggaatgcatctccaccctccaccaagccggtagtcttcaaatcccgaccctgattacctcacggtccggcttgcaacccacccttcctgagctccctccaggcttcagcccactcgtcgctaccctgctgccg

SEQ ID NO: 42180 - DNA, 2927 bp, Homo sapiens
aagggaaaagcaaaatttaagcgtgtaacccaggaagggagggagactgacagactgggtcaccccaacaattacagaggaataacatgaatttgcaaggatttcccaaggagctggctctagaagccttttcagcctgggtaccggaggcttgcagagaatgattcatgggaaaacactgcttcctgtttttgctttggggcttagatccatggtggcagatctggctggcccagaggcccgggtgtttttccgggctctgccatactggaagaccagggtattaacagcgagttagctgagtgccattccattcagcaagggctcaaagtgcaccaggcaccgctgggcttgagggacgccagcagctcattcattccatctgcccagccagcaggcgaagcgagagtggtcatcatctcatcatctgttttacagacgagaaaactggggctcagagatgcccaaatcgccaatcttctcaaggtcacgcagcggccgaccgggtcagtctgatccctcaaatccggagcccttgcttttaaggaatgaactaatctaatctcccatccacgtactaaccaggcctgaccgtgcttagcttccaagatcagaggcgatccggcgctttcagggtgctatgaccgtagacagaaacgaactaagactcagtttcctcatcaagaaggagcagacaaggacctgggtgaatctgaggccggcttccggggctccgaggtgtggctcccggtagagggggcgtggcgccctcaccctccccgggccaatgggcaggaggtgagaagtggagaggaaggcgaattatcccatcccaaggtggctccggagcagaaccgcgcccggggtagggggtactcacgtcgatgttccttaggatgacgcactttccattggtgtacagaaaattgttgcccttagggtcgccgccgatgatcttggagacgcccctctccacctgcgggaggctggcgaacaccttctctgcggagacacaaatgcggcggggcatgtcagggcagggcggggacggcggggacagaagggagaaggagccccggaccggtctcggccggtcacctgttgactgcgccgggagggcggcctccactttccacgagcgccaggaaccgcgcgacttcctggtccgcgccccgggccaggcccttgggggcagcggggctcctccggctcggcccacggcgccaacttgggggcgcaccccccgtcgggggtcccgccctgcaccaccgagggcggccccgccacgcctccggccggcgcccgcacccctcccccgcgccgaggactcccccgccacccgcacggcgcctaggggccggggaccggggccggggcagcgcggcggccgctcgggggccccgcgccgcggcacttactgatctcgtacggcatcctcgcccacttgttaccgcgccgcgctcgccgagagcctccggggccggcccgcgctgcgaattacacctcgccgaggccgagcccggggactggagccggaaggcggcaccgggcgtgccgggagtggagtgggcggtccgaggccggggctcagaggccagctcgcgcctgccctgcgcgctgtggttgcggacgccccgaacccggaagcgcggtcccgcgcgcggctcgcccccagctttgaccatatatagtcaagcgctcggctcggcggctgcggtcccggcgagcctgcgcggacctggcgctcccctcccccgccggccccggccccgcctccgccttgctcgccccgccccggaagtgacgtatagcacgccccgcgggcccttgaaaaggcggcgcagacaagcagccgcgtcagaatgcttctgggagtcggggggtgggtgcctttctgttgctagcttgtaggagaagctgggctgtaggaagtttatttgcgggggggtcttaaagacgctgaaagtactggcgggctttggtgggggtctggaaaaacctctctgtacctgtgaccgcgttgcgtggcgggcgctccccggcctctcctttttgaccggtcccgggcgttgcccagccgccagtcctcctgctcgggttttgtaagcaggagagggatgctttttacgtcttcttaaagtacggttaagtgcccttgcttgaagtagttgctggcaacaagaacgtaggggttactctttgttgggcctgaactcgtgctttttctctcaaaagttgagcttttgaaaggcaaaaaaggcgtgggggatgggggagctgtcggtcttaaggaagttaaaggttatttcctaaacaaaacaagtctcactcctaaaaccagggtagtggctcagttgtggcgggagagcaggggctgtaaagtgtccaagtttctagtctcatctttcagtaggatgggtacaagctttccccttggggctctgggggctgggagggttgtaaaagtgggagaaagcaaagtatttggcggggtgcgggcgggtagctgaatgttgttgtaagtggaagaggaatgctgttggcgtctttctctaagcacggttaagtgctttttcttgaagtagttactggcaacaagaacgtaagggttactctttgttaggcctgaactcgtgctttttctcaaaagtttagcttttgaaaggcaaaagtgggggtgggggcgctgctgcttttaaggaagttaaaggttatttcctaagaaagcaaaacaagccccacttgtaaaacccgggtagtggctcagctggagagcaggcgctgtgaagtgtacaagtttctagtctcatctttcagtagaatgggtacaagctttccctcggggctctgggggtgggagggttgtaaaagtgggagaaagcaaagtacgtgggtggggggtagctaaatgttgttgtaagcgggag

SEQ ID NO: 42181 - DNA, 1054 bp, Homo sapiens
gagactacttccgtgggtggtttgtggtggggtagttgagcgcttggggaaggacactttaagccaacactaagtttgtataaaatattcagattaaaacccatgaagagagaaaggaggcaggatggggctgaagtcagactgggacgtaagacttgtcagtcttgctgagcctggtggagagggtccagagcatacaaaaaaggcattcctgtactccagccagtggaccctctcccttaaaccttctgtgctgacctcattacaaagtatctccttgatctatatttaaatttctgtctttaagtttttagattggcacacaatgtgaatggacgaattctgtaatgtgttctaggtggttcatggtataggcttaagacaccaattgtgcaatgtgaaaagtcacacggtgacacacgtgtcctcttgggaagaccaggtggaccttggactttacacaactaagtttataacaaccagtctaacaccaatgtgtactagcaaacccaggggacttctgcctacttccatactggaggagccaagtgggttgtttgactttctacagcgatctgagaatgaaataattgggtatgtgaagtcaatttgtgttccctagaggcagacttgtagatggaaattgtttaaggtgttaggtttactggtgaagtgagctctcacacctgaaagcaaactggaacagggtggaatgcaaactgtttgttttggaaaagaagcttaaatgaggccataatctctggagccagagtagcttccacagctagccttgaatattacctggctgggcttttgtgtactcctcacactcctagccattggaagtggccacatccagggatgtggcataacattggctcaagaaactttgcattacgacgagggctgttgtccgcagaagaatgttgaaacttctagcccaggtatcgggtgtagcatagtacccagctccttggaaagggaagggtgtactgcctgtcttctgaaaagggcagatcctgagacctttatctggggacctgtccttgaactg

SEQ ID NO: 42182 - DNA, 885 bp, Homo sapiens
cacatggaaaagatgatggcaatcctggatgagtgttttagtcttttccagagatctgccattagctgtgggtcgatcgtgtcctatgatgtgctatagtgtcccagatagcagagaggctagtgtgaggtgggtgtgactgagtgtgagtttccagcccagggtgctggcagatcaggagtgatggtggatgggctcaagagccctattcatgggagtggactcttagcaggctttctgcagagcccaagataagagatggccctgagctgacctctggtctctcagtgatgtgtcatactgtgcctaatgaatcactggatataaatgtccccatgacccaaatggatcttgacatcttcatgaaaaattgttccaatgaagtttgaatactaagctcaacccaggagaaggatttgttcttggatgtaaaatggtttatagggagtcctgactattcttgttctgtgtccttaaatccttcagtcttcaactcttgatacctgttaatcatctctgcctatgctataaacataggcatgctcaagttaagtgcctctattggggaaaagtcttagggttcaaacttggtggtgtccaggtagctacttaactcccaaaatctagacaaagcacctaattgggaaacacatggctctgtgaatagcttcagaagacagtaatgcagcatgagccccatgggtggaaggcttaactcctgcagctgcttagcacattggttactgaggaccagaaggtacttctggccttgtggaacacttgcagggaactaatacagtattacctgctttgatttttgttgttctgttgtgcccctgttcttaatgcaggaagttgtacaaatgcctccacaatgaactagtg

SEQ ID NO: 42183 - DNA, 1252 bp, Homo sapiens
accaggacagatgtaggagaaaatgactcaactgctccgaggtactgcagtaatagagcatgagacttttggttggaatgtgtcattgccatggatagttcgggcttctgcaacacttgcagagaatacttttggattctgtggtttttttagaatccttcatgacttgtcccttcacacaagttgtacaaatctcttcataaaaaataactggcactgtaatctcacaccatgggcagttcttcagggaccaaggctcatgtgtgactgctgctcagtgaccgagcttgtcctagagcctataatatggtagcagtacacttggaagtgacaccccatcgccaggtggctgcgttccaagtgttggcagctcactgacagtgggagtatgggagcctgtgggtgtttgcttggggcacgcattggggcaggcaggatgactgtgtcctgctttgtgtcctctcttgtgaggcctcttctaggtggctctgttccatgtcaacatctgcctcaacttcttccgagacaaccgtaaccttggatagtaaactacattacctctcattctagttctttactctttcactcaagaatgctttcaagtctcaagtttcccagttcttcagaggcttaaaggcaacctttagcttgaggaatccaacttaaggttttaggaaatgacagatgtaaatgtaaataatcccaaatgcatggcaatgtcaaacttgcagctgagatcacctcacagttggaggtgtacatctcattccatctgaattcaagcagacatacattacatacaccaggagagttatgtggaggtacatacagaatagtcagtggcacttggaacataatagctgactgtactggcaaatatgagatggctgtgtgctcacacggacctgacagttgacctttcatcttataaaatgtatgactcacagtccatcattggtcatttggacagtcacacttgcaaaaaggttctgggtacttattgccatgactgtgtcattgttggcaggtgtatggggtcaacttgaaggcttctggcctacccatgagtaagatgaagtacatccttagggggaggcatctggactaccctttggagtggaaaccaattattaccctagtcgtaatgccaaaaatccttgtttcctgccatattgaaaagcctgatgagaggacctttctgttagggaagggggatatgcacttgtgcatagtttttctagtgggtgactta

SEQ ID NO: 42184 - DNA, 1154 bp, Homo sapiens
tactgttttccaggcttcctctttaagatatctgtccaatctccaaactattaactggaatactagttatcatttttgaattgcctcattttttttctactggaaccgtgaacaatgatatccatgcaatcaactaaatttgacgcactgtttctgtttcttctcgtgtactttaaatgtaaattaccaatagtacaattaagaagtgcttgttgatgtatcactcagaatcttaccttacagttatctacctgttgccccacactaaaagcatttttttgaacagaatcactcctgaaaggtaagttattgctttcaaataaccactagagggaaatgttgctctttttactaagtagtcacagtccgctagggaacagtttcctcaagcaatgagtaggaattataaagccatggcttgcgtcatttttcccttcctggagtgtagaatcctgaagcttgaagggagcttgcaacccatctaggtcaagctcctctgacctctccctttcggcactaaaagaaaccaagacccagagaggaacagcttttttaagtcataggataaaggaagcagaaaaaccaagtgctaaagacaaaatttccttatttacctaagctgggcaaatctggaatgaaacaagagagtaactcagaagagttggtttttagttcaagatcattaagcagggattcgatagtaagaattagcactggttaaatgtttgctgtgtgctgagtatacctgttaccatgtgctgggacgactttagatgtctgcattctttatttttatcctgatcagagttgtgtgtggtagaaaaaaatattttctatcccttttctacagatgagaaaactaagccacagagagtttaagtcacctgcccagaatcagacaggaagtgattgcagaccagggattcaaaactaaacaacgtagctctggagttcatgactaatcattctgcttactgcctgtcagtggaagacctggaatttatctgtgaatgtggaaaaagctatcactccttcctggggaagtggcctcacctcaccctttggtcagatgagacgacgtgtcccattgaccacagagatccttcaggatttatcaaggtggtagacagagctttttaaaggactgatttctt

SEQ ID NO: 42185 - DNA, 1134 bp, Homo sapiens
acctgtattattttccacctcctctgtcttctgcaacttaaatggctctactgtctatctcttcaatgacacagtgaaaaagaaaaaaagggaaggtatccttaacctatgtagtttatcaataaaatgctagccaataaagaagcaaaggtggacgttaaaaccaaaattcctgattccaagccaaatggcttttcttcgtacattttcttttggtattttttggtatattcatctttgtatatttactcaagtaaacagaggcaaatacaacttttcaaggactttcagataaaattgattatatgtgaccagattcatttcaggaacctataaaatgtatactatttttcattctattccagttcacatcatcttcatataaatgtagagctttggtacatactacaattggatgtgaagtctatttttgccaatgaagcaatgaggcaaagttcacagctgaggacagccacactttgccaacagttagcttaaacaaggagaactttgacacttgtggtaagggggaaaccttttcatgaattgctgctttattgaaaccttgcctagcagatgcagtttaagtggaaagggaatttctgctgcagtttataggactgtgggggtcagaggccaaccagggccttctgaaaatggactggaagagcttgcctcttctaagacagcccccatattttcacttatgacaaatatttggaaattaaataattatcttaaggaaggcatgatgccttttacagcctgaaatcctgagggttgccatggctgtgaacttcagagtttccacagcatttctaaatatttgcagagaaccatttcctgtttcaagaatgacaaaagtctaacttgaagagtgaacattttagtgctggtcaattatttcagaagagttgtactttgttaaaatccacactcaaatatactacaacaacattttgggcttgggaacgttttctcgatctaggaagttcaaaataaagcctgaatgctccatctttagagctttcagcaagggtaaggtagcatagaggaactattacataggatgccattctctgcaagcaagtggtggaaattagacataaaatcctctattcaggagaatacaac

SEQ ID NO: 42186 - DNA, 2789 bp, Homo sapiens
atccagctactcaggaggctgaggcaggagaatcacttgaacccggggaggcagaggttgcagtgcgccaagattgcaccattgcactccagcctgggcgacagagcgagacaaacctgaggtaacaacgcctactttccaaaaccatgcaagaagaaaatactgccagaatttagaatagatgcctaataaatattttttgaataagtagatgaacaaatgtaggaacaataaatgttacctaaacagagtgtgacaaccagtttgtcaacacactagtgatataaaagtttcctaattatgaaacatcttttacagggattattcaccataagatccaggactctatacattttgctcactgctaagtagtcctttcttaccagtttaatctccctctaaaatgctcattctgtctcaaatgcatattgtaagctatttaaaaagttggattttcttccttgggaaagacactatttcttctacttgccaaaataatacatatattatatgggtagttaaaacaaacatttttaaattttattaaaggagttttactgatttcataactgaaatataagatattaacaataaagatgttttgacagtaagagtctgtcaacattatatctagaagtatacataaatctaatataaaatatctagaaaatccagaaaaattaatgacagcaaaactatagtccaaacactgatgagtctcatcagctgactgaatatgacacatattaagagaatgtctgaaagtcagttattttctcagtttttaaggccagtatctgtcaattactcagatgcagcataagtaaatgcataaagattagcctttttcatcaatttaaaaatcatgagaaaataaaatttttaattcaatagggtctctaaagatctatttcttaaaactaaatataacctgcttttaaaagggaacacaaagatgtgaaacaagaaaatgaattaaaattccttaacatttaaactttcctaagtgaaaacttttcacaggcctgatagtgagggatgagctggaactctgtggtgggaacagtgctgggggtttatctacaacgacgatggttaaaatccgggaccttcttgacctgttcagtggtgggtttacattgaaactgttataaattattacagaggtgaagccaagccaaacagtccaacataaatatatctgcagacatactggctactatatattctaaacactgtcggtaaatgaataaacagagctttctaaatcatttaagaaaatatatttattcataaaatcaataattttcagttttcagtttgagcctcctaaaaaatgagagacctattataactaattttttggaatccgtaaatatcatggattcccaagctgctcccttcctgcgataatggccagaacctcacacttctctaagtgatgtgtgaatgtttttcagtttggacacttgactaatctctacctgttgaaattgttccactgcattacacaagttaaatatttgagctccacaatttcaacagactgactctgcatctgtataaagggacaaagaagtataatatgacagtctgattttcctagggttgttgggatagcagcaagcctgctgctggcttgcccatatgggtgaatcatagccaaccagggtagaccaaattttgtggtctggttttatttgcctagtcatataactcagggctttaagtctgcacattgttgaccaaaacattaattgtggcaaaatagtttgtgtctgtactgaaagagtaataccagggtaacccacatgtagtgaccatgaattagttaaaaaaaaaaaaaaaaaaaaaaaaaaaaaaggaggaaaaaaaggcatgaggctgtgttttgttgcaggggaaagctcctaacctctgaagctaaagtcattgggaggtctcatgttgaagacagcttcaatagaaacgaggttgttttatgggagggaggaggggctgccggttaaagcaataggtgcttttctggatagtatttattttctctttgtgttccagtattaatcaatgtaagtgtctttctctgtcatttgagtttccctgtctattaaacacagccagctggtgataatctgcagttcacttttcctaagggaaattggccttcactggtccctttactgattggtaaattgataggttgattttgatataatcaatgaatgttagacacaggggagaaaaccaaaccccaaaatgtcaaactgaatgtcacaaaatatggaagatttctagggagaatataaaaagagatctcctgaggcaaacatatgggttcaggatgaaggtctcagctggatgagtgatgaaagtgaacgctatttttttcttcctgccttaagcattattcagagtatccactttgaagctacgctagagaaaaaacatgcctcagaccctatgtgttggtcccatactatccaggcagccatcaagagaacattagtatactagtttaggtttctgtgagcaagggagggctgtttttccttttaaacggccccaggactccaaagagtgaaacagtttcccagggccctggcaatggtaacatctgttggtggaaacccaagagctgctgggtaatgaggatggacctccagaccctgaatgtctatctcacctatggctctttaggataagctaattgtgttctaattgtattagtttcctagtgttgttacaacaaagtaccagcaactcttaaaacaaaagatgtttatattgtc

SEQ ID NO: 42187 - DNA, 1339 bp, Homo sapiens
gcagagccccaattctcacccggggaatactgattccagagctacgctcctgggagctcacgatgcagtagaagcatcagaaacggtaaagggggtgggaggggaggagtaagtgtgacccagactacaagtaagaggagctaagatgccttggcaaatccctgccagtcctgagaggcgggaagctgaaaggctggcccgagtcttgcaggagttcgcaatccaggcggggagttaggaagtgactcttttttaagggggagctggacagctctcgtcggccttcaccaagcgcccacttcgtgtccggcctcaggccacacaaccagaagggcccgggcctagaagcccgagggctcggggtaacgaggcgacgccgggcggcggggaggaggccggggaccgccggggttcctgcaggcctgggacggcgggcctgctcgaggactgaccttcccggaggcgccgtcccccagcacgacgattttcagttgccggtcctggctctcctcctcagagtccgacatggtgtcccgggaaccaggcccgcccctcgaggtggggggggaagggaaggatgaaggctccgggggcgggggagaggaggaagggaggtagttgcggcaggacccccgccccggtgtctccgcgccggcaggaggtattcgaggagaatcactcggcaagcgccatcttgcccacctccccgccctctgcgcgcggccccgccccctacgcgcacgtcgggcgcgcgcccccgcctcagagccaacccgcgccgaccggcggccccgcctgacgagccgaaccactcgcggccctggactggtgtgggggacattccggcgggagaggcgaggcgctgcgtttcccttcaggagacagttggctagaagaagaaaagaagtgttcgttcaaattaaggagagaaaacgggagcagagcagctttcaggcgttccatcaaattcccttttctccttccctcttgagaaagtctctgaagggaatggttcagcctgacggggtggagcagtgacgcccgggctacgcgccagggttgcctggcagccaggagttcgaggaccggcggcggggcggggcctgtctccgggcacccgggacgcccgtagcctggcggagagcgccagagagggcccctgaaaaaccggaccagggaagagggtacctcggggcggatgaggggacagctgctaagggccgaggctgctgggaagcctcagtagcggccgtgaatacagtggagctccggcgctgcttatttcggcctaactcttggtttcctcatctgaacaaccccaggctcccatggttcgttc

SEQ ID NO: 42188 - DNA, 2497 bp, Homo sapiens
aaaaaaaaaaaaggaaaccctcatttcatcaaaactccaatccaatggacccaaccagatttaacaagcagacaaaaacaacccctacaaaccagttaattttccaacatgctttctgcttccagaattctagactgtactgtggttttccatccatctcactgactgctctttcctggtgtctttggctaattctttgccaatccagctaagtttacttgttcctgctaatgtccctttcactctgacatttggtacaaaatcccttcccctttccagcctctctttctggacagggaaccttgttgctgtcctttcccttctctacattactctcctgaatctgctctctttcctgtcctttctccacttcagtatctgctgtcacctctcctgcatcttttctccactgaatgactcggttctctctaccccaccttcctgtcccttcttaccttagaatggtgacatggcctaagttacctaaatcaggcaatcactgctagaaacaatactaaagtcctgtctcaggtttgcctccttatctttgcgctcccacccccacgatgtccagcaaagcatattacacataacttgattcaattaccatttagtcatttctccaaaggataaaggcccttaccgcccagaaaccttcaagaaagaaggcaaacataacttcgatacaaagtaaaatcatcagatatgagaatgaatacaaaactggctactgttagcgccactgtttccaaaccagttcctgtaagaacaatgccttagtcttgctcatcagaccggggtaatcactgtgccgaaaccatgactggcacgtagtaggtacttaaacactagtcggtaaaacgaaccaaaggacacgctaaggaatgaacactctgtgctttgcacagtccgtggcacacagctgcagctccaagaggaagccactgcaaaagaagcgcgcccttgggtcctccccttccctcgcagacccccaaacccggcgcgctcctaaccttggtgtccacgtcggccaggcagtctctgcggaactggtcgaagagcccctggctcttgaggtggttcacgatcatggccacgagctgcgggtccccggcgcccgcacccgcgccgcccgccccgcccgcgccggggccagccccggggcccggcggcggcggcggtggctgcggctgcggctgcggcgggggaggcggcggcgccggaggaggcggctgcggctgtgggttggtggccatggtggcctgtgccggggagggcaagggccctgaccggcggacgatcctgggaggcggcggctgcactggtcccgccgcctgagggaagccaacgggatgttgttacggaaccagcggatccagagcaaccccggaagtgaaagggaactgggggaaaggaggaaaagacggtgacaacattgacgaaagtccggcgacggaggccgcgaagagccagtttcgaccgtcgccgggcgcaagcgccctcgcgaggccgagctgcgccggaagtggcggcgactgtggcgacggagacgacaagactgtgctggtcgcgggttgtggggtttaggtcaccggcaggggtctggagtccctggaggttagggcttcgacccgcgcgacacctggggccctaggtctgagcgggggcagtgcgtttctggccccgcttcatccgcgacggcattttaggcctgcctctcttgctccagtttcccggagcagtgcatagagatccatagacatttgtaatgcgaaccctacgtggatctgctcattctaacttcgcccaaccctcttcgttcttagcctgtgatcctgcactattcttgtcccagcaggtagctccaagttccttctgtctctcttctgcctgcacataccatttccccgtgggggtcccttgtttctggcagtgtgcctgtggattagatccgatccctccagcccgttcttcctatctgtgaagacaaatcgacaggcttttatttttaggagatttgctattgattactatgattatagcaggtaaaacatctatagcacatattatgtaccaagcgtggcgttaagtgcttttacatgtattaacgcatttaatctttggacaaacactaagagctaggtctgattactgtccccagtttgcaaatcagggaaccaaggctcagataaattaagtatgttgagtaagattacacagctagcaaatcacctgcttttggactgcatcatctttgaaattattattagtacgtggtcaaagcaacataaatattagaaaatttcataattactaaatagtgtgtgtaactttattgaaaaatgcatattgttgctttttaaagttcctacatctgtggctgaatatatcttattagtaggaaaagaagggttgagcatcaattctattcctatttgtaatttttatagctgtgtgccctgagaaaccttgttcatataaacaagtactgtgccta

SEQ ID NO: 42189 - DNA, 1393 bp, Homo sapiens
gagctcgcaatagcaagggagtcaacaaccattgtcacttgttaaagacaggcagagtaatgagaaagtttaatagtggaaaaaagggaagacttcagatatgccctggctggagactgttggcccagaaaagctggaagtggctaaccagaagtgagcatcctatgagattggttaggggtatgtatttgacttctttggttggtcctaagttggaagcaggaataaaaattagagaagctgtcagttattaatcaagtcctagttgttttgggccaattgttacaggggttattatttggcttccaggactggttggtagagatattaggttggtgcaaaagtaatcacggtttttgctattgaaagtactggcaaaaaaccgcagttacttttgtaccaatctaataactgtctgacttcctgtaggtgtgactcatagacagcaggctggcttcctgggctggttactagagataatgtgtgatttcctgagctggttgctgcagattgtgggtcagagttcatatgggctcttaggactcatttatctacagtctggccattgattgcatattctgtcagttcaattctcttccttctagatcaggagccagcaaactttctgtaaagagctagattaaaaaaaagtattttcagctttgcgagccttacaatctcagctgcaattactaaactctgtcacttaagcacaaaagcagcagtagacaataggtaaacaaatggatttggccatctttcaataaaactttattttcaaaaacaagcagcaggcttgatttgaccctagggccccagttcactgacccctgttctggactgaagaatttgcacaaaatcaacaaatgtgcaaatagcaactctctcctcctatgttgtgattcattcccttttggtctgtcttaatgctattgaagctgtgatcattgtagtctagtttcaaagtggcatcatattaaaaaaacatagttcaacaaccaaaaattttttaaaatattatttttcccctcctctcaaaaggtattagcactcatttaattactaaagcaatacttctcatcatagtttccttctgtctcatttctctatagcccatactcccatttatagcccatattcccatttaagatcctcttagttgctaaaacccccaaagaaagcctctgccacgcacaaggaatcatcattccctcaacacatcacatggcaggcaagagtaaccttgtcaaattggcaaaggtggtctgtccttagccttgaacccttgtgtgtacaatatggctgccatagttccaggcatcacaaggagaaaaaatagtatccagagaaagtagaggccatttcttgcctgtatctccttaagagtgaagag

SEQ ID NO: 42190 - DNA, 2412 bp, Homo sapiens
tgtctctgccaggttttgaatcaggatgatgatggtctcatataatgagttagggaggagtccttcctcctcagttttttggaatagtttcagcaggaatggtaccagctcttctttgtacatatggtagaatttggctaggattctatctggccctgggcttttttttggttggtaggttatttagtactgattcaattttggagctcattattggtctgttcagggaatcattttcttcctggttcagtcttgggagggcgtatgtgtccaggaattcatctatctattctaggttttccagtttgtatacgtgtttgtgtatataatggtgtctgatggttatttttatttccggggtgtcagtggtaacatcacctttgccagttctaactgtgtttatttggatattctctcttttcttctttattagtctcgctagtgccttatctatgtttattttattttcatgatgaacctatgtagtaccaccatcaccccctatttaacacatgagaaaattgaggcacatagaagttaaataattggtacatgacagaatcagaattttaacccagagtcataattttaatctggccccagaacctgctttctcaatacttcactcagtgcctatcacagaaataagcaaaatcttacaagcagggaattcagccttaaacctccctgaatctattattgaaatttgcatggcccctgtaaatttgggaaattaatgcattactgcctactccaaagttatatataattgtaaactctaaagcagtctgtacaaataagaaattgaaaaatttttttcagatactacaatggtccagtcatttcatggcttctaactaaagatctgccatactgtgctccctaattttgatgggcttcttattttccatgaggttctctaggcttgaaatatcataattatcctagaattaagatatttactgaatgtattctatgtttcaaacagttgaatgctgtaagggacataagagagacagaatatggagatcctaattttatcagtagagtgaaaattacggtttcccacatcgtgcctctgggaatattgaggccttggtagtcatcagtttagacaagaggaaagttttgtccacaagtcactatgtagtgcctaggggtgtggaaagaagagacctctgagtgtttggtaaagtagagttaatcagtaccatctttaactgaattgttttccacataaaccaagggctaaaggtgaattgggcagataacacaaataattgctttatttcaaaggtgagtcatttctggcctggggcacttgatccagatttcagtttgatttcatcacattcttacagtcacttctgctttagcctagagattaatttctatcctggtggactagtatgaaaaaactattccacaagatgtctgaaggtttaataattaaagcagatgaagatctgtaactaatcgaaggttcaaagtaccaggagttttaaacacagagccctgatgaacagcatgcagtctcttacaatcagcgttcacctcaaaaacttctgagttcacacctcttttcttagcattccctttcttttctctgttggaatccttcccatcccctctcccttcaatttttttcccacatttcttcctctcacttgcattctctaattggtcacagtgaataatggaagcaccaaaccctagatattaagagcaaaccctgggttttgcagatgaggaaactgaggcacaggatggaaaaggggtttgaagcagtcagaatggaaacttggctctttggattcaccaaccgaatatttttatatagcatttaccaaaagtatttaaaaatattatttttttgtcatattataaaatatttcatggccattgtaaaagatgttcaaaaatacagagactgtaaagaaaaaataaaaatcacttactatgtcttcacccagagataaccactattaacaatttgggtatatttcctttcagtctcttttccattcaaatgagcagacattacatttattttaaagaaataggattctactgtaagggcacatttgatcctgtttttttatgcttactttttgctttttagcattgtctcattgatacaggagttaaaaagaaatcattgggcagatgtgagggtatggaagttctcggtaaggcttttctttttaaggaaaagcagccccaaattattttctaacaaagagcagcctgtaaaatcgagctgcagacataaacaagcaagctgggagcttgcacaggtgaatgccagcaggaactagggactggacatgtttaagacggcagctccatctttctttgtctgccagccacatgaacagtaaggagcagacaagatgggccggccaaggataa

SEQ ID NO: 42191 - DNA, 3235 bp, Homo sapiens
ataccccagacaacatagctgcttcatcatggcagtgaatattcttaaaaatatgacttttgatggaggcatactatttcaatctatggctgctgcatgatctgtttaactacttgtggcacttattgaataatgttctctgtttttgatttaaaagcaggtgagtgagacacttcatacgtcccaaaggagaggggagagaactccaacaattctgaatgagttgcttttccttcatagctttcaatttttcttcccattgtttttccttcccatggtttatagaccctcacaagggagaaaaaggatgcttttgcactctaaatgtgctgctttcattaccatcattgtctagtgacttccgttcctcttatgttcccacattgattgggtacagagtccacttcattctgtgcttcctcctcttgcaaccagtcttcatcttaagaaccagtggctgctcgtgctgcctgccttatgtggatcacccaccccactggctttgctcaaaatacttctccttttttatttttagttttgttaacttgttctttccccctcctttctcttttccttacctccttccctcctttcatttttttcttccctttcttctctctctctcttttcccagctttcctgcgatataattgacaaataaaaattctgtatatttatggcgtacaatatgatgcctgtatatattgtgaaatgtttatgcaaacaacctaatgaacacatccatgacctagcattgttattattatttttttagtggtaagaacatttatgatctactctctcagcaattttcaagtgtgtaatagattattatgaactagagtgaccatcctttatcaacatcctcttgaagcagaaaaagttcctgctgggcacatgccaagcatagacagagaaggctcaagagaaacgtgtttattgttggagcatagtattttacagtttacaaatccttacctgctctgggaaaggtagatagagatgtctctgaggtgttggaattacaaattagacccagtgtttggaattcttttccattttgaagatgaggcagtatagctagtgcagtggataagagggcagactttgatgacaagcagacctgtgcttgaatctcagctttgtctgaacttgctgtgggactttggttagaccattcatgtaaatcatctgagcctcattcttcatctgtatttgggaataataaagggccctaactcataggcctgggcaaggattgaaagacatagtctacctgaagagttcagcatggtgtctggaatgtcaaagtagtaaacaaatggtagcaaggaacatcatttatcctatttgtcttgccctggtgttcttacattcaaggtcaatgttttatcttttcagtgaataatagaaaatgaaaattgaagtgatagccaaagaatgatcccttacatatatacatacacacacacatatgtgtttgtgtgtatgtttgtgtaaaataaacatacttcgtttaaattaaaaatgagagttttaaattaaaaaatgagagattttgatttttagaacttgttgagaagttggagatcaagtttaagagcatcttaatagacttatttaaagcaaggtacttaatttttcactttctcaatgcttatagccttgtgaaattctacagtgaccaactttaagggtctgggttccatgcactgaacttcctggataatggtctgtttctgcgaagctgcatgattgagcttcctggttccaggcaggcagactggccgccctctggctttggaaccggattggagctgtcacatccacttactgggacccacatgacctttgttccacacttgaggctgttctctgtgagccaaatatggatgtacctggcatagaatagatgttctttgctgtgagaacaatttggagtaatatttgctcataaacgcagtcgtttcctcagaaagtaatgcattagcagcttggctggctgattcctgctgttctttcaggctgaacagcagcagtgtctgaatcaccttccggaagcaccttgtggcaattcgctaattatttttatgatgccaggtcagcagtaaaggtggccttcctgcttcgctctttctccagagccacgtgatggaagagactatttttcaaacctgagtttgagtgcccagcctgccaggagaggaaggcactgaatattcaggctgagttgctttgcacccttttccctttgcatgtccttgtcctggtcttggtattttgtccccggaaagcgtattattttctgagggctgctgtaacaaagtaccacaaagggggtggcttaacacaatagaaatgccttctttcatagtctggaagctagaggtctgaaatcatggtgttggcagggctatgctctctttgaagggtctaggggagaatctgttccatgctttttttttttttttccttttttagcttctggtgttgccagcaattctcagcatgccttggcttgcagctgctttgcttcattctctgcctctgtcatcacatggcattgagacatgtcattctcccaggtgtctgtctctgtgtctcttctccttataaaaacatcagtcatactggattaagggcccactctaccccactttgacctaatcttaactaattccatctgcaatgagcctatttccaaataaggtcacattataaggtactgggggctgaggattttcacctcttttagggggacatgattcaaatgataacaaaacatatccaagcataccttatttatgaaagctggggcattattcctaattatttttcaggtctgagactggttgggagctgttttgtttcctttgtaggtaggaagagggtggctgagctctgaactcaagctagtggtgtgcacacatgttttttgaacatgtcgtctgtgagctacaatcgtttgggtgaacaaaactcttttcttatttttatgagattatagtgttccaacaaataaagaaaaagaagacttctttctccttgctgagtcaaggcttgtattctagggttccttcattcctgtaacacctcatccatgacaaaactcttgtttccagcctggagggaaaaaaattacagtcatattaaaagtaccacaggaaagttaaaaccctggcgtcagtcatttcagaaaaggctgaactcttttaactaaacagagcagctttga

SEQ ID NO: 42192 - DNA, 890 bp, Homo sapiens
gaattatctaggcaaagtttgggaggagcgacctgactcctcttgactgcttatagtaaaatgtgagaagagagaaataatttaaagatgaaattgctaatcaaaaggaaagcagaatgtaaagatttggaacattctcagcctattcttattgaaaagaatgataaaacctgttcagggaaggaacataaagggtgtgcccaatcaacttgataaggagattagtttagatctgccatctgaacagaagttcagggctattctccaagacaatgggagaatgaccgtgaaggcaatttagaaatcatcagggctgccactaccatcgcagccacagagtggaagagccctaggagtaggatggttttgaaaaaaggaccgctgcttcctctggtgctgtgcttctttgccaccccaggcagggccacccctgccactctttggcaggctctagtgcaacacaggcaacacacagaatactgaggaaagaacattgactcaggaggccaaatacttggatttgaggcctacttcggataaatattaactatttgagataggaaaaatgacttttaccctctatttcctgggagatagaataatagcttctctcccttataatctcaccgggttattataggatcataacatctatatatcaaaaatatctcagagttttttttttttttatgggtttgatgagtcaatcactcttggttctgtccctctaaagctgcaagagccatgccaatggagctttatgttacagtttgcttaacatttaattgaggtctcaggtgaggctggggtgcctaagattcaagcttttaaaaatggattattatgctatggactattttccctctctctctttttttaaattttacttt

SEQ ID NO: 42193 - DNA, 1769 bp, Homo sapiens
atgatatcctcaatcatggggccagctcatctagattgccagggtactgcattaacagcttctactttggacaggtgtgtgttaaaaaatgctcagctttgctctcatcgcctcaaggaaatctttctcatcctctgcctaaccttcaactccatttggtttggatgtttctcctctgagctttcataataacctctttggttttattgtattaatgttgtttctgtcttcccactaagctttgagttctttaaggacagcaactgttttagtcatctcagtagctccactcttagaattcaaaatggaaaacaaaataagtaagttattcaccagattgctgtgactcttttcattaaggtattaagtggtgtgtatgtgtgtgtgtgtgtgtgtgtgcgcgtatggacatccacatatgtgttcatatcatttttattagaatttggtacctttactcactcatatgcctgctgtattttcttttcctatctcattcacataaggcagcatctctcataaatgtaaaccaaacctagttgacatgaaactcctatgcccccaaggaagacttaaaactgcttggagtatcttttcttgctggaaggacaatttgaagagtgtgtgggtcattgaaagcaggagagggatgcctgttcattctgctgaaagacttctcattatgctactggccacaaggtgtccatctctcagtaggaagaatgcatagcttctggagagtgtgtcttccaccacccccagctcaagggactttgagaagttgtttaaggattgtgtaggtggcttgagactctatccaaaggaataggaatgtgtgatctataatagttactcaatgactaagctacaagcatcacaaggcctgcagatgactaataattattctcattctacagggtatggtttgcaaaacaaagtaagcaaggcctctgctcttttgtcctgtgagtcattcctgtaaaatgagtaccctgggctccagtggtaaggtgcagagagtaccaggaatactagctggtattttccacttttctccctgcctgctctatccacctatctcccctacagtcgcagtccttttggggccacacttccccttgaaagccttgaggggaggctgtgctgtgctggggttaagaatccgactttgacttctaacatagaggctcacatctggactccctcattcccagatgtgtggcttgggcaaaagacttagcttctctgagctccagtggttctcattcttaggtggagataatgaagtaagttatagaattgttatggaaactaatggatataaagtgcttagtatactgccttggtgcagactaagagcccaagaaatggtaattattattaagattagctaaaagttttcctcaggctgtctgcaaagagtgaaatagctgtacaatttagggacttttttaaaaaaaaaaacttctctaatcttttgtttactcatcttaaaaaccaattataataatctttaccttgcagttttgtaggcgaagtacagcaggacatggcaaagtgtatggcataatgtagttcctttacacatacatattttttcttttttcttttcatggtggatggaagattcctttggtgtgttcaaattcctaaagtagctctttcaggcctttatggtagaaggtgttagttcttcagcactaaccccagaagactggtttcctaacactggcatatacactgatgctgggtatttatctgccttggaa

SEQ ID NO: 42194 - DNA, 1871 bp, Homo sapiens
ttcattcatctaacaggacaaatattgagcacctgccaccagccacgtattcagcagaggatggaggataaagtgaagaatgggacaggcccaatccttgccttcatggatttctccatttaagtaaacacacagctgaaatttggagggatatatcttgatacaggaatatacaatactatgacagtaatagcaggattgataataagcattgtgataatatttattgctgggagaatgttgttttagtctttttaaagactcacgcattgtgctgaatgatttgtgtgaagtatcttattggactctcattccaagtctgtagttaggtacagttactatctttgttttacaaataaagtacatgaggcccagagagagtaacttgcccaagtttatatagcccataaaggtggagtctgggggaaggggtgccctgccccgacttagcaaatcaggatgatgtctctgtacttcttgactctttgagtacactttggagctgcagagattggggagctgagtggatgtcagagtgtatgttgtagaagagaagctgatgtttttcaaagcattgcatcagcataaagcagggccttgcacgcatacatgtgtgcacacacacactcaaaaagtattaccggcagaaaagattatgagacaacacttttattttacaagtgagaaaacagaagcagagagagctgatggcacaggcacaggctttgccatgctggggatgagatccaattcttctgatttcttctttgagggctctttaactcaccccgctgtgactcagctttcacagggtgctcttctggcttacaatcccaaggttcgagggaaattccacccgatttcaccaaatacattttcacctgacgttgcataacgaagtcacctgagcttgcagtgattcactctgcaagtaccttgattcacccagcccacacctcaaatttttgatgccccatttcttcccataagcaggcattgtgccttcagtaggtggtggagaacttgtcatgagaatgctataatcctttccacatgtttgaaattggtacttttctaagttccttagcaaccattgtctcatacaatctttccaagagtcccgtcaataggcaggaaagttgccattatcaacccatttgggagatgaacttaacttgggctcagaaacgacctgcctcaggctcctcctgggaagtttatgttattgttatggtaacaggatgatggtcactactaaggaactccagccacatcctcactcgccctcacacaatgtcttcacagtcccatctgcatttgctccagctgtgtttccaccaacaacctcagtgctggttcctccttgctgagtcatttaggctgactcatcttctggactccagagattccctaactgcatgcttcagttagggaaaggtatgtttgtgtgtgtgtgtgtgtgtgtgtgcatgcatgtgcatgtgtgaggtggtccttattaaattcttatcagaacacttcagaatatttgaactggccacgacctgattgcttactgatatctgagtgtcccttttccaagatagaaatgtagttccttgctcttttccaaatctgatttgcaatagctgctgctcctatagatccagtcattttccccttttttctctcttttcatttattgattccttcttcttctaaccaccaccaacagtttagccaagataatgtaaacatttctctagagtctggcccagtcaattctcttagaggctcatattgtccttaaaatctaaatgatgcaatgaaagagaactttgtttctgagcagttccttgaagactattgcttgaagacttcatccaagttga

SEQ ID NO: 42195 - DNA, 1006 bp, Homo sapiens
ggtttttcactggttggtatgtgtgtatactgcagcacaactgtgttcagtaagtgctttctgaatgaaagctcaaagctccagagctcgaatctcttgagcaatgatcttcctatctgtcattttctctctctgacttaaatctattctctcagaggttagccttactaaaaatttggttcaaagccttgccaagtaatgtgaaatatgacagatgtatttcctatggatcttttactcctggaattttccatgtgtcaataatttcctaccctccagtagattttgatctagccagattccttgcctggtccatgaagggaaaacagaaaactgaaagaccttgaactccttcttgtactccagttctcatgaactcaaaacacaaactcatttaaagttagtgtggcatcatcagctgaaagctgagagtaatttaaaggcttttcttctctatcagctccctgagcccctccaaacagaagcattttaaactgatgcctcttgagagttctgtgtatggagtgctgagaatgaatgagattgtctcccaccccagagggtagcagaaaaattctgattgtggccaactatcttcagcttctggttttccctaagatccttattgtagggccacttgttctttttatctagtaggtatttgatgtcatgatgagattaataattcacagagtctgggcagtatttttccactgaaggctgcgtgcagaaaaaaagcagagtgctggcaaaacccgagggctcctgacgaggtcagatgccttgtgcttcagcaagtgctcagaatcctcagtaaccccttccttgctgaaaatgacacatagaaaggcagggatttttaaaggactttttgctttcttggctggggttaaaacgagttcaattaaatagacctctagagatggccgaacaacaacagtgacaaaatgtaaataaaattttaattatcacttccaaataataatttaagagggattatcaaatc

SEQ ID NO: 42196 - DNA, 985 bp, Homo sapiens
gggtgttgagggattctggtaatagtaatgatgttattatcacagctcaactgagcctcagagtgactttcctgatgttcacaattggtcaagagtaaagatagagtttgaatccaattcttttgatatcaggcctcctaactttgaatccaattttctgtcctctatggaactgttggtgcctgcatatagagtattcaataaaggtttgctgaactagattgaataaaactgaaggccaaagggagttttagccctgcctttccaatgaaggcaatttcctattgaccagactctcacctttctgttctgcctctgagttcatttgataagagacttgatttgggcttgttttagcagataagttgagttaatatttattttaggaaagtgggattagtgaagataggtagggaatgaattatacattctctgagcaactgaaggtcattaggaaaacatgcagctgccggagatttccgggtaaggcttgcacagtgggggctggaggtgatttccaaatgttgtggtttctatttattggagttactttggaagtggtgagctgggacaattacgctgttaattcagataaaagggaactttttaatagagagagtgacaaatcactatgtaaatatggagaacgcagcttccaagactggcagacagtgcaaggtatggggacgtgagaatcataggatttgagtgttttgctgactctgtatgagtcagaaaccaaaagaggggcatgaagtgagagaaccaactcaactagcaaaagagacccggcaaggggagccattctaatgcagaatccaaaaagtgtatacaactcagggagcatttagaataatgttagcactagaaatttttgttttgttttgtttgagaagcaaaaaatattgtgtagacagaaactaaaggttgttattaggcaataataatagctagtagatcattctttatcctcacatctcatgtg

SEQ ID NO: 42197 - DNA, 514 bp, Homo sapiens
gaatttcagagcttgatggagtctttgagattaagctcaacatactacaggaggatagactggagaccagagaagcagagcaatgggcccaaggtcacacagggacagaggcctcatggtgagcaaaacaccctaagagactttgtagggtctgggtgcttctggccatgccaagcaggcctcctatcagttgccctgtgttcactctgggctgatcgcagtcccagggcacaccaaagtcatgagtaccatcgggctctttgaagtcataatcgaaccaattgtggacttgctgtttgttttaactacatgccctcgtgtgactgcagtttttgtttgaccaggtgtagagaaagggcacaggactggaaaccatctaacctagaatcctgtttgtcactggctccatgtgtgaccttgggcaagtcacttaaatcctctggttccaatctccagctctatcatacggggagggaggggtggggctgggataaacaacactttcctatcagtt

SEQ ID NO: 42198 - DNA, 1107 bp, Homo sapiens
tcattgcatggcagagggcatcatcagtacatagcaagggaacaagagagggggctaaactcattcgcatggtctaaaaacatcttaaaggtcctacctctcaacagtgttgcattgggaattaagttttcaacccatatgctttgggagatacattctaatcatagaagagtgtctccttctttgtaccaggaagaaaaggatgactacatctctaaagactcttatcaatggagaaggcactgacttaatctgcataacaaaccttaccctgtttactgagcttttcctgggtatttctccataaccagccttccccacaccttttttccatttcaacagacatggtatttaaacctgaattcaaagccacttctgtgagatttattcacttatccttgcatatatctgatgtatacttgaaatatacatgttaataaactcctgagcccctttctcttgttaatctatttttttgttacagaggtctgtcccaactaagaactatcaagggtagatgtttcttcctgtacagctccatttcccaggctcccttgctgttagcattggcagtgtgactgtgttgactcagctctggacagtggaatgtagatggaagtgatgtactcattccctgatctaatccttaaacactttctgcacaagccttctcagtttccttgcctcatctgctggcttgatgtcaatggccagagtttggaagtcatgactagaaaatggcagagcctatgtccacctgcgactctgaatacattccttgaacagaccccttgctcttaccaattgaaatacatgtcactgaaaaataatcttgcacagcatttaatcactgaggtttcagaatttctctgttggaacacctacccttgccttaattaatatatctttctaaagcagaaatttgacctgcttaaaaccttctaatctctgcctatcatctttgagatcaggtccagagttatctggctccggccctatcaaactctctaatcatttatctcaccattaaagtcacacatttcactttccagtaacatccaactacacgtcagttcccccattccccaggatagctcatataccttt

SEQ ID NO: 42199 - DNA, 1103 bp, Homo sapiens
cacagagcaggcaactagccccacttggcaaatcagaagaggcaacagcagagctgagccttggagaaccaggagcagttgtcaggtaaagcagggaggcatagtagaagaggtgtttcttgtttcctttccatttacgctataaaaatattcttccccttgttaaatagagatgaaagggaagcattaaagatctttagtgtaagcatgacatgatgatggggcaagctggacagaagccaaactggaggcaggggaactagttccaaggctcattctctgctttcctccaggatgagctgtctgctaattatctcctgcccatgaagccacaggcccagaggcccataatgacacagcactgaggggtccctgcttttactagaattattcctgataagcttcacttgacagaagacttggcttccccagtctctgattcttttgtaaatccccagaattcaactaaggtctctgccctggagcttttgtaagctgatctcaaacccaaaaacaccccccttgactgacaatcctctcagggtggaaccaagaagaaagatattagtctaaagggaaaaacccacagaggcatggagttccccttggctaaaggaaaaagcatgtgcacagtggtgtggcttaaagaatgatagtactccttgaccttcaagggttgggctcaagttcatggttcttttaaggctgtcagaagccacagtgagtcataacgctgtttgtcctgggaggagggagggtgatggggtgtgagtcacaacggagagaaggactcactagtatggggcttgggaaaggcccgtaatagtgacgtcttccagtgtcttctgagttctcatgtttcctttcagactttgagctgggcaaggggcgaaaaaggggactatatggtagtctcttattaattagaatggataactagagaataagggaaaaactaacaaaaaaggccagagacaagactggccctggggaatgtgaattccaggtcatttataaaataataataataaatcaaggttgtcttttgtctttcctgcaaaaaaaatgtgacttggtagcaccacgagtgtatgagtgatctt

SEQ ID NO: 42200 - DNA, 746 bp, Homo sapiens
cttccaactctcttctgcaaatcttgccctaaccttttgaaatgaagaattgtttggcaaattaggaacctgattttctgcatcctggtagcagagaatggcttgccaattcagttcaggcacgtaatgctggaggcagagcaacagaagagcctgaaagtctgacctgtgcttctagagctctgattgccacatgatgaaaactcagggctgacatcaccagtctccagcctcccaaacatgagcccatgtggagagaatgttataaagaggaaaaaaataaaggtcatgttagagtgaatgataggtataattaatgttactgacaatgaaaagcttaggtgctgagagaaaaatgagtcagcagtgagcttgatgttgaaactacatgctgccttgttgctcaaatacttacctattaggaaaaaagagcaatttcctgatcaatgcacacaaaattctgggttgagaacactaagtgaaaagtgggaaaaaagccacttgtgtgttttatttccagcatgtgcacagccacatttatgcataattttgggtttgtcattcccctttatgagtttttgtgatctcagtgttttagcatgaaggcctttcataatctgatcgtatcttccctttctatgatcgtcctccctagtctcttctctaaatatccaaatattacttcgtcattccagaagcagctctacctagacatgaagccttccctggtctccaaatcagaaatg

SEQ ID NO: 42201 - DNA, 1009 bp, Homo sapiens
aatggccgacatgatttgcctgttaaaacaccgaattgcactttactctataacctaatctactctcgatatttctaaatattttttcattgttttccaggaatctttaaaagtcctttggcaccagacaccatgttttccccctttttaaatacactaatggttttgccaaaccttaatctattgaaatgtcgtctgcacagagtctcttgccaatatagatgcagaaaacatactcactgccaacatctaatggaggcgacctattatgtaataatcaaagacaacctttcccacctaagaatttgaatttgaaagccaaaaatccatttcctggaaaaaaaatttgaaaaattgtgttaggcctaaaattcaacccaactcaatgtactgctatgattatctattgctatgtaacaaaactacccaaaacaaaacaatttatttttgtcctaggggttgactggactccactggtaggttcttctgttgggtctgtcatgtggttgtagttggttggccattgagctgacttaaaggcttccctgaactatggccccaagatggctcatgcacatggctggcagttgctatgggctgttggctggcaacacaacaggggtcattgaccagggtgcctgttgcaacttcgggcattcaaggctgtcaggcaggtcaactcaggactgcaacaggcacagcagccaacagccggctgagatggccccattgttatctccattacatcccctatacacaaagttacatcattggaagccctttaaactcatggaaggatcctatgacatttagaagtcttgttctttgtgcggtgtgaagacctctagaactacattctaacatccttggaggctagttaagtacttgactttcagttggtcaagcctgagttcccaactgagtagtttttgtcaactttctaaagctcttctataaaatggagacatcacctcacaaagttgtggtgaggttaaagaaggataaaatg

SEQ ID NO: 42202 - DNA, 688 bp, Homo sapiens
ttgaaggagggatacagctaggatcaagagtttggtcaactcacatgtggtagctctcgataaaatgagcaggatacagtgtaggtgctacagaaagacagtatggtatggtatgaaagttgggcatgagggcagaggttgctggaaaattgcaatgatggccccagttttccccctgcccctaccccctttctctgctatgcaactttgcagtgccctcttactctgagctaatagcctgggcatgctcatctggtgatgacagaggcacagaagagcaaagcccaaagttcaaggccatttgaagatataacttgtgtcagatctgctaacaacccattgtccaaagcaagtggcatggtttagtccactctcaaagagccaagaagaaaagtgacatgagtgaagtaggctctatgagccagcaggtgtgtgcacaatggtacagagaggaagaccaaagttcagctagcccctgtagcctgctagctcctgtcttccttcccagccaactttcactcaactgcacaatagaaactgagggaagggcatggtggaggatgtttttgatctcttggaagttccatttctgccctctcactcattgcgacttgaacaggtcattgcctcctgcttgtcctccttcatttttctttagtgtaaatccttgctctaaactcatcccatt

SEQ ID NO: 42203 - DNA, 1081 bp, Homo sapiens
tatggatggtactaaaataaccctagatccatatgagaacagtcctgtaccagagctaacaaattccactggagaccagtattgtcactaattaaattctatccagagtcacagcagtgacacacatgctttttttgtttcttcagtctagcttttcactgattgtttagaccctgtgagagcaaacctttaggagggcatctcaagcccagcatcctcccccttgcatgacctccagatccattttctcatacctggtatgatcaataatcctcaacgtttcaggcacctggttgcatcattttacccagaatgactctgccttcacaatcactcacctctctagtgtcagctcatgatttgtttgtttgagttgtggtttttaggacattccttactttcttgtgggctcagcaatgcacaggcaagtatggtttctttgtgatttattcagcatgtagatattccacagtataaacgctttccagctcatcttatccaccacatggctggaagaggaaattcatacagacctcagggataactctaattaataaacggctgttctctgggccccaccagccagggagaaagaggaccagacacttaactttcatccctcttcttcccagccttttcaaatgctcccagaagagtgctgctgggccctaggagaatgcctcttataggtgctgtgaagtttacatttccaccttttctcttttgctctctagattgcaatgctgctatttctgatcaccagagacatcaaaatgttcactctgtctcccttgtccaccaaatcaccctctgtttgctcctgctgctgctgtttctgcccaaaacccgggacaccaacttttggatgaagaatgccaataccaagagtcacagcaccatcccattcactctaggctggttcacccttgtgatgaagaccaccatcccatggctattggcatctttattctccacttccacaccaatcatagacagaacacctttctatttttcgtcagtgagggaggctcagtgtcaaagacattcattatccctataagcaacatgctttgagtatata

SEQ ID NO: 42204 - DNA, 1123 bp, Homo sapiens
ttgaaaatatgtctcttccctttcacccatgtcaatgcatatcaaccacaatcaccctccaaggctcatatatgcagttatttctgatacacagtgcctaggacataatacatattcaataaatatttgcttagggaacaaataaataggtctgcttggatgtccaaacgcaataaaggcacaccacagtaccagcaggtagcgacacacctctcccttcctctccctttaaaaactactcgaataagccagacaataaccattggcatcaaaccctgtttccttctttgaaccaccccagttttgccatttctcttgcctccttttttgcggtacttgcttatctctacctcatttcaccacctcagttcagttttggcgccttcccattgttgcatgctattagcacatctactgaaatgcctgccagttgattccaactttgtcgcaatatttcatatcagaccttttggagagggtcagaggtgtgctgtcagctttccagaaagaaacctccagcaaataccaggtttcagtttcactcagctctgccttccactctaccttactggtttttaaatagagtgttggtacgtccagagctgtgtaccttttgggaagattgccctgaaagaaatcgcagataaagagaaattagtctggaggcagaaagttaagaaaatatacgctcatccaagtgaaaagaaatgaatgagctaaggtggtaatgaagagggagaatcagaaagaaatgagagacacattaagggaagcaaatggcctggaaaagtgattggatgagattcagattcagcaagctatggtggactggtgatctgtgaagcacggtgctgtatcagagaaaatggcctttatggatcagagctgccagagaaggtgccacagaggtgatgaaatgggagctaagcactcaatgacaaagaataagatgtgactccaggtgggagacaatgattggggagcatgtggtgggaaccacagaaacaagcatggatcctgtagtatccctaccatcaaggcttgatagggtttcaaagaattgctggacatctattatccttctctgcccagcactcatttcttcttctgaaaacaaagccca

SEQ ID NO: 42205 - DNA, 2013 bp, Homo sapiens
tttaataatattttttgtagagatggtgtttcaccatgttgcctagggtggtcttgaactcctgaactcaagctatctgcccaccgtgacctcccaaaatgctaggattacaggcatgggccactatgcctggtccaacttttcttcctaataggatcactctttcctcttcacaaactccatacctattccatgcctcctcactgcacacttctgttcaaacctttttctttgtatcttgaacaccttctcctctatttctacctctccaaaccctatcattcttgaagtctctgttaaaatgttatccgctccataaagtcttccttgtttgccaccaagtgacatttcctgtctctgaaccctcattttacatcttttacacctttattgtggcattaatcattttctaatttatatttacttaccctccttttctatctctccccttattttattgaagtcacagagacgtctgtaaaatgagagtcaaacaaataaactggaaagttcctctgtccacaggactttcagagagaagttaaatgtgtaatcctgataccttgaccacagctaaatggaccaggatacgaccccagttcaagaccagccaatccctagactgaccagcagctatgaggcagcagacaggggtgacagtgatatgctggagctggcttatgctagcttatgggccccaactgttccattttcaggatttgaggagccaggtgacgttatgttgacagcttgaaaccatctctcgtaggagtatttgtgccaaggaaattggcaacacacaggtgtcagggtttcccctacccccacccaacctcccacagagaaccagttattaaacattaccagcacaacactgatgatagcaaactgaaccttctccccaggcagtagaagtgtgagacctacagaatgagccagcggtccttaacacaaacaaaggcagaactaactcagagaggaggctgggtgcaaaagacaggacacagacaacggcatgaggcagcaaaagccacaaggctgagagataggaatagaaataagctggtcagtaatggcaggttcagaataagcagaggcagggagtggtggaattgtgacgatgacaaattcctggagtagaaacaaacaagtgcctctgcctcgggatgatgactaatcctgcctcctggatgctttgctggatcccacatgacctttctaattcctactcatctgtggggctggctttgcagggattccttttttcctcactttcctgcctcccagataaactctcatcacagaggacgtgcagcccagagaacacaatagagtgaccattgcactttacagctcataaactgctttcacatctatcctcacattgaatcctcatgataactttggcaggcacacaggacaccagctcttgtgagcctcagccaacacatgagataaggaagctgaggctcagagaagctgcaagacttgcccaaatatatgaggctagaacaaaaaagaaatgacatatgatcccaggtcctctggcctcaggatcaggggctcaatccactttgggcataggtgagctgggaagtccacataagatgggaaatgctttaacactttgtcctctcagatcacagcccatgaatgacagcacggttagtcaaccatcagaaggagcgaagaggccaagagatagaaaaagtgagagaaaaaagaaaatgaaagagatgaggagaaaatgtgatttggaagtttgggtatcacatataaataatataatatataggtatgcacacacacataaatatacatgtacagtatacatgtaatatcacattatgtatgttatgtggcatcagacatacctgggttaaaaatctcagcttccctactcattggacacgagaacttgaacaagccacttacccttcctgagactctattcataaaatggacattagtttctccgtccactttgtaagattctgataaagcctgatgaga

SEQ ID NO: 42206 - DNA, 1608 bp, Homo sapiens
gtggcctcaataaaatatgactggtttccttataagaagtggagatttggacacagagacatgcagagaagaaagatcatatgaagacatgaccaagaagagagccttggaatagaccttccctcacaaccttcagaaggaaccagctctgcccacaccttgatctcagactttcaacctccagaactgcaagaccatacatttctgttgtttcagttgctcactctgtggtactttgttacacaaccctagaaaactaatacactgatcttcaaatccttcagacggccctacctcccacgaatataaatgtgagcctctttccttgctctcttgctctccatgcaatggaatacatacttctttctccacagaaggaggaaggaggccctcaaatcctttacaattttaaggcattttttcctttaatattattatccagcagccttctacaataggcagaaaaatcatgaagatagtttgactggagagatgacaaataagtgccattttagtttataaggagaattaaatttttgtgaactaaacattctaattggtatcttaaaatttttcattaaaaaacaatcctggttcattgagtttacttagaaactttggctgtagtttacacttagaacaaatggctttaatttcattatacactaccaaatcaaccaagtcattgtacacgtaaacttaaccttcatgtcttgcaaatatgtgtgtgtgtatttttttcctggtgctttactctaatttttattgtttaaatttttttctttattgtttctcagtaactgagtgttccctaaaccagacagagaaaaaaaaaggaaagacattctcaatcatgggactgaggctgttagatcccagaaattgttttccaaagagtaaatcagagtacttttccacttgaatcacagtacttttccaggactagctataggatgatcttggtacaaatttatttgtcgtgacagaatagagaaaatttagtgctattattttccacaaacccttttgaacacttttgcaagaatatcaaaatgccaggtgaacattgtttcacttaacatgacccagtgttaataattaaacagggccaagcattctgtaaatatttaaagccctactaatatacacttggcatcatctatgaaaaattcgggtacctgccacacatttggaattcaggtgtgaattataaagtgctcaacaaatttaaaataacagaaggcaagccacggtcactgcaggcaggagcactaagggtaaggagaagggctaattgacgtcctaacaacaaatgaggaagcaggaaacccataaaaactggtcacaagcatataaaaccccagcattcattttttatagaagcactgaatattaagtgtgccacaggccccaagacattaatgtaatacaacccaacagaaggagacaaagtcgctgcaatgctccctggaaaggcaaagggatcagcaaccaggcatttggaaggccccctgattagccaggccacttggaaaagtcatttaatctctcaaagctgctctttatctacaaataaaaataataattctgtcatttcctactctacag

SEQ ID NO: 42207 - DNA, 5699 bp, Homo sapiens
tgttgttggatctgcaaatgattccaatcaaatacaactgtacttggaaaaaaatcatccgttgttaagactttacattccttagttgcagaagtagttttttttcctgcacaataccttttaaaaaatgaatatttaatatgtcaatatatactctgaaaataaccatttatattttaaattctgagctcaggttattttctagacattgtaatttagaataaaaatacttctccagttctacattttgcctgactgttaaaaatgattttgagattaataagttgaaccaattttctattcacctgaccaaattctgaaccatttgagttttttaaaaagtactttttccttattgtaaaggcaacataaaacttggttcattggacaggatagcagagataaacattatacatgaagtatagttccctggggcaatgttgctctctttctaccatgtttatttcgatttatataaatttgagacactgaacagaagtagaattcaaatagagaatgaggacttataaaaatgtacactctgcctacatcagtaagagtatgctaatttataaaattaaatatttaatcttagttcacttgtaaaccaaaatcaagtaaagtctgaatccaccttctattgctttgggggtttgagtctatattctaggattcatttaatagtttcatttctctaagcatcaagcaaaacagttaaaattacaaaacagaaacataaagttcacctcatcatgtagtatggatcactctgttattctttatctagaccttcaaatactttatgtaaaatgtttctatacaaaaggaaacacaggattagttcctcctctaatgcttctaaagagctctaccatggaaagctctctcccttccattttgcaagtctcaacaagtctgctgctgagtcagaacctccttttttccctgatgtaagaactatttctcccttgaaaattcataaagcttaggaataaattagagtctccctggggggaaggggcggggacgccggaatgaatgtggtggggaggagtcccacgctgcagccctgatggcacacgaaaggcttttatgaagcggagctggcccggggttactatgggagctcgccgtggaacccgttccacgcatccgagtgtgtaaataaccacgcggagcgtgtttgttccagggactttgttccttcttacccaagtgaaaatgcctggaatatagccgaggcttcatgtttaccctacagaaacaccctcggcggctctacgacgtcggtgacagcactcctaccagcgcctaaaaacagaaacaagcttagagggcgctacctagggctacaaggaggccctagatcggggactcggggtctagaggtgcgcggcgaggcgctcagcggacttcaagccggcagagcccagacgctagttcaccacaggacccccgggctgggccgggctcccgcgttgcgctgggggcccctcgggcgcctatttctacgcgggtcgcacagtgcaggcgccggtcggggtcccgggcctcagtttcccccgcgggccagccccgctctgggaagcccgagtggtgcagcagggcttctccccacccagggcggaaccgaggtgacaggaaggaggaggcaccgcgaggggcggagacgcgtgcgacccaggcagactctgcgcggatcccgcgccaaggaggggccgttgcccaggaaccgtccctccctcccgcgcgtgcttgccctcgtgcgcgcgcccgcccaatgctcccgaccactgtttgccagccgacccccaccccaaccggcctgtccatttccccgggagcggagagacccaacgggacacgccgctcgctcccgccctcccgggagcgcgagcgcgccctcggctgcgtctgcatagtaatgaggggcggggaggggcgacggggacgcggtggcctcgcgcccgcgcgtgccgggacgcaccgcggggggcggcgcgattgtgaggtggcgctgacgcacgttccggggttcttaagcggccagggcggctacggcgactgcgacggcggcggcggcggcgatcgccgcgaggggtggtggggccgaagtcggtgccccctggctcagtcacggtgtccctctctcactgactccccctccttccaccacggccgcgcaaccccagcgccggcggcttcctaggtggggcaggggacgaggagcgtctcctcccgctgccggcggcctgataaatgagggatttcgggtttggggtgctgcagaccgccccgctccgaagtagcagtcctgggcccctgttctgcggcgaggcgtatggtccttacgccgtggggtccgtcaacccgctgccctccgccacgcccttcggcccactgtcgccaccaccgttgcctgtcaccggcttcttagaggccgcctcccccttctccgtccccctcggcggcggcgcgggcagcccggccgccgccgcttcctcttcctccccgttcctggcgcatcagcagaccatgcaggatgagctgcttctggggctgacacagcagccggcgcggccgctttcgggggcggcggccacggagaaactccccgaccaccaccccggcggcggcacgatcgcgggtgtgacccacctcctcccctcccaggacttcaaaccgagtctgcaccacccctcctcctcctccgcctcctcctgctgctgctgccgcacctcctccccgcaggacttcagtaagcggcagcagcagcagctgagcagccagaagaggaaagagttcagccctccccaccttccccaccctccggactcgaagccgccgccgccgcctccgccgctccactgccccggtcggttcagcccgccgccgccgccagccggcccgctcctccagccggcgcagctcgctcagcgccagcagcaacagccgccgcagcagttcagcctcctgcatcagcagcacctctcgccgcaggacttcgccccgcggcagcgtccggcagacctgcccccgctcccgcagctccctccctcgccgcctgcagccccgcggcgccgccacggaggcgcgggcagccctcgcaagaccccagccgcgggcgagggcagcgccgccgagtcccccaatgcgggcttggcctcctcgacgccggtgaaccccgcgccgggctccatggagtcccccaaccaccctctgctcaacagtcccagtaacctcctgcccggaggtgcgcttggcgcgggcgccttcagcagcctgcagagcccggaccttccacacccgggcggcggcggcggcggcgggggcggggggcccccaggaggcggagggggaggcggctccgcgtcgccgccgccgctgcccggcttcggcaccccctggtcggtgcagaccgcgtcgccgccaccccagccccagcagccgccgccgacccagccgcagcagcagccgccgccaccccagcagccgccccagccgcagccgcagccgcccggctcgtctgccaccaccccgggcggcggcagcggcggctcgctcagcgccatgccgccgcccagccccgactcagagaacggcttctaccccgggctgccgtcgtccatgaacccggccttcttccctagcttctcgcccgtgtcgccgcacggctgcactgggctcagcgttccgacgagcggcggcggcggcggcggcttcggcggccccttctcggctaccgctgtgccccctccgccgccgcccgccatgaatatacctcaacagcagcccccgccgcccgcggcgccgcagcagccgcagagccggaggtcgcccgtcagcccgcagctccagcagcagcaccaggcggcggccgccgccttcctgcagcagaggaactcctataaccaccaccaggtacggcgggcggcggcctggccgcgccgcgggaccgggagaccatgggcgggggacggaggcgggggcagggcagccggggacccgaccttagccccgagagaagccgcgacgggggccactcgcccaagtgagagtggaactgagggcggacaaccgtgacaggactcggaaccccagcccccggtgggttgggagggcagtggccaccgtgggctgtgggggcgtgggagacgagttcgcgctgggagccgcggctggccgggcgccccctcgaacgtcccggcgcagcagtggggactggggcaggggccgaatagcgccggggccgcgggcggccgggcgcggcgtctcaacccggccctcctagctggcgcaccccgggatccgccctgtgccctgggcctggagggccgccgccccggacccccgacgcggggaggcgcggcgaggaccgggggctggccgggggcctcggaagagcggccgtgggaagtgaacttgggcaggggaaaaatgattgctggagaaggtgcgtgcggaggagcccaagactctgtctcgctgtccaatgagggaaggcggaaaggcttttttttttctttggagtttgtttattcttatttggccggcggtgatctcgccttgaagcctcagcccctcgggcggtcagtcgagccgctcccaaagctccgcccgatcaacctgctggcagcgccgcaccctgggccgccggcccaggagggagtcgggagggagcggccgaccgccctcctcgcaggacctggttcccgcggggccgcctccttggctgtcacaggactgggaaagagaaactgttagtgaccgctcgggttcaaaccgagatatcccacgaatgtcttagtttctgtgcttttcaatgttggggtcatgttttgtgggttttaagacaaaactgaacttggatctgggattggtgtgtttcctcgtagactttcggtacattttttggttgccttaaccttctacaagggaatatgtgggccgtgtgtattttaagtaggtaatattgtgaaatgacactgggcagaatttttattttccggatcttttttgattcaagatcttttttgttattccctcaatacaatttttgggtgaccgctagattggtaaattggcattgaaagagtgtcttgttggttttgaatcttgttagcatttgttgcagagttcattctgtttaagtccattttctattttcgtgattaaggattgacagagacgcaaaatatgaccttaaccccataactttttcagttgaccaaagttttcaaggattagtctttttaaagtgaatattatctaaattaacccaagtgaaagttaacagtttatctaagttaaccaaagtgacagtgaacagtttttgttgaatcactgatttctttcttagaaaagagaatgtggcctatgaggattgaaaatagggattttgaaataatgttccactttttcatgatttttataaccctcagcaactgtcttttgtgtctcaggatcttcattttgttatctggaaacttgcccacagaaaattatctgtaggtaattttgtatttacttaaagttgtggtacagagcgttggaagaacatataccatgatccatatttaactgtaatttgcttttggacaaaagatgggtctagccatggagtgtgagaggtcacacagctttcatatggaattttagatcactggaagataactttgagcattaaatcatttaataag

SEQ ID NO: 42208 - DNA, 2672 bp, Homo sapiens
tatctaaatatatgaagcaaacattgacagaactaagggaaaaacagcaatagtaggatactttaatacctaacatttaacaatgaatagaagttccatatggaaaatcaatgaagaaacagaggacataaacaatactgtagaccaaatgaatccaagagacatatatggaatattccaccaaacagcagaagaatacacatttttttcaagtgctgaattaattacatgttaggtcacacagcaaatcttaacaaatttaagaagactgatctcatactaagtatttttttctgaccacaatgaaatgaaactagaaatcaataactaaagaaaactggaaaattcacaaatatgtaaattaaacaagacactcctgaacagccagtgaatcaaataaaaaatcagaagggaaatttgagaatatcttgagaaaactggaaatggaaacacaacataccaagtcctttggactgtaacaaaatcaggaaaaggaaattatgcagcaataagcacctacattgaaataagaaagaactcaaataaacagcatagctttgtacctcaagaaagtagaaaaagaacaatctaagcccaaagttagaaaaaagaaagaaagaaagattaaagcagaaatgaacacaatagaaaacagaaaaccaattaaaaaaaataaaactaagagtaggattttgaaaaagatcaacaaaattgacaaacccatagctagaattgaaaaaaaaaaaaagagagagagagaagacttaaattaaaaaaatcagaaatgaaagaggaaacattttacctgatgccatggaaataggatcaaaagaggctactatgaacacttatacacgaacgaattgtataacctagaataaacagataaattactagaaacatacaacctactaagattggattatgaagaaattaaaaacctgaacagatctataattagtaaggaaattgaataagatggcttcactggtgagttacaccaaacacttttaaataaatagatgacttaggattatgcaattctttttataatttttgaccctttttttgtaacttttaagttcagggatacaaaccttgtacaaacaaggtttgttacataacgtaaacttgcgtcattgtggtttgttgtagagatgatttcatcacccacatattaagcctagtaccccatttgttatttttcctgatccttttcctcctcccatcctccaccctccaaagggcaccagtgtatgttgttcccctctaagtgtctattttctcctcatttagatcccacttatgagcacatgtggtggtatcccaagagaaatctaaccgattttgtagtgtgactatttcagattctgttctgatttttatcacttaaattcctaggaatgagaagacatgataataaaaaatattattcaattattaaaaaattaatgccaatccttcttaaactcttccaaaaacttcaagaggaggggaagcttttaaacttattttatgaggccagtattaccctaataccaaagtcaaagactcttcaaacaaaatgtggtatatatatacaatggaatgttattcagcctcaaaaaagaaagaaatcctgccaaatgtgacaacatgatgaatcttgaggacaccgtgctacatgaaataagtcagtcacaaaagaacaaatatttatatgaatttccaaaaatagtcataggggcaaagagtagaagggtggtctccagagtttggggaaagtggaaaatggggagttgctgggcagtgagtataaagttttagtcatgcaaggtgaatgagtaagttctagaaatctgttgtgcaatatcatgactgtattgaacaatattgcattgtacacttaaaaatttgtcaagaagatagatatgttaaatgttcttaccacaattttttaaattactggagaaattatagggttttttttaaagaaaacatcctacttgttaaattaagtgtttctttggatgttagttgagtttggtgtctttctttcatattgctttcttcaaatatttgatgtattcattttctgttgctgtgtaacaaactaccacaaatttagtaacttaaaacaaaacgcatttactagctcacaattgtgtaggtcagaggtctgggggaacatgacagggttctctgctaaggacgtcacgtggccaaaataaagatgacggctggattggactcttgcctgaagactgtgggaaataaggtacttccaagagcattcaaatttcagcagaatactgtttcttgcatttgtgcttttgagatgtctgtttctttgctgtctggtggcaaggggccactctcatctcctaggactgaccacactcctgctaacgttgcttcctccttcaaagccagcaaaaaatgtgttgaatttttctcaagtttggaaactttctgttctgcaaccagccagcgaaaattttgcttttaaacggctcagctgattgagtcaggcccactggataatctctgtattataggatcaactgacatgtagctttaattacagctgcaaaatttcctcatagcagtacctagatcagtgctcaattgaaaaataagaaatgggaatcttgggagaccatctttagaattcagtaattacatgtggtgtt

SEQ ID NO: 42209 - DNA, 656 bp, Homo sapiens
ttatggcatagagtcaaggcagcacaaggtcaccacttggcagcaatatcatccagtgctgtaaagcattgataaggagattcacaagatgttctttaacaattctcctaattctaagtcagagcatcagtgtctactaatgaaatagaaacactctctttccatggggtgatgtgagtagtcattattggaatgcactcaaattttttggaaggaacgtgtttcctaactgagggcaccacgaacagtgttatatcactcaacaggaagccccaccatgcagtagtagaggaatagaggttttggagcagagctgcaggtatttgtgtcaaagggcgggttgaggagaggagtatagactgtattctccaaaattctgtgctaacatgaacagagatgcaacaaggagaaatgcaaaacggaatttgacccttggtttcagctctccagtggcaaaatctaaacagagcctttgttcaatacttggcacatcattccctaggcggcaatggtccattttgagaagacatatgacactctcagggaaacaggacttggaagaagtagaaggaccagcccatcgaggagaaacagagtgatggtgtgttctttcctcgggcagggctactctgtgcacaccaggatgcctctaacaa

SEQ ID NO: 42210 - DNA, 1525 bp, Homo sapiens
atgtatatcactgtagaaatattagtcattcattgtaagatgctgccaagactttcaggagtcttaggacacaactctctaaaaattttaaattctaaaaaaaaaaaaaaaaaaaaaaaactaggccccaaggatttcagataagagagtgtgaactattattaaaagctaaaagatatagtatttaaaactatttagcgggcaaataatcataattatctgcgcagggaaagatgttttccatctattctaacaccaacggatgtacttcaattcagttctggcactaagcacccagaattagtgcagactccgtaagtcaaagggcatggttccaagcaacactgttttcacttcagacaccagctaaaaacggggcccctaggccacctgcacgtaggacacaccgactacaattcaggggttcccgtgaccacttctagttcaataatttgctagaatgacttggagaactcagaatgtgctatactcatggttttactataaaggatgcaactcaggaatagccaaagaaagagatacacagggaaagccctgggaggctcctggacgcagagcttctatgccctgtccccgtggagtcaggacacatcctcttcccaggacattgatatgttcaccagccaggaagctcccacaggcttcagtgtctagtatttttattggactttcattatgtaggcatgactgattacatcattggccacgtcattgaactcactctccagcctcctgtcacctttctggaggtcagcctggttcaaagtcccagccctcgaatgatgcagctggtctttctggtgagcagctctcatcctgaagctatctaggagctgatcgtgagttattaacataaactcaagtgtggtctaagggtctcatggataacaaaaacactttttatcacttgggaaattataagggttttaaaagctctgtgccagaaaccctgggcaaaggtcagacaaattctctattatgcagcagcatcgtatgactattaacattcctagcatgttcttcctttatcactagtggggctgctacctgcgactaagacccagtttctgatgctgttcttttgttaatgttcatatgcgataggaagagagacttccacaacgtcccccttgggttgattcctgtcttcaatccactttctattcctgggtgggaacagggagatttttattcaaatcatatgcatgttttaataaaatatgtaaacataaatacccacacatacttcttttggtcaaatttatcgtctaacattttataattacctgctggcatatacttggtttatatttttcttatgttttcaaaatagtagttgctgacttggaggaatgctactgatttttatatatttatctctctgatctcttttactcataactcttattaattctaataccattttggttgatttggatttttgtaaatagtaaaccatgtcatcttcacataatgataccctttcttatactgatgtcaatca

SEQ ID NO: 42211 - DNA, 1228 bp, Homo sapiens
gtgttcatgttgagtaggcagaggaggaagaggaggaaaaggaagggttgttttgctatctcaggggtggcagaagcagaagaaaatcctcatatatagtgcaaactcatgttgtttaaaggtcaattgtatgcatatataagctcacacatatacagcaatttggttttataacattattttacatacttttttatacttccaaatctattttccattgaagaactactaatatttctcagcactctagaatttagtggattctactctagaatttagtggtggataatgtggactttagaaccagataattccagctccctcttcctcacctctgtgacacaagtgagtttctcaacctctcctcccaccatgtgactgtgctgagttcttgtgagaatttagtgagataaatgtgcaagatgcctgatgtcaaataaatggaaaaaataataaatgcttgctgtaaggtgttatttattttcctatcactgctgtagaattctctatttctgcattttgcctctcctttcctttggtcctgctttatctgactcaaagattatttgtaatatggtttggctatgaacttgctcatagtttgaatttgctaggctgaatagtaaggatgaagtgagtccgtgactgactggctgttgctacagtcagctttcattcataacaaaggttattaacttacctgtgatgtttttatggcaattgtgtgggaggccacaaggtacaaagggaattcctttggatccaggcaaaagtacactcacactggcactttgacctgtgacaagttccttgcttcctattagctggcttatctatttttataaactaggactaagaacaactaattaaaagattaccagaataatgtgagttaaggcttgtgaagtagctagtctgttttctgcaacacagcaaatgtttcccaagggttgattctttcctgcaaaattgctgacacagttgagagagagttttagattgaggtaacccttgggagggaggcaatgtattgcagtggttgagaatgtggacttcagaaccagatatactccagttccctcttcctcacctctgtgacacaagtgagtttctcaacctctccttccaccatgtgactgtgccgagttcttgtgagaatttagtgagataaatgtgcaagatgcctgatgttaaataaatggaaaggataagaagtacattgccaaag

SEQ ID NO: 42212 - DNA, 484 bp, Homo sapiens
aatctaactttcttttcaggagattcagaacatggagatgaattattaaaacaaaaaacaaaacaaaagtagaaaagactgtgctgtggttcgaatgtgtcccctccaaaattcaggtgttgccaatgtgacagtattaagaagtgggccttcaacaggtgattaggcaataacggctcctccctgtgaatgtgaatgtgattgagagccttaggaaagctttcatgcggcatccggtctcttgccatttggccgtccctcatgtgaggacacagcattcctttccaccccgagatgtggcaataagttaccctcctgggagcagggagtggtccttgccagacaattgcagctacaggtacttagatcttgggctttcaagactccaggaatgtgagaaatacatttctgtcctttataaattgcctcgtctttgggattatgttatagcagcaacaaacaaactaggacacacctataatcc

SEQ ID NO: 42213 - DNA, 1775 bp, Homo sapiens
gagtgaaggtcatcctgctactaaagaaggtcaacccaagacagtctgaaagcaatagaagtagggggccggggtgtcacattcctgaggtctctgtgtgcagactgcccatgtcctagtgatgtggagtcaagacacaagacatgtcctcaagcaggaccaaaatcatcccttcaaaatcacatcgccatgttgaatggttgctgtttgtttgtttagaaggaataaataatagtgataaaagggatggaggctatttcttgtacacccactgcgtgtgagactccctgctgcacacgcccccagtaactcctacagccctctgcaaggtgtacccatcgagagattgtgcccccgcatcagactgcctgctctgccaccttctgctgcgtgacctcacacaactgacttaaccgctctgaaagtcagttccctcgtgggttaaacagaaataagaagagaacctagttcacaagctggtaaggactgaatgaaagaatgctttgaaagcttggtagagaggctgtcatacaccaagtgctcaaaaaagtcagcaatcattattactcagcatgcgtagctctggaagtgaaacagattctcacaaactctaccaaagggtacctcattcttacacgataaaaataagaccaggccttcctaggctgctgcctcctgcctcctgctaggatgcaaattcatggccaaaaacccagtgacaacagtccctcctttaccagcactatttggcaggccaagctttggcaaacagcccaccatacccattaaaaaaaaaccaccattgtttcatctggaggctttttgatccccctaaataaaatgttaccaccctccccaccccacccccaggacagattcagcctgcaggggagccagctcctcctgctatgtcactccagccaggcaggccaggcaggatgactcagcagaaaagagcctgctgcggggtccgcccaccctcgggtcagctgcggccagaaaaggaaggcctctgtgagacaaacagaaaaggacactgctcaggtcccctgggtgcaaagcatcctttgtctgtggggacttcagacaggaaccgcccatgttgacatttcagctggcagagcaggcttggcctggctgggagaggcaggaacccctgcagaggctacaaaagatagtccacacttctttagcccagccagataccacagtccctgtcctctgtacgtattaatatacataacctcagacttatgcgttttctattattatccctacttttgagatggggacactaaagcacagagaaggcaaataacttgtccagggtaacacagccatgaagtggggaagcagggcttacaccaaagagttgtggcttccaagcaggtgcacacagcatccaggtctgtccttctggctgcatgttattccctccctctgctctgctgcttctcgggagctcagagccgaaggcagcatttcatggtttctggagcctggctcccttcctccatccccttcactgcccaattacaggactcaccctctcttccctggatgccatcactaccttctaaccagttctccttccacccaggttcactcttcttgaccatctcatctcccatttgatgctccagcagcaaatactgcttggagggccctacacatgcagagctggcatcacccatgccttggctggctcatgctgtcctgattgcccagaacacctttcttttccagcctctgcatgctcgactgctcctgtagga

SEQ ID NO: 42214 - DNA, 1271 bp, Homo sapiens
acagaatccacaagggcagccttccttcttttggtaccaacttttggcctgctctggggggctgtgaggcggggatgcagatgggtggtccagggtgcaggagcctgattcagagacttatagatgagcctcacaataaggcgggggtccatacttagagcatttttactctaagttttctcccatctcctgagagaggactctagaaaagatggaaggagcctgttttagtgcttcattgaaggccatggactatgatgggcagtagatggcagtacacgattacaaatcttgggaaactccctctttttccaactccaagcccaaattctgtctttgaggcagaagccaactcctttctcccgagcctgctggcagatcctcccccacctctccgcaggagttcccctcctaggctgggagcatcccgtgcagggtaaatcttttcaaggtaagtccttggtaagaagttgtcctctgagaagggaggcagggaagcagctattgtggatgggagctctgcttggaacaatcaagatgccagcaggggagggaggggagagaagcgccattttgagccagcagtcacgtgaaggggctgcagagaggggtggccaggagagatgaagaggtcatagggagacagaagagacctccctcctagctccccccttgctcagcacactcctcggggcaatctgggcagaggagtcactttcagcctttcaagggagggtccaggtggttggggaggtactgcctggccacgtgggctagctctctggccactcctggggactgaggagacccacagccagacacagctccgaagctttaaccccttcctgtggggtcagtctgcagccgtgcagcccaaggccaggggctgtggaggcagtagatgaaaagggttcaagcctttagctccacagtcacaggcacagtgagcaagtgggtgactagtgccaaggctgccacggagcttagactgaagaggagaaaggggcaaggatggagaagggaatataacagctctcaaatgctgagcaatttatgggccaggcttggaactttataggttgggagcattgcaagaaacgtagttgcactccagaatcagaatcacatggggactttttgtttaaataagttccatcccgggccatctatttacgtcagaatctctgtgctttctacagtgactcaaacattgtagcatctcaaaaaatgggctctttttattatttttcttttacagataagaaagcagt

SEQ ID NO: 42215 - DNA, 690 bp, Homo sapiens
ctatctacttattggtctgattctgttgcctcttgtttatggtgtcttgcttcctcatgtgtctgtttttttattgtgacttatatctggaactttatttgcattatttatttaaggccgaatccaatcctcaggtccagagacttaggttttagttccagctctgatattggcaagctgtgagactctggtagtcttgtaacctctttgcatatcattttcctcatttataaaatggatctattaatagctcctttaatgtcttataaggttattttgaagatcaagataggatgttcaatatgaaggaaagatctagagttacttcatttagtgcttgaaaatcttctcctttagttgattaaataactgcccagagcgtttttaccattaaattcccatcggtagaggccaaatcagtgagagtttactgtagccacaacagcttagtaataattaacatgtgttgtgtgatcactatttgccaggcattgtgtaagtgctttgcaaatattaacttatttaactcctgttcctcacgtctgtcttagggtgcttgcacttgttccttctgccagtaatgctcttttccaaaacaatacacctctacctccacttcttcattttcttcagccatttactcaaaagtcgccttcattgaggctttcctggccaccccttctaaaagtt

SEQ ID NO: 42216 - DNA, 2610 bp, Homo sapiens
aaaagttgatttctatgcttaaacagtagtcatttgaatgctttatttagttggatcatttccacaagaaacgggactgcctgaggtttgcagatatccatgactttccccaacataaactgacaaatacgtggaatgttaatattgttttaaaatcactagcaaagggccctgaaccatctccacaaaagtgcctcttcagcttatgctgcaccaattatgggcccaaaatggttctcacagttaaaccaacttttcctgaggccccctttattcgagctcatataaagaaatccaagagagaattgctgtcttataacaaaatctacatccagtaagtgttcagggcaataaaagttgcaaggaaaacgataacgacacatgaagagtgaaggttcttcagttctaaacttggcttttctcccaaatcaaaccagtgaagaaagccgggggtaaaaggaaccgggtagctgggagacgctgcagttccagccaggaagccagcgagaggtgcagaggatgggtgggtgtctgcacggagagccccgaacaggcccgggggagtgacgggggacgggaacaactactcggtgcagatgggagtccaccgcaggtggccggccggggcacccagggcttcgaggaggtagggccgctctccttagaggcagcagcgggagtcccagcgcggcggtggggccggcccgagggcggccagtgacgccggtagcgcccctcctcagccgccaggccctcggcaggggacgccgcccgccccgagagcacgtccgaggcggcggccaggccggctctgcgaaggcctcgcagcgggcgggcaggctgcgggagcgggcggcgctgacagctgcgcaggcggctactcgcgcggcgacggcacggggctgcgggcgcggcgcaggccaggccgccccaagaacccagcccgctccccatcgccgcccgcaccgcccacagcgggaggctcagcgctccgttaccttgtcgcagtagagccccaccagctgcttcatccgccagtgtggggcggtgaagacgtccacttcttcaggaaagggcgccatcgccactgcctcagcctccgcctcagcagccgcggccgccgcctctccatagacaccctcgccgcggggcagaggcggcgcgcccccttgcgcatgcgcccgccccgtcggcgcgcgcgcccggtcggcttggccggcggggacgcgggggcgcgcaggccgccgccatgcgatccctgcggcccacgtgaccgggcgcgcgcagaggctcgcggcttctgcctcccgcccccactcttttcgttttttgtcgtcttcataagccgcagaaggaacccaaaccttttccctgtttctttcactacatgaaagcacagtagctgagggtaggggaaagtcgttgcagtggcgctctcggcgcttctcccgttgctgccctgcccaccacggccttgaggagaggcagccaagcacaatggccgcggtcagggccgcgagctctgcttgtgcccacgccccgacgcctgcttggcctgggtgaccaatgcttctggccaggacctccggagctgcccttcgcctccctgcgattggcccgtgccagatttttcctggggccgagcgcagaccaccccggccgccactcaaaggccgggcctggctcccacccagcggttggtgaaccagagctgcgggctctgagagcttcggtcccgggcggcagcccacagcgggcgcggggcctgggtgcgaggggcggggcagagaccgcgagagagagttctcgtgaaattcgggagactcaacgtgggggaaaaacagtatctggggatccaggtgcggaaatgcacctcaagtgcaggaacgcgggtcagggataggcccgacgggccttgggggtggggagaagggtgaataatggaaggttggtgcgggaaagaaccttggtacaaatcccgccattttaagcggaggttcggagagaaaacaaggtcactaacccaggaaaatgtctgcctctttcccataaatcgcctggccctggccacagacctcctggagactctgttctctgctcacgccggtcagtcttagattggttggctggagtactgctggacagatagagaaataggagaaaacagggaagcctgagaaccttgggaggaattgttatttgcttaatggccagaacctccaggagggcaagaaccagatatgctgtgttcacccttgttctctattatctatcacagttgcaagacaacatggggatcagtaaatagtcaacaaataatggagtagaagaaggtgagaaagaactttgcagtggaatgcaccctatttagttctaatcttatattactatatgctattatagacagtgtgaacagtggttaaaccacagactctggaagttaagattcctggttttgccagacactagctatacaaccgttaacaagctatatgacttctttatgcctcagtttgctctgacatgaaatgaagctaataatacctacctcagaatctttatgaggatttatatatttgaagcacttataacagtaccgtctgtaagcta

SEQ ID NO: 42217 - DNA, 1227 bp, Homo sapiens
acaaatgatatgttctatatttattaagaaaataaaccactgaaagcatacatgcactacaactccgtttatattaaggtcaaaaagaggtttatttcggatataccgctagatagcgttaaaactataataaactctgaagacaagcaaggtaacagataacacaaaattcaagataatggtttcctctgggaagcagaggaaatatattcacaaaggaacacaagaggcttaaaagatacctttatgttatgtttcttaatttggatgctgggtatatatgttcgtcttattactcttctgtggtataataaaaaatatatttattctttgtccttggttcctggaagaaagctcctaaaacccttggaatttcctaataggaggtgtcttttatacttcataatatatccctttcaattatgcctgagtttatgttaatgaggtgactcataggggttgggagatagagagggaccctaggtaccttcaggatggaggctggttaccagaaaaaccaactaggtgtttacaggattaaaacttttagcccatctcactatctctgacaaggggagaagaactggagactgagttcaaataagtgactagtgattaatgattaatgagtcatgtctgatcattggaagctcaaggggcttccaaacacattaatgtgctgggagggtggcacagagagggcatgaaagttttgcaccctctgtcctccataccttcccctatgtgtctcttccatttggctgttcccaagttgtatcctttacacaaaaattgtagtagtaaatatagtgctttcctaagttctgtgagtcattctagcaaattatcaaacttggggagtaggtcatgggaatgcccaaatatggagtcagcctggaagaagtccaagtaggttgggaatacctgagacttgtggctggcatctgaaatggaggcagtcctgtgggactgagcgcttaacctgtgtggcaactgtgctaacttcaggcaattagtaacgaaattgaattgcattgtaggacattcagctggtgtcagggaattgctattggaatgatgtatcattaaatgggcgggtgggtgtgtttcatacatactttcttttctcataaattatatatttaataggaataattcaactactgtgaatttaaaaatcaaacaaaaaactatgaagttgcacatacttttaacttatgggacaag

SEQ ID NO: 42218 - DNA, 1768 bp, Homo sapiens
cctatcttgttaatgatcaagaaatctgctttgttacaatcattagaggacagaaatatacatacatatttaaatctatttaatgaaatgcagttttatgttaaaaatcaatgatctgctaacctaaagagtcgcacaggaatactatgattattaaacacaatgcgattctctaaataagtaaacacgtgcaatgatatcaaagttcaaaattctctaattcttccacaaagactatgaaaatcaccttggagtgtatgaaccagcgtcctggccccgccaggtcggggctggggcgggcgcgggccgggagcgcttaccccgcggcaggagcgattcagcgccactacctgcttcgcctggttgtggtgtggctgctgcgccaaccgaaaggcctccttaatccgcagcagtctcttttcgctcccatggctctgggactctgtccggactagccctgtccgcgctcggctacatccggcccgcccaccagctcagaggcagagttctccgcggtgtctcctagggtttcttgtcagagggccccaggcgcctagggagtcgttaccgccctggcattcaaataactcccgcgagaggcggaaatcccgcgagactgccgacagagcgtagggaagtggaaaagtggagcctgcaccgcccgctcccggcacccccggacaccgccccggtctcacgcatgcgcagagggccgatccagttcttttcggctggaatggggaatttgtgaggtaggccggaagtggtgttgcggagggaagtgtggggagagcagaggcgcagctctgctggagagacctgaggcttgcagcgctgggcccggccgggtcgctgcggctgggctggaggtgaggcgaaagaagggcatcctctgatgggagtggaccggagtccgctaaagcgaagcattccagggttcgttgcgggaaatacagtctggttttgccccccgtatgaattgagggaaggtgagagcagaagcaatccgggcctgaagggcgattattctagggtcggccgaggggttcaggccaaagttcattgaaatcctagctgggtccctggaggacgagaaaaccggtcaggagtctcctgggaagagggtcatgttttaatctagctaaagctggtacctggcagtttccactcttaaggcctagtgtactaactaatgtgtgcgcaatgtcaaaacaggaaacaaagggaaatgcaagaggtggaaggtaattttaagttagtggcagtatgacagatttccagtgccttcaggaaggtatccagccttaaagatgctttttttaaatagacgattttagacagaaaaaaggtagaaacaaaactataacacatgtgtactcaccactgaattggagaaataaatgattatataagtgattgaagtcctttgtcagctctaccccgtctcattctctttccttttgcctaaggaaaccactctcctaaccacctttatgcaatctgtaatgtgtacatctttttgcagctagcttgttttacataatgtttttgagatttgtcagtgttgtgtaactccaccttattcatcttaatagctgaacagatattctgttattttaatatgtcactgttcattgtttagtatctccagtgcctgacatactttaggcactgtaggtagctaaatgttagttgaatgcatggctgctgtagcatttgaactaagtagaaaagaataaataggacttcatgtgacccaacaagagta

SEQ ID NO: 42219 - DNA, 1897 bp, Homo sapiens
acttttaaaaatctaattttgacataactgctgtaaccatccagaaacggcattgatgttgcttcacgttgctgatgcttaagcaatgtatattgtgtaatatacaatgtagtcttcaaactaatttcaacttctgcctttctgtgtactcccttatcccactgggtgatattatttggcatggtcattgtcattaaaatcatacaggatagtaattcctttccatctgctaccatgcctagccttatttaatttttcagattttctgttctattgaaggtaattgattttttctttttttttaatgcttgaaataaagtgttgaaaaacaattccctgtgaatagctcatatttctgcacagtctgaatcccgtttgaccgtgttcacatccaaattaagaatgtgtaaaggaaacattccaggatagtgacgctagagatagcacctcccctagagacatcccagggaagtaaagataaagccttctcttttctcacgccaggaggggaatttgcctacattccagaaataatgagtaatctctctggagaagataggcagacatgtcagcagccccataaaagcctagagacttaaaatttggggctcctcttctgtagtgcaacccactccatgcagaggtaacacctggcccttactgtattacgttataggaattggagcatggggaacacatacaatgctactctggctgctgtttttgctatgaataagaaattgtgtctctgatccagaggtttgtgtgtttctgtgtgtctcctctgtaaaatctcttttaccatgtaaggtaacattcatgggtttcaggcagtaggatgtagacatctttggggaggccattattaagcctactgtagcaccctctggtccccaaagactcatccatcccatgtgaaaaatacattcacccctcctagggtccccataaatctcaacccattatagcatcaactcaagtccaaatctcatctaagtttcatcaactaaaaagtcccaaatctcatatctaaattagatatgggtgcagctctgagtataatctactctggggcaaaattttttatctaaggacctatgaaactagaaagcaagttctgtgctctacaacagtagtgggacagaaatagggtaacattcatagatgttcccattcaaaaagggagaaaaagccaaaaagaagacaccagccaattcctttcaaagtcccatggacaaactgcattaggttactaagcctgggaatagctgtggctcctgcacctgccctctgtacctggggctccaccctcagagccatctttttggatgaggagtaccacatgtctgctactaaatagttttattagcccatttcctgctagtagaatttagggaactcggttgccttctttcatttcaaccactctgtccgttttagtccaatttgacagtgtttctattggtaaacaaaacattgtgagtcatagggattcactccattgaaagaggcttctcaacagatgtttcctgaataatcctatctctagttggggcttctgctgagattggttgagggggtttgtgagtcacatgcctcttcaaagagctctgtgtatctgaatactgtaatcttttgtgcctcctaagcagtagcaaaagactacccacacttacaaatagttaagataataaatttcatattgtgtatattttaccacaatttaaaattcaaaaactttttaaaaaaaggatgtgcagccatattgttggctttctcgccagagcatgttttccttacagtggatctcttagctttggcatcttttgcaatctggataggctgagaattactcaaatcatcaaatcatagtttcattttctaacagttctctcag

SEQ ID NO: 42220 - DNA, 744 bp, Homo sapiens
taaattataacaaatatttgacagcagagctgaggatattaaaataaaatgtaattttatttcttatatgttggtgaagaaggagcagcaacagaggctggagcattatttacaagccaaactatccgtctggagattcccagtgcagcaactgggacggggactactgaatccctcagattttaggccataggccaatgaacattttctgtaaaaggtgaagtaatacttttagctttgctggccatgcaacctctgtcgcaactactcaactccgtggttcgtgaggggtccacagggttcattatccgtcatgaaccgcagagttgagtagttgtgacagaggttgcatatatttactcagccaatatttactgatgatattgattaggagtcttgggaagagcagtgacagtttttttggtattatatctagcgacaaaagattgaatttggccgttactcactcctcctccaacaaagttgtcaaacggggctgctacagacaagtagaatcacagattggagatcagctgtcattatgtaacagctggattggcaggcttccctctaggggccatccctgtctacagctagagtggacaggccagggaggacaccatacttggagtagagtaaccttgtccaggagtaaaacatggcccgagaattctgtgctcctagcaatcctattattatagaagtgcttcctgataagggaggaagggtaggaagaggaaagct

SEQ ID NO: 42221 - DNA, 1493 bp, Homo sapiens
cgggcaccaccaagcgctttcccgagaccgtcctggcgcgatgcgtcaagtacactgaaattcatcctgagatgaggtgggttggcgactaaggcgcaccggtgggcactgcggggacagcagggccccgcgcgcagggaagccgcccggatcgcccggaaccgggcatcttccgtggcgggtcagccgagagcccgccgggtggtgctgagtagggagtcccgggctcggggctccgcgggccgctttcaggagcagctggccttggcaccgagcgtgcccgcgggaggcgggggggggcgctgctcggtggctctgctgcgtagccggtgaacacttggcaccgatgcccgccttctgggcaaggtgccctgagcccagcccctcgccgggctgcagcccaccctcggcgcgctcagcccgcttcaccgcttcagggacggaatagaactcgcagatgcagggtgtcgctgacattttcaactttttctgcggtttccgcccgctgtctctgacccgaaagtgcccccggacggttacagaggacacttaagtggtttgcaaagcctgtggtaggggaggagggtgtagaagggccaaaccacggaacttagttttattcatttatataaagcagcactccgattctttttgcgcggcctgaaatgcatgtgaccagagaagtaattaacaaaacaatgtcaacttctaaaaccgagacattacttagatgataaggcgcagcaactcggtgaatctgtacaaaccttggaaaaaaaacacattagtctatgggaccttccagttttctcatgctcctttccagctactaacctctcctaaagggaacaaccactttttggatttgattcccaggcctcgctttcaccgggaaattatcgttgcttgtaaaacagaagaagccgggaaggcaggcagggggagctgctactttacactctgtgctttgggatagcaaaatcccgcatttaagcaatccgaggaaacgagcaaatagacctccctcgcctctccgagcacactcaacagttccggttgcaaaatgtttgcctcctgggcttcccagcgtcccgttagttgttctatttacacataattagatacttaatggagagagaaactagaagttgaggcgttcctccaggctgtattgtaaagtatgaagtgaaatccaaaatgaaatggtaatgttagaaagcaacctcattaaaaaaaaaaaaagtaacactggtcttgaagatctttcaatgtgagtacataaagatctatctcatttcttttgacagcccatagtatttcataaactagatgtaaccatttcctattgacaggaaattagcttgtttccaatttttcaatcccattcattcatccaacaagtatctgttgagcacccactatgttccagacagtgatctagctactgatgacacaagagtgaatgacgaagttctcactcatgaaattttcac

SEQ ID NO: 42222 - DNA, 1861 bp, Homo sapiens
atattctgatggcgggctatggagacagagtgagttggacagtcaccactaaatagatattttccctcatcctgttttcatgttctctgcccaggaaactggtgtgttctagtctgagtctctgttgaatgccaactgatcccgtagggattaagagggatacacatgcagagcagtcacatccagggctttgctttccggctgcccctactcgttgtgtaaaccaccctccctggacctcagttttcttatctgcaaattgggggcaatgatgcaaacttcccagagaagattaaacaagataacggttcaaaagcattttagcaggatgcctgccattttataagcgcttaataggtcttaacaaattattagtatttaagggaggctttatatcttcctctagaatgtgcatcccggagggggtactccgagtcagatgaagcttcttgctttaagggcactcatggtgtaactggatgggggtggcctggcagccacacctttgggaccatgacaccccccttccactgtcttcacatcgaaccagctgatcttgcctagtcctcatttcctatcccatgtgatgacttttgccagtgacgcggaaaaagccagtttaggtcttagggaaaataaataaaattttaaaaagctagtctaagcccagctcttgcttttttgttttgttttttaaaaccagctcggagcgggctggagcaggggaggaggtggggccggggagcgcgccccgagcccgccagctcgctggggcaagtgcaagccgggtgcctgccgagggcggcggccccgcggattggcctcgcgcgtatggggcgacatcaggcggcgggcgggcccgggcggggctggcctctggcctggggcgccactgctctgctgggtgcgtcctgcccctgcccgagttccctttttctccaggtgtgattaggcaagcttgcgagcacccagctgctggctgccaagtgggtgactcactctgccaggtgggtggggtgagaaagtgaatttggaaagaatgagaaaggtttcctgacgcagagatggccactttcaaaggagcttccgcttcccctccatacaaagggccatgtattgacccatctgctaagtaccgggcactgtgtggcgtgcttatgcgctctggctcattgcaccctctcagcaagcccgacagtagaggctgctttaaattcctactttataggtaaggagaaggggggcgcagagagataagaactgtccccttgctgcagtcaggcttccagcctcagccccttgccttgaaaaggactgaaccaatcccatcctcttttttctttttttaaaggaatgtaagttgccatgaataagcatcttcttatttatcccagattttcttggggacttaaaactaatatttcgcattataggtggtgacaaggagcccacacagacctcaacttccaccagcctgaaaatgatgctcccaattctgcccttcaaacctgtttgtcttggatttcttatttgtttttattttatttcattattttatttaatgttttgagacaaaggtcactctgttgcccaggctggaatgcaggggcgccattatagctcactgtagcctctatcaccccagctcaagtgatccttctacctcagcctcctgaggagctgggtctataggtgcatgccaccacacctggctaattttttaattatttgtagagatgaagtctcattacgttgcccaggctgatcttgaactcctgagctcaagcaatcctcctgcctgggccttctaatgtgctgggattacaggcatgagccacggcgcttggccttgaatttctaa

SEQ ID NO: 42223 - DNA, 2175 bp, Homo sapiens
ccgtctcaaaaaaaagaaaaaaagaaaagaaagaaagaaaagaaaagagacaaaatggcagagtctgaccttcggaccttcggggcactctgctggaaaagcgatgatgggcatgtgcaccacttcctaaacacattgcgcatgctcacctccggagggtaaggaaggcgcggtgggtgcgggcagcccaccccaagggaagaatcatgggaaaagggccagcctataaagtcctaggatcatcgcacttgtcctcggtgcccacttgggtctcttccaagtgtactttcctttcctttctttcctgttctaaagcatttaaagaaacttttactcctgctctgaaacttgccttgggctccttttctgccttatgcccctctgtcaaattctttctcctgaagaggcaagaattgaggttgttgcagacccatacggattcaccacccggtaccttccatgggatactttacgctggtaacatgttcccatttcacaaataaggttcatggaggtttgcccaaatgcatgggaaatgtgaggctgggacccaaggtgtgagtgcattttgctccttcaagttactggtaacttggttggtaaaagaaatactaattctttgctttcctcatttaccctcactcccttccctaagttactatgttcccggttttgcttccagcagcttctcactcagctgccatgcattgacttccctgttgatccagcctactgcggacccaaatattcctgttgccagataggagggatgagtaatggagactccagtcctcagagaccttgatcaagtaaagcaaaaaccccttcctccactttctttgcaagtggctaaacccttagtcactctgggaagaaaagtaaactgaaaacttgaaaaagtcccaagacagaatctaactccatcccctgccccagataaaaagcaagatagcacaactatagcaaccttttaagtcaaattaaatgagctaataaaaatcaggcctgttcaagtgcccaattgatttaaacatgaagattgtcagtttccagcatcactgattctaatccaacaaccctcaccatagaggtcttcattcagcctgctgtgtttggaggttttgcttattgggtgtgtatctgtaaggtaaatcttgacgatttccttactacagacaattatctggctggagatgtcatgttttagaccttggccatcttgtgcaagttacagaagttttgccaaagacactttgcttctatccgggtttatatccctgaccatccactcaaccatcacttatccattcactcagcaagtatgaatcacttatccattcactcagcaagtatgaatcacttatccattcactcagcaagtatgccatggctgtgtgccaggcaacactctcagcacagcatatatggagctccctgactagtagagggatgtagaggatggacaagtgatcaggcaataagagcacagagagagcctggatctgtgccctcttggcccctccaggtctgggcttcattaacaatctcccctcttctgcagcatcctcagcttctccctctctaccttcccctaataccataaaactcatccactggcctggcggtccctcctaggtatcatcctacttttctccttcctcatccagacttctaaacagagtaatctacatcctcaatgcctaccttaccttcacttcacacctcaacccccagtaatccatccaccaagagagtccccacagcaatccatccaccaagagagtcataactgctctttctaaagtcacctacaacctcctaagttctgtgaacccccaaaatttgacacaggtctcagttaatttagaaagttcattttggcaactttgaggatgcatacccatgtcacagcctcagaaagtcctgatgacgtgaacccaaggtggtcagggcacagcttggttttatacattttagggagatttgagacatcaatcagtatatgtaagaagtacattggttctgtccagaaaggcggggacaactcaaagcagggagggggcttccaggtcacaggtaggtgacagacaaatggttgccttcttttgggtttctgataagcctttccaaaggaggccatcagaatatgcatctatctcaatgagcagagggatg

SEQ ID NO: 42224 - DNA, 2090 bp, Homo sapiens
tggacacttacgcatatgtacttgtgaaaaggacactttcctccatgtgaaatatacttcaaaaaaagctgcaaaaacgccatatgaaaggcatcttacaggaaagccttctctatgtgaaaaaaccaaaacgtcttttttcaagccatctaaaatgtctaatgtaataatttttaagggctcttactgttgactagttactaataatcctttgacttaaaataatttgaccaattggcctgtttttgtggcaaaaaacgttccattagaaggtgctaattgccaaggttctgttgaatttggccactagatggcagtaaggaactacataaacatagccgaactatttttacctgcagaagcaagtaaaaaacttgttagtttgtaatcatccagtggaagatgtagatatggttttagaactaaagttttgcaaataataggcaaactttaaaaacatatcagatgcagaaaatcaatacattgcctcttcagcaaaagcaatgtcttgaggctttatcgtgcatataattacgggtaggatgactaaacatcccattttttgtacctaaaatcccatgtcccatttctccatcctgggtaaatggggacagttattcaccccacttatagtataaatacattccaaggagcattggttcattactggtttcaaaacatacttttcctttgcagtataacataggtctattaggtttcccaaaatgctccaaaaaagtttatgtaatataacgttgagggatatttcctatggtcaacaagttgcagtgtactgaatactagactaggggcacaagatttgggttctgggtcctgtcctgccaccaccgtactgtacaagccaaagaaaatcactttctttctgtggactccagttggtacctccaaactgaaaagatcagtttagatctttaggtgtaattagataaattagatccagtctaacttagattagataagtgcttctcaagctgtaaaggagagtagtactggatgtacacgttctctaagatttttaagtttgggttaattctgatggtaatcttataaaataaatattaacaatattctgtcccatttggaatgaccgccttataatttgtcctaaatttgcattggtattttgggagtcaatgcactacagcaataagagttatgaaatcaggcactcatgccaaagaggtcaaatgactcaaaataatgattttggagttttgtgaagaagaaacacacacacacacacacacacacacaaaagttgagtcagcaatgcacctggagcttgctgccatgccaaattcaaaacatgctagaccatgacaagtcaggctcaccacctgaacatacctgatgttcacaatggggactcttgctctctcttcccagcatgcccagattattttattcactcgtcagattccagatacaagaagtcaaagtgaacttgggagaaaagcaccagtccaagtccactttcacttgaccctcactgacccctccacccatccccaagagggagaagaacctccttgccttgaactcccagaggctccctttaattctgatgggatatgtctcacttcagactctaatgtgtctttattcttatctatgtttaattttcctaaaaagaggtggaaactacttctttgttaactttgtataatgcagtcttgtctacaccgggtgctccaggaaggtgagtttaggggtcaagctttggtttcatttgggctatttagaagactggccgtatgtctaagtgtgagtcagaaactgtctttgtgcctttattgaataaatgtccttactcacaagatcatcagtcagtgaaatgaattgcaatacatttcactacaacactcgatttcaatgctacatattttagacctacatttctactaatcgataatagatctaattaaaattaaagcattgataattttttaaaaaaactgtactaagctgggtgtggtggcacacgcctgtaatcctagctacttgggacaccgacatgggataatcacttgagcccaggagttccaagtccagcatgggcaatatagcaa

SEQ ID NO: 42225 - DNA, 2930 bp, Homo sapiens
ggaaaaaaataccaaagggctggctcatcagctcagctggggcagcttcattacaacgctaatgtctgatgataatgagatcctttcgaatcactctagacaagcgcttgtgctctctcttttctgtttggtgggtttttttttcattgttgctattttgtttagttttaaactcatggtttaaccataaaaatgtgagacactcttcatcagcctaaaacacaatcagttgttgtccaatattgtacttgccttattattatacaaatcaccaacagggagattgcaaagcatttcctcaggaagggcccattttccttctgtcgctggtgcatttctccaccacatttgttacagcaacgacacatacaaaagaaataccccaccagaggcatcagaataataaacagcagccccaggacacagcatagaataatccctgcttcatagtagacaatctgcaattcaaacaaaagaaacagcacatattgtagcacaaaataataagtagaacattccatggtgtacaaagttctttttttttttttttttttttgagacagggtctcgctctgttgcccaggctggagcgcagtggcgcgatttcggctcactgcaacctctgcctcctgggttcaagcgattcttgggcctcagcctcccgagtactgtatttttagtagagacagggtttcaccatgttgtccaggctggtcttgaactcctggcctcaagcaatctacctgcctcagcctcccaaagtgctgggattacaggtgtaagccaccgcacctggccatgtttcatttttttaacctatctgccatcattagttgaatctgaatgtgtacatatatatatatatatatgtatgtatttttttccattttgaaactcctttttgaaacagaggaagcagagaattgagtaattaaatacatggccaagtggttactggaagatgtctttcaacccctaggaagatgtctaaatgctagtttgagctgcaaatggtttaattttaaccccaaaggtattttgtttgtttttaaatggatcaataaatcttggcaggagtacttgcataacaatctacatataaggcgctttgcacactgcaaaaatagaagttaaagattcaaagcactttggattggctggcaaacaattactcaagaatctggaatgtatcttaatttagaaaaaaggctcagactctaagtcaggcacgttaaacacaggccagtcacaaggttcctcctctgatacactggaaataataatacgtaccttgtcaagtcattgtgaaaattagagataacgcatgattagaaataatgtgacaaaggaccaagcactgagtagacacttactaaaggtgcctctcatgccatgcccaggagccagatccacagtgaaggaccgaccttggcagtccgtgtctcagacggttcctgagttcctaggaacagcacaatttctagatacaatcatgtgacctaaacatattttcataatcactgctgactttattccgggataaacgaaaattaatgcaactagatgatgaaacttgatgtcattccaattcatgcatgtagctgcttatatttctaaagaatggcagaaaattgcaagttggcagtttgcaactaaatggacaatctagacagctgcgaattctgaagccaagctgagcaaaggaaaataaaacacgagtcttgttcctgggagcaaatgtgatgtcttggaggagagacctgctttacatcccagcagggggcttccaggtccctaaagtggatggtgtcacattagcattaacttcataaacatattgtgagggacaaataactaaatgactgaatgtgaaaacaactagccaagtgcccagcacacagtagatattcaataaatggtagttaactctatgagcaaatgctcaagactagtaaatctggtgcatctggcacttgaatattatctacttccatattaagattaaattgcttaaaaaaaagagtggctgaatcttgctgggttcatcaagtatgtgctcacgcttaagctaacccccatcccatgtccacgaagaggcattattaggggacttaacccttcctcgaggaccaataccacttgtcagttaagaaaccagcccagacattccaaactcttacttacgtatttttccatcatttctcagcaaatattctaaattgtttactattttaaagaaatgtaaattctatctgaattccaggagacactgaaccaaaacccaggagagaagatatattgaaatgttttaaatgcactaattttagctttaaatacaaattgtacatttgataacacagcctttctaatgttactgactaaatatcaggcagtatcaggaacaagatacggcatttcaagagttcacttctaggccgactagacgaaggcctgtcactacttaaactgttttttgatacaccaagatcttccagtgctttgttgattgtgttgaagatcaacatgtaaatattacagagatatctttcttcaaagagaaggttaaaagtgatggtaaaaacagaaatgaaacggatcatttaaaaatcttcacagtgaggatgacagtgaagaacagaaaggctttccaagagcaacttgaaatagcagacaaggactttacctttagacctaagattacagtttctggctgtagaagtcaacgcaggtgaggaattttggcagaggcagcatgcatcaagaaaacagacagaaaaagttatgagtgatcaaccataaccaagaacattcatatcccacaaggaggaaattgggtgatagaaggataaacatgagaaaggaatataaaacttgagtgtgaattcaagaaacagtgttttaagttgctctgagttctgaaatttacattt

SEQ ID NO: 42226 - DNA, 742 bp, Homo sapiens
ggtccatggcactgttaccagtagaaacaatatgttcacctatacccgacttcaggctttcttgttttacaagcaatacctatccccatgcatctccaacacctgcattacacaggtactgtttcacctgtgctaccctcacaggtgctacccttatttacaccaagccttctgttaagtctccatggtgactagaagcaacctagatgcttcagatactgaactatctagtagtggcattatgaaacagaaccaaactgattaggcaagcagtctaagcaagcacagagtttacaaagcaattcaacaacccaaccaagccaaaaacacagatttcctaatgcttagtccaaagttgatttgctgtacttagattcctaaataaaaatatggctatacagaaactctcctacctaggacttctgcagatgaatcaagtggggaacaagcacaaaaacataacattgattatttggttttatgtcaaaaggaacaacagaagttggtagtattttcaaggacaggaagaaaatacagaagagatcaatctgcagttcttgataaccactacatccagagttcaaggccagtaaccacatatgcaacaaggaaatacacaatgaccattctgagagagcaaataaaaacaggaatgatgagtgggattcccaattctaactatgttaaaaggtgtaagtactcgcatctgagacatgcgtcagcctattgccaggctaaatat

SEQ ID NO: 42227 - DNA, 3848 bp, Homo sapiens
agacttagcagcctgggcattgaagaaggactaaaataattgtttctagtggggaaacctctaacaaatatggttatcggagctacagactgggtgctagcagtggcaggagctatgtgactagcagagcagggacaccaggggaaaagaaggaggggcttatgtggaggctcagagagaacactggccagtggctccagctgaaatactcctggaatttggaattctcacctaaatcctgatcgccaaggctagtgtgacttggtaaagcaggagtggccactgacatctcctcacacaaaatcaatggaactggggaaagaacaaggactaccccaacagctaaacctggaggcatctccctgataatgacttcctgcaactatgggttaaaaaaaatccagccttaaacatggtgaaccatgttggtgaagaatggatacgtggtataatgaagtccatggaagtccaggtatccagtcccagaaaaagccagggaagaagtgttaagtgatactgcaagctcaagatctgtgctcatcaataggcttcaaacaacttcatttcctctccacgcaaacaacaaaaaaaggcttttaaaatggtggctttcctgcaactgagaaatgttttaaagaaagtatagtgaagcctggctacatctatctctatttacaacagagtgcttttaatattcaagtctaagtaagtaaacagacagttgagagatttgctattttgtcttactgagatcctgccaatgaagaaagtaaatactcttgaaagcaaatgtttaactgagaactaaaccaaataaagtatggttgagaatttttaagtggttaattgaaaaagaccaaacaagaccgtctgtaattttccaaaaatatagactgcttcaaatagaacctacgtccagttctgggaatcagcaaatcaattagaatcgcatctgatcaactttatgccccttaagtagttttaaaatttcagtactcaagtacaatcaatgatgtaatcagcctcacaacttagttatttgcatgaacttcaggaaataacggctaacacagccccttttggacaacagaagtaattttttagttggaagaaatttaatggagttatggttcagttgctgtttacagcttgagaattaaaacgttgggttcactctatattcaagaagacatccatctcaaaaccttttttcatttaaaactaatctgtaactgcaatatgaatacaaatgcaagttttaaaaattcttttaaaatgagaataaaaacctacagcttatagaaactgtaacattgtaacaatacgtttaaaactggtcattgaatgtaggattcataagtacacattttctcatctagtaatttttttggcataagtttcagttcaggaaaagttcagatgcaacattttatggagtgttaaatatttctgtactgggcaaaactactgaacttcatggtcactaccacaccgtcagctgtctgtgaaaaatctacttgcagggcaagttaacaggtttctatggctcaagtttgcttaaaatacagaacaaaaaaagtcaccttggcatgaatataattaagaaatcagccgtgtgcttctcacgtttgggctccgagacgtgggagatgcccgctaacctaagaccttccgagggcgatgcaaggacccggacagaactttcccggccgcagaccccttctagggcacacctggcctggcgcggccgcgggggcctcggggctgcgcgcgcaacccgcccgaggaactgtcaacggccgcggagcctcggcagcctcggcggctccgcgcgcccacagcctggggagccccgggaggcaacggcagccgcgcggctcgggggccggggttccaaggcgcccccgccgccctcggtccccagtccgcccctcggagcccgccacggcctagcgccgcccgcctcacctgtgcggccccggcgcctctcccgccgccggtcgctctcgtagaagcccagcgtctctgtgagctgaggcgccggcgggggcccctgtccgccgctgccgcccggctgctccgcctcgccgcggccgtcccgctgcgggccgtccacgccgccaccgccgccttctcccggagcggccgcgtcgccgacgcccgccatgttccgagcacaacaaactgtccccgccgcctccctccagcctctgcctccggccggccccctccccgcctcgccccgcccctcgccggagcccgagccgccgccgccgccgccgccatccgcggcccgccgaccggcgcgagccattggcgtcagcgacgcgtgtgaggccgctgccgccgccgccgccgccacggtagccgccatcttcttcctgccctcgccgtggcgggcgacggtttctcgcgccgtggctggctcggccggccggggcaccgcgccgggctccatgcagccgggctgcgcggtcccgcagagcgggcgcctccggggctcgagtcggggacccggcaggagcgggccggggatggcggcggcgggcggcgggtcggccgtggagccccggagaggcggccgccaccaccgctgcccgcagtctgcgaggtgtccggcggtccgctcagggcctcttttgcagactcggtgcccggagtgcgccggcgccgcccgccaggtcttggcactgctggcgcggccgcggcggcgggggcccggctccagatcaccgacccccacgagcgccggccctgcctgcccgctattttggttccatctcttctgcatatttatgcttgcctgttacattccctggcctctgagtgtcctttggcagtttccaaagcatttgggcaagaaggagcttgggcagcttcacaacaggtggggacgcgcaggggaggggccgcggccggaccggcagagtttcaagggctggcgcgccggcggactttccacactgtctttcgggactggggttaggagacagcccttggccaccactgtgtccttactttgtcgctttacttggggctggacctcccctttccagctctggcgtgtgaccccgcaacgagcgtggtgtcgagaccaccaccagctggggcggtgggagcgaaggtgccccaggctcggggaaggtggaaaccttttccccgctccccaagtgattgttgcgcgctccggtgaggggacagtggtacctcgatttcccgtgtgccagcttcgggactcagctgtgcttttgtgtctctttgattagcaaaagcaaaacgaattcctccccgaacactaagcttcctggaaacttccctagacctaaacttgagaaccgcatataaatgggccttgagggttctgtcgtcagtagcgggttacgtgattgcaaacgagcaagtttaaaacggagtgggctttgggctgcagagccgcctggcattctgacagctgagcaggaggcagaggtgagagtccaagatggactaaaaatgtcccagcagctgggagcccaacctcggcccaacctcgttgaaaggaggaacattcggtgcagccgtcggaaccttattatttatgaaaggggacagctcacaggattacatttttctaagccaatcctgtgaccatcctccatgaaattctctattttggttgcatgtggtcaaaactgagcctcactgaaacaattgaaaacaaatactcccgacaaatcttaagaatcgttttgaaaatcaaaaggtggggaaaatgttgtggcttctgagctttcttcagcccatattctattattctctgatgttttatggtgtaaaatcatacccattccattatgtattgattgtca

SEQ ID NO: 42228 - DNA, 2286 bp, Homo sapiens
cttctgaaagagaaggaagggaggcaccaattcctactaccaaatgttaaaattaggaaaccctgccacagtggattgtgatggtcttgaccaaggtgcatgagagaagaggacagtaaggtcccaaaggccaactcaccacaaggggaagtagagtctggcagtgatctgaactccacacaacagcattaactccaggttaaagagctcagtctggtgcactatgagtctgagtgcagaagatttacaggtaggagtcaggaaactatcaagtttacatgttgcaataaggaggttagacattccatgatgctttcagagccattgatgggttttaagcaaggcagtggcttggtttttgtatgagagagctcattttagtgaccaatatggaggatatttttaagagaaacaagaatagaggctgggaagctattgccatgatccacgaaagaggaaaagacagcttgaatgagtcagtggtgaaggaaaagattcaagaagtaggaggtaaagtgatcatagcttggtaattgattggctcagggggagcagtcattaatttgtttgctatttgtgctgtttattattattacaaatggcagggattagaataagtggccaattattctcttcctgtctacttgtttttagctgctggtctctaaaatgaaaattatgaagatggaactttgattagcttctcctactttcataatgactgtggttatcattcccagtttattgagtgaagtcattgtttaaatttgcataagtggcttttggatatgcaaaggtccaattacattaaaagctagatatcaattgatatagaagaacaattatctagatatgtccatgacattaaaaagaacaaagactgactggagaatttgccaacatttccattgagttaattctggctgccaaagaactatgggaggagaacatgaagaaaagaagaagaaatatagacaatcttagccaaatggtacctctgcagattagaagaatggagggcatgcaaaaaaaaaattaaatttgaaaagcaaaacattttttgttgtaaaacaacaataatcacaacaacctaaaacaataagcttatttatatggtaaaaataaaaaggcatcccccaccacaacctcctactgtctaaaacccctgggacaacttctgttaacagacaggtggggattcttccagtcagaaatgtccttaaagagattccattcattatacagaatctatcatgacacatgtttcaccaaggtaacctttgatctgttttcttatctgttaaagtctacttggtgattcagttcatagcttgctagttggctgaatgctagaattgttgctggcaaggaatgctgttacagggggccagtagacagtggaagtaagagagacaggacaaaatgccaggagaaaaaggtcaagtcaaggtggagtacaaaaggcaaatgccaggcaggaaaatgggacgggcttggaaaagaatgcttagtaaagtccaccttccttgttttcactttttgtaacctaattactccaacatctttgctgctgacttttacccctgctttctcctaaattactctcccaaaggtcaccaaaggaccacgtggtcatcacatttgatgaccttctctccatttttaccctccttaacctctctgtgtttgatattgtcaaccactgtccctttcatgagtccctgtttccatggcgatggtgacattgtactcttccagctcttaaatcctcctgactgttctttccctgagctccataatgactccccttccacttctctagtcttcttttttttttttttttgttttgagacggagtctcacactctcacccaggctggagtgcagtggcgcattcttggctcactgcaagctccgcctcctgggttcacgccattctcctgcctcagcttcccaagtagctgggactacaggcacccgccaccacacctggctaattttttgtatttttagtagagacggggtttcaccgtgttagccaggatggtctcgatctcctgaccttgtgatccgcccgcctcagcctcccaaagtgctgggattacaggcgtgaggcaccgcgcccggccttctccagtcttctaattgtggggtctgcctacagaactgttcttttcttacttctcttttttctgcattttctatttcttggatatttaattcactcctatggcttcaatgatgatttctatgacagaggttttgaaatatgacagatacagacat

SEQ ID NO: 42229 - DNA, 2228 bp, Homo sapiens
aaagtgtagctggttgcttacttgtttgtattcccaggtgaactgtgagcccttggaagtgaagaagtatgtctttgatgtctgtacacccaggccctaaaaaagtgcttaacacatagtaagtggattcacacactttttctgtgcttaatacatactgaatgtgaatacatacggtatgtgaatctgcttctctctcctggtttctctatttttgatggtggtaaagccatctcaaatttatatctctaaccctgacattcctcctaactccatgatcacatccttccttcaaaacatctccacttgaatgtccaagaggtttattaaatctaacaggggctaagcaaagcccctgctgtctttgcccaccatactgcatcttggtaagggcaccaccatttacccagctgttctaagtacaaactctggaatcatcctttttcttctactctacatcaaatctgataaaaaaaaaatcctacaagcgttgcctgatcatagatctggaatctggccatttttcatctcctccagcagtgctacatcagttcaagccaccattgtcccttccctgggctcccatggtgccttcttactggtatctgtttactcttgctctctataaatgattcctccaaacaaaagccagaggtacttaccttggcttacaagaccattgaggattaggcctttggctatctttctgggctcatgacctatcacctcctccttgttgactctgctgcctacacaggcccccttgttactttctgaacacaccagatggacactcatttcagggcttttttcatgctactctctctgccccagatacttctctcctagaacttcacatggctcactgcctggctttcttctggtctctgcccaatagtcacttctggaaagaggccttctctgaccataatatctaaaaaagcacccccacagactctatcctcttaccctgatttgttttttcctttgccatatgatgttttatatttctttatatatctattgatactctctttcattagtacattggctccctgagaatagggtcttcgtctaccatgttctttgctgcaatcctagcatctggcacttttcctggcatatagcaaaagctcaacaaatacttgatgaatgaataattccagttattcaagactgtgagtcatatttgactcctcacttgcattccctcctgtgtgcagtcaccgagccctttagagtcttatgtttattcatttcacatttattgactgtaaactgtcttatggtctgtttttctttgagctaacttactttccacaagtgccatatcaaatgaagtaattaatgcaacaagaactttgtaaactctaaagcactatacaaatgtcattttccttccagtcccactgcgatgacatgaattaatgttacttcctcttccaatctatacaggagcctctaactgaactatctccttcccaaattctccttagattatatattttgcaccctgctgcccacttagtcttcttaaagccttgctataattatgcacctctcctactcaaaaactttgactgccttccagttcttgaccaaatagtatacaaagtccttgacttgtaaccaagaccttccctgatgtggcttcagattgccctttcactgtttctcactcttctcccacccaaaccctggattttcaagtaagtttagcccactaacctttccctgagcccaactgccttcccccacttgtctttcactcatgcttcccctctgaatggaaagcttcctgcataccttctccttaaaaaaaaaacaagcaaaaaaaatcacaccttgcaggctcagaacaagtgagcatccatggattctgccattcgtgggtttttctacttcaaggtgttctttctctactctctattcttatagcatttcattcttcctgttgaggggtacccttatcctccaaccttcccttctctggaacagaaaggaaggaaatagatgcaaggattacttttagcatctgcttccattttcattattctgatttagaaggcaaggaaagtcttatctgttcttgtccaagcttctcagattatttgtccctcctttctgtctctgagatctgcctgccgcagtaagcatgctttcatgactcccacctccatgtgggagggtttcaaggacaggctttcatcttgacaaatatggcagcc

SEQ ID NO: 42230 - DNA, 1008 bp, Homo sapiens
ttaattttttagaattattaattaaactgagtccattaaaattagcatcatttttttaacaaaaatttcccctgggctctctaaaattcagatcatccaacaaaaaaactgagggggaaaatggcaaacttattgcacacaaatgtatccataggacatggagcaacaaacctaaattgtgaagtgtcagcagatgaaaagtactttgcttcttaaaggaaactcacactgatctgatcctaaccacagaggaagtctccttgtctcatcttgacactaaaactacccagttactctgtcgatagggttgggcacaggccagttagtctagataatctaaagccgaaagagggtgaaagtacagtgatgtttgtcaaatgcttccaagaatttaagagaactagagataaggtatgaatcattcactttctaagccacagtccatggctcggcaaagtaaataaaagtttcaaattcattttcattttgtttaaataaaaaattaaaataccataaactaatttaagacagaatgaaatgctgtgtccatgagaggctgctggattagaaagtagaacaatctgggttctagattcaggtctgtcaataattacctaagagacggcaggcaaattatggaacttctctgggcctcagtgttcttaacatagtagcagctactacttcatgaaagctttcttccatgtattttggttgtttttctaaaagcactttgcattttagttcagagaatccttccaacaaccttataaactaagtaccattagtaaacccactttacagaggacaaaagtgaggcacagaaagtagcttgcccagcaggggtcatgttaatgggatcaaatggaattccaacccacatttaaccacctgctacactgcctctcagctggaaaacatgagagatgaactgggtgccctctcaggacacctctcaggaccctttagctcctttttttctgtgattctacaatatagcaaaatatc

SEQ ID NO: 42231 - DNA, 961 bp, Homo sapiens
ttgagggagggcagaccaccgtcctttggtttttagacacaaatgaaaaattaataagagttattaggggagagattgtgtgtgtgtatgtgtgtgtgtgtgtgtatgcacacaaatgtgctttcatacaaagcagaatagtacaagttaaatatcactagcttttagacttagaagtcttgagttagaaaattaatcataccacatgccacccacacgccttggccaagttgcttgacgagctgttgggatgagtacatgagatactgcaaatgaaagtcagggcacgaatgcttgtacaacccagtaaagctgtaaataatgaatgccacatattcagtagtactatgtgctgagacctgtccaaacattgtctcatctaatccacataacaatcttatgtagtaggttttatcatcctcattttgcttttcacttaagtgtctttgtccaagaggcaaagtggaatttgaacctacacctatgtggtcaaaactttgtttgagttccaaagtccatgttcataactgttaaactccctggttctacacactctcctcactggcaaagtttaggcatctttaatccatccaatttctgaagaatttacccacaacacgggtgttcacccatgcttttaagactgaacagggatttccttaactcaacacatggttattgagtgccagccatgtcctggcatgagcctggttgctggggataggaaagtgaataagacagtgagcatctcagcctgcttagagccacatgagggagagataaaacaaggaaagcattacactgtgatgtcatacatgttaatggtacctaaatagtacctggtatatggtagatgcagagtaaatacatgtgggataacagggaagtatttgcaatgcagtggtagctgagatactgcctaggaaatctgagggaggcagccttcctggagggggtggct

SEQ ID NO: 42232 - DNA, 1373 bp, Homo sapiens
ctgttataaatatttttgtataagtgtccctgtagatataagttttaatttcccctaggtaattaaattcgaattgctaggtcattgggataggtgtaagttttactttacaaggaacaggcaaagagttttaaaagtggttttactattttatcttctcatcaccaattaatgagagtcctaattgctctatagcctcagcaatatttgctgttgtcagtctctacaattttagccatttgataggtgtgatgttttgttttgaggtaactcaaaagaaacactcatttttccgaggtgggaactctccttcctgctctaccagatagagctcaacttcacatttatattatctgagctctagtgatgtgctggtaaatgtttaacagaacattcaggaatggtggggtacaaggtcctgacttgtagtatttgctaatttctttggtgtaaatactgccagtaaggatgattttaagctagcaacacaatagaaatgcacaaactggttggctttaacacatcactgtctgtccattacttcactgtaagattcaatcaatagaaaagaacattcattttccaaagataatgactgtatgtataagtgtatccatggtgtgaaccaaaggttggtcattcacaaagaagagagaggtggctttccattccactattggcctcatcctcaacatttgaagaatctcaaattattgagcttgtgggactaaaatctagaacttcatctgcactgattaaaagtttggctgggaggataaacatggataatgggagaacaaactgggttctgaggatggctggatttgaaatcatatgaacatcttagttactcccaggtgctcaggaagtccataggtttccattttccagctgggcaaatttacctcctctacctagatgcccagatgtcaaagctctccaaatttgggctttatcttgcctaactgttgctattttctattgatctctgctgcaaactggcagctctcactgctcagacagaggccaacgtcttctctactatcagagccttccctccttccagcattgctccccttgtctaagataccctcccttttacctctgctattttttccttccaaatcattcatgcccaccatttattgatttcgtctagttaccaatgctgtgcacagagttttacacacatggaattattgaatccttaaaaaagtatttctgctttaaaaatgaggtcactgaggctcataaaatttaaataatcacacactaaaagtggcattgccagattttgaactttagcactttttataaccaaagcccagatgctttccactttgtaggaaggtctaattaaaatctctagaatt

SEQ ID NO: 42233 - DNA, 790 bp, Homo sapiens
gagctaaacttttcatcgaaaggcacattccaggtcctacgctaggagagggtgaccttctccctaattaggagaaattaaaaacggagatcagcaagcaacagatgcagagactcaaactaatctgcctttcattcttccaggcttgctacctcaaatccctcggcatgtgactatgagggcacctttcaccatagttgtgttgacatttctgtggctccacatctggaaaggcgacttttaaactttattcacaagctcacttgtggctccctcttggcctttaaagacacaaatacatgtctgtgaaacctacagctgagagttttgggccaagatttaggaagtgctattgggatgttagcatgcttcttcttgtcatgtacttaaaaaaggacacccagagtgtactgtcactctctggagaacacagtggaagaagtgtcttgctttggagctcccaacacacactgaggtcaccaaacttggctcaaccatttctctgcctggcagagtaggcaacttccagtgtgaggaaaaggacattaatctgttatccattaatactaataaatgattcagccttccatgcactgagcaaagaataaaaagcaaaaagcttagttccatgcattttggaagaacttactctaaaatgcacaataggcatagtcatatcagtgacttaacttcaagagacttcatttgcctttgttttttaagcttccttccctaggatgaatgagaaattaaaatgttgctctatgttagtgagaaagcctcacaaaag

SEQ ID NO: 42234 - DNA, 686 bp, Homo sapiens
ggttggttagaaatatcacacacgcatctatctccactagagtgtaaatggaggataagaatccaaggagcccaatagtctacttcagtgggataccctagcctaggtctcattttgaacctatattacaccacttgacagatgattctatttcctgatccaactggaaagctgactaattctacctctaaatggaacattgcgacacctgacttcagtaagcctttcctgcaaggtgcttttaagagtgccaaagggcaggccaggcctggtgactcatgtctgtaatcccagcactttgggagcctgaggagggtggatcacttgaggtcaggagttcaagaccagcctggtcaacatggcaaaaccctgtctctactaaaaatacaaaaattagccaggtgtggaggtgggcacctgtaatcctagctagttgggaggctgaggcaggagaattgcttgaacccaggaggcagaggttgcagtgagctgagatcacaccactgcactccagcctaggcaacagagcgagactctgtctcaaaaaataaaaaataaaaataaaaataaaagagtgccaagaggcagagagctagggcttcactaagaatacaagatcagacctaggactgctatgggttctgcttgctgataaatgttggcacttgggcagcagaattcattaa

SEQ ID NO: 42235 - DNA, 9315 bp, Homo sapiens
tgaccttaggcgagtgacttagcccctgccatccctccaagtctctaagccttaaataaaaatgacagctcctccctcagagtttgctatgagcattaaataagagttatgaagtgcttagaatggtgactgggacataaaaagtgttctgtaagtacacatttcaaacataaaacgcaagtcccaaatttctcccgatttaatttaaatgagattgtgacatcaggccagaagcacactgctaacttcacaaacatctcttataaacagtcgtcaaagcagtttacacagaggcactactgggtcaggctgtcaccttgaccctctcggcacccctgctccctgtgggcagggatcccatctttgtcctcaccgtgaccccagagccgagggcagcacctggcccatagtgggtgctcgatgaacacatgcttactaactagaggggcttgaggaactgatacctaaacaaacacaaaagaggaattcagctctctgtcccatgagcgttcaaatgccacccatattcacaaatgggcaaaaaggatttcggaaattaaagggcactttctgtgggtctgtggcttgacacagattcagatatgtgcccccaggccatctacgtggtgtccccctcccccatggagtctcctcatcacagcagtaaggacacaaactgcagctggggatcactgagcacttgttatggccagacactgtgttgagtgcttgccgcacactatcacgtttaatcctaacaagcatgatggacctcatgatacaggtggggaaactgaggcctcagcaggtcaataatgtgctcagcatggccggtggtgagggagcgagccaggattcatgtcggcactacccattctgccactgtgctgcctgtctccaagtccagctactctgagattccgtctgatgtgcaatgcatcctcagagtcccagagacctcccaagaccacccggattgacgatctcagggaacacagacttgtcctctggaccacagcaggcagagaataggggctggaagctgctcagtcatggacatgtctgtaatactcactcaactaggaattctaagggtgtccaggagctgaagtcagcctcaggcattgatttcctgttcatcggggtatccagggtaaccctgcaatggacacagataagcacgtcattcatgtcgctcctttctaacaacaggtgcccagtcccccttggccaggaaaacgcaaacatacagcaggacaacctagagcctctggcactgagggtgctatttacatggaaagatcagacagaaagataagcagagagagagcaggaagctgtccccgctagcaaaggccagatctgagcataattcaataaggtgcgctgtggctcaccacttaggcagataagaacaaaacagaaggagccacattttgcctttttaaaaaagagtcttcactgaattaaactgctttgttgctgtgtctttattcactccctaacatgcagcacactcatttctaaggatttaagatagttatatgcctttaaatatgagaatactaaaatactaaaattttaaatatgtggctattttccacaaaaccttaagatttttggcagaataatatagaattcagatatgcatgaatctcccaagaacatcaaggcctcaggaatcattcgaatcattcaaaacagctgtgggaatcatgtcacagaatcacagaacctcacaactaaaagggaaccagaaagtcaatcagtgcagtccctacagtctcagcatccctttataggaccacaggcaagaggcaagcctgctggtgctggaagccttccagcgagaaggagtagcctccctccaaagcagctgcctctgcctgggacagctgatgggggacagtcccccgatgaccaacagaaacacctccaacagtttcccatattctctctctctcacacatacataccccatataatgacttgaaagacagaactacatataaaaaagtaaaatgtgtagtctaattttaaaggaagaaatgaagggagaaaagaaagggagaggaaaaaaagaggcaaaaaagacagacccatccaaccagccaatcaaacattctggacagcccaggagaacccaaaactggaagtattgctatggtctgaatgtatccccctcaaactcacatacaaaacacaaactgcaacataatagtattaagaggtggggtctgcaggagacaagtgggggcctttaggaggggattagcatgcttataaaggaagctggagggagcccatttgccccttccaccgtgtgagcacatatagaaggcgccatctatgaggaatgagccctcgccaggcaccaaatctgctggtgccttcatcttggacttcccagcctccagaactgtgagcaatacatttctgctgtttataaatcacccagtctaaggtattttgttagagcaattcaaacagattaagataataagtatcttaagagactttggtgtgtttcagaaccagaggtgagagcacacccaggtcgcctgtggaaagctacagtcagacaaacggtcacctgcagcagtggggcagaggtgggcagcagccagggaaccccaagcacttacgggagcacagcgatggcggctgccccgggcggcatgccgctgttcttcccagccaggctctggcagagctggtgaacagcacccttggccatgccgtacccgatcatacctgggaaatggggagaagatggctcagtgaccactggcggccagggggacagcaaggacatgcaatcttctcttgagatctctattccctaaaaactttataaatagctgcatctggcctcctccttcaggtcagacgccctcaccaacccccatcaaaaaatggcagagagccacgagaaagaggggatgggaacacgtgggttgggaattatggcctctggccagtttccaagaacacacaggcttcacacaggccaccggtgcatccaagctgcagcattccagggtccagaagaggccaggaagaaaagataaatgaacatttatggagagaaaagtggaggagacatgacatttcaggtgtacttactattcatctaacacttaacatttattacaaaagccagaaggttgatcttatttttattcttaggaaaccaagactcaagacaggttgagtacatgccaggctcacacacagacttgtgccaaagctgatggagaggttaaagcccaggcaagaaatgggttctgaaccttttgatcactaaatgcttgtgagcacctggcacacagaggtactcaatgggacagcaaaatcaagcagtcacttggagtataggacttaaagtcaaattacacacattcaaatcccagttcctccacttaccactaaataaattctgggaaagttcccaaaacctctctaatcctcagttgctgcatctgtaaaatgggtttgaggtgttttctaacacagtcaattctctaagtctccagacaccaactgggtgtctgacaattcaattagaactcccagctaggtgtggtgcctcgtgcctttaatcccagcactttgggaggctgaggcaggagaatcccttgagcccaagagttccaagaccatcctgggcaacgtagtgggaccccatctctacaaaaattagccatgcctgctggtacatgcctgtggtcccggctactcgggaggctgaggtgggaggttcacttgagcctgggggaggtcaaggctgcaattagctatgatcacgtcactgtactcccgtctgatttaagggctcagtctcacaagacctaccctacttcagatggcagtcacaagtcctgggccacttagacttctgaccaacaagcttaatcaggggtttgcacaaccccctcttcaggtgcaataatttgctagaatggctcgaagaactcaggcaaacgctttttttatagttactggtttattataaaggatacaactcaggaacagccaggtggaatgacacagaggcagggtaggagagggggtgggcatggaacttccacgcctgctccagccacgccaccctcccagtgccctccatgtgttcaacccagatgcttatcacatctgtaagtttttatagagcttaatctccagcccctgcttccttccaggaggtcggtaggtggagctgaaagttctaacctcctaattgcttggtcattctaagaagtagctccatcctgaggctgtctaggggccccaacctactaatcaccttatcagtataaactcaggtgtgatccagaggggctcataacgacacacaggaatagagtacttaattgtgagcatacccttagcacaggacaggcactcaatgaaggtttcccatcaaatcaatagaagtaatgtgccctggaacccgactacctggcttcgtgtccaggctctgctgcttgctagtgactgacactgggagaggctactaaaccttggaatcctcagtttcccatttcgtgaaatgggaatgacaatcccaaatcctaaggataatacaacaatcaaataaaataccatgtacaagtgtagcagacagggagggtctccaaggactataggagtttcatcagcttgaacaatcagcctgtttcacaggctcctgcccttcagcctggtttttcccacaacttgcatggaatgcagtcaccaagtcaggtgaaaccagcaacttatagagatgatcccaagtggactttcctcattaccatgctacagtctccacccgggaggagctacagcttcatcaccagaacatgtgactatgtgctggcgtgatgactcactgcatctgtgccactgggacccctcctccacatgcaatgacacaccctttcccctctccatcaccccatgaaaccctcctgggagagacgctgctttggagaatacttccagcatcctccttaattatgtcaagtaataaaactccattgattgttttttttccaggttaacaaatcccctttgtacagtactgagcacagaggaacactcaatcctggccattattgtcattcatgactctcagcaggtcactggcaactctttttcctcggacagcaataaggaattgcaaaaagggtcatcaacttggaattcaaaaagtgcagccctaactcctgtttttccagccaccaaaaaaaatcacaggttctgtgggcctgcttttccatctgtcagtgggagtggtaactcagatcacaatttattcacaaggctctgctgaggatggaaggagactgcatccaacaagggccttggaaaccatggagggcacgcacagaacccgatcagggcggagggagcccagcctggtgtaggaggggctttgctcagcaccttgccagggagatgttctcccagtgactgcggcagggagggggtgatgcttctcccactctcccagctcatcattattcatattatcatagatgattcctctccagatcaagcagtcatctgcggcccatccggggcatttccttccttatcagcagtggaaggactgtggcatgacggggatggtgacaactctggccttaacaccatcaaaccaacctgccatcactctgctgcctgtaaagccagagcctggaaaggggctgccagggtctgcctgctcccgggcatcaaaacccacttaccccaccccatgtcatggagcctcttctatgtgggaatccctaggctcagtgttagaaagacgaagaagcacaaggcagctccctggctcccaggaacggcacagcacaccagaaagaacccagaatctggacttcgaggccaggggttggaacccaggtgattcctcaccactgtgacttgggcgagcagctctttcagcctctggttcttccctgctaaatgggatccaatgctaagctaaataggctttcctgaaaacgacatgaaacgtgacacatctcataaactcgaaagggctctttcattcccagaagaatgtaagttccacagaggcagggatttttattgttttgttcaccaatgtatcccaaaccaaaaggtggcaatcaataaatactttatttggccaggtgaggtagttcaggcttgtaatcctagcactttgggaggctgcggcaagtggatctcttgagcccaggagtttgaaaccagcctgggcaacatggtgaaaccctgtctccacaaaaaatacagaaattagccaggtgtgatggcgagcgcctgtagtctcagctacccggtaggctgaggtggaaagacggctggagcccccgggaggtcgaggctgcagtgagccaagatcacgccactgcactccagcctgggtgacagagccagaccatatctccaaaaaaaaggaaaataaataaataaataaataaataaatactttattcactgctttcagaaaagagcaataggtgggtttctcaaaggaggataatggggcttaatcaaatggtggccactcaaaaactgtgggaatgaaaaaacaaactggggccaggtgcggtggctcacgcctgtaatcccagcactttgggaggccaaggcaggtggatcacctgaggtcagaagttcaagaccagcctgaccaacgtggggaaactccgtctctactaaaaatacaaagttagctgggggtggtgatgcatgcctgtaatcccagctgctccagaggctgaggcagcagaattgcttgaaccaggagtcagacgttgcggtgagccaagattgcgccattgcactccagcctgggcaataagggcaaaactgtctcaaaaaaaaaaaaaaaaaaaaaaaaaaaaaagaacaaactggtagctctgttcattaaaactatggtaggtgattctcagtaactcgtgagtttctcaatattccagacaaactaacttttaaattatttaatctatgatgaagtgaaaagaataaggcatggaaaagcctctatcgagtcatcaaattatggtgcttttctttttttttttttgagacaagcttactctgttgcccaggctagagtgcaatggtgcaatctcagctcactgcatccttcacctccagggctcaagcaatcctcccacctcagcctctttttttgtttgtttggagacagagtctcactctgtcacccagactggagtgcagtggcgcaatctcggctcactgcaaccaccgcctcccaggttcaagcgattctcctgcctcagcctcctgagtagctgggattacaggtgactgccacaacagctggttatttttgtattttttagtagagatggggtttgaccatgttggccaggctggtctcgaactcaggtgaaccacccgctgtggcctcccaaagtgctgggattacaggcatgagccatcgcgccctgccaaattatggtgctttttaaaaagtatgtgaatgtgacatgggcacacactagaatgggcacagaatgcttcccaaaggacacctgagaagccatcactgtagttgggcctgggagggagtgccatagagatcagcggtgtgagtaggagagagtcttcctattcattgtgtttcttttagtgccatgtgaatttttactacatgcattggttagttttccaatttaaaaactgattaaattatttaaataaaaactaatacagtgccttgtcttttcccataagctctatttgtcaaagcaagtccttttccaagaccctgtttgaatcagctccctcaacaaaaccttttcagaggtggactcacccccaccaagagcactccgcttagaccgtaatgtagcccggtctcacactcacaccacccgcacccttgctgccggaggaggctctgaatataattatattatctctatataattatattatcagtaattgctataattactgattataattatatattaattactgatcaatgtattactcagaccaatctgctactaactagctaggttgtcttagacaaggcacctaaaatcactgaactttttttcctccataatcaagggaaaataataggacctactttacagatacctctggtgatgaaataagatcaagcttagcccaacaagccaagcacccagaagacagatgcctaaaaatatttctttctttttcgccaagtctgttgaggtataactgaaacacaataaacttaaacacatttagggtgtaccatttgagcaaattttgacattgtgtatacctgctacctattggtcttcctttcctcccactattcgatggatatttgctgacagaagcaagggatgtcttttattaaggtaggtttccctctgccccgcaggcatgtggcaggaatggagtctttcctctttatgttcccccactgtgcccaactgtagctgctcactaaatgctgctatcacagaataatgatagcaagaaggaatgatgagtcactgtaaacttctccaccttctgaaaaccactatttcttctagaggtcatcaggctccctaaaatcctcggcacacacactgtttaagatgtaattgctgtggaggcatcgcaagtccagcgggaggtggggggatgacagcccagccaagggaccaatcacaaaactgcttcaacaactacctcaaattgcaaaagagggtcaaggtctcaaagagctatttggaagcacaagaagaatatttcgccatccttagcttctctgtttaatcagggggcataacaaactcttcagtgattaaaataaaccagggcataagtgctcattaacccagccctggtcctcaaaatcccagagctctctcttgactccattcgaacaacacaacacaagagcagggactctgacaaaggaaagaaacaagcaaatagcaaccgtaatggcttaattctaaagaatgacctttccttggggacacaaaaggggttatttgcaagatatgaaaaaaaagacatttcactaagaaggtcaacacttccaaattactgaatgatcagtgtggtcccccaaaactgatttccaatcacagcacagatcctttaatggtaaacaaaagtgaacaccattttaatactgtttgtcctacagaagacagtctagaaatacaaacttggaaataggagggtgaggttttctcagtatccttccaagtgaaaaacttctgatgtgcaaacaaatcttcttgagtttgagggactactaagcctgattcatcatttactttcaaattgtagatctatttcccc

SEQ ID NO: 42236 - DNA, 6020 bp, Homo sapiens
acagccttcaccctctaacacatgacgctaacaggatctactgccttaaagatattgggggcattaagagtctatgggaactctggtactgggaacacagtgcctggcccttggcagaagtgctgcctctgtcaccaccatgcatctctgaagacctgggaaagcgccctcatcagtgtccccaagcactgagcagatgggtggcaggaagggagtggtgtgactgaattcttcagaagcatattcctgtaccagattctgagcaacaagaaaaccttggtaaatgtacactatttgggtgatggttacactaaaagcccagacttcaccactacacaacatatccatgtaactaaactgtacttttgcccccttcatctataaaaattagatagtttttttttaaagaaaatcctgaaagcctttttctggtcccaggggaactcttgcccaggctgctgtgctgctgctgctaactaagctcccagaacgctgccgctggcagtgtctccaccgggaaattgctgaggcctgctgagcggctgaggtcaagggtctttggccatgtatcagctctgctccgacttgccgcctcctggaaattgacacctgactatgcaaagtagttgaaatagtctttgcagagcaaagaagccgtcagcgtttttccgtgctgagccttcaaactgtcagatccaatggggctaaaagaacaggggtgggtagtaatagtaacattaatagacagcatttaaacagtttttaccaggcgtcaggtaatttatgtgcaacgacaccaattatctcatctaatcgtcccaactctcactgtcagaatctccgttgtacaaatggggaaaccgaggtcctacggcgttaggtaatcaatacgcggtctcatgactagtaaccgggactgggctgtctcattctagagccttccttctacactctctctccgtcctctcacccctgctcccgttcctcccctttggaattctctcccgagtcacgccggactttttgggtctggcggaggcccacggagcacctccttgcacagcaaaggcccagcgccctgggactggcgtgcgcacgcactcggaaacaggaatagacgcgtagacctgtgcgcgcacgtgcaagcaacacgagtcagggggtgcacaggggcccccaccttcctctagactgccccccgccgggttccacacgaaagcccccggccacccccgcggagacccagcagccccagcccgcagcattacccagttgcgggcccgaaaagcctgcacgcatcgagaacccagagcgcccctgccgccgtacaccagcacccggcgcgcctcgcctgcagccgccgccgccgccatcctgctcctgccagcccggctcccgcagctccgaatgcctcgagccggagcgccgcgccccgccccggccggccaaccccgccaagagggaacgcgcggcggccgcgccccgctccgcgcccgctgctgccgcctagcgcgctgccacgctcggggcgccccgccacccggagggactgtaacttcggccaggccctgcccctgggacggggacatcggcgaagcccctcctcccacccgccagcaagtgctgggcctcggggcgtgcagcgagccgggctaagggcgaggagggtggagagcgggtgttttacgagcattaatttgtgaagtgtaagcatgtaaaatatagtatagtacaattttcgaccactgttttggcaattttttatttttaattgtgcatcaaaatagagatttaagtattcccacctgccaaaaaaacagaagaggtcgctccgctcaaggagctgaaagtccaccgccgagacgagacaaaccacactaggtcttatttcttctatctaaccgtaaatttatacccattaatccaaatggcccttttactatatgccacccatcgccagacacagatcctggcattttctcccttgtatattagttatttctgcccatggcctgtatctttaacacagagcctctcatctacagcactactgacattttgggccagataattatttgtgacaggtgctgccctgggtactgtaggatatttacagcatccctggcctgcatatactagaaatcaatagcaaacccctacccctcactcataagaatcaaaaatatctccagatttaacagttgtctcctaggggcaaattcatcactgatagagaaccagagctctaacactctcataaccttcttgatagcagaaccctgtattacatacatctttgtgtcacttcccatccacatataaccttgtacacagcagacacagatgtttgttcagtaaacttgtgccaggtaaagcatgcagaaatatgtcactagagaagaggatgcagccagcagcacattttgttgtcagaagcttcattatcagaaatagaactgctaggaggctggatggagaggagagcaccatctatttagtgctccttatatccaaggcactgcgctaagtgatctgcctgtgctatttcactttactccacacgataatcctatgcagattagaaagctgaggcatgagagtcacagacacttgtctggaagagtgggaatttgaacacaggtcttcaatagctagagttccacttaaccacacctttgttcagcaagacaaaggcttgttgggaatcaagtgtttcccttagagtttttctgaaaacaattgcttaaccctcaaaacaccaaaagttgacacaggtccctcactgacggcagaaatatgactcaatgatatttacgcaagtcctgacttgtcaaagcatgcttaatgttaaaataagaacgtgaactaacattattgatcacttaatgtgccaagcagtcttctgagccttttatatgtattctgttattttttaccagaaaaacatttgctgtttcaaagtcactgggatgaagatgagctgttgtaattcaaagacctgaatttcagccccagcactgacatccagtttttcatgagagaaatggctgaaatcgtgcatctcctgtttaccttaaagggttgctggagcatcagaggtgagcaagcatatggtcaaagcattttgcattttgtacatggtaaagtgccactcatctgtatatatagtaagagacaggatctcactctgttactcagagtggcatgatcatagctcactacagccttgagctcctgggctggagcagtcttccagcctcagcctccagtagctgggactacaaatacacgccatcaggcccaactattttttttttttattttttgtagagataaggtctcactacattgcccaggctcagaaattctcatttttattttcattgtggagtggccactgaagtgagccccagttgcgaggaaggaaactgacatttccattaatgtgtccctctgcttccttgacactctccaagtgagattcctgggacccctattggttaacagtgcaacttcctgaaccccccttcaggcttctgtgaccaactaagaaattttactgctccacttttgcccaactttgctccccagagatatggatagagtgactgttgccagtctcacatgatgttaagttgatattcaggaataaggtaaaagtcaaaatgtcaaagtccacagtataagatagaaaggaaagaatatttcattcctagtatctacagattaaaaggaaagcctagatcttccactattagaagagatgaataccccagcagtgtggctactatttgctaatacactagaaaaacacttttctctcccatttcagataacgtagaaggagggacgggtgagagcaatgttaagtgttggattccaggctaccccaacagccacaaagtaattctagtcacagtttacccccagcagattcacacagtgagaaattcataaggccctatttacacatttcaatattaaagccccaagaaccggggtcatttgatggtattaataacagtcctaaagattctgacagcagtgacatttcagagaaagaaatgccagggcacccatgcatcagcgagatcgacatttgatactgcgcattgttggcaatattcaagtgctaatcattctgtttttgttttccttctaacacatgcattttttgagattggtttgcgtctcttaatcttcagagctacctgattttgcttattactaactcctttatcattacgaggtccacaccagggctatttaaatacttgaaacgaggaacagttaaacagtctgctgaaacattagtctaggaggagatataaggttacttccttcagtaacacactccgctacatagtcaggtgaagattgtctctgtagaggcttctggatgtggttgtaggaagcatggactgtgcaagcttgcgctgaaggaggacgagaggatggacctacaaccttgaaacagagtgtttggaagagctgaccttggagcagagcattgccgagtatctgaaagatgtcaatgaccctcgctgctgctcggagaccttggggatgacctgcacccactagcatgcctggatggttcaaaaaggcgtggtatgggctggcgtctttactcagcttctcctccttcatcctgatcatcgttgccctggtagtgccccactggctgagtgggaaaatcctttgtcagactggagtggatctggtcaacgccacagacagagagctggtcaagttcattggggacatttactacgggctcttccgagggtgtaaagtgcggcagtgtgggcttgggggccgccaatcccaattcacgagtgagtatattgggagcatgaaagctgattctaggcactcatttttgttaatgtgtaagagtgcttatgtctcattgtggaatttggctgctgcctcaacgtcaggcataatgtcaaagtccacagtgagccaagggttctggatccacatcaaaaagatctttccttccttccttgcttccttttctttttctgtagagatgtatagaaacattagaaataaggatttgtgcatttttgcagtttacctctattaattatgactattaaaatattgagagtttacacgtgtcagacattgtaagcacctcacgccacttgtctccttaaagccttacaacaaagttatacagaaggaattgttaatgttcccattttccagaggagtacactgaggcttggagaggttacataacttacctgaggtcacccagccaggaaacagtagagccggactccagacccatgccacatgaccacaacaagtgggtggaggctgcctgcagaactgaacctttgggaagcatgatgaccctttccacatctacttttgtaaaagcttcatagtctgagaaaatgcaaaggggcactgtgcttgggttctggaatcagactaccctggctgaaacccctactggaaagtttactggtggggagacctcaagcaaggcacttgcctgttctctgtgaacgtgagcgggcaccgactttggctggcattcagtgtagcatcagagctgcccaggatgtaagcagagcagtctgcacaaacaggaatccaagctggacttaggaacgggcttctggaaaggaaaaaacaaaacaggcaatattctgcaagccttttgaatcgatgagatcactggtgaaaagtgtctgcacaaaaccgtaattaatcaataccatgccaatgtagggtgatacagaattgtattcattccttgatttctatatttcagtattgtagtagtttatagaaatctggccaaggtaaatgtcgtattaaatttataaggacaaaaagctggaaccgttgacaaatataatacaaattgtcatcatttaaacacacaaaaatttacatttgttatgtatattcaagatcaatatgtctgggcatatttatatttacctagcaattagattagaccctggatattgaacaaatagctccatcaaaat

SEQ ID NO: 42237 - DNA, 1133 bp, Homo sapiens
ctgctctgaacagagcttatttataactacacaactatgtgcattttctttaagacttaggaggaatattataaatcagggataaattgtttcataagtgaatcagaaagaaactagagaagtaatgagctttgactgccttaggtattgttgctgtgattgttaaatgcattagctaatagttttaccatggatactatataatactatcacaccgtatatgttttaataatcatatcaaagcaatccatggtgcaaaataatttctaaactatgattctaaggttaaacatgtctaaaaatgaaagtggtatgaccaccgtttgccactagggggaagcaatcgattgaccataaactcatcatgtctcagcgggcgtggggctgccggttggatcaaggaatcttgaatgattctttcagctcagagtcactctgtgattccactatgcttccagtttcaagttccaattgagtaaggaaataccttttaatattttagataacgttgctaagtataacgagggttatttctcagcggggtgttgcaggaccctaggaaacaaaaactgttagaactttagaggtcttgactgggcgcagtggctcacgcctgtaatcccagcactttgggaggccgaggcgggcggatcacgaggtcaggagatcgagaccatcctggctaacacggtgaaaccccgtctgtatcaaaaatacaaaaaattagccgggcgtgatggcgggcgcctgtagtcccagctactcgggaggctgaggcaggagaatggcgtgaacccgggaggcggagcttgcagtgcgccgagatctcgccactacactccagcctgggcgacagagcgagactctgtcaaaaaaaaaagaattttagaggtcttacatcctaccagtaacctgtaacgtcacagccataaaggttttctctctggtcctctgtgtcagcgcagggttgtaaaaatcaaattactatacttgattaataactcatcaaggataaaatagtataatacataggcccagcaactctaacaagtgactggcctttttttttttttttttttttttttttttttgtgagacagggtctcacttctcacccagggtggaatgcagtg

SEQ ID NO: 42238 - DNA, 1410 bp, Homo sapiens
aaactaactgaatttattaaacaagaaatcaggcacacgtgctttacagatagtttaattgtccaggaattgaagtgtcctctacttcctccatagatggtcctattacctgatcactgctctgctggaggaaaaatcagttgcctgcataggcccccacattgatccaaattctaacactcaacttgctttggatagagtttagaatttctccccctggggaaaagaactaatattctagtgcaagactgaaattcaaaatacagacagttattagaaaacaaacatggttaggtaattgtatttgcttatgttgcttttccattgactaatgggttagagctgaagaagccctccatttgtttcaatgaaatctatcattcactgattaaacatgcattgagccagacactgtactttgctctacacttgatcttagttaaaaggccgagaagcaatcgtatttggctctaatagtaacatgatggaaagaaagaccatcaagtagttgatggtcaagccgctttaatgtaggcataggcagaacctcatgttgttcaaagctttatttaaataaaaaagaatgtgaacaatggttctttctgagccttgctatgaagtggtgtggaaaagtccagtgagtaatccctactgctcatgacaagtgcaaagttctatttgctgctttaatgtcaacacagtttttttctgagatttctggaagttctgcaacttaagggttaaaggtagagaccctagggttcaacaggccagggtccaaatccctgctctgagaactgtagcttggccttggggaagatactttgtacctctgaacctcactaatttatgaaggttagatttggcaacatgtgacagccagctgaaatcaacagtgactgaaatgcaccaggacttaacacattcccattaaagaagtgtggacttgctgtcctggacttgtatagaatgtccatgaagccactatggacccaggctccctcccctgtctactccaccatccctagggtgtggctttgtcttcacagcccaagatggctccggaagctccatccactgcatctacattctactacatctgcattctactacatctgcattctacaggcggcaggatgatggaaaggcctgaaacattggtttctgaccccttccttatagcaaaatgccaggtactaaatgcaaacccttttggtcattcattcaacaaatatttgttgagcacctactatgtgccagtggcaataggaggcactagaaatacaatggtgaataagatagacagcgttcctgtcctcatgggccacagggtattggaagagccataagaatgatttaattggcatggcaataagccctgtggaaaaaaaaattgagaggttaaaaatc

SEQ ID NO: 42239 - DNA, 1723 bp, Homo sapiens
aaacacaaagattagctgggcgtggtggcgggcgcccctaatcccagctactcgggaggacgaggcaggagaatcgtttcaactaagcagcgggaggttgcagtgagccgagatcgctccattgcactccaacctgggtgacagagcgagactccgactcaaaaaaaccaaacaaacaaacgaaaactcagtgggagtgtcttcactatgcagtcgtctattcagcaaccttgacaacaagctctggcactcagtttctatttcccgggagttgcccagcgctccgcccacgcccgcttgcagaactcgccccgcctccgccccacccatcgtgtgacgtcaccatatcggtcccgcccctctacttcgcgttgctcccgggactgtcaaccgcgtccggaagccccgccttttcgcccccgcccgcatgcgcgggcgcacacgaatgcgggcgcacacgaatgcgggcgcacacgaatgcgggcgcacccttgagtcccctccacaaccgcggtttgatcccagcggtccagtcggccggtgctgcccatccgtcccgccccctagacgcacgtccgctcgcccggcgcccgagccagtccgcgcgcacgccgtctgcgccccgaaagccccgccccaaggcgcgcccgcccaccgctctccacgtgctcgctggagggcggtgcgaggggccgagccgacaagatgttcttgctgcctcttccggctgcggggcgagtagtcgtccgacgtctggccgtgagacgtttcgggagccggagtctctccaccgcagacatgacgaaggtgagaggcggcggctcgctcatggtccgccgctggggccctgcccgtgggctactggggctgcggggctggtcgaagccgcggtgtcctgggcgcccaagccaagttgcaaaaatcagtttaaaagaaaaattctctccttgcggggatcggcctaggccgctgaggaccccagcggtcgtattgagggcgcgattcccctgctcggggctagggggtgatggttgtagccgccctttacccggctccactcggccgcgcacttgctccagtcgtcacccgcggtcctggcagtaacccggggaaagacgcggcggtggggctcccatccgagcttggaggaagcccgagtttgccaaggtgaaagggtttctgaggtcccagagtcacagggctccttcccccgcggaagtgaaaggtcagggagttaagtagcttggaagggtttctagaggaaaagcatgcctctctagagaaaagggctttggggagagacccacgtttcccagaattaagagcatcttccagaagaaaagtgaactccaaaaaattacgaaggtcgctcttcagatgtgaaggatctgcaaagggaatggctctcggaaccagcacaagcttgggagtcatgcctaagcaccagaaagagatgactgtccctgcagaagaacgttctagggggagcttgagctccagtctcctgcaggtatctcagtggtggagggaccagtcgcctgaccagtgctatctccagtactgtgccacagcctacccagataacagttgctcagttggctccattgattcccggggagtgaacaatcttagggaagttagaacctggcagagttaccaatgccaaggaaggccgttttctttggtggaaaagaccgagagggcactattctaagtgtctgtg

SEQ ID NO: 42240 - DNA, 1817 bp, Homo sapiens
gagtcgggcggatcacgaggttaggagatcgagaccatcctggctaacacggtgaaaccccatctctaccaaatatacaaaaaattagctgggcgtggtggcgggcgcctgtagtcccagctactcgggatgctgaggcaggagaatggcgtgaacccgggaggcggagcttgcagtgagccaagatcgcgccactgcactccagcctgggcgacaaagcgagactctgtctcaaaaaaaaaaaattagcagcctggcgccttggctcattactgtattcccaacactttgggaggccgcggcggtagaatcacttgagctcagtaaaacacctgactcaactaaaaaaaaaaaaaaaaaaaaaaaaaaaagcccgtcgcgactgcacgcacctgtggtcctagctacttgggtggctgaagtagggggattgtttgagcccgggaggtcgagccctgatcatgacactgcactccggccagggcgacagaacgagaccctgagaaaaaagaaaagaaagaaaaaaaaagattagcatagtgactttctctttgatgtaaccataaatatttaaagacatcagtgccgggcacattgggaacctcaacaaagttgtttccgttatccatctccgaccagaattcaggaagaactttgcctgtcttgttcccgctataaccaatgactcaacaaatgtttgtggagtgagtgggtgaccctctccttttaccaacggtaaacagcccgcggaaagaaaaagtgacttagccaaagtctctccaggcatttggggcagagtcgggactagcatagtagtatcctgactctcgcaggagggctcgctccactgtagttattaattctcctctccacacaaccaggtctaatccggccaaagtcttcaattcttaagctaagaaaaaaggaaaatacatgtaaactctgttttgcgatagacaagaaaacagaagaattaaaaatcctccttccggggtgcaccagaatcctcccatcgctcggtcctgtcacgtgaccacgcctactacaccagccacgtgagcttctgagccggcttccgcgcaggcgcagtggatctctcttgcgccattccaaacatggcggctccactagggggtatgttttctgggcagccacccggtccccctcaggccccgccgggccttccgggccaagcttcgcttcttcaggcagctccaggcgctcctagaccttccagcagtactttggtggacgagttggagtcatctttcgaggtaatataagacatgggcgtctttgtccctagccttcccttttttctgaaacgtgaactgcgcgtacgcgtatctcctccagggatccgagcaactaattcacaaatggggaaactgaggcttaaagtaagtcacttgctttaggcttccccgtggcccgtattcaattcaggtctgctggcgggggcgcgtaaactcgacgtttgtggaaacgtgaacccgaagtttgcctaaaccccaaacttggaacccttccagattcccagccggtccttagtctcatccccgagcaccgtttcttgcatccctgcatgtttagtaagaggctcaagccttttcggagctgagagtttcactgctgtatcctgtatcctttccgctgggcttcacctttaaacgatcctaaagggactcttaagagcggaaattgacttaagttaccaggcgcagcttggtactaagagctgaggaaggaggaatgctggaggttagggagggagggaggcacaggtgacccaatctctcagttttgcccaaggagtt

SEQ ID NO: 42241 - DNA, 1423 bp, Homo sapiens
caggacagattttcagagcgactcctgtgtctgcattttatcagaataccagctcaaaatatactctagaagtatattgtagggtggcatattttggtctcctacagtcctatttttggatggtgcatcctgagatccaacagaagttctgtctgatataatttcatttaaaatttaaaaacctagttcctactcttctttattttaaccactacccgaaagacctttccattctcttgagttctcccttaatacactgtccttatgcacacttgtaaacagggcctacacagctgcacatctagaaacggcagcagctaagttagcccgcaccccccttcgcaacgatccccggactgcctgcacgccctgtggaacctcgcagtcggcttcaccagggcagggactaaggccttcaaaagacagcatccgtctccactaacctcgggtcgccccgctcagcggacccagcagcgtcgtctcccttctcagaggtggccgggcctccggaacgcgctacgaactttcctttgtcgccgtctctcgaagcggagccctcgtgtggggatcccccgcccttcggccacaagggaggttgttatcctcggcagatctcccgttctcactcttggaggatcgctttttctttctagcctcacgctcagccgcacgacccagccaggcctaacgccagcagcccttcccctccggtggcaaggccactccgctcagctcccgcgccgacgctacttccggccgagtcaaggcccctcccccttagaaacgccacttccctccgtgaaaacggctggacaaggttgaacctagacgcatgcgcccaaagcgcggggtgcgaggtgggtggacccatcgcttcccgctctcttctcccaaagcgcttacggcagtctcgcgggatttccccctctcgcgggaattatttgaacgttcgagcggtaaatactccctggggctgtcatagaagactactcggagagcgctgcctctgggttggcgggctggcaggctgtagccgagcgcgggcaggactcgtcccggcagggttccagagccatgggagcggaaaggaggctgctgtcgattaaggaggcctttcggctggcgcagcagccgcaccagaaccaggcgaagctggtggtggcgctgagccgcacctaccgcacggtaagcgctcccggccccggccgccgcctctcgcccgccccggcccaccctccctcaggggccctccgtggccctcgggctcggcgcaccgtgactccagccttgttcaccttcgcgactcacttcatagggatctgaggttcggagaagtcagggacttacccgaggtcgcctgggcccaggccagaaagcctccgaagcctgggcgtcgttcacacgggccccgccttggcttttc

SEQ ID NO: 42242 - DNA, 2339 bp, Homo sapiens
ggaattgcagttgaatggggatgggaggtggggagggcgatgcgtatgcgtgtatatgtgtgtgtgtgtgtaaggaagagtccatcacatgacagtgaaagaggaccagagtcgtcggggcgtccgcaagcagacgggggggagggtgtcgttgccgtggcaacaccccccatccgtccagacttccaaagagggaggaagaacttcaaatcccaaccgtcagcgctcaagcggctccttcttaaaggggtacacacagcgccgccgccgagcgcgagagggcagagttgggcgccccccgcccctcggacgacgcccccgccgcccctcgcccccagccggcccatcagcggcccccgccctgcgagtgcccgtgggtctccaggtccaggtccccgggaactggccgcgtctgctcacccggcccccggcggcgacaagggggtgtgtgtgcgctcggcgggggcgcggaccagcccgccttcctccggccgccctgcccgccggctctcctccgccagggcgccgacccaccgggccgcttcctccgtcctgtcagggtggacggcgggcgacggcgggcagcgacgggcgccgaggagtttcggggagagagcgagcgggcggcttccgcgggggctcagcaagcgggtccaaactaacagttcccggggagcccaagagctgggaaggcgaaggagcgcggaccgcgccgggccagcagcccgcaagacaaaaggcgagcgccggggccgccgcgccgcgccgctcccatctcgctcccccaccgaactaacccgaacgggagattcaactaaacccctcagccacaaactcctcgggctgcgacagcggtcgccgcgcggagcccggggccccggcccgcgtctctcttacctacacagtgcatgaggcggtggcgccaagagtcgagttcccgccggaatcctcttctctccgccgcgcaccgagggctccggcactgagcggcggcggcggcggcggcagcagcggcggcggcagcggccattctctctcttcccttgtccatctgcgtcccgcgtcacgcgccctcatttacatacgagcagcgcaggcacgaggcaggggcgcgagccctcggcgcgagccccggagcgcgcgccccccggaggggggttgattgacacgtgtcactaccttccctctgccctgccctccccctcccaccgctccctcagggagaggcggggagggagccagaggagaaggaagcaacctgccgcttccgctgaccccgcctccccacccactaccctcctccccctcccgctggagtttactcaggcgagccataccgctcccgccgcccgcgaaaaccctgagcgggagcgagagacccggagcccagccaggaaccggcgtgctagtggagcggactagcaacgcctactttctgccttcactacgggactccgacagtccggagacttcacttcccaggctccatttcgccaggatcccgaagctgaacttggcgccgtggcgcgttgcttgccggtcattgtagtccagaagaaaggattttttttgtttgtttgtttttcttcccccccgcacttgggtatgcaggctggcctgcaacttctctgcgccgcgccgctggggggctgagtctgtcgctccctgcgcccggaaccatgcgctgcccggtggccgggtctgacccgactgctttagcttccttaggctccgcgatagaagggtggtggaagccgcaagagttgtcggctccttgtgggttcaggctgcgctttgcgttttaagtgctggaaactttccggggtcgctgtcttcctgtcactccgcagggaaagggcaagccggtcattcggctacatctggaataactgccaaacgtccagagagagatcccggagtgacttcggtattcaaggcgaagagatctcggaaagccagaatatttgcaaggactaggaaaaagatgcgggtttttttcactgaaaattacttgcaggggactgggtgtagccggctgaaaactgcagaaggaaaattttctttataagctcctggagggcagcgacccactgagatctctgtaccgtgacatctgtcactcgctagaccctagtacagtgcgtgacacgggattaagcactttacaaaggttaatggaatgaattctaccacgtgctagagaaaataacttcttcagagagagctagagaggaatcttacgtttaaatacagactccaatcacagtttttacttttgcaccagagcgattgtgcgtttgtttccgtataagtgcagtttatcaagccgaagctaagct

SEQ ID NO: 42243 - DNA, 509 bp, Homo sapiens
attagactaatgtgagcctttttgaaaaaatctttcaaccctcttccttcaatttctccgtctataaatacttacaatatactgcaactctaaaataactcaagatttaatttaacctatttgtgttgaggaatgatctgagatgcgatacccaaaatgctcactagatggcagggttcccatttcaaagggagcgctaccttgttacaaaacagtaaaggcttccaacaaacagaattcgaaatgtgtttatttgtgtggctataaatatagcacatctgatccaattttccactgggttccatgcttttcagtgatttttcagccagttttttaaaaagtcagattaaagacgttatttgatatgcagccacattctttccaaataatcaaaattaatccctattccttatttttaatcagacattgcatatccatccacagtgtctttagctgaaagaaattatgaacccatttattaagtggtgtgtgatttttgaacacagttt

SEQ ID NO: 42244 - DNA, 879 bp, Homo sapiens
ataagccaggcataaaagggtacatatggaatgatttcatttatgtcaagctcaaaaacagtcacagctagcctatggtcttgtcatgatagtgatcctctttgcagggaccggggggaaggcttctggggtgctggtacatggtgtgtttctagatgtgggtgctggtgacctgagtgggttcagtttgtgaataatcattaccaatttattcatcctttgggtctatgctatatatcaagaaaaaaaatccaaaataaacaacgccattgaaaagcattcagatttccttttcctaattcccatagtatattctgagggtgctcatattagtcacagatcacaatagtcctgttgtccaaaatcacaacactacttagcagcagactcagaattggataatggaccacctggttccatgccttgtggcttttgttttgggttttttgctttgttttgttttaaatcacaagctgccctaacctctaagacccatgacaatgacacagtctgctggcaggaagcctgttgacctttttctatgagctaacactgtttgccctgttgcaggtgagttgtgtgaggagaagctggacttctgtgcccaggacctgaacccctgccagcacgattcaaagtgcatcctaactccaaagggattcaagtaagtcaaaagctacctttttgctcacagtcagggtaggggacccattattttaggagcccttctcctccttcatccttagcttcacacctctgctcaggattaaagggacctattcactagtatcagtgacattttttaaatgtcgatatacaatatggacttttttttttttttttttttttttgagatggagtctggccctgttgcccagc

SEQ ID NO: 42245 - DNA, 714 bp, Homo sapiens
ctttccttgactgaactttagtcagactccttggtgcactcttcttgactaggtctggtccttggtgtgctgagtgcattttagcaaaaaattctaagccagtttattgaaaatccccccacccttgataacctatcaagctcttcttcccttttcacatttgatttttaatcaagtttctcttaccttcatctttaatacccaacaaagttcccataagtaatattccatccacttcatcatgctgtatgttggctataaatctccaatagtccctgttgtattcagagtaaagttcagcctctctactctattacaaaaatcttgtcccctattgcaatagtttggaatttttggcaaatgtagcctttgcttggtcaaactttagtcaggctcctgaaccttctgctaggcatatttgtatacttccttgtaaaatccagtttcagcaaagaactccactaagtgagtttagcaagaaccccctgccctggatatatatctgatcatcctcaatatttgattaggttcctcattctccaccatcctgcaggtgatgtctgatcaccatgactgtggcctatcttcagcaagaattgtgttaggtcagttcagtcagaatcacaattacccctgatgtttcttagtaattttccatccactggcctacaccctgctccctgctatacgttcccatatgtccatgctgtattt

SEQ ID NO: 42246 - DNA, 815 bp, Homo sapiens
aaacgaatttccacagctaggcttatgatttagccagatagaacaggaaactacaagaaaatcccacagctgggcatgcagatggcttcggctctcacccctgaagactcggggggaggagttcacagtcttcagttctccgagtattgagggtaagatagctgaggaacaatgagtattaagtgtgcgagaaaagcgtttaggagttaagcacatggactgaagagaggctagggcgcaggcgactgggaacccgtcatcgtccctctgctctccggacctcttattcgaaaaacatcctccaccacgtgcccctttgtcgccagagacagcgcctgcagtgcgtgagctgccccctgaactcctggcgcctggttgcctgggcaaccctcttctggggcgcctccgcgacctcttaccattggtttagacgacgcagcgtgcgtctgacgtcattgcgcggcgcgaccaggttcaggggcgggccgcgcggagcctcatttccccaaacgcaggcgctcggtggcggtagccgcggttgttggccgaccgagtgccggtcataagccccccccggtggggggcagctggtgtgcggatcgcggcgggagagaggcgcggtaggaacgggtccccggagccgtgaaccgcgggtacaggtgtcctgtctgcgctctctgccaagccggcttgcttcctgatctgttgctagggccgctggaccccgttgctaaggacccttgagatcgtgagcgcttggagtgtacccctcctttcctggggtagagggtcagtcgagagtagccttcgttaac

SEQ ID NO: 42247 - DNA, 1119 bp, Homo sapiens
gcccgtattttagaaaagaaagtgaaacaggaaggtaaaactgtaggtaacagctactggccaggttctggaaccacaaacagagttggctgcagcaagctgaacaggaaaaagtactacaagttaaagtttttgccattcaaagcaggaataagactgtgggtccttcctgtgtgacagcaggaggacagcaggacccggagctgggaggaaaaaaaacccagacccaaaagagggaattctttttataagcacctttgatttggatggcaggcacatcattctgtttcaaaagaagtgtcgctgggctctgcctcaatgccttccggcaggtggccaggaccagcagaccacttgctcgtcactaggctctgtttgttttctttgtgctggactttgcctgtctcctatcaaatagcaggggaaggagtccgggaagcgttcagagataaaccccagagaaaatcgtgtatcaaaaggaaataataaagcctagaaagacccagggaaggaaggaaagaaaatgcgtgcttgaacttttaaagaaatgggaaaagtgactcttttgcttttgtatttgtaaattttttctctccttcctccttactgcccccaccctctaaagaaaagactgaaagcaaaattcctctcactgagctgtgcccagggctggcttcaacttttccagagcacccaaggtggcccaggtggggaaaagaggatgtcagtcagcttggatttcattgtctcctgaaatcaagtctgagactccagtaccttcctggggcatctagcaacaaagaaagcatgtaggtgtgttcaagaaggcacactaaggggtttgctggagaagcaagtccaagccagaatttgcaatcccaaagctagaagtaaggagtcaggaaaaggcaaaggggaaaatgcaggctttttctttggaacaggggttttccctggacgcaattgcacagagctgcctctccttgagtgctggcgctgtgacacgtgggtagcttcgctggagttaaaactagttccaaggacagattctgtgttgactactgtggcagggtggtccaagtgagctttacatacttcagcaagagggccctgtaagag

SEQ ID NO: 42248 - DNA, 583 bp, Homo sapiens
taaaaactttattatttactcatcatggccttcttaaaatgctttacaaacccaagaaaactggaattttaatggaaactcactggagggaaattttttcaagcttggagtgaaatacaataatacataaaaatacatgaggttaacatgttgcaccatctatctcttctctgcctatccaaattctacacatacctcaactccaattgcttaataaagcctttcctgagtattcctgctgggaatgatcaatacctcccttggagctcctactgcacaagagtacgaactacttatttggcacttatctttattgccatgcactgccagtaatgttttacatgtgtttatctactgactctaacacggacttagcacctaacattgcaaaaggatttttaccaggtgctaaggggcaaaagaaaatacattacacaaaagccatcttccacttgcttatagtctggtaagttttaaaaagatgcatagaagcaaagataacaaaaagcacatgagtagttcaagtattctaagcaatcgctttcaacaaagtgattataaaatgaatccaagaggtggcttt

SEQ ID NO: 42249 - DNA, 405 bp, Homo sapiens
tttgtctaaaaacaacttggattcctggtattaatacaaaacagccatttggcatctgattttcttttatctaagtgaaattttaaaatccctgcagattaacatatcagagccttttcttttaggaattcctaaagtgaagcataactgggtttcgactccagctctatccctttcaagttatgttgactttaggcgagtcacacttcctctcagtaacagagttccattattgataaaatgggaagaataaaatctacctcacgaacagtagaaggaattagaaaaaccatgacatactcaatgagtatccattaagtttcaaattctgtttccttggttctaagacacagatcctccctcatttcaatgttttctgacgtgtcaactcaagaatggaaaacc

SEQ ID NO: 42250 - DNA, 1680 bp, Homo sapiens
cttccatgtaaacaagttttctgtaacaactgttctacaaaggcttaccccaacaccactaccaaagaaagcacttaaggtgtcactttcatgaaaataacaatagttagaattgaaggccagaagccaggcccagcagcctatgtgtaacctgagaagataatttacttgtccaggcttcagttggcactcctgtaaaatgtagacaatacggagctcataaagctgttttagcaatcaggtgagaggttatgcggggagcatttggcacagcacctagaacacgatcaacattccaacgttggttgttattagaactttcaaatcagttaaggacacttgcaacacggttctgaaagtcaaagagctctacagacacctgaagtttctctagtcatgggagttcacgaatattaccaaaccagttttaggaggaagttaaactagcagcagaaataaatctctcctttaaaaaagcaagacaataacaacaacaacaggtttttttactctgttgtgatggttaacattacttgtgaatgtaaagtaagaggtgcccagatagctggtaaaccattatttcagggtgtgtctatgagggcatttccagaagagattagcacttaaattgataactgagtaaagtagatgatcctccctaatccactttggggaagaccaaagtagactggtcctctttaagtagactgcctactttaagtgggcatcttccaatacactgagggcctgaataaacaaagaggcagcagggcaaattcgctctgtgctagagctgagacactcgtctcctgcccctagacatccggccttaagttcttaagctttcagacccagcccaggactaacaccctcccgtccacctgattctcagactctcagacctttgaacctagactgaaacacatcaccagctgtcctggttctccaggctacagatcatgggacttccttataaccatgtgagccaacacctacaagaactctcctcttaaatctatctcttcatctagcctatgggttctgtttctctagaaaatcttaatatacctttatattaggtaactctacaggggttccatcaaaacaagaaacaggtctatgaaattaatttcatgagaaggctaaagacaagtgttttctgaaatcccattttcttgaaggagaacaatgagaaaggccaggatcttcagttttactttactatccagcaacatcccaacaaaaaaataaaggcatcactagaaaataaactctgggtcagaataaactgcaaccattaaggcttatcagtttcatagaccagcaaaatatcacagaaattaaagagcaagaaagaacctgaatgagtcatgttatactcacctcccaaaactctcttaccagtcacggagggagcctgttattcattgactgcaggtcctggggactccccacgtttcctttccattgtaaagctgccaccacctacactcccctctggatatactaagacttagtataaaaggtctaaacaatttcccctcttattttttgctccacacagtaacagaacaattccaatgtaaaaagttttataatcacaaaaaaatgggaaaagatgaaaaaaaaaaactaatatgagaactaagaatattataaaactttaaaaaaaaagtatta

SEQ ID NO: 42251 - DNA, 3057 bp, Homo sapiens
tattttcatctaaaaagctttcaggcaaaaaaaaaaaaaaaaaaaaaaaaaaaaactggattgaaatgacatttcatagttacttatattttaaccagtttctaaaaattgtagaaaaatagtttaattggtaatatgctgaaaatcaatttaccaccatatcccctatttttttctgcaacgcaaaatcaacaatttactagtagttgacctaatccagctgaaattgtggacacttttaggtcagaaaaactggacctaaacatgagtcaacgtaaatgtcactcattgacccaaaacctaaatgtttataacataactgcatgatgactaatttttgcagagtaacaaagaaaatctcctccaacattgggattttctccatttggactgtaattaaagtcccataccgaaaatttccacttcaaagaatctgactaagaaataaataaatataactgctgccaccaccacatggtaacgtgttagtaacggagtcaaataaaacaaaaactctttcatccatcttcatgcctccataaatagacacatagacacaattttcatggttaaacgtttcctaattcaaaaaatggaaatgaaggtaaacaaaagtgttagtaatgaaatgtatacctggcctacctgtgtatactcctgctgaatttgggttacatttaaaaccatactttaagtgttttcatagatcatgctgcggtccttgcattcatgtttgtatagtggctgccttgattctttttttaggaaaccaaccaaaacaacatagaggaaccccgagccaagggactcacatttcagttgaacaaaatacccatgagaaacacttagactcaaaactttccaaaccaattcatccttctgaaaacaaactcgacagtcactggggccaactgttcagctagaattggcaaaactacgtttgcaaaactgaaccgtgaatcccagcacaagtgagttaccaaaatttttccttccaggtggaaactcaatccgaaaatcaaaaatccctcgagttggaaggctcaataaacccacggttttcagttccaatgttcctggcttttaaatataagccctcacagacacgaaaacgggactgcaaggtacataaacagattgatctgaaatgtttccagcccttaataacaactctatcttaaaaggtgctctttaactgtaataaaactaagatagcaaaaggcaaaggaagcgtcttggggtttgggctcgcacacagtccttgtgttttgcaaactctaccacgtaagtgtaacttaatttgcaaagaagcagaaggactggcgcttgcaatcaagcattgtgttttctggaaacccaagcccaggatgaatgagctttaactctgttgactgcgtgtttacttgcatcctcacgtggcaccgcgcagcccaaaagcgctgcgccggggacagcgcggggagcgcctgagaacccgaaaactttactttgcaaactagtggagctgggaggcagctcggacgcagattcccttgcctttccctgaactgcacccatgccaagcacacgaggtctttcctagcaccgccccctgcctacagctccacacaaaggcgcgtgggtgccggctggaccctgctccaaagttgagcggagagataagaaagagccgagcgggagaggacccagcgtcgcgggagatactcacagggtgaccgtgcggttgggcagagtatctgggggcaggacctgcgcgagttccaggctgctgcacaccaccttgccctcggcggcgcccgccgccctgccagcccctcggggccgcccatcgtgcttgcagccggcgggcagcgccgcggcgccgccgccgccgccgcctcccagcagcgcgagcagcgctaacagcgagagcggcagcaacagcggcggctgcgcgcggccccgccggcgtccgggtggctccatgctgcgggccggggcctgcggggcgagcggcggcgcactggcctagcgggccgccccggagcccgggcgggcaggagcgcggcgcgggcccagcggcgaccggagccttatggcggccggaggacgggccttccccggcgcggacatgctcctttgtccgctgcggctgcgctgggcctctagggagccgggggtcacggccgcatgggtcccagcgccgctctaccgcccggcgcgagcaccgcctcctcctcctcctctgccgccgccgccgccgccactgcctcctcccctggccaggacccgcgcgcggcggctcctccccgcccgccgccggcggccgcccccgccccttcccctcctctttcccggctctcctgctctccccgtgtctgcagctgcccgggacctcggggaggaggcgcgcgctcccgggacctgccgagcccgactccgacccggtgcgcgcccgggcctcggcctccgggcaggagttgtggggagcccgcgggaaggcagtaactcgtagagagaacggaggaaagttcgagtccgaacggaggaaagttcgagtccaaactccacccgcggtggccactctcctgctcgtttcccttcgccgccaccgcgctcgcaccgcgggcacaggacaaagcagtcttgtgcgctcctggagactgcccatgtggcccaaggagcctggcccggaggatggagtagggacgagagtagggaatttccctgaccaaccctatgggaaaagtacccaaaaccaagtgtttcggaaggaatcgccttctcacctcattatggtagtcttatttgtcccaaatacactggagccagtaaacaggttcctcttcaatacagtgaacaatctgaagctgtttctggccttcagcaacaacagcgatggtctctaaaggatgcatctggacctcactagaaaggcagccttttgaaagaaattcgacaggcaaagatacttgagatgttcaccagttcgagcaataatgagcaaaccctccaagaaaccccaacagaattgattactctgacttccagcctcgccctaacatttgcaagcccagg

SEQ ID NO: 42252 - DNA, 2010 bp, Homo sapiens
ttaaatatcagaagaaatggttaaaagtggttacctctacagagtacggatcaggaattgggatgaatgaactaagggaaaattctagtaggatgataatgactttttaaaacaatgttcatgttactttaaaaggcaaaacatcaggtaaatgggtgccctgccaaatcagggacttagcacccagggttatcaactctgttaagaatcagggagtgctgggggaagaaagtataaatgatggccttgtacaaagtatcttggattcttatcaaggctgtggcagtcaagtgtcctttgcccctgcttccttgttgtttgcataaatatttgtattctgaggcttcattctagggtgagagctcattttctgtttgcacaattgcctggctcctctggccaaagggtgctctgcttctggcagctgaagatcccagtagacagcttcttaaaccatggctttccctgcaggatttggatgggcggcagccactgcagcttatcaagtagaaggtaggggacactctctccccttcactggggtgggagtgctttatttctggtgtgtcctgtgtacctgaggaagatggtggggtaaggaggcaaaaagaaaagcaaagaattgaacagaccacaatgttatcaatgaatttgtttcccttttcaaacatgtcaggggtgggggctcacattctcttgtctctttaggcacaaggaagggtggagggatgaagaggtgaaaaccaagctgtggctggattttcagtcagtccaaactcagctgagacatcagtttacattggaccagctgcttttataattgatttttagaatccatttgccccaactcctctacaaaggagaatcatttttttctattggctggaagaatattgggtcgattttttcaaagagcccttcattaattgggaaaagttccctgttctattcttagtgagcgccaagccaagcctaatcttgtatgccaccatatttcctggggcagctgagaagtaaatagaagcaaatggtaaagagcacccagagtgcctgtggagcccaagttctgatcctcatcctaccacacacaagtgtgtgaattctttgtcctccttgagtctcagtttcttcatctgtgaaataggaagatgagctttacttttctaaaacacgtatgtccccccttcccctccacaaagggagttagagattgttaatagctaccatggagaaaatatttatttggtcaaataagtatatgaaaccctggattaaacaaagcaaagtgagttattgtggtagcttcctaggattgccataataaaatatcataaactgtggggcttaaacaacataaatttatcctcttacggttctagaagccagaattggccactggaggatgtaattagccaagttaagatgagatcatactggagtagggcagatatgcaatccaatatgaccggtgtcctaaaaagaaggaaatttggacactgagaaatttggaaatttgaaagaagaaaaattggacaaagagacaaggagaacaccgtgtgtgagagagagattggaatgttacagtaagctaaggagcaatagtcgccactaaaaattagaaagaggcaagagggattttacctagagacttgggggtccatgagcctgctgacaccttgattttggaactccagcctctagaactgtgagagaatacatttctgttgttcaaggctttcattttgtggcactttgttacagcacccctagaaaacttatacaccgagaaaaacaagtcaatcaatcaatgaaataatgactgctatggtaagtgctatggtgataataggatgttgtgggaaagggtcacgtgaaaaccagttcttcaggatgggtcatcaaggaggatctttgtgaactagcatcattccgtctaaacttaaggtatgaggaggagactgccatttgaatatggggagatctttctagacaaagaaacaggacaagttg

SEQ ID NO: 42253 - DNA, 1787 bp, Homo sapiens
aagaggtaagcatatgtaactgtggtataagagtgcccccatgtagtgctcaccaaatactaatattaatgccaatactattattatttttctttctcctggctgtattctcttgcactctgagagaaggagagttacactgtctactccatttagtgggaatggtcatttcttgtttggactgctagttagaatctattccctccttgctcatgcttgactacttcaccagcagttgccaggagagttactgtttaaccatttctcccaccatcgactggattacagtgcaggaagttcactcgtggctttatcaaatcagcatggcttggatttaaagccgagaacagcctgtctctttttgattttgataatctttgcagttttgtgctgccctggccttggaaggtctgtagatgcattggaagtcaggagacactcagcagagctgaggactgagcctgaattgtatttgtaaaaaaatctaacacttttaaagatttgttataaaacattaccacgtatctctttctactgtctctctttccactgtatttcaaaatacagttgtctgtattggtatatttgttttcagatactctcttgaaatccctgaagaataactagcatactctccctcaccctcactgcgaaaatggagatattttgtctccatatagaaaatactgtcagggtctttgcaggtgggccccactgagaggggcagggactgggccttatcaccaggtctcctaacacattgactacttggttgcgtattttgccggaatcacggcctttcctttgtcctgtccttgttcagatcctttcttcctctcctctggctatttcactgtttatggtcttatagaagagtttaatgttattacataagagttgactgcatggtgccttgagccttttggaagaaagcacaatacgaatctaataaataaataataaataaatggtataagcaggaggaaaattatgtgttttaggtgagttgtaaagaaccatgtaaaacctaaaaaatgtatttgttagactaagaggcagggaagaaagtgcaaaaaatcatcgtacatacagaagtgagtctcccgcaatgtttttaagtagagaaaaattcccatgatttttaaccccttgtgaagctgactctgtcctctgtgtttggctggagggaacgtgaggtgcaaaaacatcaggtagctccgtggcattttgtttactttgatggtaggccacggaagagatatgaaaatgacattgaggacccaattctacagttcttatgagcttctaactcccggtgatttcagggaaggctcttaaggagcgaacatgctttgcaaaatcccacaaatcctaagcaaagtctaaactactctgttaatgcttcctagtgggatctgagtttgtggtttttaaggagccaaagttctcagttttaggaatgccattgtgaatccttgatattactctaatataacagttgattttaagtttgactttggttttatgtcggcagaaattggggattgcctcagactttggccatctctatttgccatacgttaaaggtggattcttgtagttaagacatttgtgtgtgtgtgtgtgtgtgtgcatgtgtgtgttcccttaaaaaattggaaaaagaacatggcagctgtattttttggttataagttgagtttatggtgtttctatataggctgttttttctttggtcctttttttaaaaaaactcaactgattcacacaaacctaagctggagaca

SEQ ID NO: 42254 - DNA, 1239 bp, Homo sapiens
aaacatatatcaaaatggagttattttaaataagatgttcatatttaactgacaaacagaatcaatctaccgtgcctagttcatagaatagattcggggagtcaatttttgtgcttaattgtttgtacaaagaaaatctttgacttatgaatgataagaaaataatgaaaattgagttagtgcttataaaattctcgaattcttttgcttttgcaatcaagccaggcagatttctaggagttgaggtttcttagggtattttatgtttcacatgacgtcaccaagaagttacggatcaatagaactttgtaatgttcatgtagcagagggatgaaagagttaaaggatttaggtgttgcaaagggtgcttcttctgggcaacagaggtttgaatgtagggcaccttttgcattttcagcattaatgtttgaactcttgtcctacagttatgtaataagacaactttatttttttttaaaagagaaacagaaaaaaacgtctgctgagaaaaatacttgccgcccttggggacagattttgcagtacatttttgtacaggagtcattctctcctgtccaaaagctctggaacaggatgaatgtccttctcaaggttcttagagcccagagtcatgactgactacacgcatcagaagaaacacagagatgtatgggcaagattcagtgggcacacccacaggtctgagagatcactgggctggcgaggcattgcagccaggccgccagctagtctagaaaaagaaaccaggactgcagtcgtcggtagactagctagataagggtcggttccctcaaggactagttactctgaggtctgttctaaggggaggcagcccatgagcaaatatagcctagtatagtaggtataaaaactgttaattaacaataacatttatgtactgccccccagcaagtcagttttaaattcaacaaattttctcagtaactttgggaaacaggaagaccaggtgttatcctcattctcattttacatatgaggaaactgaggcacagggaggttgagtgaatttcctaaggtcacagatatagtaagctacagaggtgaattaatgtatggaaaatactgattgaaaggctggagagcacagactttgttcagtcacatctgacttacaattttagttctgccgactgctagatctatgaccttctctaaatccttgaactcaaggaaacttcagattcctcgtatttaaat

SEQ ID NO: 42255 - DNA, 597 bp, Homo sapiens
actcactcagattcactgagagtgttaatatatggtatatgctctgtgtttcctttctaaaacattctgaactcatatgcccctaagattttcagacacaagattatgtacctgtaccaatatgtcaacatattcagctttgaaaaccaacttgagatactcagaagtttgtagagacacactgtagatcagcaatccaagagcaaggaaaccgaaaccactggagagtgggggtggtggtactgaagtcatggaaaccacctgaatattgtggagaaattgctcatgcagatctcacgtggggatcacgtgcctgtagcactgagatttttgtgtttggccctagctttggtaaaaccatggctgattaatattacagactttgctttgaacaagagggcactggaggtgcatccaggaggtggaatttcaataagcagttgttcattcttgtgcagtgatctgttgaagcaattggaatggttttaacttggaaaggccatctcttttttcccatttaaatattttctcaaaaagcatgcgaagaattagaaaatccctgtcactgttcttcccaaggaacgacctttttgtgtt

SEQ ID NO: 42256 - DNA, 2004 bp, Homo sapiens
tgacaaagcaagactctaacactctgtctcaaaaaaagaaagaaaaagaaaagaaaaaaaaagaaagaaaaaattgcaaactggcttacaccaagtggaatgcaatcagattccatggccacttctgcatttgtttttaattccatgtaatcaccatggctgcagcttttaatctcctgaatggccatagcatacattgctggttccatgccaatccccagagcccaggcaccactgaatgcaggtaagtgactcacatgctttgaaaagttccttgactcaccctgtcagtgactatagtcagggttccttatcaacaagtcccgccccttcttgataggggaggacctctcagcagcacgagttgccacttcatccttcacacaaagctgtggttgtgtggctccacagcccccttgtcagtaatgaaatggccatgtgtgcagtactgtgaagggccacagatagttgccaggcatgccagctgcaatggagtgttttgagacattggagtttatgagtaatgatctaggagagcatagttattttttctgaagtgggccacagtgagttcattctggtttaaggggcagtgtcagcctgtgagtagtgtgccgttggggaatgctaagtgaatattttatggttaccgatacaaaatggatgttttccctctgcttttattcacccatccattcgtgtaataaatatttatcaagcaacaattataatccatgtactacactaggaacatggaaaacaaagatgaataaagtataaactgtgctctctgtaacttaagagttcagataggaaggtgtgcttgtaaacagaggcatttggtaaagtgttctgtctattacagccccagcatatgcagggcttaaaggagaatgtgctcaataggatctgggaaggagacagagaagagtattcagaaatacttcataggggagagcttccttgcaagaaagcattttcagcaggaaaataagagctgttgaattagatcagtatgaaattaaatcctagttctattgacattgagctatgtaatcatgaccttgattttacctttctgagtctcatctgtacagtgaggatgaccctacccatgcctaccgcagagacttgtgaacattgaatgagattcatgttgggcaattcaaagagagtttttaatagttgtgcataattcagtacttttccagggacacagtccctctgggtaagagggatgattttcccagtcatgctgtctgaactttggcatgtgaatgtttccttttaccaatctaagatgtgccaagagcagggcaccgtgaccttaaagattaggaatgtgagctgacaaatcaaagaattcagtgacacccaggtacacgtggtggatagtgatcaccactgttcccttgaggaatgacgatttactttacaacaaaaaggaatgtgttagccattacttcatgctgtccttctgaactgtgagagtgtcaggtattcatatgtggaaacctgaacaagagataaacaaatgtgacttaatttgcaatctttgtctttttagactagtcaattatatattgaccgtaatgccttttcagacttataaattatatattttctgttacatttggaaagttaagtccatgtaatagacttatcaactactcaatgaaataaagcagtgattattattcctgcatcagccaaggttctatattgcaagcaacaaaatctgactctggcttactaagaaagagagtttattgaaaatatattgagtagcccacagaatcattaggcgtgctggggaaccagagtaactgctaatctttcaggagctgatctgataagaaaagcaagaaaactgtggaccccaccattgaacattagatgccaatgctctattcttggaaacttgtcatttctgaggaacttggccttattgctgtattagagaagaaggagctctcaggcccttcctttctccatcactaggtc

SEQ ID NO: 42257 - DNA, 494 bp, Homo sapiens
cacagggttttcactgggattaagtcgaaaagagtatgtggacttcacccagtgtaaactcaacaaatgccaattgactataccctccctaagactttctctttataataaagatatatcagtagaattatttagtcaaagactatgggcagctaatggctattgctaagtatgtaactgatagccactgcctgaatgaatgactcatgactatttagtctagagcagtagagtaaacatgagcatcacttacatcacataaacagcacaacctacaaagaatgtccccccagtttatagataaggaagtgaagcacagagaggtaagtggttttctaaaaccacacagctgaaaaatggcagtcaaatgacagacttgtatccaggctttctaactccagtgattgtgtactatgatgcctgaaacttttaaaatcatgtccctgatactaattactttctatttcatgacacattttaataaagtttcttaa

SEQ ID NO: 42258 - DNA, 677 bp, Homo sapiens
cttcttctagcctgtcacatccaaaataatatatcttaggtaggacctggccataatgcattttgaaaaagtttcccatagattctttttcatacttctagttaaatactgaagtggagagtttcaaaagttataggtagaaatatcactgatgtcttaatacttaccctaaccttgatttaatggaaagttctaggacagatgatgactgataaaatcaataactcacagtgtgaggtacttaaatgttgcccaatgaaaaaagtcaagtaaggttcagagtataagcaacccaagtgcattgccttttgattcccatttgttttaaagaaacatcaatcaatagattagtcaggaattccactcatggaagggagtttcaaaagtggtgaaagataatgcctggaatgtcctgtctttaggtatgtttgacctaaccatctggggacactgggccatgctgcattcacacaaatgattgagattacagctgtgactgctattatcaattccaaaggagtgccaagaaggcaagtctgatttagaggcatggcgaagacagattactggtgggtgtgaccacaggagtaagagaaaccaggaggaattcatgtagaaagactaaatgagcctttaaaatgatgtttttgaaagccttaatggagtgaaacaaagcc

SEQ ID NO: 42259 - DNA, 595 bp, Homo sapiens
ctatccaacagaccctgctggtcctctggctggccacagtccatttgggagtggcctgcctccagtacattttaagtatttctcctatcacccctggttactgggtaacaaactggccttggagaaaagcttcagaacattcctatgacataagcctaattccccaactcttgctcatggaagatgaagatatcattaattgacccttgtgtaaattccccacagagctgggatagaggatgggtaaggggaacctggcatttcaggtggctattgccaaaccccaaagctgatgtgggagagaaaattcctttgctatccttggcttacaagaaataggatggtaccatttccagagaagaaaaattaggaataaaggaattgtcattatagacactgggtcaaaatgaatgaaattgaaaatagaaaatgaagaatatggttgaaatatggaagaaatctctgacagtaagagtcgccaagcattggaatgggctgtaaaaagaatttgttgggtcttcctttcttagattcttgaagcacaggaatagattatgtggcctgtcaaaatcaccttccagttctctgatgctat

SEQ ID NO: 42260 - DNA, 954 bp, Homo sapiens
gtgacaggttgacaacatacaatttcatgcttgttgaactgatcggtgttacatattcactgtgaatattatgaagcttcaccattataaatatgaaacagtatacacttattcaaagtaactccagaagtggcaatttatagcttggttgtttgtgttctgatgaagtccaaatgccaccttaagaagctgcagctcgcagaaacagatgtgcagtgtgactgcgaccaaaatggattgacgatgacctatgtgaaagcaggctattacattttggtctgcatggcagctgacactggtttgtatttagatatgtgactcttgggaacactgtgtccttaaagctctgtttaaacatgggccaagacatttgtctattggactaattattttaccacccttctatggcaaagatcacttttttccccctaaaaaaaaaaaaaggatatgagagagtgtatatgcacatacacaggcacacactctcactacgctttgtaaaattacagcaaggactttaaaccttggtcatgtcaggtgaatgttggcaagatttccagaatgtctgcatagcaggattgtaccactttcttgatcaggtgcttgagaacaggacaagaccacaaaccatcaaatcataagctgtcacagcaactgcttttggtcaagttttttcctcctcttccctacctcctccctttctttctcttagcaagcttcaaccaatttacaagtgttcgcttccacaaggacaaatttggaagagtgaagaacaacacaatttatccaaatgtgggatgaaatgaaggaaccaggcaccttgctaaagctagatatcaaaaatttgcataagtagttttgcaaccacagaggtgctatttggaacaaaataaattgcttgtattgtatgcaagggtacaaaccttgaccaactttgcggtgtcttccctgctt

SEQ ID NO: 42261 - DNA, 863 bp, Homo sapiens
aaaaaaaaaaaaaaaaaaaaaaaaagttaaaaggaacctgagaggttaagaagaagaaaaaaaaatggcccttactgaaattgttttacatcacaggcaattcattttataaaacccacaataaaatttttcattactcaaagaataggcacataattatagggacaaattaaccttgttagatgtgaagtctgggatagggaatggtggaggaacaatttggctctctgctttaacaatgtggtctttaatgttcagctttttatctgctttgtgtgttgattccatccagaggtgagtcatctgctgggctgtgcttccaggacctggcgtagagatagtggggcatggacaaataaacacagcaagtgtataaggtctccacacagacacatggttgctatacaaatagacagtttgtccaatgcagcaccctgaaccttgtgattactttcacctacactattatctttgaagtaaatctaagaagcaatgagccactttttcctgattctgctccaagatttcctccttgtgaatttgggtctccactattttggccccaaagatatccaggcagagtaactttgatgagccagttgagactccgggaggttggaaaaacctacaataagcccataaaatgtcccagtttactttctggagtgcctagagtatctgacatgaaatcattggtttctcctatcccaaaatacaaaatagcactttctgaaatccttgtgcctaatgaaacatacacattctcactttgcaaactgcaaatggctaagaaccgaatcaacgtccataaaaaaaaaaaaaaaaagcagccaatttcatctctcctagccacaccttccatt

SEQ ID NO: 42262 - DNA, 1340 bp, Homo sapiens
atgctatttaaactaaccccatgccatccatctttacagactgctgtgctgcaaaagtagtcctttattctcctccttcaaacaatgcacaaaggcaacagagggaaggaagttatgttgcaatattctgaaacataaatcttgctaccagccggtccagggacgcatcctgttttccttacacatggatcagattcactggaggctgttacctctgagccttttgctttgttttttaaagtggcttctgaatcgtacctggtcacctgcatttacacatccaaacacaggttgcgtaagcagagaacattgtttgcgtgtccagttactcaaccaacatgtgctattgcatgttgctacccctctgccaccacccagaattccctttctcaaattgtgacattcagcttcattttttatcattattaagtttgtgatgttaaataaaaattaaacttagattcaaacatatggaagaaacaaaaagaagagatacataatttactctcaacattttaagactctgccactctattatatatccctaaatcccactttctgctttgatgagaattcagtcgatggccagtttccagtggtgtcattgacgtgctacttgagtcagggaaaagcatttaactactcagtgcctgattttattctgggaatccaaagtagataatgcttgttattgtcagatcagagacagcagagcccgtgactgtttaacttactcaagtacaaggccttctcaaatgtgatgaggcagggctttgcaaattggaagaaggtgagtgcaggtgaaaagtccactgtgagtggccggccctgggaaggcacttccctgaaatgctgctttggtagaagcaacacaaacctgtggccatgaaagagttatctggtttcatacgaaccttcttcacagggaagacccaattttagaatgtcacctgtgctgaaaacacgctttcctttcacattacagaaaagatgcctgagtttaacactagagggcaaagagtggaggtgtcctcatgccatgcaaatactcctgaagctgctgctgttggtaagggcattgccacatatgactttaccctttgcctcgataaagaatgggctttgtgacatcagagaaaactgttatgggaacttacctaaacagtcacttttgccctctgacactaagaggatacctgacatattagtcctggagccccaggcatcccgatatcgttatacgacttctcattctttatatccagtagcttactatgtcttctctcagaaatctgaccaattaatcattagtaatttataaaggggaagcctgtgacttt

SEQ ID NO: 42263 - DNA, 4210 bp, Homo sapiens
aggggaaagggggtggagagaggggcagtaaagaatgacagtcttagtggggtgtatgtcatgtgaattgtctctatcaatcttagtaaccttactgtatatcaccttcattaaactgtgaaacacggggcactccaagtagctatagtgatataggcctatattaaccaatgtactaccctgtcattatgtgcaaaagggcataatacgttttaggatgacagcaaacattaatgattcaaaaaatgaaaactgccaacgctacctgctgctcgtaatattttatacaggcggaggtgattcccagagccgctgccatgtaggcaaagcttctagcagctagctgcctatagtgcaacagagaagtgactggccaatctcagccgactggcgactctatccatggctggacaagtagccaagacctttcctccttaagaaaaaaatttaaaggccactattctaaatgcttctgatgtttatttgaaaatgactgcaggaattccaatgattaaaataaatcttccttatttccatatgatctagttcctcaatcaactcctaacagcatcaggaataatacatgatggaaaaatgaaactacagcagctgagacccacagtgccagccagacaaccacccacaggacactccggctactcaaaggcaattaggactttgaagccacttataaccctgactcataatggctacagggcatatgaattatccatatctattccgccttaccaagaaatcagaacaagataacaattacaatccacaaatacgatctaccaaggcaagggagggcaaatggagccaacatttgcaaacccagcaaagagttaagaatcccgggcatgcctcgctagataggaaaaatgcattcacagacggccttggccaaattattttcactttagatgtgtatcgctgcaccacatggacatcttatttaatcaaatcacgtgtgggcttgatcctcccccttaccctacgtgcccccagctacccagaggaaacactcgcagtcttttgccagattcattgttagcagctgggatcctccatgcaattcaattcgagtccatctcaccagagtccacagaaagttttgcttgtttcccaagttgcccaaactttccttccgagagcattccattgtgctgaatgcaaacacgccgaggtcctccgtccccccactagactccagagattacgaggaaactgcttgcgttattttcccccctgtatgaattgtagccagcagagactgtggaattgatgtattgctgtctatttttacactagcagcgagcagctccacacacagtcctgcataaactctattctctctcagcttcaggcagctctccgtggtacaggaagatttaaccattggcttccctgccaccgacgcgaacggaaaaccttgcactgccaggcgtttctttttattcgctggccaaatctttcaaccacgtataggagttttaaaggaagcagcatcgttgttttgtgttctgtgggaaaagcaatctaaaatagcccagcaggattatttaggattttgtaagttctctgtctgatgaacagagagagaggggggaaaaatccggactagagtcaaaacggactatatttgaacacatccattttaatatttttatcttcgtcttattataaatagaaatggcatttttccaaccaggccactaaacaccactggaaagacttcagcttctgattcatatcaatatcttagagcataaatattgcatatgagtagaaacagtgccaaagtcacatggaaagagtttctaactgcaacagatactgatgacagcagctaagctttgatttgctcaagccatctcagagccaccttaaaatagcaaacttattggagttaagataagattgagattcttctaaaagctcctgcctggactactttcctggctcctctctttgcccaagcccatccccccttacaggaataatagcatctgagggaagcgtcagttgtggctgcagcgccgagccctgccccagctcacctcgatgtcactccatacagactcagagtcctggttgcacatgtcccacgccatccagctcctgaatgacgccagtcaagctttttcaactccaatccacagtgacacagagcacacactcatgcaggcaaccagccccttactgagagtgaactgaaggcacctgtcttactacagtccccagtcacatgacaaagctattaaaaagtaggctgggctgtcactcacccagcctcccttcccctgtgcagcttgctgctctaactcgtgacgtcactcaaaggcagccctctgcttcagtgaagtaacgctttaaaaaaaaaaaaaaagaaagaaaaagaaaagaaagaaagaaaggaaacacttagacttttggaggcttcaagcatcatgctgtgattaaagccagctttgaatgccacagactctaaacggagccctggccatataataaccaaaatcccctgcaatctttttttaatttattttccttccaaaacaagcaagtggcaaagctccctgtttcatgacagagtaactatattcttagctaaaacgtgtattccctaagaactctttaattctaagatctccaagtggactcaagctcagtttgggactaaagcaagagcttatcacatgatgcatttttatgagacattttctcattgagggagtgtttgaaagcgcaaacggggctttttttttttttttttttttttttgcttgtttaatcaacaaaatagcctgtatgtgttaaggtataaacaaactcctccacccagaattcggctgcccccatggcagtagggaataccagctcccgaagagttgctgcagttttctttgctccatataaggagaacaagccacaaaaccccatcctttcagcttccttctaattatttccatttctctcataggctcccagaaaacaagtgttagtaaatacagtcgctgctgctctgctcagatcagctttgattcccggctcctatttttcatacatgtagcgtttcctccctaactgccttagggtgcctttttgaataaacattgaattccaaccctagtgccctgggttgtgtagtttgcgttttgaaatcaagaatgtctgtgaactgagggaaaaataccaacacactattagcagaaatattcaattcctgagctttactttctattatttttcagcttgtaccttgagacaatgagggctaatgcaggtaggtgcaactgttttatgatgacactacatattgaatacataacaaactcaaggtactggacacagtggaaaaacacttcctgtaacatgacagtggtctgacttaacccttccaagttcccaggagatgtacacgtgtatgtatctgtgtgaataaacatgttttcataaaatgttaaacccaatatacttttagaatcagctcaattcttttacttgataataatttacctgaaaacaatcccccagttacctaaatataatttgtaaagcattattctactgaggttaatttacactgttcttcattgtccatctccttaaacagaaaaacatggttatttgccctaacacatattttaaatattaaattgctcaaatattaaagtgaaagaaagaacaaaagaaacaaaataccagcagactgctgcttctttcagaccatacatattataagagatttgtgtgctgtgagagctgcaacaagttgctagtaaattcccaaataatgtaaggaagttgacagtttatcattactgggcataaaaaggtggccaagagctttgacattttaagtttgctgaatacagttcaccagcacattttcccttttataaacagcagaaaattactgtagttttaattttctaatgaaagaacaggaaaatacaacctcgggaatgcttttatacaagcaattagtggcattactctgcactccccacaaagaaacactaattttcttcccaattatattctgatttaatgtaaaacttcagtaaattattaaaattcaggacaaaggtcattggctctgccctcaaggatcaactgtgaaataatattggtcacctggccaagaagagtcaatgtttattaattattatcatgtgattcttccattgtgatattcactgat

SEQ ID NO: 42264 - DNA, 629 bp, Homo sapiens
ttcaaaattgaatccatagatgataaccccaacatgtgtgtcattcattttactgcagtgcaaatactggtatcatgagatgagggaacactcacaacaagggcttcggcaggccactttttaattcacaagggcatggtgacgtgggagggcatctcagagtcactactaaatgaactccacaatagggcacaaatctgaaacccaatcttagccagatacgaacgtaagagcaaatatgtacagtatcatgtgctttccagcagccctgtgtctcgagggagctctctgacatcagcaattgagacaggtggttccctttccaacccgtggaaaataaaaccctagttcagaggcactaagtaaatatagcagtactgtaatttttccttggtgcactctccctgtgatttctgtcctatgatgacactttatcccgggaacccattcaggacatccatccatgcccataactgactgaacatttgcaaactggttaatattgacattaaagagagtgtagaagactctgttttatggccccagttggtagagctagggttttcctcctctcatttatttggaatacgttgtcaagtggctgctcaaaactttactggattatttca

SEQ ID NO: 42265 - DNA, 1593 bp, Homo sapiens
tcgttcattcattccacaaacatttactgaatatgcacaatgttcataaaatattatgcatgcttgaaggttagcagagcagagaaaaaatgcccagataatcagagatggattttgaccttatggaatttgcagtcttaaaggggaaatgctacacaaacacctaagatccttccagagagtgctaggcagaaatgttaggcatgttagacacagacctctaatggactgggtgcttggcactcaaagagaaattgattccagctggggcaaagtctattgcttagctttggtatccaacagaagaccaggagtcctcaacatcccatcacatcaaggaaggaacatctccaagacaacttcactttcttgccaaaatatgcaggtacacatctatgtgtggtctgaatttctataaccatcgaagcgtttctcctcctttctttcccccagaaatggcagtggaatagatgcattcacacaatagctaagatgaactccatcatgttttaagagagttggttttattagttcagttagttcactttcctttggtttcataatgtaagaaacaaaaagagtaagagcagtgctttatttcagtagtatggggtaaggctttaactttctgggtctgaggcggaggtttctgctggcatcttagctttctgtgtgtttgtttggtttactcctgacagagacaatggaatgcttcaatgaaaacgcccaactcattttccatctatgaatgaacagaaggcatcccgtggctaaggagggataaatattccgcgccactggaggcctgctggctcacccgggctacaccactattgtacccactctggcttccacacgcaatttactaaagtttgtgctgtttcatggcaaggtgatttatcactgacacctctttgccatttcaactgggggccactgcaatggggcaaggttcaaggaagttggccgaaactgaagcagacattttatcagctaactattgcattttctagttcttgacttttccccaggagcttttgttttcattttgttggctgcctttaactcctctgatgctgtacaaccccaggttgtttttttctaaaaacaatagagcctttagtacactgggttttgttgcttgttttttttttttttttttttatttttggtgaaacgatattagggctccttacctctaacaactgagtcttgccatggttttgagtgtgaggaaagtattactgaaggcatttaataggtggacagacaggtatggaactgtgttgagggccttacattatatgcaggtcagcagaggtaacagaaacgtggttgtatgcttgactcacccacttgaaaacaatccaattccattatttgttcctttcacaacctgttcacgtgctcaatcactgatttatttattcacctattcattcattcaacaattgagtgcctaatatgagaaatattactgtccagtgacagcatgctagtagaccaaaaaaacaatgaataagatatgggtggtccttacaaggaattcacaagtctgtggagaaactactcagtcaacaaaaaatgcaaaaa

SEQ ID NO: 42266 - DNA, 2168 bp, Homo sapiens
ctttaaatgatatcatctgaatttttacctagatattctgtttcatttacctttaagtccccaaatcaggtttgaaattccttttcattcacacagaaagaatatttatattactacccatggcttcaagcaggacaaaatccctctccaccatgagtgactctgaacttgatttttggtgtaacagccctcacattgtaccattacatatatactcaagggcagaaaataaataataaattatagcatttcttatgtttgctttgcaccatccaagatgtcaatcatattgtggggagtaacgccttctgaccactgacatttaggtacaacgctgaaggactatttctccagctagcacttcaacacggttctctaatatcttaaagatcaaccttaacaacaacaatgatgacaaaggtatgaattttatcagttacaaggtataaaaaaaggttttgaaatatgaacaaccttatcattgatttctttctttttaggccaaaagagcatatatcattcaagctatggggacaaaaataaattgttgccagaggctgttcaaatggaaaccagtagcacccttcagggttcaatgtacttttttgtttcttttttcctacccagactctcaaagggacaaacacatgcaggaaagtgatcctggaaagaaggggttaatataagctgcacagtgcactcagtgatgccttaaataattgtcacatgtcccctataatctgtcccatgctgtcagcactgagttagtcataataatatcagataagagctgttcaaagtgacacactaaccaacatgggagccacatgactttctggcttggctactgcccttcagctgaactttggcttagaacacaaggctcccagaggcagcctggcacatgccgccgcgtggagtgtccggtggcattttccgttgctagggcctctgttgcttcacagtctagtgaggggcagctggggatcagtgacagggagtcacctgctcaccccacctctggggacagggaaaggaattggctgctgtggtggccgctgcctttctgagcttgtgctgggactccctgtcccctccacagttgattagttttgcaaatgtgtgtgtcacgcgttatgccaagaaccacagcagggaaactcggacccccaaagggagtttgtgctggaagaggtagagaaggaatgtgactcttggctaagaggacacaaaggcaagggcaggaaggaaggaggaaaaaaaaaggaaggaaagttattacctctgggtagaaggttactgtagactagctctattttatttgtgcttttctgtatccccgccctgacttttttttttacttccagcatactttagatttttaatttaaaaagttaaggcacatattttttaaaggagaataaagaaagaatagtgaaaaagaggaagaaaggaaggtgacccattcactcactgattcattcacaaagcagagaccagaaaggaagcaagaatccaatgtcatctgacattggatttgagaacatttattggcagtgtgcctctggcatacttacctaacacctctctctaagctttattatcctcggcagtaaaatggaaaaataatacctaagttacaagactgccatggggataaaaagaggtgatatatgctaagtggctaacaagtggtaggtgctcaataatcagtagctcatgggaagccatggaagttatgacgatctttggagtcagagatacccagatccaaagtctgactccagcacttaccatggtgtgacctcaggcaaattatctcaccttgcggagcctcagtttctcatgtacaaaatggggataatgataccccattgtcagggttgttaaaaggagttactgttaatgctttacacttggcaaataatcaggcacatggtagttatacagtaatttgtaacaggagttgccatagtggtggtggtcatagtagctaaaaatagaaagaaggcaaatccattcattaattcaacaaacggaaatagcaagatgtacaagtaaaagtaataatcagacaaatgtatagagaagagataactaaaaaccaaaggtactgatcaataaagattggaagagtctaaaaggacccaaatacatgagaagacaga

SEQ ID NO: 42267 - DNA, 702 bp, Homo sapiens
gataaggaaactgaggctcatctaggttttaagtggcttgcccaagaccccggatccaggaagtgaataagcaggttccctttccaatggagaggattttagttaaacaaaaaacaattgccactgcctttctctcctttggaaccaaggtggaatatcccaccagatcttgtggaattgtctctgcatgtgagctgcaccctttcacaaagcttccctgtcttttccactcccctacatgtacttgggcagaaaccaagctcgaggttctgctcacatgcttgtggtttggctcccagctggggatcacattctctgctccacaggcaaagccaaggatccttcttgcaaaatactactggtgtcctggtgccacctcccgaaagagctgcccacaatgctcgcatgcctgggaggtagggtgagcaggatcaagcactggcaagcaggacatccagcaagaaaagattatgcctgctctttctcccagtaagtttcctaagagccatagacttggtcattaataaatccacacaatttcaggaaacctctcagatacaaattggtgaaattaaagtgagacaacatctggaagtaaattatatactaattttggctattttcttgctgcttacacacttagcagagaaagagcaaatgtccacggatttctggttcacaggtactttttttcctagctgt

SEQ ID NO: 42268 - DNA, 404 bp, Homo sapiens
caacttagataacaaagttaaacagcatagacaaccataggacatcacctttccaaggaaatgttccaaggatacaattgccatagagatcctccctataagtctccttgtatagtcactcaagccaattgggcagcttgagggaaattaggtgtgggctggaaaaggagcattcctggaaaatgagatcagcatcactgaccaaagagaaggggccaggaggaggaaaggagtttcacagtacagaaagggagagcccaggtccaaacccttcaacgaggagtccacaaccagagaccagaaccccctaatacagcagaaatgctgtaatacttttaaactttgtaatttccccatgtgtgtactattttttaaattactattattctctgtgttcattttgc

SEQ ID NO: 42269 - DNA, 977 bp, Homo sapiens
gaggaagtgacagaggttgaaggcagggcattttgtgcagaaggaatttaggatccaaaggttttttggcagatttaagtatagctttgagaaggccacatccctggagcccaaagaacatgggaggcacagatgtgagatgagatagggagggagggagtccaaccatggcagggctctgtctttatcttaagaacaatctggaggcaaaggggaggttgggaaaggtaaatgctcagattaaaaccagcattctggatgctaggcgggttccttggagggtgcaggttaggaggctagtgcagtggtccagtcgagaactgatagggacatagaaactcagagctgccctctctctctccaccggctcagtgtgcagctctcagctctgcagtgcagccattccgtcgtctcccgctccttacacagactttgcagtgacatcttgggagcaatacccagagaatgaggtcagaatattcaataaaggttcctgctgcagatgagagagaaccgtgaacaaagcacgacagagaagggagactgggaatgcacaaggagaggaagagaacacagcccacacggtctgccagatctcgcccagctgggaagctatttgaccagcctggactctgtcctctgaactctccagcactgagtcaacctattgtacccctggcttgatcctcattagatgcactgaagatctcgcaaccaacttggggaagataaaagtttatttgaagcctgaagaaaaagagctctttatttaaaggaaacagaaaagatccttaggagctttttttcccccttggcagatattgacttacaaactgatcttattccactggttgggatatatctattttcagtccttgtacatctaccctgtgaattgcgatttgatgaagccatacgaacaactaataaagtctcagtgtaaaaatgctatatgttcttaggaagggaaaacataa

SEQ ID NO: 42270 - DNA, 1062 bp, Homo sapiens
gggacttatttcacctgttcagggtactgtataatgaccagccatcttcattcaagaagtagtggtgaattaggtctggatcctgatgaaacatgaaatgaacatgcagccagaaacagttccgtgagccttagttacgaacctttctcatttccagggtgcaagtaggaggggtggaaggaaggagggagaaacaaagaaaagatgtttatcgaacaactatacatgacaagaaaagtgctaagcatttatgtataagaacccatttcatgggagcacagatataagaaatagagccacaaaagtagtgaaaagacagaattatgttaacttggcagaaagattaagaaagctacattgagttattgggaaaagtaagctgttcattttacagaagtgaataggaacttcagttgggagagcttcagtgggctgccccacatcgtagttgaagttgattaaatccaagactgggccaggcccctggatttcccctgttccagtctgcacatttgtatcctcctccaggtaggaaagcattgctgtaccctcctacttccctacagtagcctggcaccaagtcgcatctcagctgggacattctgttcccaaggtcttttaatgattaaatcagtctgcattagggaacactttcgtcaggttgaaccagagagagcagtggtgggaccaagcttgattctctaacacacataagaagtttgtttggtttgttcttactctttctttgggaagaagaggacagatgttataaaaaaggtatttttattcccatttttagatgagaaaactgagtttcaaataggcgaacaaattttcctaaagtttgccaagctaagaagtggcagatttgggactccaatctagaattgctaagcagaagtttcacaggtgggaatgaaatgcgtaagtttatgtttatgcctttgaccttggatctaagacaatactctctgggctatcaattcttctttttaaaggcatgttctgcttaggctgatagaaaatagccattctgcccccaaccctaggaggagtcactgg

SEQ ID NO: 42271 - DNA, 1712 bp, Homo sapiens
aatctgaaatgtgtcttcttggccattaatctcacatttatcagcttctataatacatattattaatataaaaattcaattttcaaagcatttaaatttgctaagagaaacagaacacaatgcaaacaagcatctcaattagtaggaaatgctatagtcattctgaaataggtaatagacagagttagctttaaatatgctttataaaaacagataaaatccatgggatacacagacatcaaaatgcccccaaagggacgcctctctcaaatatacttccagtaggaagccatcagcattaatagcaagtttggtatcattccgcgtatgctcaaaaggacaacatgaagatctggctcagaaacagagcacagaacacgcagatctggaatcactaaaggtcaaaatgcaagcatcgcacgtggccaaggaagtgagcttcggaggcacaggtttagctagagggaaagcctagggaattagatccttctgtcagcttttttaaatgtttaagaccgtctgtcctccaattaaactgatcaaggggtccaggatggtttgttagcaactctgctctggagaacactcattaaaagtctcgaagctgattacggagttcccatctcgagcacttcacttctgctgtcagctgctgatttctctgaattccaactgccaaagtaactgtggaggccgagccatgctttccccactgccagaaaaggagagagacatctgccagtgtcctgaatcacctgttacttacttggtgactcattcccccagaggggccagggcaaaacagctcctgaaatggtgtgtgagcacatatgtgtgtgcttgtgtgtgtgtgtgtgcatgtgtgtggtctgcacattcacttgtcacagataggtcctcggtcttcctgagaggctggcactgctaggcacagaccatgtggtcctgaataagaactcttttgtctcaccctccaggaagccactctttaatgaggtggacagaggaataaagaggaaattgcaatgcaatgtaatcaatgccacggaaggaatgatgatggctcctagttacacttaactcagcttttaagagaggagaggaaagcggcagagcacacctctggaggagagaactagaaggtaggaatgattttcctgtcagagagaacagtatctgcagaagcccagaggagtgagagaaccctcatttactcatgggctcactttttgccaatcattcactgagcacctactataccctaggtgctatgctaggtggtagaaatacagtgagggcaggatgcacattacaatgggcttcagggaattgcaaactcattctgtatgactggagcatagtaggggatgagggataagagccaaggctgggaaaatatgtatggctcagcccacaccacattcagggtttgtgtgtgtatatgtgtgcacatgtgtttatattgtggaaggtgttggtgtcagaacaggactcacacagacctggcctaaattgaaatagaaggaaaaggtatgcagtaatgtttacctagtcatagcccagacagactgatgaaataagtcttgaaggtgacactggtacttccccttatgccttgaattttctctcataccactcaccatcccacatcttctacttcatcatgagagagttcactctcatcatggaccctcatggtaccatcatggcac

SEQ ID NO: 42272 - DNA, 1177 bp, Homo sapiens
caacctcaagtgaaacaagccaacaacatgagaaatgactgtatgcaagttctttgggagtgatagcgagatgatggtgacaatgatgacaatgattatgatgatgtgatttttctacttaaccctgtggtcagccctatcaggcagctactactactatcaccattttacagatggggaaaacatggaggttaacacaaagaggctgaggaaattatcatgttgtcacagctactatgtggtagaaccaggatttggacctttagtgcacagactagcactgcactggcctctcccttttacaggcactctggaggaagagttaaccagctgtgtgtctcagtgtgtgaaatgtgagcatgtggtggtgcaggaaagagggcagaactgtgatgtctctggactcctgatggctcctggtgagtatccggtaccactcccaatgcaggacccagaaacagcgcccagtgttcctccccttcctcacctgcgtagagggttcagtaaaggcaaatcactaccaggaggaaagtgtattggcccagcaaatgcaggaaagggaggatcccgcaaaagggatttccactcattggaaaatacctggaaaagaaagaaatggactttgctctcacatgagggaatgaaaatgagagcttttgcagccagaaagacgagagaagatactgcctcctactacctgtgtgagcttggacaccctacggagaaccaatttctccatttcctcatctatgaatgggaataattgtaaattcctaccaatttccgtttcctcatctgtgaatgggaataattatacttacaatttgccatgagaattaaatgtaaactaccacacacacgtcagcatttcatcacctaggttgcctttctcctgattcagaataattttttttttggcttaactccctttttctccagctttattgaagtatataatggtcaaataaaattatataatgtaagttgtccaacataatgatttgacatacaaatattttatttccttgtttatctcacttttccccatggaagtcatttccctcacatggtccttttccttctcttcctttccccagtctttctacagcaaaatcagccttgccctttcattccttcctagaattctctgaaatgttaaataatatgttctgtcggt

SEQ ID NO: 42273 - DNA, 1616 bp, Homo sapiens
acatcaaactggaggaagcatgtgaatcagacaataaagacaaaagcaggaatggggctgtttgtatacctgtgacgagatgtggaagaaggtcaacaattagcttggtgcaacgcctctccccaaaaatatatgcccagtaaaccctgaggaaaaagccttttacagctaaagaaaggaatctgcagatggagaaatcacacggtacttaaaaatgtagcctctttcaaatactgcagttcaccagctgtgtaactttgggcaatttacttcccttccctgagcctcaatttcatcatctggaaaatggggatcatacttcactgggctgatgtgcatattaaatcacagtgtgaacatgcaacgcccatgtatggcacgtggttcaaggtgagcactcaatgaatgggtgtaactcactcatgtgggagctatttacattggaacatgtttctaatatgcctcgagtcacacacaacacccattcttctggcagaaaggcttgattaacactagagcacagtgaaggtaagatagtgtggactttgcttatagaattgtgtaattttcagacttcttcatggtttatcccacgttacagaggaagaaaacagccaccaccagtttccaatgacccaagcaaatacacaaccttgaaaaagcaaaccttctaatgggactttatttcaatccttgacttggcagctcatcacactttaggatcactggtgaaaagctagggggaggtattttccaacctaaggtaagagataaaagggcctgaggacgttaaaagtgagggaatggaaatagcaggggcgaaaatcaatgtttatgaaatagtccagtgtttctcaaatcttcctgttcacacagatcttctgggtatcttgtttcaatgcagactctgattcagtatgtctggagtcgtgcccagaactctgcattctcataagctcctccatgatgcctatgttactcgtccatggaccacccttatataataagcgaatggtgtttgtgtagagcctaagaaagggttgagtggtggaaccaggaaatccccaaataaaggaagagaggcttgaaagaagagtgatatccaaacaagatggcaagaagactagatgatttgaggagcagccaagccggagatgtaaatacagagacatggtgtccaaggggaaggttttcggagaagaggccccagctcacgaagttccagtgcattactcactttggctgtgagtcactcacagccttttagaattgttgacggcaaacattttggagagtgctgcaataaaggaatgtgctcacagccattaactatgaagcactaactcatttcagcagcctgacacaaattatgctacgcagttgaaaaatagctattgatcagtcccttctttctggtgccttccaatatcccagatcagcacttccattcgtttccccgcccccggatgccctcacacacctagttagatcctgcccaagccaaaaaaagatgcccgcagactttattttcttccagattttgcctttaataaagcaagcccagaaagaggcaaaccgaaagatgcctcctttaagtttctccatgtatctgtttc

SEQ ID NO: 42274 - DNA, 1361 bp, Homo sapiens
tgttgcttaagccacccagtccctggtactttgttatggtagcccgagcaaactaagacagggcattaggaatctccagtgcaatcagatacgatagatactcagcacagcacagtccctcaaggaatgctagttcccattccactctccccaaccccattttacagatgcataaagagaaacagatccacaagatgaattgcctaaacaggatacagtaagtgagaaaaagagaaagtcaccttccaaaattcagaggcccttgcccagtctactggtccatactgccccccacaagaaatggcagcacagtgggcatagagaatcgcttcaaacaaaaggctagatgacattcctggcttctggccatgggaagattcatatctcaatgtaacttcaatgttcctaagccaccgacaaggggtcagtggcagatcattgcgtacaagcaaacagctttttcaaaatcctttccctgaaatgctatccaaacaatcaaacaagagctaacccgtttcccccctcaaacacaggtaaaacgacttgataattctatgatgacaacaagcccagttatcaagcaccaccctcatctaacatgatcataaaaacctttctcagtcagatttatggattgtcatgcgagcccctgaagagctccttgccagagggaaaaccaggacaccagaaggccaggtcacgtgagcatagagcccaaagttcagagcatataactgcccacacccctggtctgtgtgctcaccagattaaaccagctacaagatgtctaaaagttagaacaacaaacacactgccaggtttgcagttaacctgtagtccgacagggccacctggtcatgcatccccccttttaattccccctgaaggtcagagaactcacccacaacctgagagcatatccacccacagcctgttccaagtcagtttctctagttaagtcaggtctctctcaacctccaattcttggcagttttaagagccagaaccaaagggacaattggacacagtccaattgcagtgaaattagaagctgccttagatacaccagggtatacagaacaagcacttgtttactcaacatataagttaaggtcaacaagggaaggtatgcttcctgttcacaaatccttgagggctgtttgttttggggcctctggctgttcctggtgaaaccccagaattaagtgcctgggagcaaccagcctgatcacatgaaatgcactttcttttgcaaatcactgaagtcttagcaagcctaacaggatttagtccctgcttgttcttgttaagcaagagaggagaactgtctgtctctccttctcttctcacaatggcaaagg

SEQ ID NO: 42275 - DNA, 722 bp, Homo sapiens
gttacttggtgattattaagaccattaaaactattaagtaagtaaaagtattagcatcgtatattgtaattggaactggtgtgcagtttaaatttgcccaggtattctgaatagagcatcaagctgttccatcatgcctatgtctcctctaccaagaaggacatcaagactgctgcatgcctggctcttcatcatgccaatctcttcaaagaggaatgctttctaaattaggtcattcttcctgcctggccccatgcctccatcatctcaactcagctgtttcacacaccttaccacaatctgaactctcatttttaaatgtgtttccttatatattgtcccttccccttgtagaaaataagcacctgagttcagggacccttgttcttcatacctagaacaggccctgacacttaatatttgcagaataagcatcagtgatatactttccatttctagaaacaagctgcaatttagaaatatgctttgaactcaagggtaaagttgggacctactgaacaaaacactcaaactatggctaccggtagccaatgtgatacagggttggctgaaggcttcagaggcagggtcccagatcctggaaagataaaatcactctgttttattctgagacctgcaaactcttagaatgaaagttttcagatctttcatagctgctggctataggataagtgatcagaaaaggagtctggcaaaaggcc

SEQ ID NO: 42276 - DNA, 733 bp, Homo sapiens
actcctctagttctatttccctactgtctggtgaaatatgcaatggagtgggaaaaatgttgtcctggagacaaaagaactattccccatcccagctctgcagtcctccagacatgtgaccttggaccagtctttgggcctccctgaacgtccatttgctcactggtaacaggattgtaacaatccctttctcaagggttatatgacaattaattgagatgataataatacgagaaagtcctctgaaaatagtaaacagctggaaaaaatgtacgccttacccccagtgctaagacttattagattacgtcagtagttaatgtttagctgaacggaagaccctgccaactgaacattattccttttggttttctttgggcaaaggatggctaagcaaaaaaggaaaagcaagacaaagaacagtactttgtgaaatcttccccaaaaggacagcattgtaagtctgccgtgaataaagagtgtaaattatattcagcatgatataagtaatgacatatcaattaactgtgtcaacaaggtctaaaaatatgcaaattactgtacttcaattagaaaaatctacatccttagagaatattgtaaatcaggaaatttgggagacattaagagtaatcagtgagggaaagcatgtactttttgctgtatcctatttttatacatacataatgaaataattatagctacactgtatttatgcctctgcaaaaatatt

SEQ ID NO: 42277 - DNA, 639 bp, Homo sapiens
aagttctcaagagatgttcatgaattcagtgcatttctggccttggtactcccactgtccctagtcttctgaagagtagagtgttttggggtgaaagctgacaaagtgacatcttctacatagtggacacattaataaatactaaatgacccccaaaacttgaatatatcaaagcattgtggcaaaaggttggaaaactgtccatatgagtcaactctcttcttcctttgccctctggggacacaggggacactgcccactctccctggggcagagagccagcccattcatcattctgccaggcccctccaagcaagctacctgccaggctcctcttgccactgtctctctcaagtgagtccaagcgaggtcattacctggcaacatgaactctccttatctccctgcccctatttcagaaaagagtcattgacagcagggatccagtgccccctgaagccatccccaggacaaacaagctttaaagagtccacagtgccagtgacctttagagagggcaggtcaccaaatccatggggaagagatctagggggtgtctgccactcgccagaaagaggctctttctccagaaaggtttgtggccccaaaagggacttacaggagcagttagggatccat

SEQ ID NO: 42278 - DNA, 3406 bp, Homo sapiens
atattatatattacagtaatacgtataattcatccagtgcttactatgtgccaggcaaaagtgttttatgttattatcctcataatcaaaataatagctactactaagagctaggaacagtcattgtgttaaatattgcaactctataatgagagtgttttcttctttatgctttatcagcactttgtgatgggaagagttgcttagagaggtagagggaattgttcaaaggtcacagataataatggcagaatgcagatttgaatacagatatacctaattctagaacccatgctcttagctaccaagcccactataccccacaatgcaccattatggtcttccacactaggccttgtcgaagtcatcggcagtgaagaatgagatgttaaaatcagatgtgatatgcatggggacaggagccattcaaaggccggtttcatcactgaacagctagacctccgttctggttggccaacctcaggagctgatggatacaggttggaaccaagcccaggggtcctccggaagaatctaaaacaggcaaaataaaatgtcttccaaacaggtgctgcctgatgacttcttctttgggcatcagcaaggaggaggagaacattcctactgattaccctaaagcagttgctcccaacacagggaaatttttctccctgttcctcagcagaggacatttggcaatatgtggagacattttcagttgccacagctgtgcataggctgctactgacatttagtaggttgaggtcagagatcccactaaacatcctacagggcacagcacagcccctcataataaagaattatctggtccaaaatgtgaatagtgctactgctgagaagtcctgccctaaagtatcctgtgctagctagtagatttttctatgagctgtaggcatgaacctgtgcccctaacttgccaagaaaggagcattgcctagattgtagtctacaaaatggggtacagaaagaaaacagtgtgtcttccattcatatctctgcatcttaatgttcttatttcatgtgtatgctttattatgctcataaagtaatagtacaatagtacatgcatacaatttgtatataaacaaatacacatttattggaggtatatgctcagaaaagtttactgataggagcacataatcagagaatgctggaaatcattagactagagaaaggactattgatttaaactcaaggagatctaagatcaaatccccaacttagcttctaattaaccttggtttaaccatctgtaaaacgggaagaagaacagtcatctctcaagattgtatgacaaatcaaattcaattatgtactaaacacctagcacatagtaattgctcaataaatgctcacctccttcaccctctcctcccctccttgtcctaggtttgaggactctgaacaaggtcaaaaattctctgtcctgagtgtcatcatctgcaatctaattatgaatgttccacctactttacaaagttggcatgaaggattaaataagatcactggtattaaagtgctaccaaaaatacaaaggatttataaatataaagttgttttcttaaatagagatcataccaccttttattaaggtattcctgataatcacttctttgcccaatttggaaactcaaaggctaacattctaaaaggaaggagcttgagtaaaataaacgcatgtggcttttattttctgcttaccctatttcaccatcttagctgagaaagtacttaaatattgcaaaatcaggaatttcaacagtgatctatccaattaatcagcatagtgttttgttatttttttccctggagggaattgattcacagtctgtgaaaacacattgcatcacacactgaccacgcagaggggcacagacgctgggcacctcctggactgtgctgacgtcaaattgcaagggcatgtggccccgtgcactcccagatcagcacaattctcccacccacttatggtctgggattcatgcttgatcatctacaattccaagtgcgtatttttaaacttttgaaaatgaagtgtgttcatgcaagcactctccagaaaggtcaaaagcaggcgggagctgcggcgccttcaacggagggcactgtactcctggaacctctcccagtgggagcctaggagatgcagggagctcaaccccaacctagatttctctggcattttctgactctctctcctcactctccctaatagagttaataacaataatagctcaccattttaaagcacttcagattttttaaaactgtaatgaatattatctccttgattctttgaattgcagttgcttacttacttacttgtatcaaccactctagacgctgaacttcttaagggcacaggcaagaactttttcatgtcttgttattcccagagcctgcctagcacgtgcatggctcatagtaggtgcttaatattcattccttaaactcgtgactagatgaaaaaatattatcatcctcttctaaacaatgagaaacctgaaattcaaagatattaagccgtgtgcccaaaatatgcatttataagttacaaagacagttctgaactcgttttccgatctcaatttcaccagagacttcaatatagaaggtaattcttacctaagtgaggtaactagaaaggaagctgaatgtcactcccctgagtgcagcaatgaaggagctgccaggatacagaaggggacaccaacagaaccagcaaatttactaaggccaattcccttttcttgtgtccccagcttcgtcctacatagacaggtgtatctgccctatgtgcgtgcatggctagtatatctaagaaaaggtaagttggaccctgaacttcaccttgattcagaatctgataccatattggccagatctcgagatctggagtgagatggactgggatggaatccaagctcagccacttataaacgtaggtcccttgggcaagttgcttaaccattttgtccctccatctcatctgtaaaatagggaaattaacacagcttacttcatagagatgttgtaacaattaaatgagtccatacatttttaaatgagcaaaacaataataagtatatggctgtagtgtactaacaaatattagctataatttttcttgcacaggtatattctacctccacgatgctatttcctactgtttcatcgcctaagccagccaatgtcttatcatcactctctgggttattccaaaggcttcctaactagattcctcgtctattggctcaccgttccccaacacgtctttctacgccctttctacaacttcatctgatcatgtgactcacttgcctgcatactcatggcttccccacatcctggaggatgccgtccaaactctttcatataatct

SEQ ID NO: 42279 - DNA, 2375 bp, Homo sapiens
cctgggagagaatgctggcgcaattcatacaaagttagaaaattaagacaaacatgttttcctgtgtgtggataggaaaatggtgatgaatttacccagagacctgtttaatctaaaatattgctagggtgcaaagaaacaatggcatataacaagtgttcaataaatgcttgtcaatggaataaataaatgacatacactatctgctctgagaattaaggagcaccagataaaagagctaggcaagactcttaccaagcctggtacacaaaagatgaaatggtaatgatagctgcaggaaaaaagagattccacaatgagtttgaaaagccctggacaaaaccatccacacaagtttcttcacatcttgaaggatacagagaaactagcaggtggatgaggcagtcagcgaggaaagacggaggtagctgtcatcagcaaatgctagcaggaatacagggctggcccatgatgtggataccctgtgcagactaatgatttctcaccttttcaaaaaggcattcaaatgttgcttaaacatttatttagaagagtggctgagagtttcagataggaaggatgcagaaaggaacatttttcaatcttttctagaatgttcccagcaattcagctctggcccagacttccatagcctactcagcaaagcagttaccagcatccctcctcttcaggaggtggtttaggaaacacccattgttgctcaatgtgcctcttgagatgatcagtgctcaagcagcaatcatggagaagataaccacatttagtctttttcctgaatagagtaattttatattgctttttttcatctccagtgacatttccatgtccctttgagattcatgccccaatgtccttgattctgctttgcctgagatgcacattcataaggtcaatcctctcccagtacaatcaccaagtacaaggtggggaccacataaacttcttcagattaaaacaattgtagtgctatttgtgtgggacaagaaagaggggcttattttctcccttaggattccaaattttcagctgcttctgaagtagtggtggcagaaaggtgagtacacaggataactggtatccagccaaacctcttggagatgttttatggtcccacaacccttggcaaaagtgccaggaagtccgctctgcctttctgcaaatgccagcacaccaacggggtggtcacacctgggccagcagcgtgctttgaactcttgttatctggcaccaactgtccctgaatctctctccaaggctgagagcagctgtcagatcaatgcctgcaggctgggattgctacattcccgggccgaatcttacaaacagcaaccaggttatctcctccgtcatactgggctctagcttgccctgaattcttcagtgaaggagtcatttttctgtcactgcctgcgtcactgcctcaccccatgagagccaccatcaagataaagcctcaggggaggcgtcctgctcagttaacaattgatcaatcaaagagttgtctccattattctcttaactcttacctatcttcactaaacacctacagccactggctggactccagaggcccctcctcccctcctccaaacatggacgcttctggtactagtcataaatgtgaagatagggatgatgtttggatatttgatgatcagtgtggggtacctcagacctggtaccggaggccatacagacataagccaacacaaaggccacttccacattctgaactcacacctccacctgcccatccgtcctgttgagaagccccatggagagagttcttcctgctgataatgcctagtcacagagtcccatcagtaaagagaagtgatttctctctttagacaaattttagacataaagtttgaggatttctctccttaggaataagtcaattcattttgaggactaatatccataatctataaggaacttaaacaaatcagcaagaaaaaaagagccccattaaaaagtggaacaaaggagatgagcaggcacttctcaaaagaagacatacgagcagccaacaaacatgaaaaaaatgctcaatattactaaccatcagggagatgcaaatcaaaacctcaatgagataccatctcacaccagtcagaatggctattatcaaaaagtcagaaaataacagatgttggcgaggttgcagagaaaagggaatgcttatacactgttggtgggaacacaaattagttcagacactgtagaaagcagtttgtagatttctcaaagaaataaaaatagaattgccattcggcccagcaatcccattactgggacatggtcaaaggaaaataaatccttctaccaaaaagacacctacactcacatgt

SEQ ID NO: 42280 - DNA, 1848 bp, Homo sapiens
gcatcttaaaatcagtggcatcttatgatcaagaaaatgcaatagtatgccatcattaaaaatagtaactatggaagttgtacagaaacatgaaaatatggattacaaccacattaaattttatataatttagggctaaagtagaaaggacaatatagacaaattcagtttgatttacaaataaaatgttttccttccttcacttagcattccactaatgttactatgatattacacatgtgttaacagttttcccttttttaagaaagaaagaaatatcccttctctgagacgcaattcctataaataagatggaagtcaaaagtcagctaaatgttcttattgatgataagccaaaaactcaagagtttaattcctatcaccaacctacattccagtaagagttgagtaggggcattgatgggaaggggcacgacagtgtcgttactgagtgcagcagccctgtcttcacaccctgggggctgcagtgggttgggaggaagcccaaaacctaaccaaatccctcagatagattatggaacccatgcagactgcacgcctactgtcacattggaccaaaagagaattgggatccatagaaagagggagaatggagataagacgttaagaataagacaggtactcaaaaatgggaaaggggtcagtaggttgctgaggagatgggaaataaagagagctctggaaggagaaaaagttaatgagaaacaaaagacagagtgcatagaacatcctcaaggacacatcatacaggttcttgttaaaggaataaataagtgaaagaatgacctagcgatgcctaaatgctaacacaatacctggtctggcatatgctcagtcattttttcaaacacttattcgttcactcattctgaaaatatttactgagcatgtcttatacggcaggcaattgtctagacaaggtaaagaaagcattgaacaaaacagacaaaactccatgcccttgaggagcttacattatggtgcaaatgggggcaaagtggaaaggggaggtggagatgactgatcataataagcaaataaagaaaacaaacaaaacatgagatcatgatgcaagccatggagaagtgcaagagttcagggagatgagagtatttgggggtaagagagaagcctgcagttttaaattgcgtgctcaggagagacctcactgaaaaggtgatgtttgtgaaaagacttgaggaaactacaagagcaagtcatatggatatctatatctaaggaagggggagaaaacagcaagtgcaaaggccctgaggtagaagcatgtcacgcatgttcaaagatcagcaaggagcccagtgtcaatgcagcagagatgagcacagagagggaggggctggggcttcagagacaatttgaagatcacgacttttaccctgagtgatatggggagcccctgaagggtcttgagctgaagaggggaatgatggaactagtttttaacagagcctgctgctggattgagaacagtccacaggagaaaggaaagaatcagtgaggtcagtttgaagcctgttttaataacctagctaacaggcttggaccacagcgataattgaaatacactaaagagtgactagggctgggcacggtggctcacgcctctaatccctgcactttgagaagccaaggggggcagatcacgaggtcaggaaattgagaccatcctggctaacacggtgaaaccccgtctctactaaaaatacaaaaaattagccgggcgtggtggcaggcgcctgtagtcccagctactcgggaggctgaggcaggagaatggtggccactgcactccagcctgggtgacag

SEQ ID NO: 42281 - DNA, 1408 bp, Homo sapiens
ggaaagatttccctgggaaacagctgtctttccccatccgattatagtggaggaatggagtgattcatttgtttgaatttgggaagaactgagcctgcgcagctcagctcagctccatcctcatctcgggcaccagctactctcaggaagctggcattcccttcagcaagcaccagtgggatgggggaacatcctgcaatgattggatggataaagtgatctaatccttggttacagtgatgggccatttgcttctcatgggcaaacctcatatcagctcccatagaaataaagatgatgccattttagctgccattttgactcttttatttctcaatttgttcaaagcccaggtaggcataaaatactacacagccataaaaaaggaagaaattatatcctttgcaacaacatggatgcagctggaggccactgacctaagcaaattaacacaggaacagaaactcaaataccagatcttctctcttataagtgagagctaaacattgagtcctcatggacataaagttggcaacaatggacactgaggactatcagggtgggcagggtagaagggaggcaagggttgaaaaactaactactgggtactatgctcggtacgtgggtgacaggatcatgcatatcccaaacctcagcatcaagcaatattcccagggaacaaacaggctcatgtaccctctgaatctaaaataaaagccaaggaaaaaaagaaaaaaaacccaggtagggaataaaggtaggacccctcagaagctcccaacaatgaggatttgacatggtctttgagctaatactgcctaaacatacccattacaattagtaagaattttcatgaaccaattaaggctgtaacttgttcttgttatcaaaagtcgatatttatcagccaaagtccatctttttgtttgccagtggatttatcttcctcctccagttattgtcagggttactgggggaatttgttgaaaatgcagatatgcaggctccaacccccggggttctgagtcagtcattatatcttttacaaacaccccaagtgactgccatgctttgggacgcaaggtttgtaactaacgattctcaaccttggctgcacattggaataacctgaaaagctttaaaacatactgaggactgggccccacttccagaaattcagatttaattgattatggatgaagcttgggtatctggacctttttttttttttttttttgagatggagtcttgttctgtcacccaggctggagtacagtggcgcaatctcagctcactgaaacctccacctcccgggttcaagtgattcttctgccttagcctcctgagtagccgggattacagacacgcgccaccacgctaatttttgtatttttaatagagacggggt

SEQ ID NO: 42282 - DNA, 2239 bp, Homo sapiens
caaaattagctgggtatagtggcacatgcctgtaatccgaactacctgggaggctgagacaggagaatcacttgaacccgggaggcagagattgcagtgagccaagatggcgtcattgcattccagcctgggcaacaagagaaaaactgtctcaaaaaaaaaaaaaaaaagatttgttgatggcagggaaagctttctgttcattggatgcctcttggtctctgggattcctatttctctataagggacaacatggtcgctgaaggcatttttggaaatgcagaccaaaatcccaaaatctcactgccagcatcaaaactcattaccactctatggctgcccagctcctcattccaccctgctccattgtggttctaaccccgttttcaaatgaagtgcaatttacatctctttaactagactggggttattaccattgcaatcctattgattgcagcgctgctcttagcaactcgctccaatttgatcatccttagtcattcttgcataactacatgtgtataaacaagccctggtatttggctagcacatgttttgggatgagaaggatcatctttaaatcactaacctgcctgtgaaatgaacacaaaacagtcaaagccccccacttcagcgattcttaatcctttagattttccttctgaggaaggtgtgagtaggacaaagatctgaggccgggttgtacaggagtcagttcccatcttatatggatgcttcattttaaaggtaagggaagagagcacaagagatgtggttgactcacctaaacttttcgctggttcctgatggggcagtgaacacagcctactcttcccaaatccacatctggtaccctgggaaccaccccatatagcaccttcatttgtcctgggatatggtctctaatttaaaccctgaggacagcaaaaggaaggcatctgagaacaggagtctgagttccaggactggaacatctctgagcagtgcgaagagaaaaggaactgaggcagaagttaggaaagatctagaagtggaagacagcaaacagggctccttgcaccttgttatcttgagacagaagtggtcaggcttgacaaagataactgccaactatacatgttaaatagtgatttcaaaggatgatgtagaaaatggcgactggaagttgttgaccaaggggctgtacctgggagttgttgactaagggggctgtacctctctggtgagaagtaaggaaacagacagatcacagaatttattaaaaaaaataaaaaaagacgaagaagaagaagcaaaggtattgtttgatcaggaatggcatcactacaactttataatctgagagctctcattgggtatggtaaaagagaaacagagaaaaatcgagaatgatccaaaccaaatgacagggaaaaagggctcagcagtgcttccaagagaaaaatcaaagtccattgcccaaaaccccagctctttatgattcagtccctgcctacctccccggtctcttgttctgaaactccacaacccaagtcctctctacagctatggactatgctgctaaaatgaggcagaagagacgcggtagttgggaccaggaacctctgggtttaaaacctcagctctgggctcagtcattcactcattttgtgacgcaagggtagctactttaaaaccccagaccattcagagccctcaggtattcagcgtttccaatggatgtaaggtactctccagtccggtccagtctctttcctaagggtctccagtacagaagatttgcctcaaggcccagagtgactcatcccaaaggacccaagcccagaaatcttaggagatggagttcatgttttgggactttacccaggcaacaaaggtttccggaagggcaactctaatcctccccgaattagctgcccagctgcagtttgtacaggaggtctagtatctatcagaaacattcactcgggaagaaactgtatttccataaggaaacacaaagaatgggggtgccgttaaccattagttggatatttgggatatgtgcttttttttttcttcctttttttgccaactcaaaatccagcccttttcttgtcaaatataatagtgccagagtgaaactgacaagacatacaataaagttgaggtagagaaacacaaagacctagatagtaacctatttattttccaggggaaaaaagtaacaactattctagcaaagaaaatagactagtat

SEQ ID NO: 42283 - DNA, 2647 bp, Homo sapiens
atgctgtgttgatctctaagccaatgatacactggcattacaggcttgttttatttatagagaaccatgatatcaaattagatgggaaggaagacagggaagaatttagctccaattagaataagtgtctctggaaggcatctactaccagttttctaaaaatataagacaatgtcatggattctatctttgtcttttaaaaaatcagaggagaaaagtaagacgcttacacactactgtggttatgtgctaattcaaaggatccacctttacatagaagtaaagtagcctgggaaagtaatgtatcctgttcatttccactgctctttcacgtaatccaataaacagaccccagtgatcactggctcagctcgtcatactaattgggcaaaatgaaacaaagtaagatatgcttttcttttctgttctgttctttctttttaggatagtcctctattacaagtatttgcaacatgaaaacaaaacatcacactctagaggaataatggagacacgttagcctctgcaagaactccacaccacaaatttttggctcttggcacttctgaaatactcattttgggaatattgtttaaggcaaggtaagaggacaccagtaatcttattttagtaatgatgcatcaagaaaaaactccactggccacttaacaaccaccaaggtacctagaatctaaagaaaaaatgtcagagaagcatccacttacggattcagaatcttaaatcctaggggggtggtgactttaagaaactgacatttataagaatcaagaaaggaagacctcagtaaaaaacgtggtgagcagaagctcttgggcccttaatatagtttatctttcacataaaggtatcttgaaaacctttacacaagtcctttatgagggaataatttctgagctggggcagacatggtctttcaaatccattctcagtttagaaagcatttgtaaggaggatttttcccagccaccacatgagaattgtctgatgcccttggaaatctctgtaattaacaataagcctctttcacaattgaaagtggaccctcataccctaaagtagcactgatgtttctatttctgacctacaccttgcattttatgcaatgtctttgtaaaaaccaagggcaagaacaacctggagagaaattttcaaattttggaccagagccaccaaatcaataatggcagaacaaaatgaattatcaacctccactgcttcaatcacagggaaaggcaaggagttagccaaaagagaaactgcagtcaatgttaagaaacagaatgaattgactttgaggtaggcttatatctaattaaatgagactgggggcaaaggtaaggtagactcatccacagctgataaggaagtgatcagaggaggtgactcagctcaactgaactgccttttccaagcagaaaaggagagcagaaagtgttagagggtgggggacccacagtggagaaactgcaagtttttcagaggtgtgttttccttcatcctgtgactatatggattaacaatctcagactcccaccactagcaattaagttaccatcaatatcccagggttgtgtgtgagcctaaaggaataaaatccttgctgtgggacggcatatcaaccaaatcaaagaagaaaacgaaattggtatacatactattgctttcttacttgtcagccaacagttttgaaacttttggcatgtatccggaagctttataatgagaatttccagactttcgggtcgtatcatgagcagacacccatctgatgctgggtgggtctttgggaggagtgagcaagctttatctaaggacaaaaaacactcctgatgacctcttcatgtattctcttgtgggcttggcactaaggtagtcataaaatgggactcaccctgaaatctgtcatcagcaatgatacctccctttatcttgaagacagaggacttccagggacctggtgcagtaccttaagatgtgcatggaaatgccatgtgcgaggctctgtgaggcatctgcttttagtctagaggtcttcgccagtaccaagaggtggagcagaaaaatgaaacctcatctatcccactgcacttgccatgccaacatcaacttctagttacacctgtaccctgcactaaagaaaattgcactaaactgtcatgtcagacggtcctatcaaagcagcagcatttttctgctgtgccctgagcctttcaaacacatactcacatatcctgccccatctgcaaacacacagtgttctttaaatgtgtacaaatgacacctagtgtttttgaaacactcttaaataagcccaggatgactcaccatttttctggtcttgtacagctacttatatgttcgaaaatccccttaaaagttacaaaagtctgtctcaatactttcaatgcatttaaatggctaaaaggttagacatgaagaagcgggactggaaggccaataagaaattaacatgcgcactgaaaacagtctttggcccttttatagagctacattcacaagagttgtgcatgtgcttagcaggaaattatagatcttattattggggaattgggtggcaggtgccaaaaacatgtaaattcactccatttccaattcatgaagcctt

SEQ ID NO: 42284 - DNA, 2718 bp, Homo sapiens
aaaaggaacttattatctagaaaaacaatccataccttcttgtgtcaagtccaagtgatggctaataagatgtatttatttattcaactaacatttattgagcaccaactatgtgtcagactttgtcctaggtactgggaatttgtccacctctaattataaaaggttatgtacaacacttaaggctacacacaagaaaaaacagacagtggacaaattttttttgcaaaaagttatatactgcacacaggctcagtcccttctgtttttcatgatttttgaaaaagcatgcccatcctcttgaagcctcagagaccttcaccccaactccttccctttcttctcgtggctccaagcaaaggtcagctttgattttccacaccgtgttgctattttgacttaacaaactgacaaatccctacattgtgagctttgtaaggaaaacaacaaagtcgtatgatttttttttacttccccctcaccagaagtgtgtctgcacacagtagtcaaaccacacagctgaacctctgctcccagaacagaaagcatccacatcaacactctcccctaggtcactcttactcaccagaaagtcagcccctgagccgaagcagctgagtcctagatacgttttcccacagcaaaaatactaaatagaaactgtttgttcctggaccaagaaggaaagcttacaaggctgaggaaaacattggtgttagcattgtcacttcagtgggccagcaaaatttgccaccacttttttccatctaacctttttggccttccaattctatacttccgtggtccaaccacatggtacaaaaacacattccactctgttccaacctgcttgaacaatcaaagggtatatggcttgagtgaattcaatgcctctccgttttgctttttcccgctacaaatatgtggtgcagataaatgagaagccttgagttgactaaatgctgggaaaagagcaatgcaagatttagtgatttcccagacatcatgagaaagaaagaatatgaacctattaactgatctttgtacaatcccaatcttgggtcacatgtagggaaggttggagctggagaaatagaacatgggagtgttcaggatgatagagaaagaagtaacggggggagaagaaaacaagatccttctatcttgaattctgtagagaggcaagcatttgttatcgttgtgtctagctctcaaaccaaaaaaagtaaaatcaaacaaacaaagaattcaccagccagaaccaggcagactctcccgcgttgattcacacatggtcttctcactccccactcctgccacagatggtgacaaagctccactgacacacgcggcaccctcaggcactgaaacttcctccgcagtccccctgcaagggtgactgactgtcacgctctcggctggcatggggcaatctctgccaccccccttcttgtctctgctcccatcaaaatggcacattgatagaaatgtgctcaggatgtgcaatttggggcagatagttgctggagttcccatatgcttaaggtacataactgggccactgagaaaagggaatttaagcattctagaaaacagcaggagagcaaattggcctttccctctgagagctattattagagaggcccagcccaattcagccagaaagccaatatctagcccatccgctctttctcgccaacaatgccccacacatcccgccccctttcaaatagaactgccctgatgcatcccagccagacacacgtctcatctttaatgttaaccactggcttgcagagatcagtggaagcgtcccttctcatagagcaactcgacagtccaaagtttaattccacataatacggagaactcacggaacatggcattacatttgatttgtactcgtggaatttggcagcctgctagctcttctctctgtgtacctgctgaagtcacagctgctatctaaactttgtaaataaatgctaaacaaatgccaaataaagaaaccaacttcccaggaagcagaaagggcaggagatcacagtttttgttctcagaaatatgctgtgacctgcttcagagctgcatcctgaaagcttaggtgtgtctctgctctcctgtctcttggaagctcttttccttctggagggagggagagaagaagaaaggaaggaagggagggaggaaagaagggaaaggaaggcagagaaagagaagggaaggagagaggaaagaaaaaaacttctattatctgtctccctgctaatgagtagaaaatagtggtcgggaagataacacacagctttattatttcttagagcacacatttctatgaaaagtagagattttgcagtcaatttttttagtggacttaatctccaatggtgcaatgaaagttaatgagaaaatgggtttcattccatttgatccccaagttttcaggcatgtatccattgcatatgtgaagacacttttgttgttcctcgtctttggcattctgggacacatttctcaacagcaacttcttgctgaagccttataaagttaatcactcaagatattctggcatgtggcagtccatgttctcttgggtacaagtaatatacaactgaatcaaccaaccaaagctggagaagcccagcatgtttcatcatgggtagaaatatgctttatgagtgggctgtcaggcagccacctctatttccctgcctatct

SEQ ID NO: 42285 - DNA, 826 bp, Homo sapiens
gtgcagtttacctaaacttctcccttcttgcctataaaagcttctctttagcctccgtcaccaaacgcacttgtggcttgccattccattcatcctggactataatcctcatttttcattcccaaattaactcaacatatttagggatattttttcctatttttttttttaggtttgaatcacttaggtgaaagaagaagagaaaggatcccaggactgagctctgaggcaatattcagggtgttctgtagaagaatcaacaaagaagacagagaaactctttaattttcttatttatcagaaaatcagctttcgtgttttgcttttctctttgtcttaattctatgaatatagtcaccctaaaaaatgtggggtgggggggaaaaggatttcatcaaccaaaaaaaaaaaaaaaaagattgcaacttactgactcactgtcatgttctctctctctactctgtaactaagacctaacaagtggtacaaagtacagtggttagctaaagcaaatttactttcttagaagttttttatttgtttactgccttgttccacaacataacagtataaactattcttccagtaattttatcatgaagaatcccttgaaagagaaagatttcaaattttaagtctctaataggaataaaagtcacatcagaacaaaaattaaaacagttaccataaagaaaaaaaaacagcaaagttcagaagcttattgagaccaaagaaaaaggatatttcaaaaaattgaaatccattccagtgtgaggcttatagaagaataaactttagcaggtgagatgtaaagtgtagattagaa

SEQ ID NO: 42286 - DNA, 2231 bp, Homo sapiens
tcgacatgtcttaatggccagttacacagaggtgaatgagaagagcgtctaaagcccttcccaggtttctagactgggtaattgactggacagtggtgtcgttacctaaatcaagtggatctgggcaaaaagccagtgatttgagatgtgtagaattaaagatgattataaataaacagcaggctgcatggattagtaagcaagtcataagtgaagggtagaagaagagatttgaaaacactcagcatgtagctgtgtgatttaaaaaaaaaaaaaaaaggaatggatggaatcaccatagaagattgggctaaatgaggaaggagctctgacaattgggagacatcaacatttggaggcagacacacagagcctgaagaggaaacagagacagaatggtcagccagagaggtcatgggagctgaggagcagaggctttcaagaagggagtgatctcagttgtgaaatactacagagatcaggtaagatacgggccaaaatgtgtcatttaggcttcacagtacaaatcctcattgaccattgctggagcagtttcagtgggtagcatgaacaggagcttatggataattcagatttaaggagagtgtggcaactctttccacaaacttaaccatgaactgggaaagaaagcaccaaaattagaagtaaacacaggaccacaaaagaaaggcactgattgtttattaaaaggtaactagctgcaactgcagtaatgattacccaagaaatgaagtcattgtttttcacctaataaaaatatagtcgtccagctacaaaaccaagatatgacaatacatgtccaaatgcttgctcttaagacatcagcattatctagctaaaactcatgttcacaaagtgttttgctagcacaaaaaaatcctacaatctcatttccaaagtctcaccttaaactgtggtgttactcaagtaattgaaagagttgaccaatataaagaataaagtttatagctacaaataacgtggtaccaggaatgaattaattgttgtctagattatctgctgaatagccaagatgttttaaattagctatacaactctttcatcattaggtagacctgaggttgattagataaaaatccacttttatagtacaaagtagttgaagaagtttagaaagaaatttaagaaacttcatttgtgttgtggttctcattggactacccaacttaatgttaggaacttcaatccatattgagataaaagtctatatcattctttccttccactcacctagaaatatcaaattcattatatgtattggaatccacaaaaacatttattatttctaacccaataaatctgcttttaggaatttattacataataggagaaaatgctatatgaacaaaaatattcagtcggacattataagaacaaaaacttagagaaaacctaaaaattcaacaatggagaaaaaaactacatgaattgtagacattaacttaatgaaataatgtacagtcactaattgcatgaaacaaagctgaataaaattgttcactttgactgcaatcatttaattataaattatacgtacaaaccaaaaaactcttaaagataactcaaacttgggggaaaataaagctgtgttgcaagaatgaaggaataagaattgtttgggtttcttatttcaaattttcccttaatgttcttataagaactttcagaacttaaaaggcaggaagtaagggagggaggagggagaacaactggggaccaaaaccaatggaaaggaaactgctacgtaagaaaaaaagaattctgaaatgtatctagacatgtttgtagactatttgtagactgtgactcatctgtaggctcggaagccctgtttagaactgatacaaggttaaatgtagttatccatttgcaagtatgactcattaaaatgatactgacaggtaccttgttctctatacagtcagtgtctgtaaatattttttaagaaatacttttttccaaaggcagcagcaccagtcaggggcttatagataaaactcccatctccctgggacagagcacctgggggaaggggtggttgtggacgcagcttcggcagacttaaacgttcctgctgctggctctgaagagagcagcagatctcccagcacagtgcttgagctctgctaagggacagactgcctcctcaagtgggtccctgacccccatgcctcctgacagggagatac

SEQ ID NO: 42287 - DNA, 802 bp, Homo sapiens
gtggctggtacatcttctaaaatgattcaaaactattcataagtagttgggtagcaagaataacataataggaagatattcaggctgacacccctcctctctttcctgtggtgattggaagcccaacattcccagactgaaaaaatgaaattgtatctttcttatcattaggcatacaaatgtcttattttaaaagcctcaggccatgggataatctcaggcattatgaggacagagtacagttgacattggacccagtaccacaagccattgacctctggaagtgatgagagacccaacaaaaggtcagaaactggtgtcagattgctgccggcacatgacaaaatacatgtgaaatttctctgcaaattcccatctatttggcctggaacagtggcagagtacacccttgtggtcagtagctggcctgagcaggcactgggcgaggtagtaaatacacaaaagtggtaaaaaaagaaaactcagacgtgagctgtgtgcgtgtgtacacatatttataacgtccaaagaactcgtgtctatttttctgtgctgtgtatacacttgctcacactctctctctctctccctctgtttcacacacatgcaacacacacacactcacacagttttttatatttcctgagttctttggtatatcaggccctttgctagatgccaaagacacaaagatgagttggtctcctgcgtcaccccctacaaggcctaatgagggagacaaaggcatattagcaggtgaatcacattacaaaaaggccagtgttcaatgggagatcaggaa

SEQ ID NO: 42288 - DNA, 881 bp, Homo sapiens
caaagggaacggaaactctcggcggtgctccctctccgggagaggagggatgctcgggctgccgccgccgccgccgccgccgccgctgccgccttctcaagacggtacctagataggttcgtcctgacttgggcagccgccgccgccgcctgtgccggctgcgtgtgtgcgcgcgtgtgtgtgcgtgtgcgtgtgtgtggtgtgtgcgcgcagagcgagagaccgcaggggaagcgagagggcgagataatgagcgagccgggatggaggcgcagaggcagcgcgagcgggcgggcgtgtgcgcgcgggggtgcgtgcgtgtgtgtgtgtgtgtgtgtgttgtgtgtgcgcgcgcgcgagcgcgcgcgtgtggctgggtgtgcgtctgtttggggagctcaccggagagccggggccgtcacgtgggcgcgctgactccgccggctgccggggacagcctgtactacagccccggccactaaatcagaccacgccgccagaccttttgcagcccgcggccggccggccgccttctccgacctcctcgccatagccgccgggccatgcgcgtcccgggacggcagggggcgcgggtgaggccgcgggcaggtggatggatgggtggggagtgggccgccctgagcccgggaagaggaaaaatgctcgaggaaaaacacaggcgcccacccccccgctacgtccggcaacctcctggcaagccttccttccgccctgtttgaagatttttttttttattcctaaaattgcttttccatgcagagacccctcttccagccactggaaaattattttcacatagttgctatgtcccgcttttcttgctttcgcgatccctccagcccccccgcgcgcgtgtccac

SEQ ID NO: 42289 - DNA, 1077 bp, Homo sapiens
acagtaaaaaatcagagttgcaatgccacattgagaaactagataatgacttggaaataaaagtgggggaagtgatgaactgccactacctgtttttctaagttttctattttctaatacagagcaaaactttaaatgctaacgacaaaaataaatctaacaggcctagaaattctgaaggtaacccagtgacaatagaaaacttttagatcactattaagaggtctttatattgttcataaacaataggaaaataagactgatactgtttataattactaactagataaaatttggcaaaagacatctaatatactttttacaatgaaaatgatttctaaaaatgattcccttgatctcatacctatagaaaaactatcagtgattactttttagtatgaaaataataagctagttacacaatttaaatattattttctgacttttctctcttccttatgagactggggaaaaaagatgttagaggagaaaaataactgttacatgccaaatagttcaaaatcttcccctggaaactgaaacaggatccttagaaagtacataatgtcctggagtttcccttgtagacaaatactttggtcatttatttgtaatcagatactgattttagcagattacagcacttataaacattgtcacagaccgcacaatgtccattcataaataaaggaggtttattcatgaaaaggttgtgattcttctgaaagcatccaatacaacctttctggacatttccctttcagtattacctggcatgtaatcaggaaagggaaacattcaggtaagttacaacctccagtcatattcacagcaatatgcaatatggacatttacagggggaatccctttgcaggtgacttcaactagaaatcccaagagtcacagtaaatgtttcaaagtccatataaagaaagaagcttggccgggcgcggtggctcacgcctgtaatcccagcactttgggaggccgaggtgggtggatcacttgaggtcaggagttcaagacaagcctggccaacatggcgaaaccccatctccactaaaaatacaaaaatta

SEQ ID NO: 42290 - DNA, 502 bp, Homo sapiens
agtcctcccaccccaaagaaataatcttaaagcacaaaaggaattcaataataaaagaagtgggactgaggggcagcatcaacactaaacaaatgctgatacataaatggaagataaaaacaaatgacgtcagattgatcaatgaaccaaaaagggaaaccaggcttagttagggatggctcaagtgaaggctgctaatatggactccagttatcacaagacaggcgccacgtaagaatgaaggcaatgagatcaagggtcaagattgtataactttgcaggggtcagctatctcctgtccattccacactggttactgatgtcactatgaaaaacaactatcttccttttggcacctggacaaaacacaggatgcctttagatgcttaagtcacagctcatccagttagataaaaacccattattttatttacggatttaaaagtggtattaaaaaatctgaagccatcatttatgaattcaccattttggctctttttat

SEQ ID NO: 42291 - DNA, 1975 bp, Homo sapiens
acctccacatgggcggtgtttcgccataaatactaaaaacacgttttgaacatgatccctgtatttcaaaagctacttatgaagaaaagtgggacatgcatagaaaataaatgatgaaaaaaaaaaacaatgccttctaatccctccccatgggacgatgttcagtaaccagttttaaccaaagcaggaaatacaggagatggcgggagcgtaggcagagagcggaagtttgctagtatctactttgaagtgtttgaatggaccaaggcacgctctctcccgccaaactataaactcagtcgccccaaaacaccagccttccagcccatcaggtatattactccacgttttcctttctcccggcaggtcctctactcccacctcccccgagaactccctatttgctggcttctctcaactcccgccacccccatcccagcctacattatgatccacgcgctgctctcactttccgccctccgcctttcccgtctggagtgcctggccgcgcccccacccaggccctccccacggcccctctggctgggaagtgcctgctgcccttggaagcgaatactcccaccgcgccctcccccaccctctcctccggctccaggccttcctcgggaaccgaggccacgaggtccgcggttcactcccgcccgacgccctcgcaaatgactcccgctcggttcggcctgggggaggaggcgccctcatggctactgcaggcctctccaccctccggactgggctgggcagcggccccgtcgcacgcaaccccccgcgcccttgccgggccgaacgggcgccgcgcttctcctacccgccgctagtgaacccagcccagagagaaacaaaggctcgggctccaggacccgctcggccaggccagccccggcccgctccctgccaggaccccaacaaagcccgagctgccgcctcgcgcccccggcctggcttacccatcggtccccgcacgcttcttgccagaggggtaatcctcccctaggtccaaccggtgccgcttggacatcctcgcactcttcgaacgggcagttattaaggaagaaagctggctgctgtatgggcacagtcgaggacagccacttaactctggaggacccccacccctcccgctactacagcccacacggtgcggccggaaccaacagctaaaatggcggcggcgacgagggctgggcctgcgcgcgcgcgcgcttccgcagcgtgcgtgcgtgcgagtgtgcgtgtgagcgaggtgcgcgcgcacgacgcccaaaggcgggaactcctgtcccgcccgctgcctcattggtccgacctttcttgggtctcctccctcttcctgtagctttcccctcctcggagcggctgttaggaagaacctgaaggccttcactttccatttcaggctatccttgcccctctgagtcaagaaattgagaaagtctagtcctagttaggaaatcctattcatttctattaccccggctttaagggaatctcagacccagagaggttgagaaacgaatgaagatcgtacagctaataagtggcagagccgggattggaacccagctatttagtaactccagatctggaacttgcggccactgcgctaccctcagttgcagtgaggggccgcgcgatggttcacgcctgtaatcccaacgctttgggagaccgaggcgggtggatcacgaggtcaggagttcgagaccagcctggccaacacggtgaaaccccgtctctactaaaaatacaaaaattagctgggcgtggtggcgtacgcctgtaatcccagctactcggtaggctgaggcaggagaatcgcttgaacctgggaggcggaggttgcggtgagacgagatcacaccagtgcactccagcctggacgacagaacaagactccgacttgaaagaaaaaaaaaaatcaattgcagtgaggaaactgaagtgagaaaatgttaag

SEQ ID NO: 42292 - DNA, 973 bp, Homo sapiens
gtcaggaagtttgcaagctggttgacttcatgaggatagcttgaacttggtcatagcagactatttatggtataaattagcacccctgtcccagagctggatgttaggcacttaccagcacaccactgttcatgtctttatgattttattttctctcctcttgcctcccccaccacctgtctaaatttaattcagaatcactatttccacttgtggtagaaacatagaacatttgcatttgaaaatataaaatggtcaagagcaagtggtctcatctttctaagttttcgtctcctgtccgtaaagtggtgatagcaacatcttcctcataggttgtggtgggatgaggtgatgtcatatacatctggtctcagcaaatactcaatactctctggccatatcactggtctcattctctgcatgcacccagccttgggttacttatttatcaaccgacacgttttggagctcgcattctttgaatagctgacactaatgactcatcagtgaagtgtgttttcagtaggaaaatgctcacaacaatcagtgcacactcttctacatctgtgatgaactatgaaaaccaggtctctttctgcaaagctataccctgagaagtcagagagtattctgaattaaattcttacactgttatccatgctggacttattttacttggccaaagttattcttctgagagcacccacctggcatttatctctattcaactttgccttagttatgtaggaccagctttcctatgtgttgaggtcattgtgcattgaggtcagtcatgaataggctgggcaacagcccttatctccccttctccagagtctgaaacagtgcattccctcctatgcatcatctgacatggataaaggctgttaatgtgttttgcccaatggaattcatatctgattctctctgcaacagtgattttacttggaaaaagaaatattttcctatacta

SEQ ID NO: 42293 - DNA, 674 bp, Homo sapiens
aaaaaaaaaaaaaaagattggtctttaaacattataaccattcacgcctcacttggctaaacacaaaaccacatccacacctcagcgaccacgaaaccattcagcacagcttccttaactgtgagctgtttgaagctaccagtctgagcactattgactattgttttcaggctctgactagctctagggaatctcaacaggggtgggaggaaccagctcaaccttggcgtagtaccaaaatgtggccaatccaggctttgcataagtcacagcagcgttcaccagtgcccgggccttttctgcaaagttacagacaaattgggctatggttctggaatggaaagttcgtcaccccgaacagccggctgaatgtctacctgtaacttcttgataccacctgcttgctgtaaacttttcccttaaaaacaaggtttttccaagggaaaacaaggttgaaaccaaaaggtttatttgcaaataccctgggttttcccagaaagaatttcaggcagcttccttgccctttggcctcattgcttacaagtgactttttcctttgctgcatgtgctgtgatatttttctctttctgtctccctttttctttttctctttttctttctttctttctttctctttctttctttctttctttctttctttctttctttctttc

SEQ ID NO: 42294 - DNA, 682 bp, Homo sapiens
taataataacggtaacgacaatgacaatgatgattacttatgagtgcggctagtgccagccactgtgttgtcactgggcgagtaatgatctcattggatcttcacggtgggcgtgcggggtggacagcctcacacccccattttacagatgatgaaaaggaggtgcagggagtggtgcagctgcttcaggcgtacacagataggaagtgacaaggctgggactctgcagcctgagtgtgtcatcacgacccacccgctgctctgctctcataggtatgacagcacagctctggagcaaatgccacgcacatttgcaaggtgcccatttccatgcagcaaaaataagtcaataagttattgacttacagaaaagcaaagggcctctcaataaagaggtcattgtacacctctccaaacaggcgattttctttctcatttttattcccctgctgtgtgctgaaggtcactggctacaagccggtgaagtcgcggaatggaatccttggcccgaaaacccaaaaatgggaggggcagaggaggtggggacagagcgggaggaggtggaggcgaagcaattctacaacccggggaggtctggcctgcttttcctccctgaactggcccaatgactggctccctcacgctgaccactcctctgggctggcctcctgcactcgcgcta

SEQ ID NO: 42295 - DNA, 1423 bp, Homo sapiens
aagtggacccccagggtatgtttatgacaaaagagtcgcagggcagggggacacggtgttctgtgcttccacaaatcgaatcacttctgcacctgtgtttcactttttcgataaatgcccctccccaccttacacatggtaggcctgcagtaaacacgtgttgattgaattgagcaagtgaatgagtgaacggctgcagcggacccccgaactcccccaactcgaaccaccgccgcaggtaattccacctggcccaggttccaccccagggctcggattctcccccatggcaccaccttcccgtttcagtcccaggcgtccaattgtttggctccacaacagtggcgagcgggcaggcaggtggggcttggcaccttctgctcccggatcccagggcttcagcctccaatccagggccaacccctgccttggggggaaggcccctccccaaaggctgacaccagatggcgcggaagaaagtggcgcccgcgcagacccgaaagtgcaggaggagcggcgcacctggcggggtcgcgcgggtgcggcagccgcggccacttggagtgcgcgcccccctctcgtccctcccagctcggcctctctgggggcgcgggcccggggctggcggccgctcggcccggcccatcccgcctggccggcgccgcggcctcacctcgctcaccagcccctgccagtcgctctcagtccggtcgccgttcatggcctcctcctccatgcgctggccggcctcctggacccccgccgcctcctcctcctcgcgacgtcgcgtcgccgccgccgcccgggccccgcgcggccccgagagggcccggcgcctccgagccgctgcgccgccgcctctcgcggccgccagcgctgttgactccacgtcagcctccgccggagggaaagggaggaggggcgcggccgccggggccgcagacacagcccgggccgcagccgagccccgccgggcccgccccgcgccctcagccccgcgacctcgggctccgcgcctcctgcccggcctctaggcaaggggaagccagggtctcagcctacaggtcactccggacccctcagcgctctccgcgcgggaggcgggccccacgggcaggcctgtgtcccccgcaagaagcaaatccccaaatccagtccttctccgaccaccatcacgactcccacgcctagaatgcaagctccccgagggcaggggtttccttggttcgcagatgtgcctttggcaagatcctggcccataggagatgctctacatatatttattggacgaatatttgttgaacgcaagaatgaatgaaccacgttttattatatacttagcattgttttttaaactattagtgcttgcttatatattttttaacgtatcatttgtcattaatagaaagcaaatgtaaaaatt

SEQ ID NO: 42296 - DNA, 2325 bp, Homo sapiens
aaaaaaaaagtattaaatgaaaggagaagcagaaaaaatatttttcatatgtatcaaattgttttctaacttagaagccaatttaaggtgtttatcagttagaagaaataatacccttcttttttgcaacatttcccttaagtgaatttcctccacaatagtttttgtctgattaattaactaataaaaacaaaatgtatactgtatccaaaaaattaaaaggaatgaagccaatgtaaaaaaaacaaaaaacaaaatgtggttttaaaatttaataaagtcagaaattcaaacattactgtgcatcacccttttcctaaactttgctcttactcagaaatattcattacacaacggtgacaaatgagaatttttctgactgataaaaatcttcattaaattttttctaaaggagataatacaggtaaaacacttaacactgtgccaggcatactgtaaacattcaaaagacgttagtcaaaatgaaacgaaagcaaagtatccacaaggataaataatccaactaacacaaatatccatatgctgtttttcaaaatgtgatttctatcacattaaaaattttatagctatcaaaaccatcaacaaagaacaatgcttatttttcaatacaaatttgaaagctgattggtaagtaatgaataaaccacaaagcatatgaaaagtaatcttaaaatagagttcacaggctcatgaatgtagcaaggtaaatttttaagagcatagttaaaaaactgtctcttacaatctgcctgtaagataacaaaagccaacatagaattcattattgccaaataatgtaattccatgaattaaaaccaaagtataatttgatgctacaagaaaagcccaaagtcaatatagtgcttacaaattattaccacttccattcaaaatgttaaaatgaaacaaaaaaaattgtagtcaaaaacagaaatctgtattactagacatgagcctattacattttcagaataaaaatgtgtggctatcctttagaagagtaaacctttgctttttctttcctttttgcttttattttcttaaatatttgtattattctcaaaacgcagacaatgacaaccactatgcacacctaaggtataatctgagttaatcttccaattacagaaatttgaaagtaaacaatcctaatttttttttaatttattaatactgatagcaatgaaaagaagtaaacccaacatttagcttagaaaagaaacttctattaaataataagaaaaaacatgctaagagatcagaaacaggacaaagagcaagaaaacagagacggtctgcatcgactcaggtgataaagggagctccccaccctgtactaattgtttttccttgttatatttcaaatggttggtttcccaagctgttaatgctatttctccacaaggtcaatctattctcttagaacagaccattcacctatttattgtgaagtgttatttaagcatatttgagaattagtatattttatttaaaagactgataaacagctaaaggacaatattcacaaatcatttacctatcaggcacccttggagcaaaacaggatgtagtagaatgaatacacagaatgcaatcaggcccaagttcctggactttagcctccactgctttcaggtctgtacgcagctcgtcaccttccaaaacattttctatcaccacaggctcaaaacctaaccaaaccaaccagaaaacaaaatgttagtgtgaactaaaataagggaagatcctgaaactctaggaagcatgctattctacacaagaactcttaatatttattttggtagattaaccttcctctggtaataaatacacggctcagtactggtattagtcaaaggcaggtcaaaataatgtgagggactactacacaattttaggaccataagtctatttaacacttggatatgacaagaatgaattctggaaagtaaggaaaacaaatgttaaatagatatctatagaagtaataacatagacactgatgacaaaaaggatcactttaatccagttcagtttcaatccacagaaaaataagtccactcattctctggtgatatttctgttttattttaaagttcattttatttcagagatggacataaataataatacaattcactcagtgaaacaaatcacaatcatctacttaatgttttacctctaaagaaaaacataataaatttcagtagcctaaggatcactgatccatctcatagcctacaaaagcctcctatgaaaacaaaatgtatactgtaaattttgcataaaaattgttttcacatt

SEQ ID NO: 42297 - DNA, 3022 bp, Homo sapiens
tctcccacaccacaattgcctaagaaattgttgctgtccatgattgcaagttcatgtaaaaagagttcaagtgtactttcatcccagccattctctggacacttgcccttaaaaaaaaaaaaaaacttatgattatatttaataaaactaccgttctctagaatactacaggaatacagtttttctttttaacgtgtattttgccacgctgcttgttttctaaaattcaagcataaattcaccactgtatagagaccgcaaagaggcaaaacgtttgtacatttgattacaattatttacagatttcgagaagtgatgataaatgcatacaatgaggtttactgagatatttaaatttccgtaagtgaaactaactgaaaaccaatacaacacatccccagtgaagatgcttcaaaccagggcgttacgactggggcggtgggacgtggagaagggcggtagttgtcaaacttcagtgaaattttggccacgcgctgtagctcactcacgcctgtaatccgagcactttggaaggccaagaatggccgatcacttgaagtcaggagtttgagatcagcctggccaacatggtgaaaccccatctctactaaaaatacaaacattaaccgggtgtggtggcgggcgcctgtagtcccagctactcgggaggctgaggcaggcgaatggcgtgaacccgggaggcggaggctgcagtgagccgagatcgtcacactgcattccagcctgggcgaaagagcgagactctgtttcaaaaaaacaaaacacaacaaaacttttaatgaaattaaaatacatgaacgctggcaggagggagacctgtgaagttccgcggaaagctcgtggttcgagttagcatacagtctacaaacaccattatgtgttctgagtcgttgagggttggtgaaagatggaggtgcgaactttgccctttccgcgaataaaaaagtacactgggactttccctcacttccgcatcccgaagttagaaacagcgggactcaaaaccccgaccccaacaccccctcctaacaacaccatttggctttcactggctttggcaaggctgagaaggcacagaccgcagtcggtcagctagggcaagccaagctgagacagacttgggactagtctcaagcagcgaagagctgccggtgaggcagcaccagcggggacgcccggcggagccagagccccggggtcgcggcggctggggaggggaccgacagctcggtaccttctccagaagcagccgtatgaggtgctcatgcgagcggcgggcctcacagccctgccgcacgtaagccggcgacaccagccgctctcccgccgcgaagctctcgcggttcatgacagcggtggcgacagtggcgaataagcgggagcactagctccacacgccagacacacgacggaaccagaatgcaactcgccgcctggacggtacggcagcgccttgggacaaaaaacaaaacaaaacaaaacaaaacaaaaaaaacacttctcgttcgtgcacatgcgcagaccttctcagatggcgctccaggaggaagttggcgtatttgagcatgcgcgagggagtccgcgcttttcgctgacttttggcaaaggaaggactgaaattagccccgccccgctgcggctgattcgtctagttaaaccctggtgttcctgacacaaacttcaggaaaggattttgcacttgtgcagaccgggcgagcagagtaagaagcaggtacgtgggtttttccaagttctgtgtttcagtcctgttggatggttgagatctgtgcagggtctgtgcttccgccttattcaaactgtcagatgccagaaccttcgatctttactttgatacatttccacacttattactgcctcacaaccccataggaaatagcagtgccccactcattttccccttgacactactgtttagccatagcacttactactcaccacgtgacatgccagacgtttgtttatacacacacacacacacacccatacccatgaatgtaaactctctaacctaacggcaggacctcggtttttgctgcggtgcccccttcccccgggcacctaaaacagtgcccagaataaagtagggcctaaaaaaaaagttgatattgaattaatgaattagtttgaccattctgaaactatccccaagaacattttgtaaaattgattaaggaggggaaaaaaatccaactaggcttacagctgctgttattaagccagcttgcagtgtggccgactttcttgtagctggttgctacttactaccccaggagaatgtggcccttgtcacaagactcttcattctttttctgctctgaagataaaatctaagacattatgagaagataagctttctgtttgcattgcttctttaggtcccgcataccaacaaaactaaggacgccaacttgtctggaaggcccaataaaaagctgattcatggaggaatgcaattgtcacatcctaatgatttcatctcccttaccccaacgaatcgataaccccaaattttccagcccctcaccctccacaaatccccttaaaaaactttgcctagaaccccttgatgaaatggattgaagcttgagaactcttcctgtttcctggcttgtaacttgtgattattaaaactttctctgctgcaagcctgctgtcggaatactggtctgtttctgcacagccggcataggaacctggcagtgctgtaacagttcaacaacttagaggttcactgctggagatccctgcctccagtttccttacaatcttcatcttatgtgagcctacagtaattcctgacattgctttcacctggtggtttgtccatttgcactgagtcacacccacttgcaagagctgattgttaaatgttcagtaattttgtgagctagttttcaaatacagccactcaaaaattatattacaagcaaaagtaaaaatactcaaaatttgtcacttcctaattattttacattttact

SEQ ID NO: 42298 - DNA, 701 bp, Homo sapiens
gtatacttgattgcaagcgggacattttccaaatataagccataatatatgtaaggatcagagagtcttctgggaagatttgaatcatgtgaacagacctcccttttgtgcagatactcaggtgtatttctgggaactggcttctgcagactgttgatgtccccatgtgtaaatgaatacacaggctcaacaaaactatagttggtgactgcaaaagccctcaactcaaaggtcttaaccatcattgcagaggaatcaccaggggcatttgtttaaaatgcacatttcctgatcttttcccagagtttctgaatctgttggtctggggacaaggtccaggaatctgcagtgtcacatgcacccagggcatgttgacgctgtctctctgaggactgctctttgaaaaacaggcttatatcacaacaagaaggaggctggcccactagcttttaagtatttagctgatttcctgctgaaatagtgcaatgtggttaacagtgagccttggaagagatgagtaaaggtgatgcttcaaagacatgctgagcaaactgaaaagcaagttaaagcgccgtgacattgcttccaaaagccaaggattgacagcagctgacagtcatgctggtacctgtgtcacctttgaatacaaagaacattgggcattttgacttatttcagcagggataaaatgttagggagga

SEQ ID NO: 42299 - DNA, 1681 bp, Homo sapiens
gtcagtacagatggtctcattctctttgttagtaattgattggtttagtagtgggcatgcgaacctgttttggccagtgagctttgagaggaatatctattgtgggagacttctggggaaagtatccttattcataggaacgcactaggagacagtctcttcctgcatctggatgtggccatgactgggtgtgaagctgctgaaaacagctgcagccatctttcacccatgagggtagcagcctgagactaaagatgacaagctaagcatagatgagctaaaagatagaaagaacctgggactctggtgacaatgatgaactgctgagtcagccagctcccaaacttgccctattgctagccttcctcctatgtgagataataaatttcctttaaaccaactggaatcaagatttctgcatttgctgcccatggtatcctaactatttgcaggactagagtggaagtgagatttagttgagagacagttgtggtggtcaggacagatatgatgatggcttggactatggtggtagtggtagggagaaagaaaagcagatgattcaagagatatttcagaagtagaatcaatagggttaaaagtggaggaatgtatggatccatatagatgaagtcattaggaatgttctgtacatgttgacaattaatagattaatatgccatttgaaaatttcttatcaaacaggaatgattatgactgtacttctgatgttcttttgcatctaatctaatccattgcccaataataccaactctgagattagaagttaaaaatagtatcatcacgtaaggttggtttttaacctctgtcagagtccaaaagtctaattcaaggagcagaaactactctgcagccactatggagtgtttcctcaaagccaagagtgacagtttccacagccagagcttccttggacaaattaagttttcttttatcctgaagccagcttgataagaaagcttagcagaagaaaactgtcatgttgttagtgtagctggtgcatcttcttaggtctgggatgtttagaaacatgtacaccttgttctctccctatcctgtctcagagtaggcctgtcacacacccagtagggaagggacggaccctgctgatgaagctctgagcacatccaagatgttctgcagagttcatggaactacattcagtatccagtacttcataggcagattttatggaagatttccattcaacaaagagcttttgttgtcagaatttggaatcatggtcttttcatccacgaaacagcataaatctggtcacattcaggaagtgatttttcttgtgctcactctttgttgtgaccacttcttaggtttgctcagtggttctctttctgtgatagtcacagattctaggaaagttatactaatgacacactgaggcttttgatgagactgtctatctgataataacaggtgtatgttactgcactaagtttttataatgggttgaatagcttccccctcaaattcatgtcccctggaaacccaagaacttgactttatttggaaatagggtctgtgcagatgtaattactcaagatgaggtcataccgtactaaggtgggagctaaatccaatgactgatttccttataagaagaggagaagacacgcagagatacacagagagaagaccatgt

SEQ ID NO: 42300 - DNA, 467 bp, Homo sapiens
tagggcatttagggtggccttagttggaaataagtgaaacatagggttaaattagagattagagtctagactgtaaatttttagatttttgggtttttttttgtgagcaatggaataacattagaagttactgacagtgatcagagttgtgattgaaaaacaaccttccactagtttcctaagtgaagggtagctgcctattagaatggctaagagaatggagccagaccatctgtgttgcaacattacctttgcctcttatatcagattgatcggggacaaattacttaacttttatgtgctttagtttctctctttgtaaagaggggtgtattagtccattctcccactgctaataaagacatacccaagactgggaaatttataaaggaaagaggtttaattgactcacagttcagcatagctggggaggcctcaggaaacttacaatcatggtggaaggggaa

SEQ ID NO: 42301 - DNA, 2551 bp, Homo sapiens
attggaaaagcagaaagatccagaatcaatcatcttctactctaagcaactagaaaaagaagaggaaatcaaaactcaagtgagcaataaagagcaaaataaggcaatggaccagaaaacagaaaatcaatggaaccaaaacatgacattttgaaaagatttaaaaattgataaacttctagctagattagtcagaaaaagaaaacatacaaactgccactatcaagaatatctgaacaaagacaaggtccctgccctcctggacgtctactggaggaaagaaatgtcatacaattaaatctatagttacagattatggtaaactctgagagagaattctgtcagggagaagccgcttttggttgcaggagggcacctctttgaaaattactcaccttcccgccctccactgggagtaaagcgagctgtgcccagcttctccccgcgctcacggaagcaggtggcggccccaccccacctgacccctcaaaagccccgccccctgttcactcccacgtgccccgctgccgccgccgccgccgccacgacccttctgcgcaggcgcgggggtggtgcctggcggaggcgcgaggtggggcgcggccggcggcgaggcgggacaaccgctgggcgggcgccaagcgtgcccgtgcgctggtgaggtggcgtccgttctacccggtcgctcccgttccgcgccatgcagagcccagtctctggcacctggctgctctgatctggtctcagcgcggagggagcagagggagtccatggaggatccctccgagcccgaccggttggcgtccgcggacggcgggagcccggaggaggaggaggatggggagcgggagccgctgctaccgcggatcgcctgggcccacccgcggagaggcgccccaggcagcgccgtgaggctgctggacgctgccggggaggagggcgaggccggcgacgaggagctgcccctcccgcccggggacgtgggggtctcccggagttcgtccgccgagctggaccggagccgccccgcggtttcaggtgcgacccggccctgccccactccccgcgcccctccgggcggctgcccctgtcgcccggctcggtcctgtctcccgcgcgcgctggccgaggtggacgggctttccccgctcgctgggcagcagctcccgagctcggaccggcgccagccgcagccgcaccgcgggcacctagcttgctcgctctttctccgggagctccctctcctaaggccagtggttgtcattaaaccgattctttagacctccccgcaaagtgagtcaaaacttctagaaaccgacactggggagaggttaacgctgtaaaatgacgtaagtccttgctcaagtttggacttgacttttgaattaagaaccttgaactctcaggaaagttcccggagtggtgaatttgcaaagtggatgacaggagagagatggacagccagaatatccagttgccactggggcacgtttcaaaacctttttctattaaatgttgttattatgaagttagccacagggggcaaaagcagttgaaagtctgttcctgccctcttacagtttagtttctctttcttgatttacttctaatacataagaaaaccaaaacgaaaaacctcttttcgctattaagcggactgataacctcaggcgaaacagggcagttgaaatgatgttgaaggttaaatttaggtatgctgtgcaggcctggatatttattaataaagtgagtttttctggcgtgttgaatggagttagacaaatgtgatggaaatagcaagagacttgtaagactctcagctagaggtgagacagacttgtttgtaaaaaggcgatggtacacctccctgctggttgtgaggatggattaaatgagatgttgtgcacccggttggtttatcgcttcacacatgacaacttaaaaaccacagaaaatggaagtttctttaacactgcttagttttttttggaattgttagattttaaatgtactgttagtggtacactaatgtgtcctttacagtttaaagaattttggatagaatcggtcactcaagttctagctagaggctacattcaggcatattctagagtaaataaatcagagaatcccaaggggagcagtttgtctgattgtttaagctttaaccaacgtctgctcccgttataatgttacctgatggatgcattgacgtttaaccaaacaacgtgaagctgaaaccagatcacaaacgggtctgcatttgcctagctacattggcaatttgggtatatgttacttagaatttagtctgtaaaatagctagcttgcctttttctgtcccttaccttgtgtaagctaccttgtgtacctgggtttttaaaagagcctaaagccttcaaaatgcacttgttctgtgaaagtgaggtgttttataaacaaacagtattaaggctagaaaaaaatcaaagcgagaggtcaacgagatggcaggcctgtaatcccatcccagcattttgggaggtctaggcaggagaatagcttgaggctg

SEQ ID NO: 42302 - DNA, 2140 bp, Homo sapiens
ggcgtgagccactgtgcccgcccccgcccccatgttattatttggaaatttaagagaagtgggggttgttaggcagtggggggaaggaggattagagcagtctatacaaatcttgattacatttttctgtaccttatatcctgataccggcaagctaatcgatattacaggtccatatcatgagcattctcatagctggtatttcttcttaatgcagtaactattggtacttcagagatgaatgcattcttggatgacccagaatttgccgatattatgctgagagcagagcaagcaatagaagttggaatttttccagaaagaatctctcaaggttcaagtggaagttactttgtgaaggatcctaagagggtgagaatttcacagacctattatatgtaatggaaactttggtaaatactaatttaaatatgaaatcattgtgagtttctaaagatattttcctattaagtctgattgtaacctcttttccaaaacaaaggtcagtttttgtttgttttttgagacgcccggggtcgccctctcttacccaggctggagtgcagtggtgcaatcatagctcactgtaaccttgaccacctgggctcaggcaatcctcccatctcagcctcccaagtaggtgggaccatagttgcgtgccaccacactgggctaatttttgtaattatttgtagagacggtggtctccctatattgccctggctggtcttgaactcctgggctcaagcaaacctcggctttggctcccaaagtgttgagattacaggtgtgagccactgtgcccagcctcaatgttttgcttttactaaagcactctagtgcttagaaacagagctaatcagttcaagtcacagtttgctattttgttattttatacttggtttcaagcatttattgaatacccacattcagctgtagcctttttgagtatatatattcacaagtccttatcttatggaagtctataaccttaatagccaaacacggtggaaggttaaaccttcaaaagttgtttaatgtcatttccaaagtacttgattttttttcaaaggtatgtgaataccttttctggcattttaccaggggaaggaggcttagcaatctgaagcttgaaagtattggaatgtgaaagtgaaatgaaccacaggatgattctaaagtggaaaagagaagttgatgtggcactttgctccacttagtctagaatttttcaaaaatatgttattttttctaaaagctttctgaatgatgcataatgagcagttcttttctccaggggaataacgtttataatttcacccaatttttttggcaaagatagaagttctatttttaaaatgattttaaagcatagtcccttttttaagattaaaatgtatttgaaggtactgtcaatctctcaatctttattctaagcttgatttcttaatttgatcttgttgacttttttactagtgactcagaccttattgcattatatttattgtgttataaagcaattatatacttaaaattataataagatttgttcttgtctaaggataattcagcttctaaattgaatatgagtatattgtatcaaacaataagagtacagagacttttagacattcatgagcaaaaaaagattttttaatacgagagaatttaatcaatttatttgttaagatggattctcactctgtcgcccaggctggagtgcagtagcacagtctcggctcactgcaacctccacctcccgggttcaagcgattatcctgccacagcctcctgagtagccgggattacaggcgctcgccaccacgccgagctaattgttgtattttgagtagagacgggatttccccatgttgaccaggctggtctcctgacctcaagtgatctgctcacctcccaaagtgctgggattacaggtgtgagccacagcgcctggccaagagtttactttaaattggttcctgaaaaaatagctggaaaagaattagggtacgagaatctgacagcatggatgtacactgtatcttatcattatatttgtattttagaggtagtttttgtcattggattagttaatttaacaaatacttggatgtccactgttcatcagatactgttctga

SEQ ID NO: 42303 - DNA, 470 bp, Homo sapiens
tttgaaagattagttattttggattacatcatcagaaatacaggtattgaagttctctcatttgttcacgtaaatcttgttcattttcaaactatattcttgttatccaaatcaaagcggtaaacttttgttgcagaagtcttgaagccactttctctgtctgtcttggcaaacagatgtagtattgactctcctgggcagaattcatcctgtgtgggatagattctgactcatagcaggctcctagatcagttcctgtcccctagggaggaatttcctaggggcagggcaaagtcagatattggaaatgttatctgcataatgtgagtaattaaggcttcattgtataaattatgttaggtgcttattttgacattatgtaactcttagtgtagtctataaatacactaaactcttaatttttcctgtgctataaaggagcaatgacgtagaccagggatgtccagtct

SEQ ID NO: 42304 - DNA, 1336 bp, Homo sapiens
caggacggttttctttctttcttatgtataaatgtcaatgagtatgcaactatgatgtgcaactttcagcattgtccaaaagttacagaggatgatgcagtgactgtgactttgaaaaacaaagaatgatccttaaatcacagctgctgcagccatttcagctatttggcagaggtggtaatgctgccttttggacctacaatacaaccaagtctttgttcgaatcatctcacttcctggctatattcttaagaaaggagggtgcttcatgcgctgagctcatggcacaggtcccgcaagtgacctgcgagccccaccgctaggggccgcttaggtgcagcccccaggtgggcggggactgcgtttcggggcgtggcctccgccgcggcagcccccgcccaagctcctcctaagcgcctgggggcgctgtgggtcgctttgggtcgcgggggcgctctttctcagcattcttgtttcgtactgaggctttcgggacggcggcgggaagatggcggcctccaggaatgggtttgaagccgtggaggcagagggcagcgcagggtgccggggaagctcgggaatggaggtggtgcttcctttggatcctgccgtccccgccccgctgtgccctcacggtgggtcagagtctgggctcagcctaactgccgggcgctgagggtgtgagttggcttggaagtggcttttggggctcctgtatttttacccgcctctttccctcaccagtgtgctgcctagaaaatactccttcctcggaacgcggtgtttttcaacttacttgagaaacattcagagcaagtctccactcttgtggttttggctccaggactatttcatctcttttggggggaaggggcagaaaagtaggcaaagagaagaatgcatggtattgaatagttctcgttgacaagtacttggggatttcatttgttgatttgctctcccttcaaaaataaaaaattagggagaaaaacagtgtaattcttgcctgcgaactagactcagtttttctctaacttacagaaagtgggcgtttccagctcaaagctcaggttttcactgcaagggtaaccgcgcaagagatgtcaaagtcctcaattctctgagtcccttccttgttttagtctcaggtttgtaatattcacaacgtagacagcaactgtaccgacaatagcattttctttctgaagagaccggttttcaaaaattatttataagtagtcactgccggaatgttgtaacagagagaaaagaaacattcattaaacacagagaagccggcgtggtggcgtgcacctgtagttccagcacttggggg

SEQ ID NO: 42305 - DNA, 1532 bp, Homo sapiens
cctgttagggaggttttagggcacgcgcctcttctctccaaattggaatcacccaaagagttttagtaaatactgggcccatccagggttaattttcttctaattggtttggggtgctgcttggacagggggacttttaaaattctatactgacccaccaggactgacatgagaactactcgcttagtaactgttagaggaggcgccagctgatcaggacctaaagttcatattctttttcatctccccgttgtcgctgaagcctaccccataaacccctaccgtccctttgcccacagcagagaatttccgggaaaacgggaaaggtatgcaagcatgcccacacacgtgcacacacgggttcccaaaagacctgcgtgtggccgcaggggcctgccccgcccttctcgggccctttcaggtcccggcgcccagcgatcccaccagcacctgggtccggcgcgcggctccctccctctccgcgcccctcggggctccctgccccgcccgcgtgccccacccttcctagctctgccccatcgctgctccctgccccgcccacgggccccatcctacccccacctcgatccgcccctcgctcctccctgccccgcccaccgcgccccgtccctgtccgccccttctggctctcagcacccccaagaccggtgcgcgccccgcccctcctcctcctctcgcgaggcagtcccgacgccggaagtgcctggagcgcgcgacagcggcggggcggggcggcctggaggctgtggcgcgcggccggcagagggaggggagaggccactggggccgtgttagtctgccggtggggactcttgcaggtacaggcgcggtcggggctcctcgtggagagccgggggctcctgccggcctctgactggggtgtcgttgcagggccgtccccatgttgcgttttccgacctgtttcccatccttccgggtggtgggagagaagcagctcccgcaggagattattttcctggtctggtcgcccaagcgggatctcattgctttggccaacacagctggcgaggtgagtgagccggcgggagcccgcctgtgctgggtctgctcccggggggcccaagaacaccgagcccgagcctgttcattcgggccacaggcggccggagcctcagtttccccttctgcagacatggctggccacctgctaccccttccctgcctcccaggacggcagtaaactttaagtatatatgcgaaaggtgatgtctgtgctattttcggtacttttatggctaaagtaacagttttcacacagcttaacaccgtcacgcaatcctgcttccccaagtcttcttcactcattggtttattagttaaatgaactttttaaaaaagcccactatgtgctgctcatgagctagacataatggtagatgcagggaccctgccctaagtttgcttacagttttaatagcagtaggaagagttattgtcaaacttcagctgcaaatgtgcctgcatgtagctgccacacaggatatatttaa

SEQ ID NO: 42306 - DNA, 816 bp, Homo sapiens
tacaggtgtgagccaccatacctggccttctttcttcttttctttttaaccccaaggcagggagaagtggtcatttccgattattttaaatctggaaccagtagcaatccccaggtgttttaggaagggggtctttgtggttgctgtcctgcctaattttgtctttagtgcactgttggttacagacacaattatgtgtgtggcacagggaggagagggcccaagatgactgcgtggagagtgggcctgagcaagcgcctgctcaaagtccaggtcaggaggctgggtgaggcgggatgaactgaacagtcagtttgttgccctgtgaaggtgcagtccagggccttcctagctctgggccaatgtggtccatatcgccaaacctttcctgggtggtctgaagattttcttaaggggaactaactgcccagtccaggcacctctggccatttggggaatgaggcaggcaagtctcggcttggcctcagttcccaggcccctaggaattggcactgggcttcagctcgctacttagcagatccagtagggcctagacccagctggacctgggagcctctggagctgccaaattgtacatgaaattcctgtgtgcttggccggacaagaggttcatgatcgaagggttactgcctgcacctgcctctgtccctcccccagatttttcctgtctgcatttggctttttaaggttctcctatgcagaattggctgtggaagagaaatagcatgggagagattgcaaggtgctttttatatacattctcacagaattctctaaacaactaactctgcaata

SEQ ID NO: 42307 - DNA, 1168 bp, Homo sapiens
caccatgttggccaggcttgtcttgaactcctgaccttaggtgatccacctgccttggcctcccaaagtgctgggattacaggtgtgagccaccgcgccaggccatactattttgtataaagaacacggcattttatggtccccaaagttcattggtcctattatctcactcaatttgtggtcattgccactgtcccatgagatgaggtgactccaaggacatacctgatggttgcagaggtgggactttcacgcttgtctcctaggctcttcccacccctctcctgttggcttaaaaccaagatctttattttcatcagcaggattgttgggatccagcccaattacacactatgtttaagctgtaattaaaagagaactctgcctggtggcaaacttgcagtgcctgtgggggctggcggctgagcgccaatcaataaaatacgggtgtctcctccagaatgccgtggttcttgcgaaagcacagagaatccaggtgccaaacataagactaatgattaaaaatgagaacagggaactgcttctgactctgcctttttagccaacattcttttccatcaagagtgacagaagcatatactaaatttcttcagttatcgactccctgtttgccagcccgcccacaggaaactgctcaggagtctgataagaattgcacaatttcagcacgaattaagtgattcttaccttgaatagcacaatggcatagtcatagattaacgcaggatcctccgtctccagggcgcccttggcgtaccactcaattgctgcttcgggattcttggccacaccttgctgcccccagaacagcatctgggccaatcgttgcttaaagataatagcaatttagaacaatgacttttcctgtataatgcttaacacaagattttgaaaggtgggagagcaaacctactttacgatgttttagattgagaaccaaggattagatacactttatcttccaactggaggccagagccctgaatgtggacttatgtaaatacaagcccttaatgcaagccagaaatggttcgtgtgtgtgtgtgtgtgtgtgtgtgtgtgtgtgtgtgtgtgtgtgtgtgtgtatctactgtacccaggaccagggctagctggaacttcgtcaataatcagaactcctcaaatg

SEQ ID NO: 42308 - DNA, 596 bp, Homo sapiens
gcaatggggagacgtttactgagtatggattttcagttttgcaagaaaaaagtcgtggagctctgtggcacaatgtgaatatccttagcactgctgaactgtgtacacctaaaactggttcagatggcaaattttgttatgtgtatattagcaagaataagaattttaaaaagataaatcacagcccttaaagaggaaaagtgtaaatatttggcaagtctcttttgtaatagaataatacggttattctgggaacaactcaaaggtgctgacctcactggacgggaatgtggaggacactcttttccacttcccactggctgttaatgaagccaaagcctcctcactctctaccccctgcaatgttctcatctctgctttgaagtgtgttgttggctgagatagtgagcagatgatccacctaaaatcacacagtgtgggggaaagaaacgctttcaggtctgaaacgtgcatatgtagcggcctggaagtggagtgctggctgtgtctatgaagaaaagctgctggcagggaagaagatgactctcagacagaaccagaaattacagcccattttctcttgcaccatggtgtca

SEQ ID NO: 42309 - DNA, 1975 bp, Homo sapiens
tttctccccactttgttctgaggggtctcagctactctggtatttaaaataaatgggttttgaaaaataggttactgccctttagttgatgactaaaacagaagccaagaagtgtgcaaattgcaaactgacatgcatgagccaaacatattctctgaaatgacaatgttcaagacgcagctaaagtcaccactctggcggtaagcgtgttacagagaactagatttctttccggcatccgcaacttggctggagtgaccaaggaggagttgaagagcgctggagatgcgaggtgcgttggcagaaaactgtccgggccgggaggacccggtggaaactaaaaggagggtcgacgcgggtggcgggcgccgagagtaagaggcgaagttgggcacgggaaggaaaggagctgcgagaagattgagagggaagcccaggaggggtggggggttggggggtgctggagactgcgcgcggcggggcggggagcgaactccgggcggcgaggctcccgggtggagtcgaggacaagaaggggtctcgagggtaacccgacccgggtctagagagagtccaggagggaaaggaatgagcacgagcgagagagcagcttggcaagtccggtccaagcgcccctctccacgcccggggtacctatcccaggtgccgggaacgcccggggcgcagcgacgaggaagagagaaaactagcagcggcgtccccgccccgcgtggcgggtgtccccggccgcccccacccgcgtccccggggccccgcgcggaggggaagacccgggcagggtccggcgctcaccaggtagcagagcaggagcagcgcgcaggcagagcggccgccgaggccctgggggacgccgccactcgggaccatggctgcggcccgggggccgaccgcgagcggcgggggttgctgctgctgctgccgcggccacccgagccccgcgccgcgccgctgcatggcgaggccgcccggatccgggccggaacaggtcacctggtgcagggaccggcccccgcccgaggcgccaccttcccgcccgcccccggccgggccggccgccgcgcgcggggccacctgccgccacctccggacccgccgccgccgccactgccgctcccgccgtcgccgcccccgcagccccagccgagcgccggctcctccccgcctccccgtccccgtcccctccctcccctctgcctccctgcccagccctcctcccggccgctccctctggcccccgggcttccacccctcggagcagcgggcgcccacgcaggtgggcaccgacccgggtcccgccccttggccgccgccaccccccgcccgggtcgctgggccccggcgcacccccctttccctttctctctgctcctcccccgccccccttccgcgctcctgctctctgcgatccccctcctctccctccggctccctcttccttctcccctcgcgctcccaaaccccctctctttttcactttctccttttcctccctttcctctttctcccttcccatcctcttcctcgcttccgcattcttcctctcccacccaccccttttgcgggtcgcacagaccagttcccgcccgtgcaatgggtttttgtctggttgcttttttggccggggcgccattcccgcagggcgcagggcgagtgtgccccctggagttgtgccgcgcagctgcccggctcccaggccttcaggatggattttgacccctgccaacctccacctgtccacctgcggggttgggactgcctccttgctggcatgtttgcagccgggctgcgccccaccctgccggctggttcgcggcacgttctggatgtttcccgagggttttgtgtggtgccgccgccaccgccaccactgcgctctttgttttaattgtccagagtattggcacccaggacgggtttgtatttgatttgcatccctgtgctccggcttccactt

SEQ ID NO: 42310 - DNA, 1339 bp, Homo sapiens
agggaggaaccgggccgaaggaaggaaagtagacagaacagggcccgcgggaatcgagtgcagcaaaacagctccaacctcaatccaacgccagcgcccggcccgcacagcacggaatcccggggaaggcggagggcggggtccgaggccccgcctgtgaccccacccctttcctggccccgcccccagccttgaggccccgcctctgactccacccctgtctctttctccgctccgcccctcctcctcgtccctccctcaaggcccggaagcgaaagcctctccacctcttccgagcggggtcacggcccggccgtcggtaacctggtttccgagagtgccgggcggtcggcgggtcagggcagcccggggcctgacgccatgtcccggaacctgcgcaccgcgctcattttcggcggcttcatctccctgatcggcgccgccttctatcccatctacttccggcccctaatgagattggaggagtacagtgagtgatctctaaccccttgcggtgacctgactccccaacacacacacctcccctctgtgagctccacgtggtgccgtggaaagaacttggctcgagggttagggagagccgggttcgaatcctgccatgtgcagctttgtgaccgtggacaagttgctcaacctctaggactctcagtatcctcatctgtgaatgtttgtggctacgtcatctatgctaaaatgccgagcctcctgtgagactcaggtgatcatgtatatgaaagcagtcctcacataagtcgacgctaagtaccagttcatatttacagttaaaattcactgaatgcctattacacgtcaggttaggcatatgttggatcgtttcatttgcacaagctcaccttgaagtatatatgtaaaacatgcccattttacaaatgagggaactgagaggctcagaggttttataacgttcccaaggtcacacagcaagtaagtgacaaggcaaatatatccaaccccaggcctctgtccagagcctcctccaagcacccaggctgagaatggtgactgggggagccagatggaaccctgatccttctgagtggaaaggtgcttttactgcacttcatttccactccccaagatgttttttgagtgggactgtttcaaacccaaactgttaacctggggtttgtagtgttttctcttctttttcctcaaattgtttttccgattctgcttgtttccttcgttttaagccgattgctcacatggtaatggtgaaatcctgggagtaattttccttcttaatcattccagtcctatcattctaaaagccaaactcttcttccttgagacctat

SEQ ID NO: 42311 - DNA, 3095 bp, Homo sapiens
atcacgaggtcaggagatcgagaccatcctgactaacatggtaaaactccgtctactaaaaaatagaaaaaattagccgggcgtggtggcgggcgcctgtagttccagctactcaggaggctgcggcaggagaatggcgtgaatccaggaggcggagcttgcagtgagccgagatcgcgccactgcactctagcctaggcgacagagcaagactccgtctcaaaaaaaaaaaaaaaaaaaaaaaaagaaaccaattgctaaagtagagtagctaaggaatcagaacttgtttcaaagtaagcgaagtagtggccagactaggtgactcaaggcatgactcaaacccgactctggaggctgtctgtcagctcccggaggcggggggcgcggtgtctaacacgttttaggaaagtaccaggcttgtggagggcgacaggaaacctccccgggagatcggcctggggctcctcctgccctagagcctgacctctcactctccgtaccggcagcgacttccaacctcctggcttccccttcctccgttcgaggctccccacccctcgtcttccatccagcgtcacagggcgtgtgcgtgttgtgtgcgagacgcgggtctcctcccccgccgccctccgccccgtgctcccagccacgcgccttcccgccccgcctccgcggcaagccgctcccttcccaccccgcccgcgcccgccgcccgccgcccgcctcccgggcacgcgctgcacgaacggcgcccggagctggtctaggcaaacacctgtcctgccttggctccgcgagatttggggcgaaagcttaggcaacaggggcacgttctcgcgaggtttaggaaatttcccacggccgtgttgtgtctgagccgagtagtggaaggcggtgggaaggaggtgtagcgtgagactggactgcccgcattgggtacatgcgcagtgccgctcgcgcgggccgcgccaatcctgcagcgccttcaacaggtttcgggcggcgaattccagttctccgggttttggggctccctgcgggaggcagtgctggatctgggaatctctaggaaaggaaagagcaaaggaggggaaagatggggggctgcaggtaggaggagggggcgggattcgggcccttcaccctgctgttccatgcccggtggggccaggtttgcccgggggcttccgggatcaggccgcctgaagcgcgattcgggcagccggcagcgtcctcggctgtgccaggccctcgggtggcccggttccctgtgcagtagtggtctcaacacacacctgggctcacacacggtggtggctgcgatggggtcttagagaggccatgcagcacgcgagcggcaagagctttgatcgggtcctctgggcagactcggaggtgggagaatgtggctctcaattccaaggcagttttcccttctggagagaactactccgcgctctggcgtgtgtctgcgaggtggccattaggggtgtctttgctagaggccttggcttgacctcatttcacacccaaggagaacgctaaggcgagagagctcaactgcaaaagttttccgcttgaggagctctggaagggcctcctcattagcatgggggggtgtaatgaatgaagacagtccccgacgtgtcacttgcccgaaccccagacatctctggcgctcctgcaccaaacgccgagattagcataaaggaggcgcccagggaacgtttgaatgaatgaaaatagctgggaacccagagtgagcgggaagccgcttggaaaacacccattgaggaggtgtttcatctaggcctgtgaaacgcagcccattttcccaggacccctcctcccttctcctcggccccgcctcctgacccctccattcctcgtccccgtagtaatcccctccggttttcctcagtctccacgtacgtccctcaaagcgcgtcctaaaacccggataaccggagcgctccccatggaccacacggagggctcgcccgcggaggagccgcctgcgcatgctccatcgcctgggtaggtttccagggaaggcagcgagcaggatcccctactctgcgggcggcgcgaggcgtctggctcttcgcggcggcggcgaggggaaagggagcgcgggggctgggtggaatcgaggagtgaggaaaaagggaaggggcgggggagagggaccagggaaggcgtcggggggaatctcgcgagggttggagttttggcgagagtttgtggaagatggcgcctgttgtgacagggtaagtctgagggaatcggagcgccgggaaccgggaaagttgcgggcgtctggcagctcacggcgggcagcgggttcgggggccgcggcgcgcttggcgttcgggggcccgcgggggcggcgtcgcgtgcgccgagcgcggcggcggcggcgtgtggccgtgcgctgccgctctgcgctgccgtggctcaggctccagcgcgtgagggcgggcggcggcggcggcggcgaggccggcgggtgcgggcgtgagtgcggcagggcgcgcggggccctcgggcgccgtgcctcccgcgcgcctccagcgggctctgcctgggggccccgtgcatctttgttcctcgcggccgttgtcgccgcttcgccccgctagtgcccccggccccgggcgctttgtctttcaccgctacccgctgcgactctctacccccggccctttgtttcgccgccttgggcgctttgtccgacccgtggcgtcccgcatcccctctccatctcctcccctccgctgtccttcctcccgtgcccctttgttgtgccacactcttgtcgttagcccagtgacctgccacagcccgggcaccagatttctgccttaattgttcttccattgtctttctcctgtgggtcccctctcacctttctgtatggtcctggatcaccccccgaggctttgtctcccccatccacgggcttattctctcggcacccccttcctctcccgtcatcggttgatttatccacaacccacggtgtacgtctgctgaactgtctcagccccggggactccatctgctgcttctaagtgcacacaagactctac

SEQ ID NO: 42312 - DNA, 768 bp, Homo sapiens
acaacctgtactaaaacacagctcttttgagttttatagctgatacaccaatttactaaggagtcttaacatcaatgttcaattaaaaaaaacaggagatgtgtttccaaaattgatgccttctcaacctcctgagagtgtgccaacctaggtatttgactctgtgccatagtaagcattgggtagctcccagcattagaagccagaaagctcccctttgtagacttgaactgaacccactccaaaactagcccagctaatccaggcttccctccaaatttagagtgacctggaactgggcccactaacttggctgtgacctttatatccttggcctcagtgtaagtatacaggcatgaaaactgctcttttctattggattagataaatgtgagaggactacagagacttccctcctccctcagttaaatccgtagggcctccttggtctacttgtccgctacctctggcttcgctgcctgttaatccccctcttgctctgtactccagccgctctggtctgttggttgtttccccactgttggtcacagtccttcctatctgagaacctttgcactggctctttcctctgtggaaatgctcttgccccaggtgtccacatggctttaggtcgtgactcaaagtcaccttcttaaggaaacttttcctgaccaccttgggccgtccccatttcaagtaccccttgcctgctttatttttttctccccatacttatcaccagctaatggagtacatatgcatgttatt

SEQ ID NO: 42313 - DNA, 1660 bp, Homo sapiens
actcaattttgattatttttgtgaggttattctaatgtatttttcactaggccttttttggggggggaagggaggtgccgttggcctttggggatgtcattcaataatttaagtcagttacttttagttctgctaaaaatcttttgtgcatttccttgaaggcaagaaccatattttattaaacctttgtgcccacacagttccttttatgtaaatgttcaataagttgaaagctgaatgaattatgaataaatgcttgaatgaatgaatatacggaagaggatgaatctagacggtaaattcctggaagacttggacaatgtcttattcatccttgaattgctaatgctttgcagaaaacctacaaataatgcctgttggttaatttgtagttgttagatgagacgagattgtctacttattcctggtataagactctagagaatagaaacgagagaaaatgaagtaaaatggagtgctatggtacagtgctaggcaccttcacgatttttacctcagctaatcatcacaacatcctgcaaactgggtgttattttacagaggcggaaactgtaacacgtttacgcaggtagtgtcagagcctaacaattcgtggttgtaattcgcagtatcattgcgtgccacagtcctgtttctgcagaaattgagaggtggaagagaatgatcctttatatagtaaaacgcacaattctccgtgtcccccttgtgcatcagaggcgctgtggctctgaaagaatgagctttcttgcctttcaaccatagacaaggcaggaacaacggtgtgaaaagcgtcctccccgccccggtctttttccgccggcggaacgcagatgctgtggccttcaggcgctgaggggaccagagagggacggacacaaggctcggcagttgcctggtaacgcccgctggaggagtcccagtgtaataaggtcccggagaagtgtcactggccctgagtgggacccggtagcccgttcgctccgcgccggcggcctgtccccgcggcttggcgggctagggcaggggaaatgttgcaggaggagtcggacctctctctcattattgcccagatagtccaaaagctcaagggctccaatttgtactctcagctggaacggcaggcctgggtaagtgaggccgagtgggaagggatgcagacgggcggggccgcggcgatgtctcttcttcaccctcctcacccaagccagagctcgcctctgacctctccagctccgctctggtgctcaaaaaacaaacagacaaaaacaaaaacaaaaacaaaaacaaaaacaaaacaaaacaaaaaaaccccacctccctgtccggtgcaagctgtgctgcctcagccccaggcgtggttaatagatttttaaagaagggtggggcgcatcacacctttttttcagaccagagaaacgcttactcatttatctattcctgtagtcatttacagggtctaattttttaagctgctggactcactgaaggtagcttggaccatgccttccctcactttttccgtcctgtgggtggacttgggcccccaagtacctttctgctttctcgtcaatgtatcactttcttgcagtttaccctccctgcaattattcctcgtctatccgtccaccacctagcattt

SEQ ID NO: 42314 - DNA, 575 bp, Homo sapiens
agatcttcatgccattttaaagtggtttaagttgtaggtctgaaagaaataacttataaaatggcttttttttaagaacactgaattttcctttttctcaaaactgtggtattcagtttgtctggccatcaggcactgtcctctagagcagacaatttccattcatcacaagaccttaattcagaatgcgggggtgtggtccgttgtgtaaagcactagttctgagtttccgtgcagtggattttgggcatagcatagcagtaaccgtgccgggctgatgagtaggccagcagttgaagtagtgtgcattcttttccagtgctggcagctgccgtgtttgctttccgagcagtgaacctgatggaggtgacatcactggctgcagctgaagtaaggataagtttcactcagatgggatggaaatagtttctgagagattgccaggctgtcattttagtgtctgttgcataggacacgcgttacttgtagccaggttttttaactcgggtaaaacctgttaagttctgagctaataatacttaaggattcaaatttctttaattacttgagaaaag

SEQ ID NO: 42315 - DNA, 1780 bp, Homo sapiens
cacctcagcctcccaaaatgctgggattacaggcgtgagccacagcgcctgtctaaaactaggtttattaatatgaataatgatctagaaaagtttccaggtggacatgggattacagccaggcctgaagaaaggaccggatggagatggatggaaaagaggaaaagggcggtctctgacgaaagggcagcactatgagagtgtgtgcctggaaaagctagagttgcatctggtgtcactgagggggctcccagagccacaagtttgtggggctggaaaggcagattgaagcctgagtgtagaggacttgacatgcttttcatgtcaagtcacgagatttggcttttccctggagattcatggaggttactgaaggttcagaaggaagtaggaacgttccctctggaccccctttcctctaagcctgaccttgacaacatccggacttcctttgaacttggaagctcctggcttcttacagtatttatagttccccttaccttttacaagaagctgtggacttcctgtgcccaggacagctgcaggactctggcagccagcactctcctccctccccagggagcagctgaaagactgctgcctacagaaactctcggctgacagttaagaagcaagtgatttttaaagattagatgatacaaagggaagcaagtccccttaaacctcctttgtcaaataaatgctacctgtgaatcagaggagcgatctgctgtgactcaccctttcacaagcctctgcagagaaggccggctgccagctgattttcacggcatggttccaggtgactatgggatcccaggggccctgggttcaggggaggggctgtgctttaccaccaagcaaaccacacaggggggctgacacaggaaccaagagggtgcctggaaggtttccttccataggaggcagcagagtcaaggggagcggttctgttttgcttttggaaagcaagagcattagagctgaaaagtgcctagaatccacctcttcttaatgggaggttcccggatactcatcaggaagtttgtaaactgcaaaattaggtgggtatgtgcattttgtgcaaagagggcacatagttttaatcagatactcttggttctaagatcctctctctatgttgtgacacctaaactcctcattttgcccacagagcatgattcagtgatttgttcaaagccacaccaccagtggataacagagaagagagagaaagcaaagtcattaggcctctttctgctgccctggccccatgagagaacctacaataagcaatctgctgtgacattctgaacatagccccctagacagaaattaaatgtgtcaagaaggaccactttgaaaacctttgtgccaccagccccttccctccttccaattagcctactcccaccccatgaccctacctacctatcaagtcggcttcctgttaagaggacaacatgctctagagacaagtatttgcagttggaggatccctgaagctgcctctcaaattctcaagcacttagggtgggagtcgctgagctactggccttcttggctgaacatttcaggggaaacagcagattgagagtaagcaagtaaatgggagcaccctggagttgctggaagtcattgttacctttttttcccttttttcatttatgtggatgggtagttgtcacctcaaattgaccttagtgtatcttcaacatagttgtaatgtaaggaacccacagtttgaagactaataacttgggtttgaatcttagctcca

SEQ ID NO: 42316 - DNA, 1919 bp, Homo sapiens
ctcctcccttccccatgaaacagaattttggctgagattttttcaaaggagtatcatagttttgtctttgaaatcatttggcaaggaacaactcattgaattttcagttggctctgattctctgcagtcatcatgcacacttgaagtaaaacaaaatctaccattaacattgttttcaaatgtaatgaaatttttctaaataattcaacagttgatcacataagtgtaattctgtgctttgtgggcattcatgtaaacaggtatttattttaacaggttttgtagtactccttgtgtgtttgaggcagtaattattttcctttgggatttagccatgtttctgggctcttgaaatctcacaggacctagatcttggacctggaaaattaggcagataaaatagtcctgcaagaatgagagactggagaaaggtctccctgcacttgcctgcgaatgcaggtcctggcccagtggttcaatggtggggctgtcctgtaactgtgccagggagtcagaagccatggcggggctcaccgtggtcatgctggaagtccctgtccctgtctgctcatcacacacaggtcagcaggtacccgttctttatgtgtggcagacctctggtggccaggcggaccacttttctccacggcccttctctctccacttccacctgcatgctctcctgagccctggtggcagaaatgttttccttgacattttatgacactttggcagaattctgttgactcatctaagacaagatggggaattgttctgcagcagtcgccacatggggaaacagatcacttagtcacatcatctgccaagccccgctgttgcctgtgcaaagcatttctaatcacggaaacttgaaagctgtccctcatttgtgatgacattagccatggtgattttttacccctgtcttaagctgtcagtcgctggggttttcttgttactctctctggcagagacacatttatttatcacacaaaagcctggctctgaagggatttgtgcaaacttccttctggagatgaaaagaaaacatctccttcctggcctgtgccatctactgaaaagctttccaagccaaatgtgagtgactgtcctagtggacagatgtcacccagagcaggcctgaatcattttgtttgtttttcttgctaacccaacacgactttgaacccacttcattaataagagagacaggagcacgaaaccctttttacttcctgctttcttcccagtgtgctgacatttccaagccccatatgtttccctaaataaagttccatggaaatatatatttttttgaaaaatcctgtttttgggttattacagcccaagaggaaaaaaggctgccagtggactatgtagggccctttacgtaatgctatgattgtttcgacccctcttgataacagcaggctcgtttaaatggttaacgttgagatgcggttgaagacctgtaataaatgtatacttcttcatttaggcaagtacattagctacagtcaatctgcaacagcggggaagcactaagccacaaacaggaaatagtttgaataaatatttcccattctaaaatgaatgactagatagagtttaaaacatgtcagactcttgtagagacatgatagacatttgctggttacctctccagcagggatccagtcccacccttccccaccttgattttccttgggatcactctacccttccactctcaatagtggtccagaccagactgaccctgcccaggagtagactgtacttgactcaagctgtattagtttgtttccacgctgctaataaagacatacccaagactgggcaatttacaaagaaagaggtttaatggacttacagttccacgtggctggggaggcctcacaatcatggcagaaggcaaggag

SEQ ID NO: 42317 - DNA, 1689 bp, Homo sapiens
ctcaccattttcaattgttatgatctttactttagctccatcacaattctagtcctctttttgtggaaaatgtcaacattcctgctgcttcagcatctgtcagttatcatgtgatcaataatattcatgtaacacctcaaattaagcagtatagagcaaacacatcctatttaataatataaacgactcaccccacacgccctctgattgcaccgggctttagcgggcaaagttaactcgcttctgttgagcggcttttaaaaaactatgttagttaaatctagagtttttaactccctatcctggatgcaagacacttaaaaagacttccttcctctgctcccagagaaagcagcaataaaattttccaccttcactacaccacttgaggactatctcatgttttattgggtttagggaggaagggtcttgctaatgagttacttccacggtgtcacttctattcctagtgctttattaaacaatttgaggaccccatttttatgctagggcttcattgatcgaatggagccatcacattgtctatatcactttagaggtgtttccaaagttctcagcacctcgagtcccttgttagcgtttgtcgagagtcagcgggaaaactcgatacctaacagcgtttccaccgaaggcagctctctgaggggcttcaccatcaagagcaagcgaaccaggctggaccaccctgctgggtctgtcccgacattccagggccacgcagggaagtcaaagacgggaaggagaagatcagtgggagggcgaggcgccggaattccccacttctatacctccacccctactaccgccccacgtccaccaccctccccactgacagcccgccgcgcccgcccacgcggtgacgccatctcgcggctgccgggcgccccgcccacagagtgggagccggaagccgggcgggcagcggcgcgcggcgtcccggaacccagcagcttgagaactcgcgcacctgggggaagccggcaggaggcagcgggcatgcgcggggctgcggtggcgcaggcgccctgccgcgcccgccagtcgggaaccggttctccgagtccgagctggcggcgcgctgtgggctgtgcgggagcgaggggagaagagggagatagggagcccgacatttgggaagggcaggcttgcctctgggatggggaggagccggtgcacggatcctgctgtgcctctgtgcagggcgcgcccagtagtttgggatttgcaagaaaatgcaatcaaacaacatgggcaaagtgcgatgcgtttatcctaagccaagaacacgcttagaatgcacgcccagagccagttctccccaagggatggcaacgcacctgtgtgccgggctccgcgcaagggctttccctgtttattctcccgccgccgctaacaaccttgtggggcgggcatggttggatccccaatttaaaagtggggaaactgaggacagattaacctgtctgcacgtaacacagctgaaaagtggtggaattgctatttctttcaggtttgcctgattctagagctcaatgctgcccatcaggtgtttgaagtcatgatttggtgaaaatgggacagtgaagacgttctgaaaaaaaaaaaaggcatatgatgaggtttggacattgagaggtataggctggctgtaggagtcgggtaagtgcc

SEQ ID NO: 42318 - DNA, 2723 bp, Homo sapiens
acctaagaaatactttaggagaatgtaatttgagtatcttcttggcttgagaaagcaagcaaacaaaccaataagcagaatgaaaccaacaaaacccaatagcaaaaggatcttcgtgtttaataaccctatctgcaaattttaaacaattttgtgcccctgggagaaagaatgcctccttgcgtgtgaatttccagggcttttaatttatagtgacagtacattcaacacttccttttaaatttgaagggaggtggccttaaaaatatgctggcaactagtttggatgagaaagattccggttctttatttattcaaaccaattagaccaggtctgaacaggatttacaacagagagcagatcttgggtgcacaagagctttgcttcattccaggttggcgaaaacaagtcaagtctacatcattgttctgtcagccggttcaggatacagcacagagtcgatgggatgggggtgggaaggtgatgagttcaggtaaatgtacctaggagagtcagaggctaaagtaaattctcttaaataggccttttcagtggctgctaaatctcgctcatttcccatgaattagctgtgggatattggggacaacttacttcacatttctaggtcttagtctcttcattcgtaaaagggggtaacgataattttggagttatagcatgtaaatgtgtaaaacggttagagcaatgcctggtacactcacacatagcacgcgctttgtgaaatgtttggcaagtaaataaaacgctaagctatgctaaccgcgtctaaacagccagccacttgtaagccccacctatattgaaattacggggacgctgctgttttccgattgcaagattttcctgatccatgcaattactttcgctgccctctacgaggctgaaactcgccctcaggatgtgggacgtctggactcttctctccgtccccttgtagccccccactccccctcgcggtggtaccgtgaatgagggagaggtacacgtcccccttcttccccgcctcctatcttcgcggctcgctaaagcgttatcagccgccccacggtactaccgtccgtctaggaacgcctccggggcggggctgggatgccgcgcacgcgcagtacagcagcgccgcgcctgcgccgtggagagcctgagggaggcgggggattggtatgcgagcgaatgtgcgaggggagggaggcgtcccggcggagcgtggtactacgaccagcgcgggccggagggggcggggggatgcgccgcggcggcggcggcgcgggagctggggttggtgtttggcggcgccagagcagcggatcccggtctcgccgcagcagcagcgcgggtgtcgtgcaccgcctgaagacgccgtacctttctaccccccaccttttttttttttttttttaaataaccggaaccaatgaacgcagccgggatcagagctccggaggccgccggtgccgatgggaccaggctggcgcccggcgggagcccgtgtctgaggcggcgggggcggccggaggagtcgccggcggcggtggtggcgcctcgcggagccggcgagctgcaggcggccggggcgccgctgcgctttcacccggcttctcctcggcgccttcatcccgcctcgactcctggcccagcgtggggctggctgctgcggcggcggcgctgggctgcgttgctggtgctcgggctgctggtagccggagcggcggacggatgcgagcttgtgccccggcacctccgcgggcggcgggcgactggctctgccgcaactgccgcctcctctcccgccgcggcggccggcgatagcccggcgctcatgacaggtgaggggccggggggcggcgggcggggctcggccggcagcgatgggacccccaacccgtgcagaggtcagcatctccgccggacgtccgctattccgcggctccggccagggcgcgatgcggagccctgcctgctgcttcgtcgcggtcccctgcactccggacgtctttccttttcaccccgacaccccgccctcgccgagcctctcgacggcactgattcccctcccttcagtcgggctctccgatcttccaagctgagcaatgcggtggtttctctttcgtgctgcagaagtgccagcagggtctgcaggggactgggctgattttttttttttttttttttttgaggctgctagaaaaagtcagcagcagcattgcggtattgagtctacctctggtgctgcttttgcaaaggcagctggcagcgagtctcaccggttcaaagctccgcttgagcacagcgtcccaggggagcctgctaaaggggattctttgagagccataatacctagtgatattagtggttccgtgttagtatgcagaaatgcctaagtttacagtgcattttttgcggggtggaaggaggccgttttaagtggtgatggaaagtgtttggtggtgggagcatcactgggtgacaaagggtgtagaaacctcagcaggtaaccagaaattatacctaaaatttgcaaagtgcagcatactcggggcttgcagctggcagcacagttctgatagactgcactagcaccttttttttaatatatagaacgatctcataattgaaaacttggaaacgtgttttgtaaggttaagtgcagaattgtatcctttttaaagccttccggtgttatgtacaactgatcagttgtggt

SEQ ID NO: 42319 - DNA, 1000 bp, Homo sapiens
aattacctgcttctcctagtctgtaattgtctctcagactctgactaatcctgatttttggtatatctctttttcttttccttccaggttttgtgttctgttctcttatttagccactgacttgtattccccatctgtattagttcattttcacactgctataaagatactacctgagactgggtaatttatgaacaaaaggggtttaactgactcacatttccacctggcttgggaggtctcaggaaacttacaatcatggcagaaggcgaaggggaagcaaggcacatcttacatggtggcaggagagagagagcaagagcaaggaagtgccacacttaaaactatcggctctcatgagaactccctcactatcatgagaacagcatgggggaaactacccctgtgggccagtcacctcccatcaggatcctccccccacacatgaggattacagttgggggtcagatttgggtggggacacagagccaaaccttatcaccatctaacttttgacgttattttaatattttcttgctgctttgtctcccctgtcgtgtgctctttttgtattgcattcagattgactcatcagcctgtaagtaggccagtaaacttttcaattacttttgtgactcagaaacttacctataattctagttaatctacttgactatgtagttacttaattatgtaatcgacatgacagcatagatcttccatttttgtatagtttgtaccaaaaatctctaacgaggatttcatggtttcacttagttgatttcacaatctaatggttgtgaaactgttaatcttttttttttttacctgcctgtggtgaagaatgcatagttttgtagaaggattatgggattgagtcaggtgacctgggatattataccatttcttttatctgcttgtctattcaattacaaaacatttattgaataccttttttattctgggtggtgagatattattactatgaattctgatagct

SEQ ID NO: 42320 - DNA, 737 bp, Homo sapiens
ataattccttggaagtgaaaattgtatagaaattttagctttaaaatcttctgagaagaagggcttgcggacttacattttgtggtgttatgcaggtctgcatgaacctgagcttaaattttatctccctgagagattagcagggacgccacacagcttacccaactgacttattaaacacagtattgtcccaagccattgcagttagttatgtaggcagatgttgctcgggatttgtttgcagtgagttagtgctcttccccttactttaatgtgtctttttgaactgtcacctagtgttgcattgtgaattttgtttttaattttggaatcttaaaatatatttttctacgtaattctttgttttcacactaactgacagctgttctatttctttatcagaagtttgtgtatagtactcttgttggtttattctggcacactataaagtttattcaaataagttgggtttgttcagatcaaacattcctttgctcttcagtgtccttagttagctttggggaaaattaatctgcggggtggtgctcgacacgcaggatgctccgtagtcgctcgtagctttgcctcaaggtcttgagtgtgagtgtatgtgcacaatttcataattacatcctgtgtctttatatatctttagtttgaaagctcttgctagtttttaagtaaatcattccaagaatgaattatctattccttttgtgtctttccttagtgaggct

SEQ ID NO: 42321 - DNA, 366 bp, Homo sapiens
tcttatattatgggtgtgtgtgattttgattgctatatccattatcttgcttattttaccttagccttccatacagaagtagatgttggattccttaaattcatagactttcaggattaaagaatactttgaaattatctaatcttatgccaaagcaaacaatttctcaaatattacctttaaccctgagtgcagagctattatgtaatctaaatataaagcctacctctgtattttttctgaaaagtatgtctttgtctgttaaacagaaaatcaacattacaactttaacctcacacttaagtcctgtattatcttaggcagtttgggctgctatataaaattaccacaaactgggtggcttaa

SEQ ID NO: 42322 - DNA, 1285 bp, Homo sapiens
aaaaaaaaaaacttgcatgcataaaagcacattagaaatgttttaataacgtgaaattagatttttatattcacacaaacatgcattaagtctatccatattggatagacataatggcttccttgtaaaatttaaagagtttagaattgccctaatattttacatagatattacttttaaaaactgattttgaacaaaaaccaatatatcaaagattcttgtgaagttgggacctgagattgcaaacagatgcatttttctaaatttttgtgagaatgaaatgttttcattgtgattcaagctggaattaataagggtgacttaagagttatgtttttgattttgtagggagagctcccttggttacgacagtcttaaagatctcctgttacataaatttgacagtaagttatcaacattacaactaagaagcctaaccatttggaatttaaaactcctgtatcagtctgccctggagtcattctgggatgagtcaagtggtcagacactgtctcactggatgagaaacatgatcatgtctgagtaccaggaataacaattctaaaaatggacagatctaattcattcaatatttcagtgatggccaagtgacgcatgctgggagggctcaacctctacgcctggaaacttggctctttgggaagatgtggcaatgcaaatttgttgaagatgaaggatatatcactcttctggaatgaatggaatgaatggaatgtctagccagagacctttcagaaatcttaataattgtggcaatttttttttcttaactgttcacttctcttaacaaaagaaaagccactgcaatgccccacctattcccctcacacatgtctgttcttgatactaatttttacattttgacatttaaatagtaactataattatccacattttttcttctttgggcaattacatttgcattcttagtgaagaactgtaaaaccaaatggatggaccaaaaaaatggtttaaacagaagtcgtacaaacatgcatatttgaaagaggagattcttataactacataaaataaataatgtaatatcttctatttatactttccagtagattaagtgctgaggacacagtcaacaaaaacaacattatatgtttctactggcaatatccctggtgttgcctaattggttgaatttcaaaccattatctttaaagaagcatctctataggtatagttagttcttctttgctttctgccagagaagcctgcagaacacaatcaagggatattgatgttcaaagaa

SEQ ID NO: 42323 - DNA, 974 bp, Homo sapiens
agaacttgttcatttatctaattcattttttggctgtggagagcctgaggcatataagaaccaaagaaagctgcttttttatgagaatgagtcatttacaattttgcacaccttctaaataacaatccagaactatgttcagattatacttttttcagttttattgaccatggaaacagtctctcaatttagtaatccagtctcttaggaagcaaactacaatttggtaaggttttgtgttatactgtcctcagcaattttcatgtatttaatctatgtgatgacctgacatgtgttgttcagttaatgattgataggtaactgaggctcagaggggttgaataaattttaacaggtcacacagctaggaaagagcaaacaaaagaaattaaactctcatctcttttctgttagagaatttagtttttcaacaatatctcagaccgtatcagaatatttatgtcttcagaaatttttgtggatctagcctcaggtgccttcatgtgatttttaaacttaaaactcttgtttggtgcaaatcttgtctctttggcgtccaagtagcaattttatttactgttcctttactgttcaagtctcctgtgaattttctatttacttctctggccagaggagagagaaatgtttgctgacctggctgtgtgcttcatgcactgaccttttagaaccatttctggttctggatgctggagattgtcctctttccacctgcttttgtttgtactctctgagccactgtttgcatttaattttaaaatgtctccttctattaccttccttagctttggagtttttatgccactttcatttatatctctcatatctttcatttcatctaaaacttttaaaaaaaaataaatcctagcatagaagagaagatgccaactggggacaaactcatgaaagagaaaaaagaaaaaaaattaaagtggacagaaatgtgaaagagattg

SEQ ID NO: 42324 - DNA, 505 bp, Homo sapiens
gaagaaggtcttctaaataatgtcacaccaatggaagcattaataccaagttcagtaaagctgaagaaaactttaaggctgtagctgtcttgacacatatctattcagttatgagctgcataatgtcattttatcaaacaaagcactgcatatatgacaatgttcccattagtttataatggagctgaaaaattcctgttgcctagtgtcacagccatcccaacgtggtattgcaacactttactcgcgtgtttgtggtgatgatggtgtaaacaaaccctttgtactgccagtcttaaagtacagcaagtataattatgttcagcaccaatacttgataaggacaataaatgactatgttacttgtttgtgtgtctaccatactacactttttgttattattttagagtatactcctactcattaaaaaaggtaactgtgaaacaggtccttcagaagatattctggaagaaggaattgttatcataggaggtgacagctccat

SEQ ID NO: 42325 - DNA, 434 bp, Homo sapiens
ttcttctaaagtaataattttagagtgctgtagatcctttgtactatattgaaattagaacaaaccaaacgatacaatagacaggaaaaacaaagggtcacagagcaccctctgatatgtgtacagggctttcattgagctcagagaaaagcagtctctagtgacgctgcaaatttatttttaaaaggtggcttgcactgtcaggtgtagtagttgagaaatctatgtaatcttgtttgatattgaatccaagggcaaagtactaactttgttgcccggagcaggcctcttatatgaataggaggcttctattttgaggtctgtccctcggggaatttgtgagagaatgctccaagatgattccttaataatctagctaaatgggccgggcgcagtggctcacgcctgtaatcctagcactttgggaggccgag

SEQ ID NO: 42326 - DNA, 1355 bp, Homo sapiens
tgtataatatataaatatatatatataaatacatacacacacacacactcacacgtataattgctgcaggtaatgtcagtctttttgctccatttcttcaattgatttaatgaagcctacccacgttatgaaggacaatttgctttgcctaaaatgttaatcccatccaaaacaccctagcaaaaacacctagagtaatgtttgaccaaattcctgggcactccccggccaaatcaggttgacaacttaaaattaaccatcacagaggtcatgggtttagaaattaaaaaaaaatcaataaaacagagttgaatgagcatacatggaatgtaatattagaaagaattaatagtactccagcataaagtttatacctgaaacaatagagtgacgttgaataattcttaactgcaaaggtgtaagttgaaaaacattgtgttacccttataaaatccaaactggaagttgccactgataattgcaataattgcaaaatctggacatagcctaactgggtagcaaacccagacttcccactgttagtgaagtgatttggagcaagttgaacagctgttctgtgcctctgttcctcatttgtaagaagggaataatagcacttcataaggtctctgtaaaagattaaactacttaagcttgaaataagcttaaaacatatttagcacatagtaaacctttgataaatagtcatagttctattgttattattattacattctttagtagtacctatctctcctaatctcctgtacttatcatctgcacttattacctcaaagtagaattcttcagatggtattaaaagtatttttactgttaaaaaccaaaccaaaccaaacagaaaactttgtgtactgcagtgaggcagagttgtttctatcgtggacttcacagatctgaaattgcttctgagagacactgagctttgacctatgaatcaaagtatgaagtcagcctgtttattcagtcttttgtctgaatgacatgaaaggatcaatcagctagagaagtaattaaagctgagtttctttctgtatatttacctagaggcaaaatcaatgagcatccccagttaataataaaaagtgataaataaataaataatcacatacattttcaaaagacactgtgtctcagccttgaggtagttgtcagtcaattggtgaaagtctgattctggctcttgaaatttttgaagcgtatctttaatgcccattgtataatgcagcttatttcattttcttttgaacgaataaatgactgcctttttgtcccaatattattagtgtaaaaaatgttttcagaagggcaaggagaccagagcttatcaaacttat

SEQ ID NO: 42327 - DNA, 635 bp, Homo sapiens
cttatcggtgacttagtttccttatttataaataataattattattaatttggctaatacacacaaagagcttacaacagtaagacctacagccagcacatgataggcattctactactattagcttttagtttgaacagtcattaggtaattctattttgtggcttactcaacctgtgactcaggttaagttctctcagataaggtcctgttaggtttttccattctcggtaacctgaacagcatttgtatacttcttctatttcccagaatgctgaaaaatgtcaggcaggacactgaggaagagagcccagagaaaacaagttgtcacattctagcctctggaaacaatcaggattcctggagaggtgacaatttcccctttgggtgttagcaatgggcaacacatgttatgtttgcttgtttgtcagtgaatcttctctggtggatgatgagatcatcaaggccatgggtcattttaaatttataggaacaagtccagagaattttcagctacagaagagaaatcagaagataaaagatgggaggcatgcaggcataagaaggaaagggacgcagaaggggaagtagtaattgcacacagttgcattagtctgcaaagaaatggacttaga

SEQ ID NO: 42328 - DNA, 797 bp, Homo sapiens
ggtgattttagctggtgaataattttgtaattttacaatgaagaggaatatgagtcaggggaatttggaggaattcattacttaccagtgttttaacattactactcttaggtttacatttcctattcccctgctagcatcagccagagaacattctctgcttttaaaaataatttgtttaattgtggtaagaacagttaagatgaaatctactctctgaacattttcaagtgtacaatacagtattattaactatagagataatgcattacagcagatctctagaatttattcatcttgcaaaactgaaattttatacccactgattggcatttatccgactgcatcaggtccccctagatgattttcctatcttaagttcagtgatattatacaatataatcacaggaatcaatttccattatatttactagttccagacacattccaaagggaggggtttactcaagactaacactattgctgaacattcttggaattcttcctgatacagcagaaaatagttcaaccatggcccagattcacaagctttcattaagtccaaaaaggaggccacttattatttatattatatatattgactgttacaacacacagagaacctgatactaatgataatagtaaaaatttatacagattttttccacaaaagcttttacaaaaagaaaacctaggtaacttttattatacctattttcccgaggtagaaatggagcatggagaattttaagtaaactcttttcaatttctacgagaggaatattcaaagaaaactc

SEQ ID NO: 42329 - DNA, 568 bp, Homo sapiens
tattttaaatcttattaccctgtttgaattctaagatagtttcctaaggaaaatgatttgaggacagaaagggagattatttcaaaaggaaaaacaatctgaaaaaataagcaaaagcaagaacagaggcaaaaatataaacattgctatcactggaatatacagtgtcctgtgtgatacagtgggacatcaattaaaaattatattgggccagtccagcatggtcttgcaagctaaacttaggaactggattagtgcatttactaggtaatgggtaaatattaagaaattttaagtaacagtatgatctttcacaatctgtaccctgaccctttatctctgtgacctcagcttctatgatttctttcctcactttctatatcccagcaattcagatgctttcaacatgtctagcaccacctgctttgggcctttgttgaaattttgttttgtttattgtggtttcccacttagaacagtgcctggaaaataacaggcattcagtttaaaaaatgtgtttaattaatgattttacacatttgttaaacaaaattcggatatgtgtgcc

SEQ ID NO: 42330 - DNA, 2165 bp, Homo sapiens
cctggacttaaagctcctgcctcatttctttttctactacatcatcattaaaggattgccagaatcaaagttctcatattctaatttgggagattttgtcattgaaatattttttacaaaaaaaaaattagaggtggtatatgaatttatacttcatttgcatttttctgtaattaacaacacaagctttatatttcaaatagttcattggaaaggtagtttttctttctaaccacccttcatttcctaatgtataattgagttaaacctggtaaacatttctttttttccaggtgtcaagatgttaaactttgtcaatagaggactctgcagggacactgtggatgaaagggtctactcttcttcactccaggacacatctctggacatgctcttctagtgcatgacaaccaacagtatatcacagccagcagtgaaagactgcctaaaatataatctacttctcaggaggcagtttcttccagtatatttgaagaacgctttcaagctgtttcttctatacagaatctaaggtaacttcatactctggtgggccacaggtagggggttcttccacatctgttccttctttagaaggtctgcctcagcctcaaagtttgtggctgcttactccatatgctattcctgaattctttagagttgtctctttcccataatagctaatcccctatgagagtttataattccttgtattaaacttcctgtgttcaaattattctgtggtttctgtctcttggttgaatgttgactaataacagttgtggtatgaggaagtagaggggttcctggagaaagatctgaaaagatggtatttggacattggtttactcatgcccttgggcttgagcatattggtgaaaactttgccagaaggaaacagagtgctaagtaatctatggcatgtagtggcataccaattaatcaagacatcacctgtgcttgattgtgatcaagtgctgactgaatcaagtcccatggaaactcaatggctgccataatttaatgtacagaaagtgactacaaagactatgctgtggccagaatttcctgagtgacttggaacgcttacagaaatgaatgataagctcaggaatttagacgtcaactcatgactaaaccagagagatttcataacagtcctaaaatactatcttatttattagggtcataaggttgataccatcaaaaaccaaatgcaaaatttaattatgtcaactgtgaatagcaaactccatggtgtcaccatccttaagtgttaagtttcaaatattgattatgaatgattgttcagttgtagaaataaggatttccttggctactcttattaactttttgttttgtttctatataagtactcaatttcctgtttttttcttctctgttcttactcttttacaatagaaggttgatggctattaaaatgaaaattcattgtcattgattgcacaatgtcaagatggattgtaattgaggaggagtgaacattactcagaaatggaggcagtacttaagagctttgttcttccttttacgtgagggtgagcagttgtttatgttaggatcgccaggttgtgttacacaggagcattttttgtttgtttcttattgctgtttggaggcttaagaatgggaagaaaatatgtgtgagggatgatatatttggattggcttgctcaacatccattcaaacctgcttattgtgtattttcttatattgcagaggctaaaaagctaaaaaaaaaaacaaaacaaaaacaaaagcaagcccacacacagttttccagattctcttgacatatctagatgtgattttggtttacatcattcatatcacttctgggaaatattggctgcttcacagaaaagcagaggtggtagacttaagatctggccagtgttgcagtaacgttcagatttggcaggccgtttcctgattgcagcagaagcactggctgtctcagcatcccgaatgtgtcctgtgagttttgaaagtcattaatgggagaaggtcagcgtaaagtctgttgttagtcattctaaatattttgaaaggtcatcagtatctgtattagtctgtttttgtgctgctgataaagacatacccaagactggataatctatatattaaaaaaaaaaaaaaaaag

SEQ ID NO: 42331 - DNA, 819 bp, Homo sapiens
taagatttaaatgtacttttaccttaaatagataatataaaaaaacttaactctggattagcatacattttcctgaatcttcttttcagctataatccagaccaatatgcaaacaacatatataaatatgaaatcacatttcagcacatccaatattattctgccattataattgctaatcccgaaataattctggcagcaaggaagaggatctctagggcgtcccaaaactactcaaaataaagtgatatgttaatagagaactgcagagaagcatgtccctggcatgactggagtcaggctggtaatctagcagcaaaggttggctgagagctgaagcaagaagatgtcaagccaggtagtgtatggaaggaaagttaccactgagggcataacatttaccagtgcacagtgttacaagggcatgcaaacttgtcaaataaattgttgtagagcttggatgcaagagatcaaagtcctatgggtggtggcactgtgggcccgaggaatcagtctattcagagttgcccggctcattacaaagctagagaataggactcagttacaagaagaatttgctggcaaatactcagcaggcagattgcttaagtcctgtccaatccaattgtccattgagtacacagtgacttggcttgagcaaatttttttttttttttttttttttttttttgagacggagtctcgctctgtcgcccaggctggagtgcagtggcgggatctcggctcactgcaagctccgcctcccgggttcacgccattctcccgcctcagcctcccaagtagctgggactacaggcg

SEQ ID NO: 42332 - DNA, 1657 bp, Homo sapiens
ttagggctgggatagcagaggtactgggtactgagtcacagtggggaaaagtgtcctcatgttttccccctcctatctccataagcaggccttggcagaggtgcctgaagacttctgccagcagaatgaaggactctgggccaggaatgcaaatatgaatgcaaacatgcacaagctcatgactagccagaagggccccagtccttgactgcagctcccttcaaagcctggggtacactcagtgctgtgcaccaagtctgatgtgaagagggcagcttttccccatgaggactgccaggtaaagcctttgtaattccctatggtcaagcttgaaaaacaacatgtaggttttttaatcagattccttactacttttaaaatcaacatgaattatgaaaaccaagagtaaatgccaaccaccacgttatgtgctcaaaaataaataaacatctcaggaagttgctgtctcttaacaaatcaaaatggctgattcctcactctgtgattagaagaacctgcctcacactattggaatgtagcttatagatttttgaggggaccagcaagtcaatacttctctttacagttcacaaaagagaaataagcaagagtcaacactttattacctcacagtctacatatttagttgactatttgaatttgtattggatgactacaggcatctcttttttaatacgaaaatgaaagacagatttattatttttccttgcctgactgtgtcttccttcatgtcttctctttaggtgacccagtttatttgcttgtggtagaaatcaagtccttcttgatatatcttgctaaacaatgttttatatttaacttacaaaaaattattttaagatttagttctttaagtctttaatttctctacattccatctactgttcagcactattttttcagttaacaacatcttccaaactaatatcatctctcatctagaaaactaataataactatgaactaatgtccctgcacccacatctaaactgttatttgcaaagtgtaaatctgaccatgtcatcttcgacctcccagtgtgcttaattcctgtcattagcattccatggtttttaaaacaaaggccaaagtcccacaaaaccttacatgacacacccactgcctaactctgcagactcctctttatctatatttattttttctagacaaacaagtgtttccagtgcttcagtcattctatgctacttgatatctcaggattttgaacgtgctgttccctctgacctctttccaactcctattcaaactcaagtcaaagactcgactgcgggacagtggattgtggcttttttttttttttttccaggctggagtacagtggcaaaatcttggctcactgcaacctccgcctcctgggttcaagcgattctcctgcgtcagcatccatctggcatagctgggactccaagcatgcaccaccacgcttggctatttttttttttttttttttgtatttttagtagagatggggtttcatcatgttagtcaggctgttcttgaattcctgacctcagatgatccacccacctcggcctcccaatgtgctgggattacaggcgtgagcaactgtggcttttaaaaatatatctttaccacacttagcatcatatgccaa

SEQ ID NO: 42333 - DNA, 550 bp, Homo sapiens
catacagcatggtttctagtcttttcacctcatgggtctctgttctctgaaagcacttcaagacctccatacactcttcacactctttagtatggtgcctgttatttctgaaaaagaaaagtagcctaggaatatctcctcactttgaactaggttctctacttctctaccaatgcactgacattgtggtgtcatcatagaagctgcctggcaggcagtcagcagccttgtaaatatctatttaccttattcatttcaccactgtcattcctcaactttgcctgccttgtgactggactttggcaggacctgtactttggggatgtgatgacattaactaagcctgaaagaggagattagccatgcatgtactccccctagtcttctttccctgaagaaaaagtctgtctttcaaaataaaattataatcataaaattgattggtaagcatagaatgggggcaaggggaatgagttcagcatttcaatattaaattgcatctatcaaaattgttttgatagacagattcatcccccatcagaatagtaac

SEQ ID NO: 42334 - DNA, 2427 bp, Homo sapiens
aaaaccctcttcgtgttaggaaccaccttaaatgtgtatgtgttaaatatgtttagaaagaagccaggaagatatttgcacttaaccctagcctagttccatgacccacttttttttcttctttaaacgttgttggacaaaaaatgtcatgagtattttctctcaatatttctcctgtaagtgtatggaagtcataaataagagttaaaaaaaaaagagtttaaaggtatttctctttttttccttaaaaaaagttagcttgctttttatcttccaattacttacgggcaaagttccatgggcctgtgggggtgtagagtgcttaagtgcagataaatcaatactgagcttgtaagtacaatactattatgagtaataacaatgacatcctattaaatgtacttttaaaaatagcttattttcaatacacttcttgattttttttaaaccgaaggctgtattctactgaacagcctacttcaaggacaagcttgcaaaaaaaaaaaaaaaaaaaaaaagaatttgctatcaggatacctacttacaacaccctaagatgtcattattccacacaaattagcttattttcttgtgttttcctctaattatcaaaggctatataatccacgaaccctttccccaaatcaaaataactccagatcacctcaaggtaggaggtgtttaagaaaacaagccagaattagataaagtaaaacttactttattaaataggatggacaccacttctcccaagagaactgtctccaaaagtaaacaagaaagatcaatctggtaaactcacatcatacaggttcccgtgtaaggtatcgggttcaggcaggtggaagccaaatgatcgtaattaaagttaattaacaggccagtcgtcttaacgtggttaacaagcagggtgcggggcagcacagacacccgggcaaattcatgatctctaccgagtaaataacttggtgcctgaaactcactacagcttcttcttatttaaaggtaggggagaggaatggagggagtgtccagctgtctatccggatcctcaccctcccgggtcaaatcccagaagtggagttcttggatcacttaccggcttctggtttcctttcagacgcccacacgcgggagcgaaatccaaggggcggacaccagagccgagcactttgcgctgaggaaatttacccggtgaagtgtcgaaaagccccagcccctccagacagggtcctcccacccccgcgtgggccatcccggcccagccttcccgaggccccgggtactcgccttgcgctcgggtcgcggagttcgaaaagcgaggtgaggcggcgctgggaagctcagcgccggcgtctctcccagccttgggcgctcggtcctcgcccctctgccggaggcgccaggcctcctctttcccggtccccgccggctgtccgcagtcgcctctgctgcctggcggcggccgcgcgggcggcgctgttagtggggccggcgtgtcgcggccgccgcacctggaggcggggagcgcgggccgcggacccgcgctcagctccggaaacgccgagcccggcgcccgcgccttgctcaggtgctcccgcgcctcgcctcggccgccgcttcctctccgcccgcgggggcggggagcaggcgccccgcgcgggggaagccggagctcaacggcgggggcggcccagccggcctccctggttccgcagcatagttgggtgactgactcagaccgccgcgacttggccgcgcctggcaccctcgccacctggcgcacctcggcccggaggcgtcagaccccgctggggaagctgcgggggcgcgccctggagcccagagcgacaggggcattacccaccttcccgggacggagatgcccaggaccttgtgttggctcctcctggccagtgggtttgtctgtgcgcactcatggggggttgaatgtcaaatgggcggaacctcgccacgactgattattagtattactcttccaagtacttaaagtgttagctcagcgtttcccaaactgaagactcatctagggcactattttccccaggctgcttctatgtaaatttgctccttcttgcacctgtggcggttagatcccagaggggcatttcccctttgagttggactctgacaaaggaggcagcgaaggaaaataggggatcccaaagaacccttgtggacctccaaatatctaagcgtccgtaaaatccagttatttgcaagtgagttcacagaccaactactttttttttttttttttagacagggtctcactttgtcacccaggctggagtgtagtgaggcaatctcagctcattgcgcctccgcctctgggtccaagctatcctcccacgtcagcctcccaggtagctgggattacaggcgcgcaccatcagccaaggtaat

SEQ ID NO: 42335 - DNA, 782 bp, Homo sapiens
caagccaaatatcttacacattgttctggttatgagggttaggggtgaaagagtgggtgttgaggaccatgttttaatcagcttttggttgaagtagggcatgaaagaaaggggaagaacatctaacggaaatttagaacattataagcaaaccagggctttgcctaaactgttcaactgctaccagtatttgcaagaaatgtcaactgctgtctgatggctttttcagaaatgttctcaatgagaagtccaaaactgtgctatagaataagaagtttatctaaggtacaaagtcagcctttctgaagtcagaagaacagggaaatattgagtaaggtcaaaattgtggctgacacaggccaggggattccctcttagcttaactaagcatgacttctgtgatctaacctcaccagaatgccccgtactgcctacacattttgacagatgtcacaacgagtcctcaattccctccgcctctcccaggactcctctgctagcattctctccccactacctctcgacattgattacctaacatagtaaataatttacttactagttatcatttttatttactttctgcaaataaacacctgatttaatttccagggtgcttgtctctttttttaattgatatattcctattacttagaactctgtctggcactcagtgaatgtttctgttttgttttccttactttacaagcgagaaaactctttctgagttacagcagtagaacctggattagaagccagatgattatattttcaaagtcctt

SEQ ID NO: 42336 - DNA, 575 bp, Homo sapiens
ctaaactgaaacacaaagataaaagactgtgaaaaatgtattagaaaatacaaacagcacatctaaaccgtgatctgatcctgacttctgaagtgaggctgaagtgaaaaataaataagctaacatcaacggagataactcatctagacagtgtgtaatcctgataggatgtgaccagaagggaactttacctcggtggtcttcctcacaaaacttataaccccgtctaatcatgagaaaaacattagacaaattccagttaagaaacactctacaaaatacctgacccatactctcccaaactgtcaaggtcatcaaaaacaaagaaagacttagtcacagctaagaggatcctaggcagacatgatgactaaatgtactgtgtattctggatgggatcctagaagataaaaaggatataaaatactagttggtgcaaaagtaattgtggtttttgccattaaaagtaatggcaaaagtaatgtttttattagttaaataaaaaactaaggaattataagtaaactatggcctttagttaataataatgtatcagtcttgagtcattaatcatg

SEQ ID NO: 42337 - DNA, 1658 bp, Homo sapiens
tgacagagcagttctttggtttgaggctttacatgtttgacatttttaaggtctagcacatcatttttctttgatatgaacaaacaaatctcagagtagatcagcttttgttgtattatgtaaactttgagaaagtaaattggctgcaaaaactattttgaattcatctgatgtgatatgcagtctcatttctcagcctatgaataatttgttgtaatatagttgatctaattttacttaggaaatcaactatccactgtgaccaaaagagaaaactgatggagcaatgtatcttgttatctattgattaatatttattcagtgaccatgtgatgtgaatactaaaatgaactttcttggtgatacactaaattgaactttcttgttgatacacagggactattaggtgaaaaatatgggaatatccgaatccctggagaagttgaagcctcagagtttgaaatgattttggatgccgccatagaggcaaagctggagaccaagttgctggaggagtggtactgtcgagatgagaactcggtgccagcagcctattacctcagacccaagtcagaaatgctgagaagcaatagaaatgcagtaagctgcctttccctcaagcctatggatctgtccattactacatttgttaccatttatgtcatccggggtggtgctgcacagaaaaggcagagtagacagaaagttactctgccctaggccccaggttttccttttaacaactaaatccacactgatccttaggcaaacacaaatgaaaccacaatgccatatcactttacacctgttaggatggccatcaaaaagtcaaaagataataggagttggagaggatgcgaagaaaaaggaaccctgttacactgttggtgggactgtacattcgggcagcctctctgggaaacagtatagcagttcctcaaaaaattaaaaatagaactacccacttctgggtatatatccaaaggcaataaaatcactgtcttgaagagatatccacactcccaggttcattgcagaattgttcacaatagccaagatatggaaacagtctaagtgtctgtcagcaaatgaaaagataaagaaaatgtagaaggaaattaaggaacatttatatacacacatactgtgatattattcagtctttttaaaagaaagcaatcctaccatttacagcaacatggatgaacctggaggacattatgctaagtgaattaagccaggcccagaaagacaaataccatatgatctcacttacatatggaatctaaaaacgttgagttcatggtaacagagagtagaagtgtatttacaaaggtctgggatttagaggaaatagagagatgttggtcaaaggtcacaaactttcatggtgtctatagttaattataaacctgaaattggctgagagagcagatctcaagtgttcttaccacccaccaaaacaaaggaaattatgtgaggtagtggatttgttagttagcttgattgtggtcaccatttcacagtatatacatagatcaaaacatcacattgtgcacctttaaaatttaatgaaaaaaactaaatccaaagctaagaaactataaattgtcactcacctttccatttagcatctctgactttccttctaggctaat

SEQ ID NO: 42338 - DNA, 1816 bp, Homo sapiens
gactttctttaagttcacgaatattctcataacctgtcatgtgctacataatctcaaattggtcctcttgaagacaagaacagagacagttgcattacactgtatgtgaggattaggttccaaagtaagcccataggtgaaatcaggtatattccatttacctttgaaaagtccataggaagtctaatttgctttttcttaatctatcaagcccagctgggttttctgcttatgttagaagatatagctttttctttaattaagcaccagatgaagtagcaggcttgtatttagggtccacattgcattgcataaattgtgtatgcatatgtttatgtgcctttgaacaggaatttgtatgtgtatcttcaaactttagaattattccaagtaagcaagatagtaacaccatgaggggcacctgagaactgaaaccaaatgagtaaacattcacatatgccattttgtaatcaccctagggcccttttccttgtggaggaaaggagcatacaggccgctggaggaaacaaatatcgttcaatttgactaagtcaaaggttcatgtgatgcacctccacatgctctagcacaagaggtcaagacttatgtgggatgtgctgattccctgcacagataagcagtcccagtgaggcagagtgtggtaactgttcagagttggtcagtttaaggaacagctttctgagctcttgctcttctagatattttgtccaatagcctgagtctgtctattgactatccaggagtcgggtcctccaagaaactgtgcctctttttaggtcctctgcctgcgcttcacttacctttctcctggggaatgtctgactcaccgtcaacaacaacctgtaccgtcctgtgacctcatgtccctttgaggatgcagatagatatctcatttttatctcatgtgtcacccagcatttccatgaccatgagctcgtgatggtagggctgctctctacagacatcacatgttcagcaacatgtgactgggaggacggaggaggatgcctgtagttatcataagcaatcaatgtagaaacaaaccggtgttttcagatttaccaccaaaggatagttgttgaatgacaagattatcttccttgaaatcagcttcaaaggttgaggctaaacaacagcaacgaaatgtttattttccttaacagctccttataaaactgacctccataaatctttctaattttattcatgccttaacctgaactatctctcctgaggaagcaaagttcacaaacttacctcctaatgtgtaaaatcactcttccttatctcaggcatatccttggtaaattccaaggataactgaaagactttattttcctaaaaatactcattggagtattttatgccttgggcatatttcttcttatattgacctttcaaaacagaaagactaaacttagtgggctcctcacatattttatcctttaacaccacagagtatttaagaaatgaaagaatgaaaagtcaggtatgacttctactccagctttgtctcttggtgaccatttaactctgagcagtcatttatccagcttgggcctcagtttcctctcctattaaatgacactgtaatctcatctacccttcagagagataatgtgaggactgatggctacatgtatataaaatcaactatctgttacaaagcacaacgtttaacaaagctcttttaaccaccattctgtggattttataacagataaataataatcaaaattatgaccctataacaccataaaattatctctaaatcataaaagattatattcaaagt

SEQ ID NO: 42339 - DNA, 2190 bp, Homo sapiens
aaaaatctaacactttacagcgtgcaatcccagcactgcaaaattagaaggattcaaaaaatggagtgttcaaattctcaaaagcctggcaaatatcatgtgaatggggctggcatcattaaagtagatacattgaaaacccaaggacactatgtccatccttagataatactctgtccagatgcctctccaatatcctattttattctcttgctggatgagttgaaaagaagagagaagagggtaagctaggtggcgcagttgcttaacactttttttggcaagctcagcatttgctttggagcacaggtgaaaagaatgtccagtccttaagcagagtcagttctccacccgccttaggtatatggattgtaacagctacgaatgtggaactcagtagattggatgcagtcttgtggccaatgccctaagacctcaggaaaagaaagggatggagggggagtgggtgaggaggggacggggaaccaggagttcattgaactccccctggggcctttagggtgcaggcgagtgtgtgcaacttccctggtttttatcgtggtggtggcgcccccgctgtttctaggtccatgtagctcatacagggctggccatggaactcacagcaggtctaggcggcgaatgccagaaataaggaggaaactgaaaaatgccaagttctcggggtttgggagtacacaactatttgccagcgggtgcatttgttttgtgtatccccgtactccagtcccttgatcataggaagctcccttctctccagcgcaacattggagtaagcaccccggagtttcccgtgatggcaggcggttggcgcggtcgtttgtgctcagaggccaacaagcgcgtggattttctgcttcagtgcgcccgggactgccaccccggccccggggatgtcggacatcgtactccagggtttcgagccctagccccgccgcatcctcggggcgtgcaggtaaagggttacgcgtgtcgggaaggctcacccgcagcccgggccacgtgacgcgcgggcccaatgacagcgctggggcggccgctgcgagctcggcgggctcagggcagcgcggagccgctagcgtctcccggcgcggctgcccgaggccggcgaagccatgggcgccgggaccccgccgccgccgccgccgccgccgtctggccccaggtagggacaatcccccgccccgcgcgcgcaaagagggctttagtcctgcggaacttggctttggggcgagctttcccccacttctctccgagtcgcctacttttaagtttaatttcttgatttgcttttgccctgaaaaaaaaaattagagacgcaattcaaagtttgatgacttcgggaaaagtcacgtaattcaacaaaggggctctaaaaggggcaaaactcgggtggggggaggcggacttttacagattcccaaaaccaaagaccaaggcgtttgtaaagcttggcgtttaattggttgtgtgaaacatttttgcttttaaatccctaactaatgaactttcaacggtgcatgcgaacttgaaaaaactgcaagagattttaccttagatctgtgccctcctcccccattttaagtatgttttttaataaaaaggaaatggaatgtgacctctgctgtttctttgaaatgcccttgggtcccggtatttgccccccaggggtgctggcggcctgggcagtgggtaggggtgggggaagaggtcagggtgccaggaggcctcacgtagtgaaaagagggtgccaggtgcaaacagttaaatagtcacaaactgtttgctaaatatttaataattaggcaagcatctcccagcttggttacttaggttgcattgaccttggcagccctgatgaggcgagattttcacaaagtactggtgaagaatttttccggtgataaaaggcaaggatcaatgctttttaccccagcatggcaattgaccttaaaaacaaaattaaaactccctgtgatgacttagtacattttatgttactttccatggcagcatagatacctgccccatgatggatatttgccctgtgaatttagagaaagtttgtgctccagaggtggttcaaatcattgaagaatagggcgtttattttcttcctgtcactatttatgggaaagaattacggatggtccttcttgccctggtttg

SEQ ID NO: 42340 - DNA, 915 bp, Homo sapiens
tgggtcactgagcagaaatggaacagatgctgagacaggaagggaaggtgtggcttacttctcttcttggcccattctgtgtctatcctctgatcctgctccgtgcatttattcagcaagtatgatcttggtcctcaatggctccggagatttagataaataatgatacctaaagagaaatagggccaatctttcctgtgtttcaaagagctttttggatatctgggattgaagacaaaaccttgcataccaactcaacacgttccattatcctaaacatggaatgattcccttgacgtcccacccagaccctctctgagccggaaatacaacctggctaagctccggccagaatccatttgcagcccaagggcagagcacaggtagggccggcccctttcctcctagaacagcccgctcttggtgcccggaagcccattcacggtgcttcttggaatagacgccagtttccaaataattgaataccagccttccagtagctaggtttcctctccctagactgtgtttcacattcccctagttacacaatttttctggtaaccctgaatcttgggatcttttacagtcttggttaaatagtaactagtacctatgtcctgcttttctttcttggtcattaggcagattttctttttggtcattctttttggtcattagattacatgcttacagagagactttgtaggtgtgtagaaaagagttgagttaaaggggtcatcctaggggaagccgacttggagtcttcacctatgtgcaggtcagatgtagtctttctcgagtgcctgctcttaaccattgagccatcctgtgtctccagttgtagcctttcttactctgactgctatttaagagaataaactgaaaatgaaatcgctcatctacttgtaccctttt

SEQ ID NO: 42341 - DNA, 968 bp, Homo sapiens
aggctataccaggcagtctaggtgtgtggtaggctacaccatctagatttgggtagtacgctctgtgatgttcacacgacaaaatcacctaatgttgcctttctcagaatgtgtctttgtagtgtgaccgtacaaacataaatactgatatctggcttcatttcaaaattttttaaattgagtttgtccatttccactgaatttaattatttcgagcaccaactccaggagcaggaagttagcactgggcttgtttttattctgagtactgcttgaatactaatagttgaaaagtattgtaatatttgaccctgaagagctttgactcagggattttgtgttgtcattcacatcctcggcaaggaaaggtatccagctcctactatttaatatgtaatcacgacatctagtgctcactgtttggttttgttaagcaatagctgtgagccacagagccaacctgcagccgcatctcacccaagaaggcccagggctgtgttttcagttttgcttttaatgattgcataactgtgtgaagttctaagacactgttgggattttagccttgggatgacaagcctttggggcacctctttggggtaaagaaagaagaactaacagaagagcttcagtttaagtctgatgaggacaaacgcctggcactaggtgggttttaaaaatccttgaaaattttttaaaaactaaaaaaaaagccagctcttttgcaattgcccagagagaggaggacacccatattgattgatgcattgttctcctaggcaggaatcgtcccactatagtctgcggtagcaagagttcaagggttaaagtaggaagactgatcccataaatgtaatttgcattccttccaaattcacatacaattgtatagcagtgagtatttaaatttaaaaacattatagtttaaggaacttttctcatgaacagttctcctagtgtacattatg

SEQ ID NO: 42342 - DNA, 834 bp, Homo sapiens
aagctcagatttgcacccatgtcttctgatcaaatccaatcctcgtttatataatcctgttgaataacagtgtgctgtgcagagaatatctcattgtaaatcagttaaatgtggtcaggacttcagatgcttggaccaaatttctataatcagaatcagacagattcgggccaaaaaaaccagctgagcaatcctaattccttctaaccttcccagatctagagtaccgctctctgggcagtggtggccaaaatcagccatggcactagttagccaagctctaatcagaggtgagtctgacaagaggatcatcttgcagttcctaatcgagggcaagccaggtcttctggtgcaatcggctccatctctcaactcactgcccagttgatgactcatactcagcctgtccttatgacccatactttctttgcagctaagctggctgggccttcctcacctaagacttgaatagccagatgcttctcttcccagatagccaagtccttcactgaccttaatcagaatgctcctctttccagctatatgaccttcaacatgtaactcacctttcccattcatcagtttcctcatctgtaaaactatgatcatagtactaaccccatttggagaggtttataatgatgacatgtgagaaacacatcagtaccatgcctagaagactagaatattgaattaacgttagctgctgttattacccatcttcatcatcctcttcttaaattcctcttgactcccttccctaaggtcaccagtaactggctgagaagccaatggtagacttttctgtactgtttctctctttaagaaggctcc

SEQ ID NO: 42343 - DNA, 1206 bp, Homo sapiens
atctccagggagtcaacttcagtaatctgtctattgggaacatttttggtttccagtgacgagaaggttttctaatataacaccaccgttaggactgaaacacatgccttaatttggttgtgaagttaccataaaagagcaatactgtgagttctgttgaaggtgtatctcctccttgcatattactcacagctacactaagccttaggtggttttctccacacttgccggcattttgtcaactacacttcctttccccaccttccccaaaatgggaggagctaggcacagggcaaggaaactccctcaagaaaagggaatatgttccaatgggtgacattttccagaaaagacctctttttctccctgaatccctgcttgataatatgcatgaaacagccaaaatcaggcaagaaaaatgtcttctgtctctcccatcactattctcttcaaagttttcctcacacctaaggcaaatttcccaagcaaaaactaacattgccatcaccaaaatgtaagcgccggcacgtgccagtcactgcctgaaagctttaccgatcttacgtgttggacttttctgatgaccttaacagtaggtagaattatcacccccattttacaagtatacagactaagacctaaagatcgtaactgactggccggagtcacacagctagagagtgacaggcttggacacaaaccctggtctgtctgactccagggtgggtgcttttaaccctgacatcttccttcctacccttcaatgtccaagtccccgcccaaagggacagaggttgaataatggttcatggcatgttgcataatcaacagagaaagtttcagaacccactcggtactcacagtcatttataaaggaatcttttctggcaaaatataaacgaagcctgaaggcaaaaacttcacaaaggcatctcttgcctagggatcagaagtactaatcactaaccagaagcacttgaggactatctgtagtactccctgcaatttttactaagcagccagttcaagggcctagcagaggaactcagctacagactcccagatactttccaaacatccatacaatgcaagaaaactccagcgactacccagacacgattcagttcggctctatttagaaagatgaattaaaagctagcactgccgtacatccaaccctttggattaggaaaatagtcagagtgc

SEQ ID NO: 42344 - DNA, 1879 bp, Homo sapiens
aggctggtctcgaactcctgacctcaagtgatcctcctaccttagcctcccaaagtgctgggattacaggcatgagccagcacgcccggccgctactttgaagaatttattgagttaatgcttaaggatttctacaaactaccccagctatatactgtccctctttgaaaggaataagttttccatccctctttcatgccacctggacagaggtactacagtaagtggttaaaataacagactatggaaccagaacacctgagctccaatcccagctccgccactttccagcggtgcaacactggcaacttagttaagtacggtgggcttcactttataacatgggaagaaaatgtcgagatcacagcatccctggaaagcccacagaacaggcccagcacatagcaaaccctcatgagtgctatgacgtcgatacgtgagaactttaacccctggcaaggttctcacagtttacttatttcgactgattcaactgccagtacccatttcatgcatcatcacaaatttggcaactgctccagcttttagaagcccgggtcccaaaggcctgcaagctccccacagccacgaaaggcagtctggaatgtgaaaggcacagaggcagtgaggcggtcatccatgccttacactgcacacttccagaatgggtacatcttctaggccaaggacatagtcatgcattgcttgggcaaattcaaaagcacttttttttcatataaaagaaacatccatgattgagtactcaagaacagtatcaccaactactgtgccctgaaggaaggtctctggaagacagagatcaaaatccaagtattctggtcttttttgttattttaaacatcatccgagtaagtttggttgtctgactttatagactgcagaaattgacaactgcatattagaagacaggagggacaatatcgtgtggttgaaaaggatgctgaatttgaaaccagacagacagagctgggctgctcactaaccatgtgaatttaattacttggaaccttctttctttatctgtaaaatgggtgtaactgaactaactttatagggatgttttgaagattaaatgagattacgtatataaagcacccagatctatgccaaaagcataaagcacattctaaaaacagcaatgaaaattatgctcaaccatacgaaactgctgtttctctaagtcaaaaaccgttgaagagagtcaaactgacaaacaggctgggcaggcaggtgctcttgtggagtagtgaggatctgggagtgtggggtgcccagggcagggcctgagggcagaggagcaggtatttactgatgagtgtggtgtatttcaacctttagacaaatggctcagctctatcaggctgagctctatcagtccacgagcccatgctggctaaagcacagacaaagcccaggggaaacattttcttttaaattgtaatgagaattcacagtgtgagaatccacagctattgagtaagtgggcaaggaatcccacacacctcaaatatcactgagggcatggtgtgctatggagggaataaccagtgctcagaacaataaccgtaaagtttctttactcaagattaaattaatcttccatttaagatgataatttagaatacatttcagggtgaaaaaatactaaatttcataaaagttcaactttgtaaaagtgttaacactggagaaaggatgacatagagtagacaaacagaagcacagcagcagctgccagtggacgggggaggagggaatggggagtggctgcctaaagtgtccagagcttcagcttgggaagatgtaaagttctggaactagacagtggaaatgcatgtacaacactgtgaatgtgctt

SEQ ID NO: 42345 - DNA, 1506 bp, Homo sapiens
ctttccaagacaataatttgaaaatgcatttgtaccagtcttcattattatttctctctcatcattttcttaaagccttatgagaaatgggaagaaagctcattaaaaaagaaaaagattctccttggattttattttaattgcagacttactatatcaatttacaatattaatttcctttttaaattggatcataattcttccatgttcatcagactgctgtatcctctgaaatacactttcaaattacctacattcagggcttggttatgtgtccacaaactcagtttactttggggactctgtaccaggagcatacatgacggtctttgggaaaaaaagcaaaccactctgaaaccaatctgcaaaatttgtttcaataagaacgaggaagggttgaaacgctccatcctagttcacagagaatgcatcaaggtgtgcagtgtcctactcatttacctggacaatgccttctccatccaaaggtcagctttcctccacgtgaacatgcatgtttggttagacagctcagaagctggctgctaagccaacctacagagcatctgggaaggaggagagggggaggctccactttctgttgacaaacacttggctttggtttgctcacaggctcatacatgactcatcatgcaatcctgttccttctcagcctcaaaggtcagtgggggtgggaaaaaccaacagtccagcaagctggcaaggaacgaggaacctcccctcagccagccctgctttgcctgaagggcgacctactccaatgtcacctttctgcagaaactgcccttagcagggctgaaaggaatagggggagtcacctactacctctcaaggcccaagtcaggaaacatccctaaagatgatgggaaagaaacatcagtggcgaaaacaggatttcgtctccccggtttttctaaacactaccttatgactccacattaggagaaacagatgagacagcctgaagttagtactaaggcaccagctcttgtcatacttttttctgcactgtgcacacgatcgtttacttaataaacataaattccaatcacaaatatttaagatagaactcccccagcaaaagtaacaccacaaacatggggagacctattttaatttttccttcactcttattcgaatctgattccataataatagtaaggattaatatttaatgagtagtcatatattccaaataccaaatgcatctttcctctaaatttcacagaaaccccaaaaggtaaggattattttcctcattgaaattaaattaaaatgtcaaatgaataagattaaattaattaaaaatacatttaagtgaaattatacatggcagagattcagagcacacaataacttgtctaaggccacagggcaagaaagggtgccctatctggcaggtattcagtaatgaaagcaagttttcaaactaggtgtgattactgcacaatctgcacttacactacactgcaccacctgccactaaaa

SEQ ID NO: 42346 - DNA, 1369 bp, Homo sapiens
gagtgatgtcaatataaagaaacatcttaaaaaaaaaaaaaaagatgaaatctaaatattaccatccctggcttcaatttgaactgaagagagaaaaataactttgcagagtcagataaagtccctagcctactccacactgtctcgggtttaccatttgaagttatttcttaaagccacagaactccaacacagatgacagctacagccacccccatccccccatcttcccccacctcccacctcgcccaaagctccgtcttgggaggaaattaactctaggatcccggtgtcttgagaggccaaggacctcaacttctggactcttccagagtatctcaaacaatggtttgcattcaggatacaacagaaggctcatctgacctggcctcaccccagactggagcaaggtcagcttgccagttatttgctttgggatacaggccaggaagccaccaactgtgcctctaagacagaagactgaggagattcccacagaccctcactgatggctgcacacatcagtggggtcctcagagaggggcgtgaggaaaagcaatacccgtggggctcaaggactgggagggctccctgctgactctctccccatcttcttttcctgttctccagcccctccctccctctttcgctgcccctcctccttttgctatttttggtgctgtccatttggggacttttccaaagtctttatttactgatagcaccgtctgtctcctgggaaggggctgggtggctgcacaacaggaatggagagagcctctgactaatggctcttgcgaacctttaaaattacacattatgtccactcaagaaagaaatggaattctgaagaagtcatttgtttgaagtgaccttaaagcaacagggcttcagaaatctaatatttgcttcagattatttctgaaaggtggtacgtcataaagaatgagttgctactttaattgtcaatcgcagcattcacacggggtgttagtggtgtcaggcagtgttctggatgcttcctgggcaatctcattcttccctcgcagcatctgtaaggaagcatctctcattacccccattcgcagatgaggaaaatgaggcacacgggttcaataacaagcctcggtgtgtaggaggacaggatccaacccagacaatggaatcccggggcccacactcttagccatgttgcttaacagtgtctgtaagtggcggtggccttgggttttatctagtgacacatgcatttaggtggctttgttaaactgtcaccaatgaaccacacagctgggctgcatacaggtcaacattcacccacccaaggcccttaaacactaagaagctgcctctctccaatgaccctatg

SEQ ID NO: 42347 - DNA, 633 bp, Homo sapiens
aaatatttaaaaagaaaggagaggaataaagaaaattttcaatcatacacatgagatagggacacacagtacaagatataaaagttcccacccaaataacacacttttcaatgcactttcacattcattcttttatttgaaatccctaatcccaagaagttaggtaatatcatcattctgtaaataaatcagtggcctacatgatatcactgggtcgaggcagagaaatgagccaagcagaagaaccaaagcttaggaggacattttccccacccacctcactacaacagcgcaccactcagacataccacggtcaaaggcaggaatcccagcaggacacagaactcgccggaaaaccctgactgaagtcaaacacctctttccctaagtggaggtggggaagtgaaggtttgtacctctaatccctaacacagttcctgcaacacagtaggagtgcctgaaacatctgctgcagcaatgttatatgtgaaagcaaattctctcattgcagaagggctcctgggtaatcaatcaagtccccaagttcacagtaactttataagcagttttgttaagatcctatttggtagaacagaatatccagtgtacttacaccccatttgccaaatgcca

SEQ ID NO: 42348 - DNA, 1566 bp, Homo sapiens
ggatgctcaactactttaccaccaactgctaacagccactaacctttactggaatttttacttacattatcatttcttatctctacaactctgagataggtgttaatattaaacccatcttagaaatggagatgatcaagaacaaagtattgaagctgaagtcactcatctgggaaatggctgggccaacatttgaaccaaggtctgttgcacgcagggccaactctgaagcaagactactccctatgaagcatggaagcaaaagcagaaactggcttttttcttggctgcactgtgttcaatttgtttcctagctgtgaagccccaggcaaggtcaattagcatctctgtgcctcagtttcctcatccataaaataataatagtttctaagccttatatgagattactagggtttatccaagttaagacttgataaatgctagccattattgctgtgattattattatctgtggtaataagagcaaagcagttgctatcctcaccaagctcacagctcagctggggatataaaatcaaacatccagaaaaggacaaggaatcacatgagctgggctggaaggggcagtgttaaatgtggggtgcagaaaagataagccctgggggtgagtgagcagcgaccacacagcactgctcaggtggtaccacaaggccaggcaggcacccacatccccacatgcaagccagtgtttctcttccttccaggaacaggaagcagataatgactaaacagagaactacaaaagtcctaaacgaagggttttccaattagtcacaggttaggtcgggcaatgttcctgcaagacaggcacgtgggctggcttctgagaacataggaactggaaaaggaaggtgagtaaatgttgagctccaaggatctgtcccggctgaagtcccctggtgtgaagtccccgctactgctgttagagaaagggcaaagtaaaggagggagtaggaaagaaaataaaggtcacttcagaaaaggcaaacgaaggaaagattgaacagaagtaaccaggaaaaccctagacgtagggaagtcaatgttaaagaagagaaatgaatgtcactagcatgaaacccaaacaagaactctgaaaaccagtagcaaccagtgagacacacagaaaaaaatactattaataatagtcacatattgatgtataatgtgtacagttactatttcaagcatttttcagatattaactcatttcatccttacaataactctatggggtagcttctattatttccagccccatttaaagatgtaaaactacagaacagagaggttaagtaacctatgccaggtcacacaggtagcaagtatcaaaggtgactttaatccaggcagcctggctccagaactccacactctgctccattactgctgaaatgtgagggctcacagtttcaacattcagtaaaagtccatggaatgggattctccatagctcatctctattatagatactacagggttcacgtagtagagttagagaaggtagaaaacctacagataatcattatccctgtaacacagcaa

SEQ ID NO: 42349 - DNA, 1260 bp, Homo sapiens
taaacttcaacattagggccaaagaatcatttttaaagaaacaataaaatctgttgtttgttcacttggggctttggtctctcacattcaaattcaactcttcaaatttccaaatagattcatttcatttccatttttagagggggtaggggcagggaattgacagagacttctcacatttttcatttccttttaaaattaaatgtagatatggactcccaagctccaaggtgtgctttttcaaaactttccaaacactatatattatgtggatgtacagcttcgcagctacctggctaagagagaccccagaatttaataaagcttatctttagtttctaaaaaggagtcagaatgctggagggaagcctgcagcccaaggacaatgcatttttcatctcaccagccccaggacctcttccacccactccttactcgagggctatgcccactgtctgagagagaaactaataaacctgaaggttgagtaaccagagaacttaaggacattaataagccaagacgtggaaaatcatccctttgggtgcttgtggtatatagtttcgaatgctgctgctaagagacaagtttaatgagattcttctactaggaaggaagtgaaaaaggcattgccactacccaccgtgaagctatctgcccttcttttctctacttgacaacttctgataaccacatgcttacaattttatgacgttctaaactatcttagaatctcagcgagattgcagaggttgactcatattctatttttcctctgcagagcagtggggtacagtggaaagggaatgaactttggaatcaagcaggctgggttatcccagataaagatacatataaaggtacacacatacacagacacctcctagtggttctgcttctctgaatgctgactggcacagtacctatgtgatgttcagccagttgtttaacctctcttgcctcagttgccttactggaagtaagtatttcacagggttatgagcaatgagtttaaaaatgcctatgaaggctgggcgcggtggctcacacctgtaatccctgcactttgggaggtcgagaagggcggatcacttgaggtcaggagttacaaaccagcatagccaacatggggaagccccgattctactaaaaaatacaaaaatttgccaggcatggtggcgggcgcctataatcccagctactagggaggctgaggcaggagaattgcttgagcctgggaggtggaggttgtagtgagct

SEQ ID NO: 42350 - DNA, 2155 bp, Homo sapiens
tattatccatctccttcccttccaacctgctctggtttctatgaaaaagtgaaggccaaactgctaagtcagtgtaaaagttgtaagcgactgaaatgttctcaggaggaagagtttatggatgtttatggaggagacagtcactgttgaaaggcttccagttgcttattatttgggcctgaggaggaaccaccgctgaaatcaagcttggaagagcttgctgacgtcagattcccagctgtagtaaccccaaatggccaagtaagtatgttttttttttaactgcagctgttaggtggcaattaagaggggaagcggtggtaaggaatccctagtgtctgtaattataaaagcaaggatgtgacataggacttccataaaacttacacctcctcttaagattgatttcaattaaaaactgcttcatcgttggtgacactttagcatctctgttggtggcttcctgccctgaccacacaaggttcctttcgtgacgacaggaatcaacaaaaagaagaaaaaaatgtaagtttaccaacgcgccttccctttttccgagcctgatttatacaggatatatgggaagaaatgtggactccttgacctgttacaagaatccatcaaccacccaaataaatggaaacgtggaaagagattcaaagtcctccaggttttaggatattttaaggtatttaaaagggagaaggaggcgccgacagcgcacccggtgctctgtgtcacgatcttccgctcgcggcgcctttgaggacaagggcggcgggaaacgggtccgcggggttccgaggcgagcggccgtggaggaagcgcccccgaagaaggcctggtccctacgccccgcactgcccagcgctggggaacacagatcctcggaggaggccccagggagggaaggcgggagcggggcccgcgggaggggagggacgggagccgttgccacgcaccgcgccctgcccggaccgccgcgggacagccagttgttcagtgccgggatcccgcggctgtgccagaaagcaggacgccgcggggctgccgtcccgacccctcgcttccttccgcgctcccgggaccgggctcagcacccggcgccccggctacgaccggacactcacccggagccaccagcggcgaactcacggcgcctcccacgaagacagcagcggctaggacggcggaccccgggagtgcccgcggagccatcgccgcgtcgcttcgccctcctcccccagggcgccgcgtcccgcgctcgggaaggcagagccgctccggagccggcgggctgatcgagtggctgggctgggccccagggagcggcgaaccccgccccgccattgccccgccccacgccacacccacctcggctcggtcccgcctctccccgcgcgccccgggctccacctaagccggcacgaggtccactcatggctccgcccccgactccccgcccacctcagcctgatcccgcctctccctgccattcccgcttcctttccaaaccccgcagcagcctcagcggcgtagctaggccatggacacgccctctttctccacccacctcagcttggccccgcctctccctaccgagccccggactccacctaagaaggcacgtggcccatccatggccccgcccttttccccacccacagctcagcccgacccctcctctcccgcttcctttccaaacccagcagcagccttggcggcgcagttaggctatagccccgcccttgcgccctgcccaccgtggcccggccgtgcctctacttgccaggcccgcttcctttccaagccgggccgggattacgcgggagcccggggcggggggagggtcgcccgggtgcaacctccctcggtcgctgggactaggcgggcgtgggaagagaaagagggagcgcgccccgagaagcactggacagtcagaagcggccagcactggagtgagcacaggcttttttcgctgttggcatgtctatccactagcattcccctcggttgcagatctagggagtgatgctgtgctggatgtcacgttctgttgtttggaaattagcagaaaagataacttaaatttcttcctctgtttgtttgcatttaagctgctcctattggggaaaatacctctatgcattttcag

SEQ ID NO: 42351 - DNA, 663 bp, Homo sapiens
tatgtggaagaagctcctagcaatccaaccttaaacagagagataatgtccaggagtccacaagattgagggagtagaatttatgaagctcaattataactgtcataaaaattacaaagtataaaaaaacagggcacaaagggcaggtgcttaacaagctgaaattgatgcatgccaaaagaatataaaaaagcaaaactaagggaaaaggttgctactgaactctaggctcccgacagctgaattaatctctccagcatggtgctaagttacgcaggggctgagttcgtcctcaagtgtcatgataatttgcacagacctactctgtctcctgatttctttgggtaaacaacaaatagtcacctgaaaaagaaccaggagcggcaagggtgatcagaggcagcagtgtcaaacatccgtgacctttatcctctaccctcactgagtccagtaggccgacagggaaataccttaaccctttggagctatgggatcttttaataaaccacagcagaaataccctagctagctaactagctagtggtaagaaagagatgtctgcaaaaaagaagaaaaacaacagggtgaatggcagtctctttttctttctttatttttattattattatttttttagagatggagaatccctatgttgcccag

SEQ ID NO: 42352 - DNA, 548 bp, Homo sapiens
tccaatgatctaaatttggaccaggatatagttttaaagctccccagatgattctaaaatttaatcagagttgaaaccccctatataaggaggacacaatggaatcctacctgttttgtaagttattttgaaaactctaggtattggtggaaaggaaaggaggtttgcatagcaaagctgagtgtttccagctgcccctgacaggaagtgttgacacatatttgcagaacttctccatcagcattgagcaagtttgtgctgtttttgaagaacagccaaatagccaaatgaacacttgtaacctaggattcataagaaatacaaaaaacaaagtgtgttgaaggtattttagcaatagtgatatgaagctgtcttgagttgcccttgagcatgcaagacggataaggttgttgtccttaaggactcagccattcagtgaaaaattgctgcagacaaggatatgtggatggtgcaacattatctcccccacaggtttctaattgcaaagggaaaaaaaataccatttctgcaaagagggaaaaaattaa

SEQ ID NO: 42353 - DNA, 770 bp, Homo sapiens
cccaaagtgctgggattacaggtgtgaatcaaagtgccaggcctgattttacattttaaaaaatacgtctagacacagacacacaaacactcctcccaatgtctcaccctcccactatgttgtaagtttggttagatcaatattcagtgtttctattttatggccatgtaaaatggaaacactgttggcagctaaatcatatattacttattttcctttcctgacaatttatttctctagaacttatataattgcctttttaaaagacggcctacatttctaatacctaatgctaatttattcccaacttttcctacagttgagtcaatctcctctcagtgctttcaaatccattaggtgttctaccattctgaactttatgaagctgtctctcctggtgctttctgacctgctccattgggattgactgataggtcagctgcgcagaggtcatttcaatgtcttcctgtaacatggttctagagatacttttcatttttctcttatgaatcacctgtttctcagatcccatgtcatcttcttgggttcactccctcatttggcaagaatgctctgaaatttcactatcatgtgtcttaatatgggtcttagatgtatttcactgtgtactcagagggcccttttaatttggaaatttacatctgggaatttttcttgaattatttctttgatgattctttccctccactttctctgctctccttttctgtaattcctaaattactcctttgatttctcatttataaaac

SEQ ID NO: 42354 - DNA, 679 bp, Homo sapiens
tatgtttcagagatacataccaaaatatgtataagtgaaatgatatgatatctggtatcttcctccaactaacacaggaaggggaagtggctggatgaaacaagattggccatgaattgatcattgttgagctgcgtggtggttacataaggatcaattttgtaaataattaaaactccataataaaaagttttgtaagaactttttctggactggatacaaaaggactgacagaattgctgacaaggtatttgagggcattgggaagacttccaaggaaattgggacactcatgtgaaagcgttcctaggcagcaagagagcatgaacaaacaaattaagttattttaagcatcacctaacatcatcgatatcaaacatggttagtatttgtttttcatcaagagcaggctattatcacatggaaacaggttgccagagttcatggaacttcctttgaaatggatatgtgtagaaatgggctgagtgaaacaggagagggactgaacgtttgactgggatatcaggagatccagagtgacaatcctggctctgtcattaaccagtcgtatgtcttggagaaaggctcttaaatttcgagtgtctccatttccttgtttacaaaacaagaaggcctgacttattccctgagaacccttcttcaatctactattctatgt

SEQ ID NO: 42355 - DNA, 1631 bp, Homo sapiens
gagatacaattgatctggagttcagagctgtgtgtgatgggaggtagggggccaagttcccttttttcttttccctacgtggatatccctttgaccgagcaccattaaccaaaaatagttccttcctgtgctctgcagccccgcctctgaaataaattgtccatacacgtgtatttttgtttctggtctctatcttatgttccactggtcttcctactttgcttttctttttcaagatttttttctggctgttcttgaccctctgagtttctacatagtcttcaggcccctatctgggtgcacttcctggtatcccagcatctgacatgtgcctggcgcgcagcaggaactcacggctggctgtagcctggatgcatcagagacgatggcaaacccttctcacacgtgccaggttccagcaacccaccctagccccgcaattcctcctcgctcactcccaccccctgcagcgcacccgcaaacggcaaggaggcgtgcccgccgcggcgcgcgtcactttcccccggaccgactggctccgccgcggctctccccgcccccgcctccgcctccacgtcttggggccgggccggaaggcagatctcaccgcctgcttccctctgcagcggtagcacaagctcagcgatggcggctccagaaggcagcggtctaggcgaggacgcccggctggaccaggagaccgcccagtggctgcgctgggacaaggtgaggggcaccagcaggcggggagcgcctggagcggggccgggtgctctgccctctccaggcgcggcgctgcttgctctgcctgagctgccttcccgcccagtgcatcccgcttctcccccgggaagacccaggagcgtacggccgctgctaggcttccttcgacctggccggcatgcggcacgttcagagttaggccgggaaggcttgtccccggacgaaaccagccatccggccggccggactgcaagttcggagtagaggagcgagccagggtggtgtaagcgcggccagaccctggacgctgtctagttgaggggcgcacgccttactgtcactcagaccgctggctcgtcgtcggtagtcggctgtgcatccccatggacccagaatcgctccgtcccgcgtattcctttggccgctgagacctttgcagagcagcgttctggtccggtcctcccatcccgagggcttggttacaaacgtgggttgtcctcccgggtgggcccgcctggcttcaggagtcccccttagaactttgactgccagggaggcacacctgggacacagcacggttttctctctcttcattccgtttcttagaatcaggaacccagctctggacatcactccctctcctctctataaacttgcgtctcgccctttcgacctgttctgcttgctgttaggttttctcggaatgtccctcgctgctctcctgctgaacttgtttctcccgttgtgactcatattttgtgcctgaacttaaatgtggcttacgtagagagtcagtccttccttggctccgaagcgttaaattatttatccctaatattcactctaaacagtctgttattttcctttatagctcttactacaaatggtaaaaacaaaaaactccaaaa

SEQ ID NO: 42356 - DNA, 609 bp, Homo sapiens
agtctaaagttgttatctctagcctccacccaaaaaatacaggaaatttaattttttcttagataatacattcaagtggcataaagttcaaaaagtgcaaagggtaaacagtgaaataagtccagcgtatccctagtgcagccacctagttcccatgcactaaggcagacatctttgccagtttcatgtgtattcttccagagatcttatatgtaaaacaattatatgatgaattattttggcttgatttcttttatccaagtggtaggacactgtacacactgttcttcactctagttgtttaacctagcaattgtgaaatcatgtttgatgtttgcaatgactcactttctcctcctgtgtagatggagtgtatgagaaattcattgttataacccactgggattttgcagttgttaatgcagaaaatctaactcatatagaaatacatttattgtatatcatactcaaaaatatattttgttgtttttaatggctaaatggtattccagtatatgggtgtaatataatctatttaatctgttcccttgttgatgaatattgaggttggttctaatttatgctgtttcaaacagtgctgccgtgaat

SEQ ID NO: 42357 - DNA, 1737 bp, Homo sapiens
ccgcaattggttagaaatggagtttcctggtgtttaatcccgggagggcacttcgccttcgttgtttcccagagtccctgattttcctgcctcgcatgccagcgccccatagggcatccgtgcctcagttcacctcttgccatcctccaaggacggggagaaggggtaaggcgggggagagcaaggtggcttggtcgcccccggcccccgccccccatgttgtgtgcagtttccaccacgtctgtttcggagggagaagaggagggtgcagatgaggcgaggcgccttcgggagcgcggagagcgggcaggcagtgccacctgctgagagccactcaggccgagcaagcggcgggcagtgccacctgctataaataggccgccaaggacagggtgtgcgactgtacatcccgccacgagggcctgcatcacgcgcggggccccgcgcccccggctccccagggaaacgctgtgcccagatcctgcgcaggggtctggatggggcggcggcccgagtacttcccccctattccccccacagacactggctgaggatggcccgcgggcttgggggcggggggtggcaaggaggggagggaggccgcggcggacccgcagtgcagcagctgttgctcgcgtgtgactcgcccgtccgggccgtgctgcccaggcacagtcacacggcgcagtggggaggaggaggacaccgagtccccctcccagctccccggggaccgagtggggagatcccggctcctgtcttcccctcgcctccagcgcgctcgcccaggctgggaggaggaaaccagagccgcgcgcagacacctcctccttctcctcctcttcttcctcctcctcctcctcctcctcttcggctgctgctcctggtgccgccaccgtccgccggtgcctgttgctgccgccgccgcgggacctgctgtgtcctcagctgggtggagaagaggcgggcgccgagccgaggggagccccctccccgtccccccgcggcgggaagagcgcagccagccgggtgcgatggactccccgcccgcccaggccgtccccaggatgcccccaagcacctgcgcgtcccggcccggccccgggctctgagcgcgccgcggcacaggtaaggcgcttcctggggcttcgtcctggccaccctgctggctcctctcggggcgtcgcggccgccccctcccgcagcacgcccctgccccgcctggccgcggaggggaaggcatctggccgcccacggacgcgaggccagggtctctcgggggaggaagttcattgccatctcgttgccccccttacccccccacccccgccgcccttggacgaaagcgaaaccttaatgttgctagcgacccgagagctccgccggcttctcccccaacccccgccagctcactggtccgcgcatctctcccctcccccctcccgccaattatcctagcgtgtttgcaaggcgaccagattggaaagagtgtggtcagagtgaccccaagccacgctttaaaagttcagggtactttgcagtagtaactttggcagctccaccagtgcgcgcaacatttctttctatgggtacatcctgtaccagtcattttgaaaccctgcttcattgtttctagccgcttcctgatggctctgtgattatgagacccccctcaaacttcaccaggcattaaggttttgtttttgcttttttttcagagaggtatcatttcgtttg

SEQ ID NO: 42358 - DNA, 704 bp, Homo sapiens
tctaagcctttctccatgcggatccttcttcctggaaagcccattccctctccaccttctgtaaatggcctgaaaccagccaggaagctgggttttcctttgcagcctgaagttattttccttcctctgggaactcatcgaagcttcacctggactttgagggaaaataacttcaggcttttgtcactcttttccctgcctgagcttccctgctaccctctatgccccttgagggcaggattctggtctgactccattttgctatttcctgcaaggacttctgtggctttccaaaataggtgctaatgaatattcatatttgtgaactgaattcctgatccattgccaagtggttctgattcacttgaaacccagttgaacttccttgtagagtttgtattacaatggctctatttttaaccaggtcttagggtggggaggagcaagctggcagagtgaggtcattcttttgcatgtgtccctgcctcactggccccccccactagagggcagcctgcctggcatcacctcctaaacttacaggaggttttgccgcccttgcttcttgttcctcctcaaaagaagaaattggcagaagagctggggcaggagtgtcagggtttgttttggtggggatatggtcaggcttagtagggaagcaactcttccagttcccagaccggcccccctgcctttcaagtcct

SEQ ID NO: 42359 - DNA, 2591 bp, Homo sapiens
agtcccaggccagtcttgagatgactccagcctcagttaacagcttggctgaaattttagggcgactttcagccagagccatccagctaagatgctcctggatttctgacccacagaagttgtttgtggttttaagcttctcagttttggggtaactttttatacagcaataggtagctaataccctcactaaactcagatgccagatatttagggaacaacattaaaatgtcccaatggtccttcaagaagataatgcacaattagtagaaggaaaagagaagcagaattcttgggctgggttggccatttggcctgaggaactcagtgagtggttccacctgacacatgcataacacatcagcgattaaacctttggacttttttttttttcaacgtggaactcaggagtggctgggattgaaactcagctttacctttgtagccataaactgaccaccttgtctcatcatcttgccttgggagagaagaaaactatggtgaaatcaacatttctcaagttgctaaagcctcctggcaggcaggagctaaatggttctttttcctctgccccacttttggtctcaatggccgagtttcctgactccaagaaaaccacctttgattatataaaggtattaggggctggggaacactggtcttttgttactagcaatctaaagcgcttaggaagaaaagccctgggggtgggggtcacccctggaaagttgggcgggctttgtgttagctccaactctggggcttttgtggaacctcggagagggaggaattcttagatttctgaaagttgtgcgaaacggaccccagaggcctggaaaggcgcgtccccagcctccagggtttcctgcgcagccctgggcatctcggaagggggcgaccccagcatgtcccaacttcccgccagcagcggagcgcgggggtgggcggggtcggctgcgcgccctcccctcctctcccctcctccccccgcccaccccctccccgcgctctcccctcccacttccctttctctgcctggccgccccgcgggcgcgacctctcggggcagtgacgaactgggtggagcccgccgccgccgccgccgccgccggggagagcgatgccccggccccgccgctccccaagcccgcccccggccgcccgcgggcccacgggccggcggcgggagtgagcgggagccggcgggcgaagagccgccgcccggcccgcgatgtcaccattgttcagctgggtggccaaggtaggcggcgtcgggcgggcgcccgttaccggagcggagcggcaggcgcggggctggaacatttgtaaccttcgggccggggctgggccgggccgctggaggccaggcgcggcggggggcgagcggcgggcgcgaccaggtcgttagccgcgcgtttctcattcattagtctcccagatccctgtggggaggacgggcgaggtagcggcgcccatttcacagttggggagactgaggctgtactcggggacccctgcgggagcccgaacccagcaggcggctcctccggcccctgtcgctccccgcgccgcggagctgccgctcggtgcctccccggcgcgggacctcgcggaagtcgaccccgcgtgtctccctcgcgggtgtcgccctcgtgtgtctccctcgcagaagtcggcttgcgctgggccgcctggacagggcgccgaggatgcccagaggctggtgcccacaaggggcgtctgtctttcgtttttaaccctctggtttcaaagggcatgttctgaggtctgagttttaaatagaagtttttaactttccattcccacaaagttttattttcagaacatcagcgccttcgagataactgggtggtgcaaatccaggccagttgcactgttgctaacaggaaggcataagtgtagatttcccgagttcccaccagttcgagaacacagtaatagcatcaatagcattctttttatccactcctgcagtgccaggtgtctgaatgtgttttaaaggatgcgaccctcgccaccttgaaaggctcgctggtcgttagggcatcttgctgtcaccccatgcactcagtcccttggccggcgccttcccagggcttgtttcctgtgtatggctggttgagtaataagctcacaactcgttagccatactgtgaggctttaccaattaataatttaattaggtggtggttatgtcttgagttatcatgcaatgcttttatagtcttatttaattacatttttatgaatacctgtttgtgagcaggtatggctttgcctgtgatttaagtgatacaaaattggagacacagaaactagataacactagtttttagatgggcaaaagtttttaggtagattttcttactaggtaaataacattccattagaatcacttcctgaaacatagctggtggtaaaatgagatgactttcaaaaacgttttgagtcattaaaaagtcatttcaaaaaccatcacagacttttaggacgattgttagccttctccgagtgtcagtacgttggaaaagtttatatagaggaaatgtaggctggtagcttaatttgga

SEQ ID NO: 42360 - DNA, 677 bp, Homo sapiens
atttatgtcagtgtactgactttcaagagatcttgatgatcatgtcgtctgttttcattttctactacatgagaacattgaagcctgaaacttaacacaaacccgagttccccacttgcctaagagtcatggatacctaaaaagtatgctacttcccaagttgatttctttcaggatatgggcccttcaaaggaaagcagtgaggctggggttttccaggtggaaaggtcacatttccacatataactcagcgaacattgtgttgggttgggagaagaattggttcactattttaaactttttgtttcatcttgaggacttccccatcccctctcctccgcaaagcacaaaagtatttcctaatttttaagtcatgggcttcctttaatggattctgaactcagatcacgtccagataagcattgtgtaatgggatgggtggggttagatattttagtcacagatgcatgagaggagggagggtggaggacagcaaagtttataactggagcctatagtagtttatctcttgtcatcggccaggtcacagagtctcacttcaggacagctgtgcaagcagaacccccatcacggttttcttgatgcctttgacagtcacctgtacatgcctctgggacctttcctcctcctttctctttttgttttttttcccttgg

SEQ ID NO: 42361 - DNA, 1351 bp, Homo sapiens
cctgtaattccaactactcactcgggagtctgaggcaggagaatcgcttgaacttgggaggtagaggttgcagtgagccaagattgcgccaccacactcccacctgggcaacagaatgagattccgtctcaaaaaaaaaaaaaaaaagaaaaaaaaaaaaaagaatatccaggtcaaccccacctaaccctcagcggggctcccttctgttgcctgggtgggtcctgggttctcttgacgcacacgagattgtgagagtgtatggaaacactgccctcgctatcaggacagcgcctgccatgccagccagaacacatcataggaattgcaaaactcttttgcaaaccagtgagagatatgcttccaatgtgaggtaaagcagaactttaatcacagctgcagtgttccacagaattccaagagccaagatggtaaaagaataaaaaaaaagaaaggaaagggctcaaattaaagacttcaagctgcagaataagattaaataaaaggattcaattgaactgcatcatattcagtaatgactaatcctaagtatacagggtttgggggtgaaaggatttgtaagtgttttgcaggaaaatattttttccatctttcattttaattagaatagatttgcattattttttcttagtttttatttttaaaatatttattgccacaaatttagaaaatacagggaaaacataaataacagtacatgtaaaccaatattttgtcccttcttttgttcaacagctatttctcaggcacctgctgggtgtcagcagctgtgctcagtgtggtgaccaaaacccttgtcaacaaggcagcaaggttctaacctggttagggcttacagttgagtagctgaaattttgatttcttttctgtgcccctagtaaagatatgatagcaaacaataagagctattttttttattgtgttcttactctgtgttgggccctgttctcagtggtttatagcctattaactcagtctctttaccaccactctgaggggaggctctgtcatacccacttgacagatcgggaagtggaagcatcaggaggttaagcaacttgttaaagatcacaaaatcaataatgacagagttttgattagaatcccagcagcctgtctccagaacctgccctattaagtgcagtgcaactgtactgcctttcataatatgtatcaaattgagatgatactttataatttcaattcttgcttttctattgaacagtacacagtaacatcctcctataatgcatataaacccccaaaagatgtagaattttaatttattcatttgtctgataggctcataatgaaataagactctataaag

SEQ ID NO: 42362 - DNA, 1653 bp, Homo sapiens
tactgccccctcccatccagagggtgctgtagtcttaagttctacacagaaagcagacatggggtccagcatgattcctctgcagccttagagatcccccaggcccaaatcttgggggtcttcagagtagatgtaatggatgcttccattgcagatggtggagcatactgccctgtgtacagatggggtggggcaggaagtgagggcatctgggtggtcctctgtgatagctgtggttccatttcattaaatgccttccctgtatagatagtctcagcctgagcaactgggacacagctggatcctgggtggaagaggtggccaaggacagggctctggagctctggctcaatgtggacaggctgaaagcagccagagagggcaattccaaaggtgacagagcccaggacagaagaccaagggtgtctgaagcctttgtggcagtgtacttaccaaaggacctgtccattgaataaaccatctacatcttctgacccaagaagaatggaaactttgggaataattagtaacaaaggaaaggaggtcagtgttgtattcttgtcacagtgggtgctctgtggctgtgaagtctcagctcagtttaaggaagaaaaagaggaagggtggctgtgggaggcagggcaaatagcctattttcagcatcctttaggctccactcagagcatggcctcagcccagcattgtcatcatatcatgtcagagcttgttagaaactcagcatctggggccacacccgagacctgctgaatcagaatctgcatttcagtgagatcaccaggggattcacatacacacaaacagctgagaaaccctgctgtgggcaactctgttagaaacacaatgaacaaaggagcccctgttccagttgagcttgtaggttagaaaccagggttcctgtattcagaagacacacctcaaatcaggggcaaaggtgcctcttctgcctgtgggggagccgtcacttcttgggcagtttgcaccgtggaaaaggagtagttttgtacgaggacaactggtgccataccaggagggtggggcgtggcggggagaagtggtttaccactggcgttgttgaaaattgctcacatgcagtggtaataacaagcagagggacttttagtgggtttgatgttttttgtaattcactacagatagtgtgtgcccccttgttgctgataccaggccgactgttcccactctccagcccttggtatgacaatgggaccagcagattggagggcagggggttaggaaggcggaagctctgtggcgagttctgcaaaccatcagggttcatgactttattaatcagtgtccatggactgtgaagagaaatgctgagtctacaatagcaaatgagccaagaacataaacagacaattcaccgaagaggagatatctagtaaacaaatatctgggaaagtatttggcttcatgtgtaatttaaacttatgtaacatataatgctttactctactagataatagaaagacatttcttgatgccagtacccagcaccaagggtatactgtatgcagaacattagcatgttgctgatggcagtgcacattgattagtggctgttgggagacaatttggcgaaacatatcccaagccagtaaaatattcata

SEQ ID NO: 42363 - DNA, 3466 bp, Homo sapiens
gagtttatggctttgggtactgctgagagccattaacttaacacagaacatcaatccgtaggaaaagccagaggttttgttcccaggctttccaggttaggagatcacttaaatctttgtgaaagaaaaaaagtaatagtgtacatgacatttattcagcaccatatttataattatacatgagtgccaaacaatctcagttttaacatttgtggtttttactgttcagactattcagaagttccatgacgtggcatccattgatgatggttttgctgaggttgaaatgtgagggttttgtggcaggtgtgtggaagcagatcccttagctaagagagcgcctgctcaacctgccaggcgtgtgctgggaacttccaggagttgcctcgtttaattctcacagccatcctgggaggtaggcgctgtctgccccaggtgggaggccaggaactgtggctgagagaggttaagtaccgagctcaagtcattcatagagtcgccagtggagccgcaattttaaggctgactcaaagcctctgagccagttacctcggctgtcaaatggagataataatccctgctgacctcacggtcgctctgaaggacaaaagagaatcagttcaatccagtaaacaattctctctctccctcttactcccctcgcacacatgcacacacaccccacagatataatggattttagtttttaggcatcaaatgacttttgtgccttattaatattatccactgaatcaaaaacagcaagctgaaaaattcatctcaaggaagagaaaataagattgttgggaatggtgagaaaggaaacatggtttttgaaaattgattccagggaagataggctagtttgaatgccagtagggagccatcagaagaagtagttttacactgatttttaacaatattggagttgcttaaggcaatgcaatagagaggcagtttctgcccttttaaagcctgacttcactttctgaatgtgtgttctgatctagcagggttttttttttttttcttttaagatggtcccagcttgactgcattctcagatccatcagataaacgttagggcttcactgctgtgctgagaggccccagcccctggggttctctcatagaaacaactggaaagaaaggaaatgccttgggcagcagcagcagcagctgtcttctgattctgctttccgccctgccttccttaccaagagaaagtacagacacggacggcttgagtcacttaggcacttaggagttgtttttcacacgtgtggtgttttcgtcaccattactattgtgggaaagaagacaactcaggcatcgtttcgtattcactcatctgtgtgggtgacatgtgggttttggctcatttctgcatatttgtgtgcaaaggagagttttttagtaaacagtcccattacttagctgttcttgtaactctgaaaacccaactgaactataattaaactttgacttggtgactctgcaaacaggctatgattcttttgtttcttttctccttttaacccatagttgatgtatctaacctaacagaattttcagagaaaagaagtgaaataagaactaaaaataaatttttatgtctttaaaaatgagaggttttttttttttttttggcttttggaaggtgagtatcaaaaacctgtacttaatgttaccttggaattatttctagatgtttcttatatccttttgtcccaagtaaaattattaccttctcagtgcgtagtttttcttatttattacttctagtaccaagtgtagagctaagcgtagaggagacgcttcacaggtgcgcattgtcgtgattgcagacgcctgcctgtacttgtggggtttttctcagttttagtacgtgatgacttttctttctataacaggtatttgaaatggacatcgctaaacagttacaagcttatgaagttgagtaccacgtccttcaagaagaacttatcgattcctctcctctcagtgacaaccaaagaatggataaattagagaaaaccaacagcagcttacgcaaacagaaccttgacctccttgaacagttgcaggtagagcatatttataaagcagcttcctgaatcacaaatatatggtagttcattaactcaccaaaggcaacagcaggctgggctttcccatgaccagaggacctttcccaccctgatctgtttatagttgggatcaaaggtatcccgggagaatgggtcctttttattatggagcagacagattgtcctttgctaaggtcaggcagtcccagagctttctgagaggctgtttctgcacttaactcttttaggggacaggcccagagatgaacttggattcaggatgccgtggcctgttagctgaatgccagccgttgtcattactcaaagagaatctaagagcttttaacttctatgagcaaaaccagctaggtccacagagggatggtaaaggaggaaagtaacacagaaataaatataacaaaccagaagagatgataattctttgtgagtccttggtgcatatacaaagatttgattaatgaaggtctcagttctcccctctagaaacttccatttcaacacggatatactcaggtgaggacatacagaagaaagaccagttgagactgtgcacgcaggagggtgtgcagagcaagcactgaggtgcagcacggagaccagagctggccaggtccagcatcacccccacccccacatcacccaggcacactgcccaaaagaacacctaactgcggagtgcagctcttttgtcaatctgatggcatgaagcaaccatatgttctacttttttctactttttttaatgtcacaagtgtgtagcagtgctgtccctgttaaggagttgttttgagggtgtttttaaaagttgtttttgagtggctgtggataaaaatacatatttttgccgaaatttttatggtgttcctgggctgtcctgagaataagttccattctgatctaagcctctgatttttcttcatagaaagatgagctttgcagacacaagcttggcagcaaggtgagaaaggccagcctagtgagtcaagctatctgaaatgcattcctcccagcgggcattccatcccagcataccctatcagatatgtgaaagagaggaaccaagaccgaatgctattcctgcccagccctaataaccactcacattctgaaatttaacttctttttttcccctgagatgtcctaactgaaaatatgcctgtatacaatttaccctggaagtctcagccatcactcaagggaagtctccagagggtgaagagcctgtctggcctgtaggggtacacagtgtaggtggtcattttaaatggcttccaagccaatgataggtccctgaaatataacatggtggaaacttctaataaagctcacatttgcattgaagtgtttagcttgtt

SEQ ID NO: 42364 - DNA, 731 bp, Homo sapiens
ttctcttcatactagaaagtcacctcccacctcattttgtacatgaaaatgcttagtgaggtgtagagagtttcagaatcacctgatggttggctacaggatcagagtagatccctggccttctggctgcctaatagtgggcaccacccagctttacttcagtgagttttgggaaccatttctgatgacatcaatttacaaagcaaagagatgtttgcttcattttcacaaagctaacctgtattctaaagagcccaaatcgatttctctcctgaaatgcctctagcagctttaattgatagggagttaaaactgggaggctctccagtgagtgacccctgtgtatggacccagaggcagagaaattctattgcaacaggatttgacatgattagatataatgtttgttcttgacaactatttcttttttacctttggacttttgaaaacttgcattgtaatgtttttagaagaaacagatcaacacagaattccctttggttttataaaagagaaattccatcatgtaaactattttgctgccatctctagaaatgattagaatgattagagaaattcaagagttatatggtatggagcagccacaacggttatttggacaatttgaaattgataacaaaatattttaaaagaatgttcttagtatttaggcttcatagatatctctcttaatatctgtaaaaataaccatacaactgccttggttgtaa

SEQ ID NO: 42365 - DNA, 2225 bp, Homo sapiens
tatgatgacgtgaactaaatcagttatgtgagcttgagattggacccaggcaaaattcctcaacagtgcaaacatataagataggtgattccttaagatcatgtcatgctagcccaatgtaattttatgtttctgaaagcacagtgaccaaatggaagatgggaagctgtaggaaaatataccttgatgtcagcaaagcttttgacatctctcacaataccttaaataaagtcttattaaaacttaaatgagttaaagtgacatgagcagtaggagagttcgattgtgttgatttaataaaaccagaaagacttctaggttgtggttctcagccctggttgcacaatagaatcacccagagagatttttcaaagtaccagggcccaagggtgctccaggctaacacactcatgcactctggggtagggcctgggcggtttttagtttttaagctccccagtgaatttaaagtttagctaggattgaaaaatgctgtgatggataatggattgtggtgagcctaaaaaggaggagtctcactgagggtttttccttagccagccggtgcacatgtgtgtcatgtgatctgtatgaggccctagggaccatgctcttggatgcacggatgccactgactaaatgcaatgaatgacagacaggaccttgattgatgttgacaagctggccagatgacctgattcaagcaagatgcacttttgaatgtcaggttctaaatgtgtgtatagggcagtgggtctcagggtataggccctagaccaatagcctcagcatcttctgaaacttgttagaattgtattaatgggatctaccaacctactaattcaaaaattctggagggtggggtcagcaatcttttttcacaagccttccatgggattctgatgtgtgctaaagtttaagaaccactcacatagaagggggaatcccactggacaagtacagaatcagagacatctcattagcaacagcagtgactgaagacagagtctgtttattcttgatctatagttctgttttattctcgctttcccattgcgatgaagacctcatacttggcagatcacgtcacttgcttatctctgtgttctacagtcattgtataaaactgtttactgaaaatctgagtaattccagagactgttacatagtgagaaatgttgagtttagagcataatgacacagaaatagctgagaagaacagcagttgccatatgccaggcaccattatgagccccttagacgaatattaactcattgaatgaggaaagacatggtcatggttattggttgggtagcaagtgttgacaagtgggctcatttaacttccaatgcttttgataggtcactaggagttctgtgtgtctgagaatctttttgataattagtaaaatattaactagtaaatactaaaaatgaatgatcccttgcttgctctgccctctcagtatccacccacccccaaaaaggcaggtgagaggaggaagaaaaatctgcctccacacattgagggaacaagagaaggtaaagaagttgggagagactatgccaggagagctcacccagttccagggcatgggacaggtacgcaaccatctaaggacacacgtgggaaacaaggtgcccagggtggtagagcacagatacttccccctcctccagctcctggggaagttgcaggtcattcatttacaaagggaggcataaaccagagagaagaagacaacttgtggggcttaagaatgagttgcttggggaccagtcaaaagttgtctgaaagagctgtcatgacttaaggcaccttgggaggagcagtctggctacctcaaaatgcctagcctagatttttctgtggctgtggccagccttagccctccctgtttcctagactggggaggttctgaggcacaccatttcaaggattttgctcctctgagagattaaaaatatgttagcatgtgttaaggatgccagaaaatcctacagtaaaaaaaaaaaaaaccaacaaccaacaacctagtttccaccttttcagtatgtggtctttctaaaagatatctttccttgatatgttgcatgtgctaaagacttgcacacacaacagaaacatacaaaacaaagttttccaaagtcccctcaacctatatcctacttcccaaaagtaatcacttagcagtttcttatctcttcctccaaaaattgatatg

SEQ ID NO: 42366 - DNA, 3508 bp, Homo sapiens
gagttctcatattcatcccccaaatccctgttttagtttcttcatcatttttaacctatgcaactataagaatcaaactagtttttctatctcttgtttcaaccccctctaactcattctctgcattgctgcatgagactttttttttttttttttttttttttttgagatggagtctcgctctgtcgcccaggctggagtgcaatgacgcgatctcggctcactgcaacctccacctcccaggttcaagtgactctctcgtctcagcctcccaagtagctgggactataggtgcccgccaccatgcctagctaatttttgtgtttttagtagagacagggtttcaccatgttagccaggctggtctccaactcctgacctcaggtgatccgcccacctcggcctcccaaagtgctgggattacaggcgtgagccaccgtgcctggctgagacatttttaaaacacaagtattaccatgataccatgtttagaactcttctcaagctctgctctgcacataaggtggtccaaattcctatgcagagcacatgagatttcatcatctcatccctacttttccgagctcctctttagacatttcctcttgcaatctcttctccagtcattgtgaaccattcacagttccctaaacccaggaaacagtttcatgccttgtgcttgtagcagagacatttattactcatggaatagccatgtgttcctgtacattttgcaactccgggaggcatgtgattagttctggccaatgggctgtggatgaaaattttatgtgtcacctctgagctgaagcattgaagagccagtgtgctaaattccagctttttttgttttcctgcaatgccagcttacaaaccacatgttccaggtggtacagctggaccctctagcttgggtccccaagtgactgtgtggagcagggccctgctccttactcctcctgtccagctgacctgattaggcaggtgacctgagtgagaaataaacttcagctatcttcagctacgaaggcttcagggtcatattattaccaaagcataacctaggctttcctgactcatgcttttgtacaagctcttccctttgcctaacatgacccccttcagctgcctgggaaagtcttactgatcattccagccccattgatcttctcttctgtgaaacctgatctgagtcattgcaaaagaaagctaactacttcctcctgtgctcccatggcaacttgtaaacaatgctgacatcatcctcatcgctggttatcataacaatttaatatccatcaattcatatggtactagatcatgggtgcattgagggcagggactgtgtgtccatccagctatcaaatttgtatctccagcaccccacagaaggatttgcatacagacgatacccaatccaatgaatgatgaatgaataaaaaactgactaaatgtaatctgtacagaataggcttttggctgagcatgatgggggaggtctgggtcatacagtgaaaacactgtatgggactctatagtttgcagacattagaagacaataattgccattttgagcttatgttgaattcatattggcctgtataatgtgtattactatagaaaataaaactttcatacatacaatcaggaaggtgattcttcaaagagtgtctaaaaattaattatgactcatgagtgagtgcacgagagtggaatcaatgtgggtcctgttagtggagagtgtttatttaggaaacaacactgcacatgtgtaacagccagaatgacgattaagatcacgtgtaactggcacattacaaaaaggtggaaaggacactgtgaacaaaatgcaactctatctatcatctgtctacctatctatcatctctcgatttatctacctacctatcatctatcaatctattatctatcatctattagctattatctatctatcttctgtctatcatctatctatcatctacctattatctatcatctatctactatctatcatctatctacctatcatctgtctattatctatctatctatcaatctatctattatctatctatcatctatctatctatctatctatctatcaatcatctatctatcttctatcatcacctataaatcccatgacagcagtaggggcagatctaagttttgtggggcctctcattgcctctttaaattaattctattgggtaggggcagcattcctctacccctgctgatgacttgggtagaccagagatctcaaggtcacattcagacaataaaatatcctttgaattgcacaaaatggcctccattcagattttagcattccaagttgcagataatagttaaaacttcagaaacaatttagctttaaatcttctttccttccctggctgggacctgtctcacccaggaagtctgccctgggaaggggtcatggccctcttcctttcccctccctctgctcacctccttccctttgtttgctgctatttccctccattcctggaatgaagcccagaaaggggagaggtatgaggatgaaacagctctcatgtggctgggcagcctaaggcttttgggccggacagctggcctccctggagcagcctggctgatgattaaagctgaccctgccatgagctccacaaaggcctccagctgggctgctctcgcctgtggttccattgacccaggctgaagcacctctgtcccttcaggtggtctcatgtgattctttccccagctcctgggattctggaggtgccacgtccagtccctctgctgaggtcttcagtccatgcctttaagccccaagaccaccccacactaccccacacctgcttcttttcccacggggccctcatctggtcttgggacatgctgcttgctctgccacaatagtatccatcggttaaaatattttggcgctgtcctatgtcctttgcatttattacctaattaataatgctcacaaccaagtaggtacatttggcaggctgtatccatgggtatttcctgtaaaatttctgtccctggttttgccatcatgaaacactgtgtgcacatttcatttgtcattgattttggctgcagaaacaggaatcaggagattgaggctttatcttggcttgaccatgaactcactgtaaagcttacggcaagtcagccatatctctgggcctcagtttccacagcaataaaatagggaagtggaatggattcatccttacaaggttccttttcttttctttttttttttcttttgagacagagtctcgcactatcgcctgaactggagtgcagtggtgcaatcttggctcactgcaacctgtgcctctcaggttcaagcgagtctcctgcctcagccttccaagtagttggactacaggtgcaccaccacacccagctaatatttgtatttttagtagagataggatttcagcatgttggccaggctggtctcaaactcctgaccttgtgattcacctgtctcggc

SEQ ID NO: 42367 - DNA, 1003 bp, Homo sapiens
agtccccaaagcttgtgattttctgggacattgaccaccatggatgcccagaggtcatcatgaaaaacaagaacataaaagttagctgctttgtaagcttgctagttaacacacccagacacacacacacacacacacccagacacatacgcacatgcactttgtatgtgactcattctttgactgtaaaattattatctcttacaaacgaatctgctgaaatagaaatgtttatttatttgaactaatatgcaccgacgttacctggtatacaaagtttccaataggtgttgctgttgttcccttatccctcaggatctctggcttatgatgcaatcttctgtcacacaatcacattctccatttccttcatttctattgagttcggttttaaattttcagatgagctgagctcagagatagtctctaatcttccaaatctgtgccaatggtgtccttcccatccaggctttctacagatcagggctgaggtgaattgttttacatcaactatgggcttataacaaagagggtgatatcagtggcccttaagtcaaagaagattattgaacaaggctgtgagctccatgaaggcagggactgtgtctgttttattcattgatatatccctaccacttaccccagaagggctccatcaatatgtgttgaatgaactttgaatgaacgggcgctttcaggatcaccatgcaataaacagtcatggatgacataagccatcaaattgatgctaatcacttccccaccgagcccagttatagtgggcatttgcccagctttgccccccagcatgcaatccactattctaaagcccctcatcttccctttagggagttttacgctgtgggttgttttctaggggtgggagaggagagcgcttgcctcttagaaaccaaaggggccagatgctctttctggaaactttgaacaactgctgcaagaatgcggattggttggaggccattcactgcagggctggtgtagc

SEQ ID NO: 42368 - DNA, 2006 bp, Homo sapiens
agcatgagaacagactaatacagataccttccaaccatgttctgaatccaccaggcagtaattactaccttcctgaaatgtggtatatttccatagggactgcattcctgcctgccaggcagtgccaccagcctgtagggtagtggcttgtggaaagagtgagaagagcaggcctcttcctgcaactgtctaccctcatcaggcacggcctgagaccgacagcgactgcgggacatcactgcatctgtgggagatgagaggacaatgacccgcagggtctgtttgcctttaggagcaatggactggacagccaccctgggaagactgtggagcctgcagcaggtgtgggtggctggcctgggtggccgcaatcaggcgtgcacagctaatgtcgcagcccctactgctcagtgtggaggaccttaggaggatcccagcatggagggcgagagccatgcacaacccacacatgtgactcaagtggggtctgcggtggatggtctgtagccagggccctgaacatgccctatacgccatgtgagtgaattgccccaaatcagcaccactggtggcctcacctctcatgcaagaaacattgctctgggcagtgggagtggcccaggccaccctcctagtcgtgacgattgcaaaggcacgagtcaccaagctctgtgggtacctgcatcctgatccttgctcagggtgcccccggggacgattctgacagttcctgcaggtgtaggcacggatgtgcaacctggaaaatttcaaggaaggtgccccagggcacaggccaggataggctggctcccttcccgggtctaagggccattctgctgcccagccgcaaacccggaagattctgatctatggggctggggcgtggctcccccaccataggtataaaaacctcctcaggtgactctcccgtgcagccaggttgagaaccacagtgacctcgctcactgactcacaaatttgttggcacattggaatcaccagggaggtttaatacattctaagcctggatgccactccctgagttttgacttaattggtctggggtgtaacctagcattgggattggagaatcaatgacctctcatttgaggtggttttttaaaacctccagtggtgccctacatctgattggctatcagttgcacacttagcttggaaggcccctggatgctggttttgtgggagagattccccttgcccactctttcattgcctgattggcttccctgaccccacaggtggcatcttcctcaagtcaaccagcgtggtagtcagagagggctaacaggaatggggaaaaactttcaacctccagaggagtggaaatactgggactgtggtcacacctggtcaacagtcctaaatatgagtgtgaaaagtcacttgaacattcagagacaaagctctggtctctggtcaccacccctctttttttttgagccagagtcttgctctgacacccaggctggagtgcagtggcaagatactgctcactgcagcctcgacctcctgggctcaagcaatcctcctacctcagccttctgagtcactggaactacaggcgtgagtcactgagcctggctctccaaccccttttagaggctttttagttctcaggctgcagtgtaaactgactttctctgaccccagggatgagtcaggcaaatgtgaagccaaggggtcaacatggagctgcttcttccgtggagtatcaattttatttgacaatgtacatttggaaagtcaagtaaacttactgactagaaatgcacaaccttattttaatatcataatacatgagaatattgtaaaccatgatgcataacttgcataattaaaaatgaaaatcaattatttttatttttacttttagatacaggttcttgttccatcacccaggctgaagtgcagtggtggaatccatagctcactgcagctgcaaactcgtggcctcaagcaatcctcttgccttgggctcccaaagt

SEQ ID NO: 42369 - DNA, 729 bp, Homo sapiens
aggaaggtgcagaatttgtggggagcaagtacctttgtgaatctctttctcactgttgcattttgttttctttctgagtttctctatcttctgggtgatacaaggaaggtactgcttgcctagaatttaatactcttttctgtttgttttaatccctaccaggaccaggtgttcttttggtttttgaagttctcatcaataggagtttacttatttggcaccataaaaccctgctttaaacaggatacacaattttatgcatcataaaaataaaaacaaattaagtatttttgaaagcagtgtgttttaaattatatccaaataacaaacactcacctagggcaaaagatgaactcttctggagcaatagattgtagagctgattgatttattttgtgcaagagtagataataatttacccaatgcttgctatggtagggattttccccacaatagtgtggtgaggtcagcaaagcatgatggtcagaaccaatgtatcttcatcctatctgcaggtcaggtcctgacagtggattctgtaaactcccactctcttaaattcacattaatgggcgttaaaacttgatgttggtcgccaggcacagtggctcacacctgtaatcccagccctttgggaggctgaggcgggcggatcacgaggtcaggagatcgtgaccatcctggctaacacggtgaaaccccgtcactactaaaaatacaaaaaagtag

SEQ ID NO: 42370 - DNA, 2564 bp, Homo sapiens
cccacacctcctttcttaaaggcagtcttttccacatgttttgaggcctggagaacaaaggtgatgcgagcttaaaaaaaaattaaaccaaaattatttctcacccagttacatgctacaaaccagctttcctaggtttgctcacacaaactccaaaaaagtaatggggtaaggggaagaggtttacaaggtcagaagaaaacatcgaaccacatgagacttgattcacttccatggaactggttttgctcccctgctacaatatcctgtaaaattgtaaataaagcattggaactaataaatcaatcacaaagggaccttcctgctgccaacccatcctctggagaatgaaatcctgagggcagatttagggaattgaaatcagaatctgtgcagttgccaaagtgccctgccttggcctgccaagttaaatgtgaacttttgtgaactttctttgcagcagttagaatcagcttcttttgtgcaatgcaattccaatttatggcattattgaagatagggtttcagggaaatacaccaggccagtgcatttgtttggcccatgaagcttaattgccaatgttaaatctatggccctggcaatcttctctgattaaaaagccactgggagcccagtttggggccactcttctttattactgttcttctgtagaaagtcgaagtattcatcccatcgtgggagttaaaagcccaagtcaattattaattgcatttgttttctttctgaattaacccatgtgacccgtggcatttgcaccttgtgttaaccattagacacacaaatgagccctgtatttatttgggtggcagagttctaatgcctgttgtttactttatagtgagggaactgtgcaatcagtaggacttttccaggaagagaaacaggggtcctgccttccgtcctctggtttgaggaagcagctctgtttgcctctctttgctcccttactcaggctgctcacagcgaagcctttcagtgtctgatataaaagtccctttgattgtgcggtggccacagggtctggctgtgggtctgggtggcttgcaggcgcatcactaaccaaaactagatccagcagaggcggcttcacacttctcatgaattccggcatcttttttgtgttaaagatctacttttcttacagcaaatattatgtatgtttttactctttgaactctttccatacttaatggaggtggaggcggggcagtttgtagatgtactcttgccaagttattagttttagataaagtcatctcaggtttgagcaagaaaatgaaagcctctgattatcagattctctggaacttctcttcctgccagaaacaatgttgagtctggccctctctctcccagctgctttcattgtattgcctgaaatggtattttttaactgtttctaatgccagtgaaacgaggcattagaggaggagaaggggagtggttgggtggcacgcttagttcataattgtctgggttaggaaagaatctcttaatgagaattggatggggaattaggatcctgtggtggggggcaggggtttgtatttgtgtgggaaaggagttaaagactttgttttatttcattgcttcaatttgctttgggttgttatttagtttcttttgagatttacataacattaaatgaggatgtggctttttaaaatgttttttgaaaatgagcctgtcttaatccattcaggctactagcatagaatgctataaactaggtagcttatgaacatagaaacttatttctgacagctcttgaggctgagaagtcaaagatcatgtttccggcaggttccatgtctggtgaggttctccttcctggttcacagatggttgtccttacgtgagggaagggtaatggagctctctggggtctatcttttatatgggcactaatctcattcatgaaggccccatcctcatgatctcatcacctttcaaaagacccaccttcaaatacaatcatgaaaggaacaggtttccacatatgacttttgggggaacacaaatattccgtctatagcattctgcctctaacccctcaaaattcatgttcttctctcatgcaaaacacattcatctcatcccaacaacccccaaagtcttaatttgttccagtattacctaaaaaatctaaagtccaaagtctcgtctaaatatcacttaaatcagatatgggtaagactcatcctgaggtgaattcctctccagctgtgacctgtgaacccaaacaagtcatgtgctttcaaaatacaatggtgggacaggcacgggatagacattcacactgcaaaagggagaaacaggaaagaagaagggagtgaaagatcccagacaagtcgaaagcccagtggaataaatgacattaaactctaaggcttgagaacaaccttctgccttctgggtcccctggggctggggtcctgcctctgcacttctcacaggttggagtcccatgtctgtggctctcccaaagagggaggcttttatatatccatcttgtatgtattcctggaatgccagattcttt

SEQ ID NO: 42371 - DNA, 655 bp, Homo sapiens
gtgtggtcatgtgggctgaaatgagaaagcatggaagtgtcgtgaaacgcagggatgaaactgacaaggtggggcatgggtggggccagggaggtcagcttgggcgttgcccctttaatctttattaatgacctataagatacaaacaccttgttgaaattgaccaaggtcacctaatgacaaggtgttacaaactggcaaagaagaatgaatgaaagacttgctagtgacaaatgctcctggatttaaaggcaggatctggccaaaggagagttagcaatcgagggcagcgtgattcaaagcacacacatccactaggaggtagaaaacaggaagggccagatgtgagcaaccttagctaagttagagtgaaacagttcacaggaaatgccaacttgctggggacttttggtggaaggaaaaatccatgctggatgattcatttacagcatatacatatttggcaaccatgagttcaacaaccaaaattatttaattaaccagaaacttgcacagtccaaaatccaagacgagctgtgtgtgctagtggaagcctcttgcaaaacctacattaaaatattatatgttgactgggggcagtggctcacacctgaaatcccagcacttttggaagccgaggtgggtggatcacctg

SEQ ID NO: 42372 - DNA, 1034 bp, Homo sapiens
ggatgggtcgtcagcctcacctgggcgcctgtcaacaaagggtggactccaccccgggcctgcagaaccaggaatctacaagtctattgggcgcctccattctgaggccagtggtttatgcacaggtgtttgaacacaactgcttgaaatcacaaaagcaaacaactcctcaacagattacctgcacctccattctgagtttgtacagaatcagtgccattatctgaaatatgaaatacttatcccctgatcactcctctttcctcctcatcttaggacctcaagcacttcaaagcctgagcgaaccccccagagaaggtggcttggccacagagggagccccacagagacccctgcgaggctgagcagggggacactgagctcccactgcagggtcagggccagctaaactctatggcttccttgctttctggatcccaagctctcacctccagccagacattactagtgtgaattccacctccttttgctggggagggcaaagtgcagcagcctgcaggtacaatttactccagcatgggctcataaaacactgcaaatgaaacttcaaaggccgtgggcagccaccgcccatgggtccacctttctccaaccctcattagccgcccacccttggagttctcctccagggtgatctcagctcccttccctaccccaccctctattaaggcttccattaagtaagctggttttatgacatcagcagtgattaaactgacctgatttctcccaggctggcagagtcaagagcccgagtcaataggaaaccagttccaagggactcagctaagccactcagagaaaaaaagacctgagctttattcggagaggaaaaaaaaaaaaaatggtatgcagctgcagcttaccccgcatgacactgcacagaatcccaaagaaatagagcgggagagacccagccgtgcctgcagcctgcccctctctcggcttgtggctaggattagggaaatgctctgacctatacacatggatggacatttgctcaaaagagttgg

SEQ ID NO: 42373 - DNA, 1726 bp, Homo sapiens
gtgcagcaacatgaagtttcttaccctggattacccagctggtaagtaatagagcagacatttaaacacaggcaacctggtccttagtccatgacttcagccattgccttatactagcctttgattctacagcaatcttttaaatttttgagtaaaaactcaattgatatatgtttgtatctttaaaaacaaattattttggaaatcctgaagcctgtataaaagtagagaggagagcgtgatgagaccccacttacccactactcaacctcagcaattatcaactcatggccaatcttttattgtatctctcctcattcacctcctcctggctcttgaaatatattaaaacaaatataagaaatcatatattctcatccataaatattccagaatgcatctctaaaagacaaggacttctttttattacacttgatcttagtcaaaagaccaagaagcgatgacaaggacttcttttaaaaagcatagccatagccatagctacaacatcaccatcacaccttaaaaaagagaaaaattcctgaatttaatcaaatatccagacagcatttcagtttctctgactgtctcaaaaacgttttgagggattttctccccaaatagaatccaagtaagatcactgtagttgttctgttttcatctacatgtcccctcccctcccttttcccccttcaaagtcgagagaaaacaggtcctttgtcctaccaagtgttccacactctgaattttgctgatttttgtctcctttgatgtcatttaaaccatttctctgtctctctcctgcatttcttataaattgggaggcataaatagaggtacaatctgactcaggttttgatttttttgtcattagtcataggcagtgtcataggcagtggtgtgataatcccaccaggagtacataccgtctggttatgtctgtttctgtaatgttaatatctcttgcctgatcctttattttatggggatgctattctactattcctgcttcgttcgttatgtggaatatttccattaaaggaaatttgtcctcatcaactctttagttaccctaaattttgcacagtaaaagcaggaaaaatgcttggttattttctatttaccagttttcagcgaaatgagctatttcctagcttctctaaacgtgtccgatgagggtttttttcctgagtaattttaaacctgtaacttcacaaatattgatgtgcttcagtctactgcagttattgatgcttgaactgtattatctttacctgggtaaacagaacttcctccatttagttattgggtacttgtaacactaccccatcatattctaggctcaacctgttctatgtaatatttttaatgatatctctccatattatcttttgttctatttttcaactagctgacaaacagctaggaggcgtggctgttgaggcttcctggattcatcttccagcttttacattttctgctacatgacttgggcaagttatttaacttagctctgcaacaattccttcatctataaaatgggaatcataataattgtacttaccacaagttgttaatagaaggataaactgaattaatgtatgtaaaaacactgagcacagtacctcacacacagcaaaaactcaacaaatagtagttattttcattaggtttaataagactgctttagtgtgtcctctttctaaatttttctaagcattattga

SEQ ID NO: 42374 - DNA, 1698 bp, Homo sapiens
cccagcttccccaccctgcagctcggcagtggacaagagtcagactcctgggtgcctggcccaactgtttctccctggcagtgtggaactgggcaaggcacttgattttgctcctttgtaaaatggggacaataatacccatgtttttgttaatacaaagctaagagtgtaaactccagagccagactccagagccaggttagaattttggctccaccttgtattaatggcgtgattttggatttcactgtggcacagtttcctcattggaaaatgggaatagtaacaggatctaccacataggattatggggaggcttaaattgaacagtgcctggcacagggaaggtaatcagcaaatgctggtggttgttactgtcttcatcttgctatcctgttgcacaaagcatgttgggagctcactccagtgcctggcacctcactcaagcccttctttcaggcccgttttatttccagaccagcccaggcatccacccaccagcagttggggccagcagggtgtacagtgaatgtgtcacagaccaaggtcatgcaaggagaaacactgtcacacccatcccagtttcagacatttcctttgccccaaggcactttggactgtaatccttccaaagatgaacctggggtggggtaggatgggacagggaggagggaaggaaggacagccacgccctatgggctgtcacgtcttgtgtgaagtaagtgacttcccccaggaagaccagagagggaggtgaggctggaaaaatagaatgaatcaccccaccctggctacacccaactgctcctatgggcaccttgaggccacaaactgtgggtcaggaaggggccccaccacctggtgcctggagctgtaagttactcccctctttggagcggtggtttaactccttaaagcttctgactctgactcattactcagcattggatggagcccaagacacgtggaaaataaggatggaacccaagaaaacaagaaggatgggaaacaacaagggattcaaatcacaaaggcaacagccctgtgaaaaatttttcttgagctaagcctggtggaggggcttgatgtaggctagggttacccagtgtcctccctccgaattacaggggtggggatgtttggtccctggctctgttaaggcatcaaatctactttatgacttaagaacccacactcattaatatacggtcctcctcaccccctgtccccgtgacctccccagaatatagaattgtgggcagggaaagttgtaaggacaattgggccttgtgctccctcctctgggtgttgagaaagatctggaatggaattagctttgtggggatttccaggtgccgaatccctggagcatgttcgaactgagctgggctgttttcacctgcctgatgggcggcaggccaagccacacccagttgtgccaagtcatgggtccaaagtgtttgtcacagcatctcagcaaagatgtcaggctggatttaacagaaacaaagctaaaatgatcaacaccaccaaaagcccagctatagggagtgatctatctttcggcttagtatatatttgaaaatgtaagataaagaaaaatcttacttcagagtaaaaggagtatgtgattttgaagatctgggcattggggtctcagctccaatggtcagggctgtgcgtgaggagagaggctgg

SEQ ID NO: 42375 - DNA, 2824 bp, Homo sapiens
agtagagatgggtttcaccatgttggccaggctggtctcgaactattgacctcagatgatccgcccacctcggcctcccaaagtgtattcctttactttcttaataaacttgctttcattttagtctacagtctcactctgaattctttcttgtgtgagatccaagaacgttctcttggggtctagatggggacccctttcctgtaacaagtgtacagttggaggccattgaaaaacaaccaagcctaagatgggacatgataccatcttaagaatatttgtatttgtctctctgacactgtctgcagactagggtcactcaaaggatggatgtggatctcttgattttccaactctcactttcaccaagcattttgacaagggttggaggggtcctttaataagaggtataggcgaaggaggtaggaactagtctcttcatctggaccagagaaggaactctggttctgcaaacaaatgaaaagcttaggaaggccttgtcctgacaaaattcacaggcttctaatcctctcccttccccaccttaaaaacacacaaaattaaggaaaagacaagaaaggcggtaagattcttgaaagagctttcaaaaatgagaaaagaaaaacaagagaataaacagcacaatgtgtcctgatatgttaatatgtttccctttcgttttgcgttttttttcccctttccttcaaaaaaaaaaaaaaaatctaggattttgtctcctctaaggagaaattaggaaggaaaatctgacataatctccagagctgtaaaacttctttgtatgccgtcacttgagtgctttttcttacattcccttaagtagccaacctaccatgtggcgagtttgtgaagccaggaagggaggcagtaacccgagaggcgctgcagggcggctccccacggcgagggagggcaggcggagccccagctcctcccagccggctgagcgctcggcccctcctatggccgcaggggaaaaggaggagagacctacatttaaaaaggcaggaacctaccaactgcagagtgagaattcccattcgtgaggtcaaatcgaggtcaagaatttcctaaccatctctgaaaaccccctatttagggggtcaagtcgggctggcaacgccccaaatcattaactaaatctaacttgatcttcaaaaacacagcctaggactgtttttctttctttcttctgcctgaatgtttctcagtggcatttctgttacttcctgtttgtgaccgggctttccttgccctacttccttttttaggggtttaggttgcctcgacggccatttccacttagatagatggaaaaggggtgtgtgtgcgttggattggaagggaaacagctcacatttatttttatgttgtaaaagtcttttctcatgcattcacattctttcatttacgttctacagcaacactatgagaccaacaatatgattatgcccaaattacagttaaagaaactcaggctcaaaaagattaaataagatgtccaagttcacgcatcacataaaggcgcaaaacctggatctgcgttccaagggtctgaaatccaaaggggcttggggatttcacgaggtctgaatctaaaactgaagttcttttcatttattgaacccttaagggagacctaactttaacttatttggcaaaactttattcagggaagacttttattcaatctttattacagagtttattcttcaaatgtaaagaaaagacttagcttagtgccttccccagagcagtgggagaattatgaaagatgtactattgctttttttttttttttttggcaacctctctgctctgctggctttcaccctggccatcccaggaccgagctggggcgttcaagcttgcctcggagccaggcctgcacttccagcgtcaggcagtagggggagcaagtgtgcaagaggaggaaagcggctccaattgggcaggaaacgtttgagaccatgtgtccttacccggctccggttgaaaatttaatttttttggctgcctgaatgcttaggacccatggctccaggcttctctgcaaaaatttatgcttactgatttgtagggtgggaaaaaccagcctcagggagttgtagaaaaagattacatgtgtcccctggatcagaggaagtaaaaacctccacacggttgctggggaaggatccaggcctcctggcctctgcccctatgtgagggggagaggacgcagaggcccgcactatgggccgtcctgggtccaagcatcccaggacctccacctgaaacctgccagagaagacaggattttgtacagtccctagcgaaagaattggaatgtatacagcaaaatggggagaaacgtttgtgttttttcattgtatccctggcttctggaacagcgcaggtggcggcctggcttctggtactcacattgacagagcctgttaacttaggctgcgctttgacaagctccttgaagtcaggtggaaaagaaacaaatgtcctaagcttgagcctgtactaggtctagaataactttagagtgctggcaggtcacctctgctctgggatgtagctttctcccatttctttctccattacaactttagtttcttaacctgggaaagaaaagtttcaaaactgcagcagtggagaaccccgagggctggctggcaatagtgtcattcaaaggaaaacagagaagaaccaaaagctgatgtttgcctgcactttggatttggatatagaagacaactgatattctttttttgatggtggttatgtacagaaaacgttggtcttggttccaaat

SEQ ID NO: 42376 - DNA, 562 bp, Homo sapiens
gatctatcttctttcaaagataggaagtcagggtgtctgcaaagcacatattttcccactgggctgaccccaagttgacctttatactcctctccactatctgttaattccttgtgtctgggttccaatggaagtgtggacagaatgaatgaatgaagtgagataatggttgcctctctcacaaagctaacacatagtaggctctcgaaaaaggcttcgtctaattaaaaagcaatatttatttactagctctggcagcagatttggtcagcaaagaggtcaaagggttgacttgaattaggtttgaaggttggctggaattcaattacccatgaccctctagtctctcctgccagccatgattaatggaggctggctaaagtaggatggggttagtaacactgaaatcaaccttctctggagaataaagacgctgaaattatctaaggagcattctcaagccagatgagatttcttaggtgggaaataaccttgtgattcagcccaataacatcagggatcagatccagagacaaaggacatgcacaataaagctggggaa

SEQ ID NO: 42377 - DNA, 2738 bp, Homo sapiens
acgtatcgatattcaagctcacaaaataagctcaaacttgaaaaagatccagactacggcaacgtttattatttttagagcataacctagtcattttgattaattcgtttggattgctttttcctgcagctccccagggagaggtgggaggaaaaggcggtaaaaacataaattttctttggtgatgagttcgcatgtttagaactgtaacatggcaaatcattgtgaaatcttctaatggatgcctgtctcatgccaaataagcccagtacccaaagcacatcaagaaataattgaaagacactggactgaatccaaaaggttgtggctaatgtttcacctaatctctctcccaggtctctcctgcctactgccggccctacccacaagatgtgaacttcagagccttcttgcaactgcttcttggctattttcaccctctaaccctctggaagaagaatgaggactattatgaaggcaaaagcataaaaggggaaaagattagcctccagagtaggaagattgggttgttggaagccagcacaagtcttcccctgaaagagttaattcgcctccaatgggggtagggactgacctgggaggggcctcagcctacataggacaggcctaaaggccccattggggctgaaggtgacactgggtcagatccctaggattctgcaacttgaggtgggagtgtctataagctggaaacaaaagtttcaaaaaaaaaaaaaaagctcattttgttttcaattcgttttatcttggctctatctcaggcaccactgacttcagacctttcaaagctaagggtggggtagggtggggcttagtgattttttttcttaaagagagagaacagggaatgtgccttgaacatgcacaatttgcttgaacatgatcatagtcattaataaaaacattgagcaatatttgcttctatgtctttggaactggcatttgcaaaggtagcattgacagatcagagaacagaaaggaattctgcggttactcgtggaggaatttggacctgtgagatattcatgatgttaattatttataatttcagttgttttaggccaggctttgagcttcaagataatgtgctcagaattggcaacaaaaatggtcatttttttgctagtaattactggctttgagcttcagctattttagaaggacacagagagatctttagatcatgtattcctgacttaagcaaggaaggaaagaaggaaggaaggaaggaaggaagcaaggaaggaaggaaagaagggagggagggagggagagaaaggaagggagggaggggaggaggaggaataggaagaagaaaagaaaggaaagaaggaaggaaggaaaaagtaaggcagggaggcaggcaggaacaaagaaagaaaggaagaaaagaagtaaaaaaaatttttttaaaggacaacccacaaaacctcagaatttaactaagttccaggcctgaaatttatttttttgaacaatagagatgcactatactgtaagaaaacacaacatgtaaaaattcaaacttgccaaactaaacagagagaagttaaacattttacaggaaaatttgctactaggacatgttaaataaaagcgccctcagtatctttaaactagagattgatgtacactttaaccttttaaaaccacgtaaagtgaagtctcccatgtaaatatcattcttaatgtggaatatccacacttgaaagtcacacattgctggggttcaacctcagcttcaccactcatagcatgtgactgtggccaagttacttcacctctctgagcctcagtttccccatctgtaaaatgagggcagtgatagcacctgcctgattagacttaactgagttgctacacagaaagccatgaggaagtcctgccactcagcaggtgtttcatggctcttagcttcctaagccttctctttccttcctacttctgggaccacgtggttcagccagcatggaacaaaagaaaatttgacccactttgtagctttagatgcctcagctttatgccaagtaagttgtaacctcaaacaaatgggacccagagagcttatggctgtttctgcctttctcatatttatttattttttaaacaaatacttgtataatgcttactatgtgataggcatattctaagcacttggcaaataccgactcatccaatcttttataacaaccctatgaaatatatagtattatttattattcccatcttacatttgaggaagcagaaacacagagagcttaagtaactggtccaaggaccataacaggtacctgcacagccaagaactgaacccagacaatctagtccattccctcagtaggtctcatgggtgtattatttatttggaaggcctgctgaaaccaaagcagccaaatgaaataccagggccagttctgcacagactaaaaaataacagcagggccagaagtactgaagttgcaaaaccctctgctgataagctttcactgccagaacctcagaccagagagatctagatgaagttgactgaataagcaagctgatttccagtcctttggcacactgccctctctccactcctaccacctaaaagggtgcagactcctctcaggtttcttcattcttcctcactctcttggctcagtgaatgtgaaattgctggctgttgcagcctaagtgggtggaagggtggctggaggacggagagcattcaagta

SEQ ID NO: 42378 - DNA, 701 bp, Homo sapiens
atttattaagtatgaactacatgctaggcatcttaagtgggaaacaacttgggaagatgcccactggtcctggcagagccttggcattctcttatcctctctctctctctccctttctctctctcacacatgcacacacacaaacacacacacacactatatgttctatcactttatcaagcgcttactaggtagcatgcatgctgccaagtactttatatacattatccttttatatacattatcttttttaatcctcatggcaacaatatgcagtagaaattgttttcctaattttcccgttgagaaaattcaagttccgagaggttacatagtttgcccaagattacacaactcacaggtggcaaagttaggatgcaaaacaaagtctgactgattccaaagtctgtgctttttgatccactgcatgataatggcctctctgtgctcagcaaacacagggttgaccccagcagccaaagatctggcttccagtaatctcccacatgctcacaaggtgcgccttgaaaaagtggacacaggagacagtgggaaaggccaaaggtgttgatacaaaacttcttcagaaaaatcatattttcatgccagatcctagaaagttcaaactggaggggaccttgaaatttctctatgctgaacaacctcagattcaccaacagaagaatgggctacatcaaatg

SEQ ID NO: 42379 - DNA, 953 bp, Homo sapiens
tcattatgaggaagtagggaagaacaggaagcagttttagcagctgcctggcgggtctggcagagccaggaatgtcattcaggacatagtatacctccagccacctgttcttcttgacattgcttcaacggcaagcatctgttgctccttctctagtgctctgccagtgtgatgactcagccacgctctgccctgctttctctgctcgtgctgctaaatcctctctgcattccttttctctcctccatggctcccgcttagttgtggctcctactgccgtgtggatatggcttgcagactcctctcaggacgtctgcctttttcggcccaactttttggcttagtcctctgataagtctcaaattcaaaatgtgtgaaagaggctttgtttgactggccactcatcatccagggtacagtgacctcgctgggtggagctctggcatcagccgctggccactggactctccatggatggctgcctttgggtcgggcatcagttctcagttcagtgcaccatagccagggaagcagggtcctggcagaaatcacatccacccacgcagagagcactgtctgcagcagctctcatcccaagagtggtgtggcagaggctggcactcatgccagcgctgactttcctccagcatgatgtcccaatgtattgattgccatcctaactttgactgtgtcaaccattcagctttgctacaaatcatgtcagagctatgacagatatttgaaaacacatttttagagctatttaaaataaccaaaagttcactttgggaggccaagacaggcagatcacctgaggtcaggagttggagaccagcctggtcaacatggtgaaatcccatctctactaaaaatacaagaattagtcgggcatgttggcaggcacctgtaatcccagctacttgggtggttgaggtacgagattcgcatgaacc

SEQ ID NO: 42380 - DNA, 681 bp, Homo sapiens
ctagggtacaagaggagatgagtcacaaaagcgagtaagaaactaggtatatgtgctgaggacagaagggaaggttgactgggcagtcctcagagctgccaaatgaagattctttacattatccctgaccagctattacggtcaagtggctctagaaataagcaatggaaatgtgccaggacaggaaaccagacaaggcattgcgtaactcctcctgtgtgtgcacacacaccagtaagagtgggtttttcacttcatctggcctcccatggcatcccgtatattcctctatttcagcacctgtcagtgtcaggcaatcaagtcaatggcattttggtccacctcccactacactatgaatttctgaaaaaaaaggaaacagcgttttattcatctttgagccctaccacctagcacagtgagtagcataagagactctcaataaatgttgacttaacaaatagatgaataaaagaatgaatgacatcgttctgcttacagaaatcagagccctggactgcacaggcactatgaaaaacctgctaaatggagcaccctgaacctccctcccacagttctcacccacctgacccataatgtctcttccatctgacttgctcccactttgcctcctccaaatttcttcccaaccttgcagggagaagcccagagcctgagggt

SEQ ID NO: 42381 - DNA, 854 bp, Homo sapiens
acagcaaattcagatgttaacacccaaaaccacatatattttctgccctcctgtcaacgtaaggatttcatatggctgacctggtcttaaagatagaccaggtcaagagtttcctaggtgtctgagtgacaccacccatgcttctcccaccaaccccctcaaaagtctcctgaccctgcataggcagatcctgaaattacacaatttacaattcactgacctctgaaagagcaagtcacgctccaaagagggctgcagacaaaagcgttccaagccagattccttgttgacactggtctctggttacaccctaggcataaaaagcaaggaagttcttcaaagccagtgagtgcttccctacctttgtctgtccccagcagaacctcttcccccactccaccctccacagagggactcactataagttcaacagtgcaagtggtgcaaggggaggcattttcaggttacacactatatatagctaacttacagtctcatgttattcgccttggcgagggttgaaagccttaatacctcccaagcatgccctgttgtgagtcccctttcctttccaaaacccttccttggcccagaccctgggagtcacctttcttcttccggccactccccactcatcctctttcagcctcatcacaaagcagggactttcccatgagtctaggtctgccctggagttgcaggaccacaccacggccaagcaaggcctctccttggacccttggtagtttcctgaactgtgagtgtcctgttttttcgaggctggtgtcagagggaacaaatgcaagacccggatgaagcatctcccccaccacatgccaacagccagttccgcc

SEQ ID NO: 42382 - DNA, 3618 bp, Homo sapiens
acgacgtcccatgagccggcgtcggttctgggtatcctccacgtggcctttcctggacttgcgttatttaaaatatgcgatttcactacttgaggttaccgagtactaattttacaatactgtgtagctacatgaagcggctcgaaatatactattatcactccgttttaagcagcacgatgtctggatgaagcatcaaagcgagatgggtcaacttaaagggcctttaaaacatcttgaagcaataataagccatacactgaagcaggggcggttttaaacattacacagaacttaaaacaatcgaacgaattcgtcctttgttctttttattacattaattattacattaatactgtttaaaaagaaactcaaaaggcattaaacttaggtaccaatctacacaaagtcctcgaaggggcctggcttggaccgaacgcgcttttgtgccgccccgctcgctcgcagcaccctgaaggccactgagcttagggcgctaggtccctagaagcgacttgaaatgagggggtcgccaggccaggccctcgctctgcaggggaggatccgaccaaagtttgccaagtttccaggcaagcccaactgcgcaaatgccgctttttagctccagcggcaggcctggcccgtgggagttttgccccaggggtctccgggccttcaaagaaaagtcccacgaggtggggggcgccgcctgggccgccggccagggggacccgtcgccccagggcacaaagaaagagcgcgcctacagggtgtcccctgaccccggcgactcggggccagggaggctcggcgcgccccagcggccgctcttcccctcccgaacccgcccggcccactcgctcctgcaccgcggccgcctcggctcggcttttctcttgcagtgagctgagtgcgctcagccgaggaggggccgcgccgcgccgcgccggccgcggggcccagcccttcccgccgcgcccggggccgcccttcccgctggagccggctgatcgatggccctggcagcccgcgccccccgcctcggctcgcccgcgagcccggctgtgtgttttggaagcagcgcagcgggccgcagccgtgtgacgcccggagcgggcagcgccgcccttccttccccccgggctcgggcggcggcgcggcggctgggccgggcgggagggctggcggggcgcggactccggggaggagggcgcggggaggggacgcgggcggggacgcgggcggggggcggaggccgcgccgcgcacgcccagccccacggccgcgccgcgcctcgtgggacaggttgggccggcggggcggcgcccggctccggggaataatgagtgtctgtcaggccgtccccgggtgactgggcggggcggggcggaggcggcgcgggaggcgggggtggcgggggaagggcgcagggcggggtgcgtgtttgcgcgagtgactcggccgacccctccggcggctgcctccacccaagtgggtggggacccgcccagcccgggcggccgcggcggctccctctcccctccctgaccctcccaccccgggtcccagcctctacttaccccgccagccccgggaggctcgcagagcgagcggcgccggcgtcatgtgactgcccggagttggtgccaggagccagaggggagccaggagcggagccgcgcggagccggggcccgagccggagcgcagcgagagcgcccgccgcacgcgcgcccgtccccgtcccctgcggccgccaacgccgcccggactggagccctgacattgctgcgctcggggggctccaggcagcccgtatcggggcctttatttctcgtcggcggcgccctgcaccgcgcctcgcaaagtaagtcccgtctccctcacctctgctccgcaccctggtccctgccgcccccctcctcggccagtctggtttcattttttctcctggagggggccgcggggaatgggtcgggggtgcagcgctggtgttggggggggcgcctgcgggcttgggaaagtgtggcggctacacttagccggggtgggggcggagagcaagcaaggaggagggggtcacgggttcgcggtgaaaagtgaggggttgaggcgaggcaccgtgcggaccccgggtgcgggggagcggggctggcagcgcccgccgccgtcccgggcagggcgcgggcgggggctcacctgtgtggtccccggcctcctcccgcccgctcacgattccctccaaagccccagaaatctccgtgctctccgcgtgtggcaacgttgtttggagaaaggtagcgccgcggccgcgcgctcctgctcctccccctcccggtgcccccccaccaccaccacaacccaggctcccgcgtccttcccctcccctccctccgcccgcgccccccgccgcccccctcccaggacacggcgcgcggccgctcgcccgccacagcaaacttggagcagtctcccggccctctggaaagaaacttagggcaattgggattggaggcagcatcccattctcggttctggagcccaggagctgccagggcgtctggatcctccggggcaggagaaatgagctggtcgggtttggagagtcttcctgggggcatggagagaacctgccgcagtgcctggagcaaggattgcagcgtggctgaaggcggaagacgccttaggcaactgcctgcagccgagcctgatggggacccagggacagatccctggatcaggacccatgggacctacctaacatttccaagtggctttcttagagatggcagatgagatctggaattgtcatattcatttttttgggcagatagctactgacaaggagaagcacttttctggtttaaattttatagcagtatacaataatactagaagaatgtgaatgagacttatttttaataagtcaagttaaacggaaattggaaattgctcaccttcttgtatttcactaaaataaacattttacacttaaccactgaatttcttactcagaatttatgtttccattaatatcacccaagacattttaaatatattgattatattctcacaagagtctggtatatgggaaaaagtatgaagtggtattctgacaagtacctgaaatgtgccagcaaaatcaagtggggaataggccagttgttcattataggtttttccacacagcagttttgtgctatccttttctgtacgaatttgaggagcatttttataagagaaattcatctggatgatctgcctcaccctagggaagaagacttgcttttaggggaaaaaacaatctgctagcattaatatctacaaattttttggagttagtaatagtgtttaaggaaagtgtccacgagtgatttcttctggtttgaaaagaggtatgttagttgaccttaggctgttaatagaaacctgaaattagatgttcgattaaattaaactccctagagaaactggtatcttcatttctgcagtcagtgggctttgctgcagaactatttattagaagaaaaaaacctaatgtactatcggtaagttcaatgatgatacattgtaaagaacatttagcttgcatgaaagggaatgcaagtacaaaaatctc

SEQ ID NO: 42383 - DNA, 1980 bp, Homo sapiens
tttttttttttccttacctgtacttagtctgcacacaccacattcttaaatctctgataacgtaagcttgagttaaacagtcctggctaacaaagtaaagagaaataatgggaaaggaactgtgaatggattttactatcttaaaaataacccaaagggaaaatagacattttagaatgacttctagaaattagtactctggtgtacagattgcataataatttttagataaatgtcaggaacagaatcacattcttaaaaggcgaatttctataaacgtgtgtatatgttgaacagatgagcagctctgcaaagatgtgtataactgcatttgaaaaagacagtgaaaattttgggttactgtagatgtcccacagtctgtcttggaatttagttctgtgactaaaggaggcttacagttgctccaattttggttctgtggggtaccccaattgtaatctgaattcctaacagcagtgctctatcttttttcctcttgatgcactgaggctgaaccataatcattaccctaactcggaatttgatctgagctagggactagccattggaatggggcagaaagggacaaaagaaatcaggagggaggctagtgttcattaggaaggtctctgctgcttgaatatgataaaatcacatttcacttatgatgtttactgtatgtggcagctcttatttgtaaatagggcaggtcccctgtataaagctggtgttattattcacacccgtagaacaaacacctccacccccctgttgttgtcttaaaaaactccagctgctcatgaatatagggtcagggagggccggctaaatgtttctctgtgctttctctccagcacagccagcagagctgtttcctgttctttgtttcaaggctggggtttgcgtcatacattccaagtggcatatgtgtgctctttcctgtttcaggctgttttctggtagatcagtagcccagaccaggctgaggtccctgcccctaaactccgtatccccacccatggagttatcatgtctctacacacttgatattgcttaagacgcctgtgttatgtcataatgagaagtcagttaacctttttacgtacaccctttgctccactgcatttgtctgggtgaataaatgcttttacctttttaaattttttattgctagattgtgatttggggaaacgtgggtccatcctggcaaagaaacctaaaggagttttgtttgtatttgtttgtaattcttgtgttgaagtggttagggcgtttgttttaagataggcattttgccctgaagctgtcaattttggatcaggattaacaccttacagtttagaagacctagcattatctgaaagatgtggcccaccctcgttcacgtttaacccaggctgctccaggtggcttccgtggatggagaatttaagcaatgttggcagcctggctttagtttaagtcttgcttatgtttggaaggagaaatctttagaaaaatcattgaagcaaagcctaagacattgagaaaatcccgggattatttctttttaaggacaaagatttaaatatcaggataatgttttaaggacaaagatttcactgtgcaatattctacacctcatttccaacccgtttttaagaattaaaaagctcaaaggagaactggcattaacaaattcatttaatgctagattgtttggaaaattttaatcttctattttgaaaacaagaagaatgctcttctcatttttgttttacaataatatttttcattttttaaaaatattctatcagttgtgggttaatgaatttctaggataactatttaagacctgccttaatattagttttctgttggttcttgagaaactaagatttaaggaaatatttgcttgaaaaagaaaagttttggaaagtgcttttgtaaacttacttggggattttttttttttaatcaaaaggaatcatctacagcatc

SEQ ID NO: 42384 - DNA, 3076 bp, Homo sapiens
aggcaggaacaaggaggggtagggttggtttgggccacgttgatagcagtggttcaaaatgcttttctctttcttttctgcttatttttaaagggagagggtaggcttcgctcatggttttgtatccaaagtttcagtggctctctgggaggaacttcagtggagaatcctcaggagcagaggaatgatcacagccccatggttccttctggttatttttaagattctaaccatccctgttcaggccggaatttccaggaactggctgctgcccagcgccaactggtccctcccaacctcccactccctgcagggtggggccccatgggtggaggctccttagggtggagttgggtgggtctccagtgatagggagggcactgagcagaggcagatgagaggcagtgtggcctcacgcagcccttctggatttgattatataacacttcatagaggagaattgtgagggcttaggcgaggccttgtgagatatgtacacagcaggattagacattatgggtatttttcaatttatcttgggttgcctgcccttaaaactaaaacacaaaattgtcagagagcataaacaagtgtgtaaccctagtagggaaaatgattcgagtttgctgcagtttctctaagaagggtgtggaatgccactagccagatggccttgaacttagagggtagcataggtgtgggtgtccccgcccccagccctgctttgctaggcctcagtttggaaacttgtcaggcttctgcttggttgttacctttgcacctgtccttattgacatgcaaaatcaattgcttcacttggtctttccgaagtacagggtgtgggcagaatcttatctgaagccatgtcctgtttggacaagttggacttgccttggcaactctccatagggtggagcagatgggtggaggcaggaaagtaaaattgggtggcttgttagcagagagaggagagagggtgggttgtttgctcactggatcattatatttcatctgaaatgaaataattaacttctttcccatttataatacacattaatgcaaaataactaattcatgaggggcgaagatttagaaacaccccatggaatttttctccttttcaaaccagtcatagaagagtaggacaggtgaaaatcacagagtggcatgaaaatttccaagaatgtctaggtaggaaattccaggtaggtgccagtgcttagctttgtttcagggagcctccagcttaaaaatgcctgctgacatctgttgcctgtcccctgtatttctggctagggcaactgtccttaaataatacttgagccattgggggattttgaagaatttgggtaaagaaacgaagagagaaaagtttctctggaaaggaagtttagctacagggatgttgcttgcctgcccagttttcctagccaagaattacacacacacatgcacacaccgccttttttttttttctttttttgccttaagttcctttggggagtaagggtaggggaagataacatgttttctctttgaaaaatccaaaaacttagaagagttgaaagggaggcttagcgatggtgtgttagtgtattgctccgtatgcctagccgaggtcagctgggagacggaagtttgcttggaggaaggcaggtgatttggagcctcggggtcagtcctgggttggggaagataatgcaggcaccctttgaggatctgtgggaagaaatgagggcatggagaaaggaagaaatagggagatgagaagggagaacgtcagaggcaggtcttgctctaaccccaagaaacaggaaactgctcctgatacgtacacattctctctccaccttcctcctccctcaggaaggggcaggcagttgtctgtaaggtcgtttctgtaataaatcatgctctagcctccaggcaagctgctttcagaggaggtttagtaaccccctaacctcgtcttccatgaaggactgtgtgtgtgtttctaagccctgcagctcacctgcagccccgctccccactccataaagccattgtgcataggtctcagacaccactggatagggctccaaagcaggactgcattacttctgaaacttcatgtcaatgattcaccaacccttttaatctataatcacgcagtcttgcattttgacagaaatttgacccttattttaacatctgaaaagtcagaagtgcaggtggaaagagcatgaagggaaatctgtttctcctttttgaggaccattcatttttattggcctttctctgcaaaataacacagctggggaagatggcatttgctccagttatggaaaattattttggcggtggtgatgttcctgtatatttttgcttttaagcacctcaataacttagaatttttcataaaaacaattttgcccttccccccccttttggatgcagttttgttatcctggtattgcttagtttagcattagaatgtatttctaagactagctaatgtatttctaaagctagctaagctagttaaatataatgaagatgtaaatgtgtttatgattggaaaatagtcgtcagaaaaaaatagaaccacatttagagcctcctcttctctgtgatacccacataaaatgattaatagaattcctgagcctggttaaaacccactaggtttaaagaccccgaggttggccaactggattgatttactgccggtgtcctggtctctaatgcctgttttagtgcgccacctactggttctgcttcagattgccgtcagtactgtatgatagattttctaagcatttgtggtttacttagcattctttcagaatggtaataaccccagtgcactgagccgcccatgggtaccaaagactgccaagtttagggaccctaattcttccagggcttaagttacttctcagttatgtggaaggcactttgaagactgtacagtcactcttttatgattgtagatcagaacctgtaaacaaattagtaccaatgacaaaagtggtccctgtagtcagagatatgggtgcaaagtatagaaattttttgcaaatacataaacaga

SEQ ID NO: 42385 - DNA, 2138 bp, Homo sapiens
aataaaatgatcctagatacgtgctaggaacctgaaagactttggagagatttggtaaccacattaaaaagacaaaaagaggtgaaattaattttaataatatattttatataattcaccacattaaaatattatttcgcaagtactcaatataaaaaattactagcaagatatttgacattctttttttatataatgtctttgaaatttggtgtgtgttttacacttacagcacatttcaattcaggtttgtcacttttcaagcattccatagccacatacggctagtggctaccatattacacaaacaggactagagccttaggttaataaatgacagtcctacaatgagccaacaaacttgaactctaatgcacccacgaaactttccctaatgataccaaatattgacatttctcatctctcattttcccatgtgctacccctgactcccgctcccacttcccctctcaactgaccctgctcactctgggaatggtcctgttgtaagagccatcacttagaacccacgtcctcagaaattatcccaaaggctttaggggcagagaaggaatatgtgtatctattagaagtgacatggggaagaaaaggaggacaaataaatatgaaagaaaaattaaagaggaaagagagaaatggaagagaaaagcactgggaggagaggatcaaaagggaaaagcaaaaaagagaaagaacaagggaaacacaaatagagaaaattaggatggaaggcaaagaacaagagagaaatggagagaaaaggaagggagaaaataaaatacaaggctaaacaagggagcggtaaagagaaaagagtacagacaaaaagaggaaagcctggatttctcatcctggtctaggtattattataactttattaattagttgcttagcattgctcttaggcagaattccaagacttaatcatataacaaatatccaaaaagacatgtcagcttgaggaattcccctggatttccttgtttgcatccaagccacatgccattgttgcttgcactgaatatgaacaattatacactgaatcatgcttactaagatatatttcaatacgtccagggctctgctagagccagcttataccagctcataagagccaatttttaattttcaagaattttgtgagccagttgttaaaaataatcattattaaaaatgaaatcatatatacctgcatttaaataaactatatttagggccaagtgcagtgactcgtgtgtaatcccagtactttgggaggccaaggcaggaggatcctttgaagccaggagttcaaggccagcctgggcaacatagcaagaccccgtctctacaaaaaaatttttaaatgagccaggtgtagtggcatgcccatattcctagctactcgggaggctgaggcaagaggatctctggagctgaggagtttgatgttacagtgagctatgattgtgccactgcactccagcacaagtggcacagcaagactctatctctaaaataaataaataaataaataaagctatatttaaaacaaaagtagtaaatactcagaactcatcacttcctaattatttgactgtatatttaccatcattatgttctgggagttatttttgtctactgtatctgttatggtggaaacactttacaatgaatggtatactgcacttttctttccaactccaccttcagcgatgtcatgttggtaccttgaaatcaaccatggtaggagtatttacaccataaaattggcaaacactataaattaggactttagttattgttttgttaattttctagacttacaaaagtaatgaagaaaatgttaataatttgtcaaagcattttgtttttctgcgaatctgttgttaaacatttaccagcacactacagcagctggtatcatttatatctgatttaaaaagaaagcatttatctaactcaatggtttactttttttttctttttcttttcttttttttttgttgagctggagtctagctctgccgctcaggctagagtgcaacgatgtgatcgccttccaggttcaagtgattctcatgtttcagcctcccaagtagctgagattacaggcacgcacaaccatgcccggctaa

SEQ ID NO: 42386 - DNA, 705 bp, Homo sapiens
agtcctggaagcagctacatgagtaaaagggacaaatttgcagtgggcaaaacaaaaaacaaacttgttgccaggatagtttgctttattttctttattggataggtgtggtttgggtcaaaggagaagaggaactcagccctttaaaaagagaacatctgattgggctgttacggcacagcagggaagggaaggcaggttagcaaaggtgcttgctgtctctgggcaggagcagaagtcccaggcacagacgtctgtgtatatgctacaccaaaacacacctgttgcaactggaacataatttgataacactcgcaaagccagaactggaagggactgtgccgagcaatgctctttattttagaggtggaaaaactgagttacagaagccacgtgttagttaaggttcaaagtctcgctcaattcaaaaaggctattgatctcaatttaaagcagtttccacccactctcacattaagataactttctggtttttctatgaatttaaaaatgacaggctgggtgtggtggctcacgcctgtaatcccaacactttgggaggccgaggtgggcagatcacttgaggtcaggagttcgagaccagccttgccaccatggcaaaaccctgtctctactgaaaacacaaaaattagccgggtgtggtggcacgcacctgtaatcccagctactcaagaggctgaggca

SEQ ID NO: 42387 - DNA, 2129 bp, Homo sapiens
aaaagaagaagggatggagtgagagaggagaaaatctgccttaaacacatcgctcagaaagaatcactatttttaaattgtatttcctccgacttttatagaaaatacaaaattgtttacaaaactagttaatactataaacactgcgcttcctccgcatctgagttcatattaagccatatttgaggaaggccttcatatgtggccttccctccatgtcaacgaatcctcatttttaagggctacaacatattcgatgtctgaagttactgtagcttacttcaccaatcttactgggggacattgagattgtctccggcttccccccgcagaaacaactacaacaaacatccttgtacatacatatttgcccatttgactgcctacttaggacaaattcacaaatgtggaattcctaggccaaagctaatacatcggagttttaacccacagctccaaactggccttctggaaagtgggttttcgttgtttgtttggggtttgtttgttttaaatctatcacactcccaccgacagggcaagggagtgctgcttaacgcagaatcaggagatcaaactttagctgaatttgagcgacctcttcccagtgacacggcggggggttttccaagcccttttaaggaaaggaaagggatctggcgaaccccgagacccacccgccctgggctggagaggcggcgcgctctggctttccgcgctggcacaggggtgggacaagccaagtttccaggagactcgcccagcgcgggcccggccctcgcagcgtgggggtggccgggcgtccccgcggcgctcctcgtggggcggggcgcaggcggggcggggccccctctccagccgcccgccctccggccgcgtccccgccggccctgcagacgtggcggggcgggacccgctgggcactcccgcgcgtactcggccgcctgagcggtaagagccccgggcactcggtccccatccccttccccggggggcgggcgagcgcgggggcggctgcccgggggtggtgggaacaccataccttggcgcctcgtccgggacccacgaatcctgccctctgcgttagtgagaagcagtggtcagggaggacccggctctggggtgagggtctggggcggcgcggccgagggacctgcgtgggtgcgggcgtgtgagtgtgtgtgtgtgagtgtgtgtcgctccgggtccacgctcatgcacacacccacacgcccacactcagggtctgccccctcggcctgcgtgaacctccgcggagcctgcctggatctcccaaagtatccagtcctggcaccaagcaagtctggaaaagtgcccccaatggctcggggccaagtcagaggtgggctgcagggtcccccagcccgggcacgaagggagcaggtccctgtaagacagaggcctcgtcccagggtgcgcctgccctcggccttggcacagggagctcaggccttgacctccccgctcccctcgccttactcctcccccaacagccgacccacgccctgcctgctcttccagtccagccaacactctaagcaggcaccgcctccactcgcagcccccgggatgggtcccactccctaccgcagatccccaggccccctccacccagtcggctagccctcgcctctgccatccggtgagtatttccaggcacctcagaccaggcgcctgaacgtcactgccttttcttaagtaggaagacatctctctatgggctgtgagagcattacctatgccctactgatcccatcatttcccatcctaaacatcttgaaggacacaggcaggtggcttcttaaatcagtgtgctctgaactccctgtgacctcagccaacctgtgacaactgagaatgagacaggctctatcctcagagcctctttttgccctctctgcagcctagtggctccttccctaccccacccataggcctgcgtccccgccctcctttcttccatcaagcctgagcttgggaaagaatctgataaacttcttacattgtaacctttaagtgaaggaatgagacgttagggatggatttgaggcacaagtgagacagtgcagaaggaatttgagggttggagggggctttcttgaatctga

SEQ ID NO: 42388 - DNA, 1417 bp, Homo sapiens
cgtgtcacatagtatatgctgaactattttaggatacttcatgaacaagataacaacacatgagggcaaggcttgtacatttaggcatccataatggtttttatttacccataagtgtttatcacagccagatttactctgatgttcctgcttatagaaaactgaaatattttgggacttcctaataatccagattaataataaggattttcaaattaccttacaaagaaataaaaatatcagacaatgtctaccatctaccgatttaaaaaaatgagaataaaagtgatggcaaggtatcatttattcatgaacccattctcctcattgttgtgtccatacgactcatgtgaggataataaattaagacagggaaatctttaggccatggcaatcaagcaaagtcctaggccatgggtaagcagacattttcggaaaccggccagatagtaaatattttaggctttgtgactttgcagcccatatggcctgtgttgcaatgactcagctccgctattgtagtgccagagaaaccatgacggtcccatatgtaaacaaagggtgtatctctggtccaataaaactgtgtttaccaaaacaggcagaggacaagagttggccagcagactggtttgccaacaccctgtcctaggctagtcctgattcagagagaggttttcacaaagattttgtaaacttccaaatgacaacagcctttttagcagcccccatcaattctactcacctcccataaaccacccacaatactaccccttctctatacagtgggtttctatcgttctttactatttcagctaggcttgaacctggctccttgacagcccacggccaaccttgaatatcctaaactttgtataccagctcaagggaagtctgcattcgttgccattcttacatgtagacttgtttacaggaatattatcactgaattcaaggtctggcagatatttttgcttacacaaatacattctaactcaattaactgggaggtgaaggaaaaaagaaagacaatacggaaatgtcaagtcatttggaaccatctgctgtaagagagctcctgagtgtctgtacacaaatattaatctaactcaacaggcatatttgttgagcttcctactatgcacaggaagccatgccaagtactatgtagaatatgaatacaaaacaaggaaggtctttgtctttatagaatttacaaatcataggaaaaactgaagcaactctaatcaaagaggactttaactgtctaaagtaagataaacacaaaatgccctcagaagggttcagaaggaaaatgttcaacctggaggaacaaagaatggaggaggcggttattttaactgggtcttcaatgtgcaaaagaacaacatatggaactaacagcccccgagggtct

SEQ ID NO: 42389 - DNA, 2839 bp, Homo sapiens
taacatttatttccatttgctagtcaattaccagctgtcagaacataataaatattataaatttgagtcagaagctgtcacctctaattgtattaactcttcctaatcataggtagtgatttgtcctgtgaaagaatgatattaatcactgatttccatctgtcttcataatggtgtaaaattgctactggattccattgctgaagtgaagtaaatcaatgtagacaccaaaaatgaaagcaggcagtgatgagtcatgaatatttccattcatgttaacaagcttctcattgtttccagacagaaagaaaaaaaaaatgacagctaactttcaaagctttttgcttcttagtcttaaaagcatagtttcttcttattatttctagctcacacttttggagtacttcttatatgccaggcactatgctcgcaacattatatgaattatttcttttgatcttcacgaaccggtgaggttattggttcctatacttatggctcttatgccactattgtttgcattttataatgaggaaatgaaggcttaaaacaatttgagtaacttgttgtccaaaacagtagagcctggagtcaaacccaagcaatttaacttccataactcagtctcaaccagtactctacactgatgggtggcatttgaatcagttaggaatgcttttgagtcaaagtaactaaaatccaacatatagtagttcacaaaatagtgattttttttctctcacttaatacaaagaatggagataggcagctacttatgttggtttagtagctcagcggagccaggaccagtgactgagactccttggcctttcccttgaggcagcaaaaatgactgcttcaatttgaagcttcaggtccacattcagggcagaaaaaagagaaggggaaagagtgggcactcgctgtaactataatgtatcatgaaagcaaaaacttttccatttatatatctcattggttgaaaactgtttcatatggccatccttatctgcaagggtagaaaataacaagggaggctgggcatggtggctcacacctgtattcctagcactttgggaggccaagggggcggatcatgaggtcaagagatcaagaccatcctggccaaaatggtgaaacctcgtctctactaaaatagaaaaaatcagccaggcgtggtggtgcgcaactgtagtctcagctacttgggaggctgaggcaggagaatggcgtgaacccgggaggtggagcttgcagtgagctgagatcgcaccactgcactccagcctggtgacagagcaagactccgtctcaaaaaaaaaaacaaaaaaaaacagcaagggagttgggagttggggatgactaatggaccagctgtgagtcaaaagttatggaatctacaaactctgtaggaattttccactgcctccttactttctttctgcccgcccttccttctttccttccttccttcttctcttttgagtaaaaaagagctatgattctccatacaggtaactcatagaatatttattcttgccttgttttctagaatgtgttcccagatagaaagagaaagctgtggttccctacttgagttaggactcattggttgcaagtaacagaaacacgcatacctgagaaaatggatgagtttcagccatttattcaacaaatatttattaagcattcattatattccaagcactcttctaagctctgagagtatatcagtgaataaaacatttaaaaaaatgaacaagaatatgagagaatctcatagaacccaaagatcagaaagcagcagggccttcagagggacagaaaccagggactgagaagctgtcaggaatccaaacagcagctctaagccagtctccattctgctcactctgccttctcttaattcttagtctgcgtggtggatataacagggtcatccacatagcctgagttttcaacttctgttcatgcacacagttcacactgaaccacagtctctcagttccaattccaaaaacctaggcaaacgaattggaatccactgaggtcagggacagtcttatccctgtgttataggagtcactatgagtgaagcagggcaccttgaatcaaaggtttctaccttgcaagccttcctgtcactactgcccatccatcgccaggtgtattgacgctttttagacactttgcccatcatccatgccaaagcacctgcctactgccccagagtttaaaagttaactctaccttgaagagcacattttttaagccctgtaagaattgcctgggtccagatcattttgaactttttcaaatccctcttgtgccctcatgcgtatctttttcccatgcagccttttccctgtcttctaaataataagagagaatcgaggctcagttaacatcaaactcccttctcacttcaaaccaagccttcagaagccaacatcagcactaatcaatttggttccaaagtacacattgcagtgtggtttgggatattcttttatgacccttataaactataagccaattagatacggttgttggtgattcttttccaaacctcctctttgtttcaaaccaataggtgtttttccattcagagatatactgaatttctgacctgtggctaatttgtttttctccaggctgtggattcccctccaagtggaggaggatgggcaggctggggatcctggggcaaatctctgctgtcgtcagcatctgccacagtaggtaagcattgtatgttgcattggaatagacaaagtaccaaagcctaataggataggacgttttgatcgtactgtatactaatagagtttaacattag

SEQ ID NO: 42390 - DNA, 1366 bp, Homo sapiens
tgaaaaactgcagttagaatagttagaactgttgagagttggcaggagaataacaggagaatagaaacaattgaaaaatggtaatctcttggaatgagcactgtaccatgagtcataagacctgagacctggtcctgaatgctgctaacttgtgatcacaaggcactgttactaactagctacactgtgcccttaacctaagactcaggttctttgtatggaaaaacgtgggtgaaaaaactggagaaattctaaggtctcttccaacttccagaatatgttgataccatatcctgtgtctatgcatagaaggagaaagatatttgtgcccactgtgctaagtggaaaaatacagaaaattaattgaaattatgtctactctatttttatattttatcttttgcctcaatactctttcactctgaggttaagggaaaatgagaaaaagtgaccttcctaatgcttatacaaaatcaaacatttttcagccaacaattattttggagaggacttaactcttgcattaggctcaactacagctacactgtcatcacattcttagaagatttgatcacctgtcacccatgcctttggacaagtttgtgaaatgaagtaagcttggttattatttccaggcagacacaagaatagaaaacattttagaaaagagggtttttggggaggctgaggcaggtaaatcaacttgaggtcaggagttcaagaccagcctggccaacatggcaaaaccccatctctactaaaaaaaaaaaatacaaaaattagctgagtgtggtgacatgcccctgtagtaccagctgcttggaggctgcgacagaagaatcgcttgagcctgggagatggaggttgcagtgagccaagattgcaccactgcactccagcctgggcaacagaacaagactctgtttcaaaaaaaaaaaaagaaagaaaaaagaaaagagggttttgatagtagttccaaatcccacaggatcttatagacctgacttgcttccaaaatgtattactaggctaagagtgatagaccagtagtcaaaatgaaagtcaacaatgctaaaacatgtataagtatacaaaaggaagagctctatagtagaatacagtaatttatttctagataccaccaaaggcttaaatgtttatttgaaattctagttttgacagttttatgagtttaaacatcttatgcaagagtacctgaggttgggggttggtgtgtacggaatgtacctgatatgtatatttactttttccaaaattatcattgttccccttactcatcctctcccaaggtacatagttttttccttctgcacattttaatgaaactcttctagcagcccggtca

SEQ ID NO: 42391 - DNA, 1079 bp, Homo sapiens
aatgtttacatttcagggttttctaggtagtgtataaggacaggtgatttccattggacataattccttctacatttgtcaaatatcagtgccttgttaatgctaagatcactaggataaataaggttacaactgctaaaatgctactctttaggtttgggagtcatccatgtgttcccctttcttattcaggaaatgggcaattggttattttaacagtgccttctaagactaggtggttctagttagctctcaaattctgttgggacttgggacgtttttcctcatattactgccttgtgttttagcaacctgaggtcacccaggtcccgagagaaatctttcattttctccgtgagtgctcgggggatggggagttctgtgatgatggcagcctgtgctgtttctccttcaagaagtcagacagccactttggaccatccgtaggctattcattccttcaacagtttgacaactcagaaaagctatagctcatcgtgaaggcctcaaagggaggaaaatctctccagaataaaatgtagacaagactatgtccgtatcaggtcaaaggttggggtttttccctgtgggtaggaaggtcagctctgtatttaccaaatagttattgaataaccgctctgcctggctcagggaacaagggtattatccctgcttagatggagtaaaacctgtgctcttcgcctgcctgactgctgttaaggttgatttatatcattattaagacaactgtcggggctgttgggtggccttcctggtttctccactgacttgccttttgatttttggatgtcagctccaggaccttcactctccatgcctaaaggaaggcctaatgctttaaagaaacattctgaggctcaggtgatttcaatccaaccaatattaattgatcatctgcaatgtgctaagcctgcaaggaatcaaaaaaatgaatgaagaatatcttccataaggagcttacaaaagagtaaagaggatgagacaggtacactatacaaagactgtgttgagcttagaattccaggttgatagctaggtggtgtgagaagcaaaagcaa

SEQ ID NO: 42392 - DNA, 739 bp, Homo sapiens
aagtttctttagaggccatgatcattaattacttaaaactgcatgatgtttttccattctctctctctctctttctttcttctttttagcaagcagtggtttacataggtactcacttatccaggtgggtgaggaaaagggcagaatgaggaggtgagatgagtaatttctttatctctgatgggggtcactgattctggcaggtcagtgacttgaacacagtgggaagttgcctcattcatctccgtgcagcatctgccactgctcagagggggcatgtggtggctctgagattccactggcttatttgcttagggttaaatctttgtctgtaatagaggacacactgaggacagttttgctgggttttctctccccagatcttcttgctgttaacttaccattcaacactctgatatttttaactttggcgtgtaagatttaacgtgggaagtaagtttagtgtaagccccaaaacaacttttacttaagcaaacagcttaaactataatgataaaattggagtgagtctgccccttcgttctaaattcagggaataacaggcaggggaggaggtttctgattgtttaatttagccatgattttgcagggcacagagtgcgtaaactgcactcatgtgaaattaaactagacacagagcagcaccagacctttccagcagcgcttctcttctcccccttgagggtggaagacctgtcatgaatcaagaaacgcagag

SEQ ID NO: 42393 - DNA, 3543 bp, Homo sapiens
ctcgatctcctgagctcatgtgatctccccacttcagcctcccaaaatgctgggattacaggcgtgagccaccacacctggcctatttttttttcttagaccctgaaaataatctgaattattctaccctttgaacattttacctttaccaatgattaaattattataccccaaacagtaggaaatgtattaatggtatttctgctatttctggtgtctggggtcatcatagactgggaatagaagctgattagggaggatcagaattttgtgttgagatttaaactacatttacctttgcatcagagtgaatttttctctgcctgagctgtcagccaaaaagcaattggattatatcagcctgtggtcactgctgactcacttgacaggcttgtctcttgtattagtctcaaaggaattctatattgcaaaagaagaatatgtttatttcttaaatgccttcactgagtgcagaagtttagggtgatccagagatgttctatttcccggccctgggtttcaccgtcaggcttggaagctgccacttggaaggaaaagcaagcacagaagccaaggccagatggatgaaagcttggcaaaaaacaaggctgagcttctgcctctgagtctctgccatctttatcctttttctctctcaggattttattttttttttggcaatcaccaagtacctgtctccaggatcagcttttaacatcctgcccctcttttccatatctcttatttcccttctcttcctctacatttttttgtcttatttccccattaaccagaaaacaattcatacaaaagattcggtcataatcaccaacatgcatttattgtgtgctgggcactgtgctgagtattttatttgcattatcccgcttcatctccgtaatcaccctattaggtagatattatcatgtccctgcacaaatgagaacattgagacccagagacattatctaccttgtccagaattacacaactagtaaaaaaaaaaaaaaaaaaagagccaggattcaaactcaggtcagttcagcctgactagctagcgagcatttttaactattagacagagcctcccaacaaaacgaatgtaacatggttatttttagagacacctgcacgctcagattagctctaaggtagatttgagctgtgaggtagatttgtagctgaaagatttggttgtcaactttggttgtttccatgcaactgagaacaaactgagactaaagagacacagaatgcagccacatgaggttatttggcctctgggtggttctcaccacaggcctcttcatcatttcacagacgtttacatcaagcagtttcctggtcatcatcgactcagcatcctgtctcacaggtgactttgatatcacaaaaacgtctccatttccttctcccttccccttctctggtgccaaggaagcccatttgtacataaccaccttcctgaaaatccttaaccctctcctaccttcccaaagcgtggggtttgtttacttatctagacagcctttaagctgaatcttcagtaccaagctctgtgagacactgattgatgtttaaagaagtactgaataatgcctttctacccctgaacttgtttcctgttaagctcaggaactaatgatcatggtggtggtgatagtgatgtgatgatgatggcatacttactgatcagtcgctatgtttgagacacaaagtacacagtctctacctctacaatctcatttaatcctccatatcaaccttaggagatagctactattattatcatttccattttacagatggaaaatgaagctcagagagattgagtgatctgcctatgattatccgactaagaattagaaaagctgggatttatatccaagcagtatgtagaatgctaaacatagccatggagaagcagatacccagtcataaagaagaaaatttgctcattttttcctgggtctgagttcccttctttcagctaatatttggcctccccctccctgctctctgtcctgtggcctcaagcagagacaaattgctccacaaatctttctgtcagagagccaaccacatttctcctgccagcacccctgatcccaggagaaaatgagtgccctatgtgccctggtctccctcatgttataaaccttgtatgttgagtgattcatttctcattgaaaaatatgatcgcctttcgacatttctgcaggagagctctagtcaactctccttgggaaaaaaattccactggtaggaagtgataaaggacaagaacccaaatgatgaactgcaggacagaaagaccccggccatttctctgtcagaaaaaatcatttgttcccacagggtatcttgatcaggaaggcttctcccccagacatccgcgcggcttcctccctcgcttcttgaaggtgtttattcaaaaaccaccttctaaataaaccacctttcccaccttcgtatttttttctcttcaggacataccactgtctaacatcctttatatcctaccgatttttctgttatctgccttgcacgaggatgtagattccaggaaaggagggatttttctgtgttctgtttgttaccatattcctaacacccacagcagtgcttggcaaatagtcggtgctcaataatgatttgttgaattaacaaataggtcaaagtcttctgtgtataatctgtaaacgctgaatgagagaacggaaatagctgtactatagggtaatttgtgggaaaatatctggttgagttacattaggaaatgttaactgtgaagtaatggtgctcattttaatggtatttggtggtatagcattaatgattatgattggggagcttagaaatgagtaagctttttcccagtaaaattaatacgatgtactctttttttactttgaagaatttgctgtttgaggggtctttcaagattcttcagggtaaggtagactgcagtgaaaattcagaagccctgaagaagttaatggtggtgcacaaatactctggaatattatgcaacagtaaaaacaaatgaaaagaatggaatagatccctgtagtgacagctccaagatgtgtaattgagtgaaaaaaaaaagaagctgtagtatgatatttgtctacaataacatctttgtacacacacacacacacacacacacacacccctagaagatccggaaggatacacatgaaactgttaacattgcttataaccagaagtgaaagggggtgccataggtgggggaaaacatcagaatttcacaataatcaaaagggactgcaatgttatttgcaataattatgtttgtataatgaaatatattaatggaatacttatgtaactaaatttttagaaatcaaaacaggaagcaaaagaaattgcttctgatcagggaggtaagaggatagggccctgccagagacagaaagtgtaaaaacacacagattgtttttcactagaagagccagaagtgtccatgagagtgtctaaatgatttgaatttatttgtcatcgatgtgcctgtaa

SEQ ID NO: 42394 - DNA, 3416 bp, Homo sapiens
gtatgaaaagggctatgggggctgagaacgtgtttatttgagaggtttggtgattctgagaatcaggaaaagccatcttcaaaaccctgctcaaaagcctgccctaattcctcccaactggaagtgatcctattggcttgtaaattctcagcaggaagcatgcatcctgcaattgacacttagcttaccgtattgtgtccagtattttcaccagtggtgtacacatcctgtctcctctgccagagtgtaaattctctgtaggcagagtaggccatctacatctttgcgtgcgtcacagtatctgttaaaagtcgattattttaatgaatcggcgaaattagcttcctgaaagctgccacaatttaactggactcgaagctttatgtttgctttttgcaagccaagttctcattgatttctaagtcattggtcagaacataagaggtggtgtgtagggaaacaataatttggcttctgagaaattgcataatatccatacctcacagggtgtaatgccccttcactaccgctgaaaaatcccagacctgagtttgactcacctattatttagggatacacagaccagaaaaagtgagactactgtaattccgtttgcgaaatcttcaatctctaaattttacaattagaatctcaatttgtgatctagagaaaaaataatcgaataccagaaaaaaaaacctctgtgtgctggaatattcatgcctgttagattgcttatgtaggaagggaaaaatatcttttcctcctacccttttaaattcagagctgaatcctttataataaaagattaaccagagaaaaacatagtggtttatttaaacaagttctacgtaacacaagggccatcctcaggaagtgaagatcagaggaaacagttacacttgagtgtttttagtagtaggtttgatgaagaatggagagacacttgcagaaatatgatcaggcaaaaagagtactagatctaataggaataaatggagggaaacttagcagagcccgtttgttcagattctcctctgggtccctgtgtcttgggagatagggaactgcctttcctctgtggatacaggaagagcacctctcacatgagggtcctatgatgtgttttagaggaaggtcagcaaaggttttattacctgcttccggggagaaaggtggcaaaggaaggtcagagtaatatttccacttaaaatttgccattttctcaaatccttcagcttaaaaaattcagtttgccaaggtgccatattttggggcagcgtgtcctcaaccccatcactgattattaaatctgaccctgcagttaatcctgtaaatcaactcagataagcaactgtagccatataatgatggccaggagattaagttccaccttaactctggaaaagcatgtttatattttaatgtcaagagctgccctcttgtctatatgtgcttttttattgttattagtaactataattatgcttgacattaacaatggctataacaaatatgaaagccaaaagaatcaaaggaaacgttttgctattaaagtacttaagtattttatttaaattcgttttattggtatctttgatttttttttttttttttttttgagacagagtcttgctctgcaccaggctgtaatgcagtggcgtgatcttggttcactgcaaactctgcctgccaggttcaagtgattctcctgcctcagcctcctgaggagctgggactacaggcgcgcaccaccacacccagctaatttttgtgtttttagtagagacagggtttcaccatgttggccaggatggtctcgatcccttgacctcatgatcctcccacctcagaatcccaaagtgctgggattacaggcatgagccactgcgcctggcctctttgaatttttttaaaaacatcctggtgctaaaaggcagcaagattcataaatgcaaacaaacatataaataaacaaccaggccctcttcccttttaaataatctgtgaaataaaaataatctatctgcataggaaacaattatcaaatcagcatctacaatgtggcccaataaaagaaagggttttcatatttgatcctgtttttggttcctcaaaattaaaaacttggctccactctgtgctgtataatgatagattttttttaagaagagagagagtgggaattctcttgctgtttccatgggtttcatcatctttttttccatgactcataatggcttcttgcaaacactcttgttcccttgatctcatggagcgaatgaatgctcttaagctagttttcatcaaccagtcagcattcctcctgctttccaactgtgcatcctcagctggacacaaacattttccagtctactcattcacaaaataaacttctgagtattcttcaaagggctcggtccaacttgcccggggatattctgaagatttaaataaaagcaagaaaatattattcacacaaaaattttgttaagtgttacttgaattagaatgggcagaaaacaattttaaaaccgtttgttaaaactatggcttataagaccaccaaaaaatgttctcaagtctctgattcagggctctttcagggcaacctgaccgcctcagcctcccaaagtactgggattacaggcgtgagccaccacacccttccatgacttcttttcctttgggtagatacccagtagtgggattgctaaatggaacagtagttctatttttagttttttgagaaatctccatactgttttctgtagtggctatactagtttacattcctaccagcagtgtataagagttcccaaagttgggacagttattctcccttttcagggtgaccccaggactgattctgtgttacgccatgacaccccccattatatccctaagaagacattgtgctcagtgataacaaacttctcagcctaggaccaaggaaacctagagtctccactaacctctgctgctacagcatgtttggtttattttctatatctatcaaatgaaagtgtaagtgttcatgccagtttctttcaattataacattccatgattctaacacagagacatagaaattgggatttattcatttactcaacaaatccttattgaacatctaaacgctaggcatcatgtcctctgaaggaggagtctctctatcgtgctccccaagtccctctcttcacatgtgaacacctttatcatgttacttgagtctttattggaattagggcttctctaatctgactcctccattgactacattgttgtttttgccaatgagtaggattctcaacatacagtaggtggtcaaaaatcatttggtgaatgaacaaagaaagaggaactcttcagatgcaaagataagcatcccagaatgaacaaccagaatgagaggt

SEQ ID NO: 42395 - DNA, 749 bp, Homo sapiens
ctcccaaagtgctgggattacaggcgtgagccactgcacctggcctgtctactgactttctaagcccaccctgtgtacactcttctttgcatacaaaagacagctagtacttatgcaccttagcagaatgtataccatgtttatactcttggtatgaactgcctttgtggggttcataacctgggtgtcccctttacaggaacccagatgtacactaaataggcattaagcattcatttagagaggtggctaagtagaaaaagggcagaggtggattaggatggcggcgctcagcctccccaagactattccacgctcttcagctgccaggcttgcattcctcacgcagcaaaataaaagcatgaagttaaatagcagagaacactggcagtgccagcaacgatcaggatgggtccaaagaccaaggtgtcattgggcactgataaagctatggaaacagaaccaacttcatattgcaataacacaagacacatgatggggaccagaccagccagtgcagccaccagcatgatctcagaagagtgtatctcctagggtcctgtgctgcccacccatccctgcagccttcttagagaggagcaaggggaaacagacagaaatctggggggaacatcgaggaacagtttaaattattatctcagagtaaatttgccagactggatcacatttagtttgaccccctgatggagaaggcttttactcccaccaaagtacaaagttggttgttg

SEQ ID NO: 42396 - DNA, 846 bp, Homo sapiens
aaattaaaatgaatgtgatcactattgccacaaataatttaaggagggctgtttttgtcatgtctcttcacatgacacaaatgtgttcccttgcagtacattcatggtatgttgcttcctgctttaagtttatctctgcagcactttaggttaatgcagttcacctcatactcacttccttttgagtaagacttaaaaaaaaaaaaaggtcttgaactgagacttcacttttgagtcacttcccattaaaaaaaaaaactaccccccaaataagcactttcagaccatttatttgtctttctaagcaagaaaggtaaataaatgatctcaagaagcaaggggatcttctccccacccaatttataaatataaacccacagtatactcacaaaaataaaacggtgggctgggcgaagtggctcacatctgtaatcccagcactttgggaggccaaggcagaaggatcacttgagttcaggagtttgagtccagactggtcaatagagcaagccctcctctctacaaaaataattttaatatagctaggtgtggtggtgcactcctgtagtcccagctactcaggaagctgaggatcacttgaacccagaaatttgagactgcagtgagccatgacaggccactgcactccagcctgggtgacagagtgagatcccttctcaagagagaaagaaataaaagggtgaatgtcagtcatgtctaggttgcatgcacatgactcattcatttacttattaaatgattgtcgatcctgtttggtgccaggtgctgtgctgaattctggtgttcagaaaatagtacatctagaagatagaaacattttaacca

SEQ ID NO: 42397 - DNA, 4009 bp, Homo sapiens
ttccagtgggagcatagagataaataaacagatgtatatgtcaggtggtgctcagtgctgagaagtgaggagttggggggcgggttacaggtttacatggatagtcaggaaaagtgacatgatggaggagggagttagctgtgagaacagctaagagcctgctagacagaggaacatgtgaaggctgcatgggcaagcacttggcctgttggcagaagaggaaggaatccagtgtctgggagtagcatgagagcccatggaggcagccagatcacaggggatgttttatttaattgtttttactgggctgatggagcaaatgagctgaaaatacagatcagtaaataaaataagtttcaggatagaacaaacaatatatttcaccaggaaaaataaaagatcatgtatgggaatgcctatttctttctttctttattattattattattattatttagatggagtctcactctgtcaccaggctggagtgcaatggcacaatcttggctcaccgcagtctccacctccctggttcaagtgattcccctgcctcagcctcccgagtagctgggattacaggcacgtgccaccataaccagctaatttttatatttttagtagagacggggtttcaccatgttggccagaatggtctcggatctcctgacctcgtgatccacctgccttggcctcccaaagtgctgggattacaggcattagtcaccacgcctggccgggaatgcctatttcttaaatcaggaatttttactgcaattgttatctgattagattgcaatgcttttctagtctttctcattataaacctgaaagaaaaatgctgaactaaaaatccaagactgaacaagtaactatgagcagggaagaaaaaaaaaacaactatgagaagaatgtcattgcggttaatgtacacaaaggtaaacactgaaaaatccaataagggctgaaacgtagtaccaaattccaaaaattcaagcagtgggtttgtttacacaattgtcttttgtgtttaaaaacaaagttactgaggtcatttttatctatgggcgtaggtgtcatggcacaggaggtggagggtgtctcttccacatagctccgataaaaaatgtatcctgtactttgtggttggaaccctccttgggagagtttgtgatgtatcttcttcctgactgtaacaatcttaaattgtcccatccgcttccctttgaactagctgtccatgtgagtacttcattcttttacatcatattgttttttcctaaccacttccccaagtggaagtgcacaaaacatccctaaatagatctcccagccaccccaggctaccacaatttggttatgttatttgattatcagtcttctggaccacttgctttgcttgcattgggtttttattacggagacaaactgaagagctcctgaacaaatgtcatctgggggggaatgaccacattcaaccatcacggacggagagcatacagctaactcagagtagcaaacactaatctacgaataatgaacataggcattattttaagaaccaaaagaaagcacgtgggcatttggtttacacatcactcagagacaaagtaaggaaatccctcccttcctaatgcatcatgagctacggggggcagggaccatagctgttttgctcaaacctgatgatgaattaatatgtaaagtactttagtgttttcataaggcgccaaataaattagttgttattctcacgacctagcatataggagttcaatgttgggtagaggaatgaataaagaacctactttttctgattcttattattccaccactggaaaacaatgattatggtcacagtgctgaggatcataatttcgatgccacaaacccaccacctagagcacactaattatcagattattgcaaggggaatggttactgaggctggagaagggaggcgagtcttagtgagttccctttaagctctgagacaacagaggccgcctctctcacggccttccagccctgcagagggacctcttcctaacttccacccccaggaattcccctaaccccagtttcaaggggcggggaacaaccagaatctttgtcaggtcctctacgccacgccccctcctcgccagagccccgcccagcctgacgtccccttcccccactagctcctcttgccacagacgctcccgttcccccacccccttccccggctcgggccgtccccacgccgcgcaggagagcaaagaaacccccggcggggcagtggcggccgcggcctctccgggcgcgcgacccggcgagggggcggggcctggcgggagggggcggggcgggcagccgactgcgccgcgccgggactgacgggctaaccggtcccctacccccacctactcgcccgccccctccggggccacccggggactctgaccccccggcctggcgccgcctgacggagcgggagtggctcgctccgggccggccggcgccggggatgaggctgcccggacagggtctaggggcgcgcgaggggccgagcatcccactcagctcgccggccccggcccccgcctcccccgctcctcccgcctggccgccccggcccgccgtgacccacggccgcctccggagcccgacgcggtaagtgcgacttccttctcggcatcggggagggggccgcctcgggcagggcccgcttcccgcccccacgcgactctcacgccccgctgcggcctcccggagcgcgcggggcgcgaagacgctgcccctcccggaggcggctgcgaggccctcgggtccggaggggctgggccgggcgggggcctccgcacaccgcgcccggggctcgaaccccggcccggcctccccgctgcgcacccccgagcgccggagccggcgcccgggccgccctggagttgtggaaagttgtggacgcggtgctggtggccggcagtgaggagcggactgcggtgcacccgttgctgctttcccggactgtccctgccaataaaacaaactggaaaccatttcggattttttttttcctctccttattacttgcaggcaattttgacctaagtttttaagcttttcttttaaataataccctcgcccccggagtgtggagaataagacggggacttcattttcccgagacccggcgtgcctggtgaaacttttgcatttaggcatttatttcagtgcatgctctgggatcagaagctggcggtaaaagtttgctatgtcagagagtaaagcgttactgtcgttttttatcgcttcatttcattttcaaaaatattcttcagtagtcgacaagttcacagaattcaaaaggtacaaaaggggcagacaggctcaccccacccacccctgcaccctcccaatattctgtttctggtgtcttcttccagaggttagatgtgcggatgcccctcctgcttgctttgaaaaatgagctgctgttatgtgcctggcatctgctggtgctaaataaatgttgattctccttcctgttaggaaacagtttaataactctttttggttattagacctctggcggcaaaaaaccaatcatgacttttttttttttttctggttttcagcatttacagatttgactgcattgtgaatgtgtatgtcctattggcttgttatgacttatgtgaatacttttacacaaagatgaatacactgacgttgttgggtaattgggcagggagggcagaatcaacatgaaattgtaagaagatgcaatatgtacaatatatagttccagaaactatatatttgaagcaatctagcgaccatgtagtaccataggataaaacaaactaaatgggaaaattgaggtagagcaggaaaagaagaacacaaagtcaagaaaaaagataataccaagttcctatttaaaagatcctgtactagagatgagtcacagtttgggccttgggcttcctgggagctaggtaaaaagagaaaaaggaacaacataagt

SEQ ID NO: 42398 - DNA, 1344 bp, Homo sapiens
gtagactgtttcaacactttcagacgcttgggtaaaagatgcactttcatgctataaataatgcagcacaaatactgtacaacagggctttatacttggggaaaagctgccagatccaaactctaaaggaaaactattggagctcatttttcctgcccacgttagctagcacattttgttgacattgaaaaaaaaaaaagattttggtgaaactgaaaaaaaaaaagcaccaacaaccctaccttgaaataaactattgtacctcttatgcctcctcccttctaccccagaaacctggaagaaaaaaagatatacccgagctcgtccaacccctctttgcgtggactgtataggagtatttagcccatcctgcctcctttaatctaacattctgcgtcttctttccttcagcttctcggcgccccctttggccagcactgacatcttagtcatcgcggtccaaaatttacgcacgcgcctttgagggctcacagagcccgtctctcccggacgaatctcatccaatcagagccagccaggaagccgaggctcagcaaggcctcgcgacgcccaacttcccagggttagcgtctctgatgtcatgtgattccaccctccgcctctcacccaccctcgcagagggcggtgcgcttggcccggcccctcgaggcaccgcctttcaattagcactcgctgattggtcgctgctcgcgcggtctcctgggtgacgggaacgcggtagcctgcttggtggagaccgggtgcgcctgcgtacttcatagttcgcgtagcggctcgagcgtggagatgaaggtaaataacttacaaattcccggggtggggcgggaaaacgcgactactggcccttggtcgcttttaaaagaggatatctgtccctctcccttctgagttcgttggaaatgaggaagagagagagagagagaggtggccagagagagcgggggcgaagctgaagggacgagagaaaggaaagaaaataggaggagaggagagggcggagagagaggcctctcgttttggggactgcagacgccgtagaagcggtgcagaaagtgggaacccctccctggccgaaatgagcggactggatctaaagataccccagcttcgcacgcggaaagaactggtcgagttaacgcgtttggagggtcgctgtgaagttgactgggtccgatgtcacgagctacctcatttcttggggctaagcctctggcaagccgcgcagctgcccagcgccttaaaaagaatgaaaagcctcctaaagaataacttcaaaatgtattacctgtgaccagtccaatcacctgctagcgagtgtacatt

SEQ ID NO: 42399 - DNA, 983 bp, Homo sapiens
aaaggaagaaagcttaagtgttttttcattacttgtaaatgacaattacaggttaagaaatgttttagacagtttatctggggcacgctattagatgacatgtagtctgaaaattgcctaacatgtggcaagtggaacattctgattaagcttatgttcttacatcccaggttttctgatgcttgggaaatgtgcaggattctgaatgatgaggctgcctggaatgagttggccagagcttgtctacatcacatggaagtggagtttgcaatccgtgtttatcggagaattggaaatgttggcatagtgatgtccttggaacaaataaaggtaaacagcatgttatagaattatcaagttaaaatttaaatgctattttaagttaaatgcagtctaaattttttgcatttaatcttacctcttaaacaagtgaatcgatagaacgttaccacttcctactgatcaaagtccttaaaaaaaaaaaaaagttaaactcttgcattttttttctcatcagaattgcttttatttgtagggaatagaggactacaatcttttggcaggacaccttgccatgtttaccaacgattataacctggctcaggacttgtaccttgcatccagctgtcctattgctgccctggaggtatggcagcaagtaagaatggaaattgtgtaagaggtatccagtggggaaatgggggaaaaaaaaatggggccgggtgcagccgctcacgcctctaattccagcactttgggaggccaaggtggatggatcgcctgaggtcagaagtcctagaccagcctgaccaatatgatgaaacctcatctcagctaaaaatacaaaaattagccggacgtggtggcatgtgcctgtaatcccagctactcaggaggctgagacaggagaactgcttgaacctgggaggtggaggttgcagtgagcctgtaatcccagctactgtaatctcctgccccagcag

SEQ ID NO: 42400 - DNA, 1170 bp, Homo sapiens
gaacaatcacaatattgttctctcacaataatacttatcaagagcccattgtatgccagacactaagataagcactgatgtaacaatggttgagtgagacataaatggttgagacaaatggttgagtgagagtcctggtgaggggaccttagagcctatacttgccattctaattaaatagcaagtataataaatgataatagtagctatgacagagtgtgacagagtatatcggaggggtttctaatatagttgaggtagtctgggaaagtgacacttaagctaagcaagaggaagggagttctaacagccggcagctaagcctggaacctctgacagagatgagcgctcctccctgaaatactttctttggcttctgtaagatatcaacctctcctgatgttcctacttcactagccactctctcctctcctttgctggatcatcctccttttcctgacctctaacagtggcccagggctcaatcctgagacctttctttcttttctatttgcattatctccccatgatctcatccagttacacaggtttaaatattactcaactggtaatgatttccaaatgtccatcttcagtttagacttctcccctgagttcctgactcttctacccaaccacctactctgcctttccatttggaagtctattagacatctcaaacttaacttgtccaaaagatctctctgtaccaaacctgttctgcttcctgtgttccagccttagtaaatcgtatcaccattcacccagttgttaaggccataactgaatattattttccgagagacaaggtattgctctgtcacccaggctggagtgcagtggcacaatcacagctcattgcagcctgaacctcccaggctcaagcaatcctcccacctctgcctcccaagtatctgggaccacaggtgtgcaccaccatgcccagttgatttttgtatttttggtagagatgggatttccctatgttacccagactggtctcaaactcccaggcacaagtgatcctctcacctcggcctcccaaagtgctgggattacaggcatgagccaccacacccagcctcatctgtgaatcttcttccctcacaccttacatccaatctgtcaaaaagaacttgcatgtttcaaggcacattcagattatgccca

SEQ ID NO: 42401 - DNA, 1297 bp, Homo sapiens
agcaagctgtagaaattttacaataagatgctactcaaataagtgtgtgtgtgtgtgtgtgtgtgtgtgtgtgtgtgtgtaacatttacttaggtaatttaaaattattaatttaaatctctcatcttcaaaaattctaaatttagtttcttttatacagaattttagtgtacaaattattgattttttaacaagtataatcaaaaaaatacaatactcacttgaaggaaattttctacctttatcactctaggtttccctgcaaacatctaagagaagctctctatcatatacagaatatatacctatttgtctgatacacaagactatatgtctctaaaagttagcaaagagaatgttacacacatccccaagaatattttctgctactattttccaaagtcacaagtcactcttattacatggtaacctgtcacctagagaacacaacatcgccaatttttttcccatttaaacactcctcaaataattttaacttcaggagtactaactgcctccagaattatatgcacaattaaaattaccagtcaaacaattcaagacaggaaaaacccccaccattttcgatcaaacaacaggccctgatgaaaccgtaataaaaggtcaatcttcgccaaacaagactcaaggtctctcacttcattaaacagctaaaagtaaatatatttacccagtacaacaagtatttgggtttttaccaaccttgaagaacattttactagagtcaatagttggctataaagatatttataagcagttctttccttttcctgtaacttgggaaattaatgtggttaaattagtttttaaaaatcaataaatcctagtagaagacagatctaatcaaagtgatgatgaaaaatatttctcatggagtgaaacggaaagcctaaaaatctgtataacaataatctaaaaagctagctgtataataatataagcaaaaatacttgaaacctacatttttcctaaatctgtttttcattgtttataaagcactatgcaatagaagtaaaatgcaagccacatataaaatttcaaattttctcacagccacatttttaaaagtagaaagaaacaagtgaaattaattttaactgtatattttatctaacccaatagatccaaattattagcatttcaaaatgggatcaataataaaaaattaacaaggtagtttaccttttttgtgtaggaagtctttgaaatcggtgttgttaaaataaattttattgtatatatctaaagtatacaacatgatgtcaggggatacaca

SEQ ID NO: 42402 - DNA, 1040 bp, Homo sapiens
cattcacctatcatttcaaacaataaagtatgaaaagataaaacaggcaataataaagcaagcttcttccctacatctcaattctaagaaaaaaatagaataatgcataatactgaacaccatctgagacaggtacatcataccccaagatttttagctaaaacatgaggacaatgtttactttcacatgtatatgctaccagcaaatgacacaaatactgcctaacgttcataaaaagtccagataaaaagctggacatctcttcacaaaacaacattcaaaaactgctcatcttaatggatgactggatacagaaagaaaaaaattgcttgtctgaaataactagtcccatgtgaaagaaaatctgtgatcagagcttaaattgtctgacctttttgtttacttaaaatcacaagataacaacagccctgatccacagttgaaggccatggctggctgcacactaactttgacgtttttcagggtgtcactggaaagccctatcacaccaccttcagttacataataaacctatcactatactgttcttactctcccctcccacgtattcaaaacttcacaaaggtagccagagctaagaggagagcctcttaatttaagagttcgtttacacagtgtgcctgggcagatatttagcaacagcacaaaaaggttaagagtcaatcagccacctgcccataacaaagaaacgtctgtttggtaaaaattttccaaaaaatatgttcacatcacttactttttgtctttgatattttgaacagtttcatcaacaaatgtttcacgtaacctacaaagttcacctatggactttgtttttctttttattttttcctttggactgctactcaatgtgtcaggcactgggtctggccctttcacgtacagcatcccgtattattccggttattgtctcctctaagggttaacaacattacaatcaaaatgacttcaccactaacttatctgagtttttctcctaggatgacaatataactctgggatccttacataaaagaac

SEQ ID NO: 42403 - DNA, 1400 bp, Homo sapiens
actccagtctgggcaacagagcaagactctgtttcaaaaaagaaaagaaaagaaaagaaaagaaaagaaaagaaaagaaaagaaaagaaaagaaaaagcatgttctaaagagaatagcaacggtgtagctggagtatcacttgataaagagattatgggattatacaggcaaaaacactgtcagtttgaattgaagaggatggagaaaggacaaaatgaaagaaggctgtcagacttctgagattccagtgacaggacaacacagctattcttcaagaaaagggaagaatggccccaaaagcaattcagagatcaaccatcagaactccctcttcaaaagatggagcttggtttcaacagatgagacagccaccacccaaagccttgtgggcaggatggcccagcagagctgcagaagcaggacagctgcctgtgactgtgggggtagggccactaacccagtgggtctagagggcagggcatcaagccaaagagtttattttcaaggcttatgttctgattgaatttgccttgctaggttttggacttgtttgggatccatcacccctccctcccttctgatttctcctctttggaatggtaatgtctatcctatatgtctgttctactatcatattttagaagcacattccttatctggtttcacaggttcacagcaaaagaaaattttccctcaggatgattcatacctcaagtatcacccatatctgatttggatgatattgacatgagactgtggacttcagacttgatgctgaaatgagttaagactttgggggctgttatgatggaatgaatgtattttgcatgcaagaaggacataaattctgggtggccatggatggaatgttatatcctgaatgtctgtgtccccaaaattcacacgttgaagccctaaccctcagggtggctatatttggagttggaacctctaaacaagtaattaaggataaataaggtcgtaagggtggggctctgatctgacaggattagcattctataagaacagacaccagagtgctcattcaatctctatctctctttctccaccagtgctcaatctctctctccacccatatgcactaagaagaggctatgtgaggacaacacgagaaggcagccatgtacaaagcaggaaaaaggccctcaccagacacctaatcagccagtaccatctattttgtagtattttgtcatggtggcctgaactaacacatgacccaaagaatcaggacaaaaggcatttaatgaagaccaattttgatacaacacagatgtcagaattagcagataagaattttaaagcagctactaggccgggcacggtggctcacacctgtaatcccagcacttcaggaggccgaggcaggtagatcacc

SEQ ID NO: 42404 - DNA, 2381 bp, Homo sapiens
gctttgctggctgcataatcatttcactttcaatttgtttgaacattttatccagaattatgcagtgaggcttgggtttttttcagattttaaacatcaggtggtaagaggatgacagctgtcaaatgtcttgcatctgtttctattcgctgtacttctttttcctagtaagccatgttatccttttgactcctatgaactcatctaaacaaaataaaatatcctctccatgccctcggtctcaacaccgctcaggtgatcgttaatgacgagcggagatgagacgagctgagctgttaatgataaaagtttaaggccctacacaacatattccctaagaaagaaaagtttgttacattcttctccctcgtgacccaaagcttgaaatccacgctttaggcagtactcaaactgaggttcgggcaacgccgaacaagaaaataactttaccaatgcgtcccaaaaccaccatccttcctctcttcctttctcccttcccccaagagtggggggcggggggaaagtgcaagtacacgtagcaacaaaatccctgcgcgctggctgccgcccagagccagagcccgcgatgcaatgaaagttttgcgtccagtgcccggtgtgcggccccttctctgcctttgctagcctccggaaccacccaccgccatcctcccccaccctgcataccaggagtgcccggtccacaccaggcctgcaaagcccccccagaccccgagccgcacggcctcccccagcggctcaccatcgcagccccaggatgaaggcgctggctggctggcgggtgggccggttgaggaatctgttatcgaggctcaggatccattcgcgccaacaacttctcccgcgaagtgcaagaaggcgaagacagtggcgcgcggtgatgacgtcaggaggcgcgagctttgcttccgtcccgcccagaggcgggaggtgcgacgcctgcccaggtgctgccccgagggcaggcgggccgctgacatcgagaggaaccacggtgctttggtgtgagctcggtttttggcgggggcgctaaagtagggggatccgatattggtttccttggcaggcggggtacccaagtacctcccggttacacgtctggacaatgcacttccctatagtaactttgaaaagtttttactaccaactttagtaagataaatgttttagctgtgcgttttacatattatgtataaatatctattctgtaataaggtttcatcaagaggccggacgcggtggctcacccctctaatcccagcactttgggaggccgaggcgggtgggtcacctgaggtcaggagttcgagaccacctgaccaatgtggtgaaaccccgtctctactaaaaatacaaaaattagccagggggtggtgacgtgtgcctgtagtcccagctactcgggagactgagacaggagaattgcttgaacccaggaggcagtggtgcagtgagccgagatcgagctactgccctttagcctgggcgacagagcgaaactccgcctcaaaaaaaagaaaagataccgaaagctttggggtaaaccagttgtatatgaatagattagcaattgaatcacggaatacaatgaaacatttgcgtacgatttcaagagaaagattagaccataaagagttcaatggagaaagcagtatctccagctttggctctagctacacttttgaaattctcacccatccaccccctgttgggtcttgcgctttatgacaccaacatttctatggcgaaagatagaacagcctggaatacaacagaggctgagcattgacagcttgtatttattaaacgcctattgttgtacgtgcagctctggactagcctagctcattttatccccatgatgacactgactactcttatcccgaatttacagacagactgttacttattaacagggcctcactgcactgttccctctgaagccaggatgctaggtctccagccccaccacctgctatttatgtgaccaagggcaagttactgtgcctcggttttgtcttagcagacatatcacacaaatttttgcccataattttagaggacctacaccaatttataatgttcattgtgttataaatcaataaatgagtaaataagacataaaaagttgtacgtgtcttttatattacattcctcttaacttttgcttttttttttttttggcatttgaagccttccttgagtttaaatgagacttaagtcaggagactgtaacttctttgtgagattgttttctttaggaatatttatttacatgaaaatactctatctcagaaatataccagatctaaaatgactgcatatgctttgaaactcctcccttgaacctggactggcct

SEQ ID NO: 42405 - DNA, 972 bp, Homo sapiens
gatatatgagattataaaattaccacacaaaaactctaaaaatagaaaagctatataccttattcaataatgttcaaaacattcagaaaagatttgggtcaatatgaaaggctacacggaaaataatgtgattttaatccagtgtttacatatgtgttagttacacattcaaactcttgtcaccgatgcattttcatctaattttttccataatgagagagaaggagacgcgttggtgactgcaatagggccacctccctcaaattacgttgctctctatgacccatcctcagtctcccagttcaagctaatcattgacagagctttacaatcacaagcttttactgaagctttgataagacagtccagcagttggtggcaaatgaagccaggctgtgcggcaggatctccagggaatgaatggattttcttcagcactgatgaaataaccacacgctataggaatacaatgtccaacgggggattgcaaagatctgtcatcctgtcagcacttattctgctacgagctgttactggattctctggagatggaagagctatatggtctaaaaatcctaattttactccggtaaatgaaagtcagctgtttctctatgacactttccctaaaaactttttctggggtattgggactggagcattgcaagtggaagggagttggaagaaggatggaaaaggaccttctatatgggatcatttcatccacacacaccttaaaaatgtcagcagcacgaatggttccagtgacagttatatttttctggaaaaagacttatcagccctggattttataggagtttctttttatcaattttcaatttcctggccaaggcttttccccgatggaatagtaacagttgccaacgcaaaaggtctgcagtactacagtactcttctggacgctctagtgcttagaaacattgaacctatagttactttataccactggga

SEQ ID NO: 42406 - DNA, 1796 bp, Homo sapiens
gtgagccactgcgctcagccagtccttttaatttttaaaacaattcatgctcatgtacatttaaaaatatcagattgggccgggcacagtgcctcatgcctgtaatcccagcactttgggaggccaaggcaggtggatcacaagatcaggagtttgagaccagcctcgccaacatagtgaaaccctctctactgaaaacacaaaaattaactgggcgtcgtggcacgtgcctatagtcccagttactcgggaggctgaggcaggagaatcccttgaacccgggaggcagaggttacagtgagccgagatcacgccactgcactccagcctgggcgagagtgaaactctgtctcaaaaaaataataaataaaaaataaaaatatcacattgtaccaaaggatctaaagtgaaaaagttaaatccctctccctctcttcacctgacaatcccaggccaaggacgctactgttaatagtttcttatacattctttttaaagttttctatgcaaatacatgcatgaatatgtttatttaacctttgtataaagaaaaatattctaaattgttgaaaagtcattacctggaaaaatgtcaacaattagagttttcatgaaaatgtattttaaggattaaagccttaaaattggctgataagaataaacaggcaaaaagctttaacagatattgcttccaaacatagttgataaaatgacatattttcagatgttttcattttcctctaatttgagatattctctgcctttaacacaaaattagcactttatgatcgtgagataaattttattattttaaatggagggatatgtttttcaactattgtgttttccaaataatgtttgtattgccttaaaagttctaaatcactagactaaataaatggtgtgaggggtccttgaaatcagtcagaaagtgaaatacactgcatgacccagtgacgtatagcactaaagaaatcttgcaatgatttggtagcctgaggtgaacttgtttttcccacttgtcccctcgctgtcttgactttcacgtagaaaacattaatttgatattttacgttgcaatgaagtatttcttccttctcctgcccccttgtgacccagaagaagcattctttaggaatagtttttagaccgaaaacatttattgagctacacaagcctaatataaaactgaattctgggggggtatggaccccttcattccccacttctcagatagagaaaaggtttcatagtggctattggggtccttttcgttccagaatgatctggaaaactccatctcggtttgaaatgttcccatttggaggaaacctgaatggtccagagggtcccaaggctgacttgcaatttagattccactttattgcagatgtagggagtaccttaatgcgggtctaagactcaggtaaaaattttccataatcacacctactaatggatgaaccaactctaagtttttgtttttgttttgttttgttttgagacggagttttcgttcttgttgcccagcctggagtgcagtggcacaatcttggctcactgcaacctccgcctcccgggttcaagcgggagcctcagcctcccgagtcgctgggattacaggcaagtgccaccacgcctgggtaattttttgtacttttagtagagacggggtttctccatgttggtcaggctggtctggaactcccgacccacagcgcccggcctcaaaactaaggttttttttgttttgttttgttttgttttgattttttttttttttttttttgagacgg

SEQ ID NO: 42407 - DNA, 2221 bp, Homo sapiens
accaaaaaccacttgtaccccaaaactattgaaattttaaaaatatttttaaaaagagaaatattatgaacatttacattccaaaaggacataaataaataaatattatctatactctttacaacaatcttgccaggtaactattatcctcatcttacagtgtgatattttgaatatgcgtgatattgctcccctgtgtaaaatccattagtggcccccccaagctttggggataaagtctcaatttttcaccaagacctttgagatacagttcccagcctccttcctggccactctcccatcctcttgcacttcatattcgatcataacacactactgccagtgtctcagtctctccttactatttctctccacccagcctcaactatcccactctgtctagctcaaatgccctctttacttcgtgatggtcactgcctccaagtcattcttgcccctttaggatttaagtgccccttctgctggctcccataagatgggcttgtttctagcatagcactcatacgacatgatacttttccatctccccagctagactgagagttctttcaaaggagagacaatttttaaatttgcctttatgttctcagcacctagcacagaatatttgtacatattaggtgtaaatgttggttaaatgaatggtttaggatttctgtcttaaatactgtaatcaaaaactaatctcaagttcaatcttcatatttcattgcattattgcaaactgtcgaaatattactgatattaatcgggtggtatattagtcaggacttttttggtggcaagttacagaaatctaattcaaattggctaaagcaaaaaggggcaatttcctggctcagtaaccagaccacagggatgaatgggctcagtgaccaggaaggccctttatttcagcctctcacgtccatttcttcctcgggttgtgtcatcttctcctttgtagaggaaagatttctctctcccaagtttagttttttcaatcccagaaatgtatttggcctatgcagcaaagccccaagggttcacattagtaaaggcagtaatgtctgttttcattctatttttaaatcaataaatacatgtaataatttaaatttgtacatttcccttttagaatggaacatttgagagtctctgagtaaacatgcacagaggtttgggaaggtgaatttgctcatgagacaataactcattctgtttattactccactaaatattgccaaagcggggcagagttgctcctgcctgtaatcctagcactttgggaaaccgagggaagaagatcccttgagcccaggagttcaagactaacctgagcaacatagttttgtagagacaagacaaaccttgtctctacaaaaaataaaaaatcagctgagagtggtggcacatacctgtagtcccagctacttgggaggatgaggtgggaagatcacttaagcccgggaggtcaaggctgcaaggagctatgattgtgccactgcactccagcctgggtgacacagcaaaaacctgtctcaggaaaaaaaaaaaataaataaaataaaataaaataaaacaaaaaatactgccagctttcatgacagttttgaccatttcatgactttaaaaatctttgtcttttactagtcacattgggttagggggaaaatgttatctttcatagataaatactgtttacatagtacaaagatttctcaaacctggtcactattgacatttggggtcagataattctttgctgtggtaggctgtcctgtgcaatggaggagttcagcagcatctaaactctactcactagatgacagtagctcccccattttcagtgttgtgacaatcaaaaatgtctccagaccttgccaaatgtccccaggaagtcaaaattcctccccctcactccacctttgaaaaccactgacttattctatagtagacaactggttaaagacatgaagcacaaagaacaaggacattgacatgtaaccagtatgaggggcataaaaatgattattttacacaattgcctcaaggagatcttcaccagatctgtaagttgcatacagaaactcaaaattaatgtacagcctatactgtttttagaaaaaaaaaaaaaacagtgcttttaaaatgttaaaagaggaaataatatttaatcatcaacatgattacatctagtttggcttttcacatatcgaga

SEQ ID NO: 42408 - DNA, 684 bp, Homo sapiens
tagcatttaaaatatttattctattaatgttttaaatttaaataggccttaaaatacaatagtcaataaagtatatttacataaaataaagcatatgtcaacgctttttatatttttttattaccacacacaaatgatgaaataattttttaaattcctcatgggttcaagagattgcttaacactgtgaaagtggctttcaggataagatatgttgggaaaccctactctaggtcaaggcctcaccaactttttcctgagcctaggataaaactggatttctttcctatttttccacttctttgactaactttgttttaacatttcctggcataattccttcacagaagctcacacatgctggacacgtgttaggcattcaatgagtaattgattattttcaatttaaggaagatctaccttgttccagaaaggatttaaacctgcaacaacaacaaaaaaaaagtagattgcagacacacacacacacacacacacacacacacaggctaaacattagtctttccagaacactcaaatcaattagatatgtctctttaaaatattgtacattaaaaacccatcttgaaacaagctgcagaattttgatggctgttaaaactcagtgatgtgtttatgagggtttattattgtttctatttttgtgtattatgacaatttcca

SEQ ID NO: 42409 - DNA, 685 bp, Homo sapiens
cttatgtagaggaggaaaccctacacactaccccaagagggcccaggaagggagccaggcagaggggaaataagagcctagactaggctttctgccagcctccagctctcctgtagcagaagttttaggttggaagcactaggggcatagagaacagactttgaggtcatcagggctccctggcagctttcccctgaatcactgtacgctgcattaattttatccatgaaaaggccatttaccagccatgttacagcccttgtaagtgaggacaacaaagatcaataatattttcttcttttaggctcactcgaaagtttggcataactacaacacacatttccgcccacatcagaagggttggttatcgatcacgttgggatctcattggatcgagccaaaccggtcggaaaacacgatggatatattcaaatgtcaacaatccatggtttctgtgcttggatggtttgccaaccctatccatggggatggcgactatccagaggggatgagaaagaagttgttctccgttctacccattttctctgaagcagagaagcatgagatgagaggcacagctgatttctttgccttttcttttggacccaacaacttcaagcccctaaacaccatggctaaaatgggacaaaatgtttcacttaatttaagagaagcgctgaactgg

SEQ ID NO: 42410 - DNA, 756 bp, Homo sapiens
agccttagtaaattaaggcagttttgattatattctaggtccacctatgtctgaagctaaattcagtatctaactgctaatgaacaagtttccaaaatactgtaaaaatacaattagtcaatttgagtaaatgcaaatatgatgagaaatcaatttgctatttggcctggcaaatgggaacagtaaaattctgctttactcttctctagtctccttgccccagctgcacccactaccccaaagttggcagttttgaggtatgattttcaaggaatttttttagtattaacatctccctctgagaactatgtacctaaggtcacgcatacaactagtcaattctgtttttattactctaactatgtagaaacagtaagtcacttaaaacaatcacttggctgggttttttcccctttgtgccacattgattcaccctgacccaagaactccagggaaaattctttaatgtcaactgggcaactcattaacctctctttaacatcaagggcttgggaaaaaaaaaaaaaaggttagccacaggaataacaaaaacctggaatttatctttcaggttttgctttctctttctcactttgtttaaagtatctcgtactcacagttcacaaattaaccttcactgtctctttcacattaagagcttatgcttaaagcatgccccccttttctaacttgctggtttaccataaactcccctaagtaataaaattcctaacccagtactgagagtcctccttc

SEQ ID NO: 42411 - DNA, 2543 bp, Homo sapiens
tgcaggcttaaaagacaacagaccacttaccgaattactttaagattctagaattaacccttatcaaagcacatggttttcaactggaaaaatccaaccacctataaaacctcccaacagttaagctttgtagaagttgcaacaaacttcccttctggaaaattaaatcatcaggtttaaatgacctactgccggttcctgtgatttttacaaagcaatcactaggaaaataaaccaaacttctaacaccattaagacgtgtcactgatgaccactattacatttgagctttatataattggctgtgttcagaatctggtttttcaatttcactgaacaggctggtattctggacagcaacatttaaagctgaagcactgaaccttaattcgaaaattgttaaagcaaccaaatgtgatgctgttataaaccaccttccaacgagcaactgaattatcagaagaaaaaccctcaccctcttttttttctttccaagaaggctgagttctacattgatgtgattgaagtccctccgcagggttcctctggggcccttcacgataactgtgcgtcccttcagagtaatgtcgactagaagagagaacacactcgtcaggccacacaacgcttggaacgtgcagtaaagatgtaagtaaaagacatcaagtctcataccattttctggaatgtcgacagtctgattgctgagaatagtcttcattctgaaacacaaacactgggggtgaggccgacgcaaggcccgtttttccaccaaactacgccgcacagagctccactcctactggagactgccaggcggaagttccagacaagatgtcggaggacgggagaccgacagcgggccccagtgtgtcccagcctggaaggagcagccccaaagcgagaattacgaggcccagcagtcgaactcccactcagcccaaccctggaagtcctatgcgggcggtgccatcccggcaagactgaggggcgggaataggccaaaaagcccacaacaggattcgcatctggcgccgccaggctcatatggcgcttgccgagctgggggacaaacaggacaaggttccgagagtgggagccgcgccgcagcctttcccagagcagatggtttcagattcccagtacccccacgagcacagaaacatccttacctcgcagtagacgcagcaaagaaagaacgtctgtcgtcattacgtacttgtatcgcgtaaggggcctgcgtattgcgtcatgagtgcgcgacgcacgtaaggctaaagcagccaatcgtggagcagcttggctgcttgtcataaatggagcgacgtaatttcgacctgtcctttcccgggagttagcgatccctcaacccctgcactgcgctagtcctaaagaggaaatgtctctacgctgcggggatgcagcccgcaccctggggccccgggtgagcggcggggcgaacgggtttgggcgtggggtggggggatcctatcccttcagagcgcccatgcccaataataaaggccagtgcatttactgaacatttactactagccaacggcagttttaaacgtttttcgtgtaatctcatgtaattatcccgccagccccatgatatagagtctctggcatcagtttgtttgcaagtctctctgggccagcaccgaggacttattttctgcttagagtggtttgtaccctatatttatggagcactgcagtgagcaccccacatagctattctgtcttggactcttactgtgtgtgagacaccactctagccgcagagaacacaaacctgtccgctaggcttcagcggcagacattgagaagtgcagtagcaatcgtgcaacaccctaacaggcactctttgagttgtcgaaggttcttttgagatacatgtgcagactcgtggattttgtagtgttttggctatctcatacacgtttgtgttcagatgtaaaagccgaataccatgatttcttatgttcttgactgccacgttcaaacacagaaacaatgtaacctagaaagtaaaaacgttcatcctggccaacatggtgaaaccccgcctctattaaaaatacaaaaattagctgagcgtggtggcgtgcgcctgtagtcccagctactcgccaggctgaggcaggagaatcgcttgaacccgcgaggcggaggttgcagtgagccgagatcgcgcaactgcactccaacctgggcgacagagcgagactccatctcaaaaaaaaaaaaagaaaaagaaagtaaaaacgttaggcttggttttaaccttccagttgtctgaaactaattgggcattattaacctacgtttcaacaattattcaaagctcgagagatttattgcacacttcactttaaacgcccctgattcaagtcaggaccagaacagttttaaactgtggcaccttcttcagttattgcagttcaatcttgttgaaagacaaacatctagttcctggtaggtggagtacatgaaagtgtgatatatgttagttccagagattttcgggccgggtgcgg

SEQ ID NO: 42412 - DNA, 1044 bp, Homo sapiens
ttaatttcagtggagaaattctgttaaaaagtgatttctataatgtcagtttcagttacttttaagttcataaatttgtttcttctctttcctgttaactagtctccaatgaaaaacaattacagaaaataaagctgcattagaattgaaatgaaatccagtttaacatcagaagctttctggccttttggcttaaaggataagtcatttaagccatggtggtttggccattgttgaagtctaggacacagcctgttccaacctcatcatgataccaccaccagtgggtgccagtttccctggtttcacttaaaaacatgatcctttccagtgaaaattccagaatcatgcatttctttacctaatatgtggcagtgttgtatacttaccagcagagggcagcttagtcttcagaaaagaaatgaacttgaaagtttcaaccctctgacatgtgggttcagcttatttttttctttgttcagtatggagactctcttacttctgctttttttcctttctcttctaatttttcgcttcagaattctggtttctcaatgcataaactgaagtaatttcttccattctacttttctctgccccaggcttgagatagaactagggagcccagtgaggccttttctttcctaaattaacaggcatctgtgcataaatgctacctttgaactatgtgatttaagataatgtgcagaatgtacttctctggtctttcaggttgcttgcataactatgtacttggttgaacttgtaattcttgctgacaacagtcctgctgttttccagtaaggttcgtgatcctcgggccaattttgatcagtccctacgtgtactgaaacatgccaagaaggttcagcctgatgttatttctaaaacatctataatgttgggtttaggcgagaatgatgagcaagtatatgcaacaatgaaaggtaaagaaattgaaaaatgaaaaatctttcccatgtaatttgagtaatagcaggaacccactcactttgaaggcccttctaagaacaaagaaaagta

SEQ ID NO: 42413 - DNA, 915 bp, Homo sapiens
aaaaaacaccacaccaccaaatccagatttttagctttttcttgagaaataggaagataaggcaccagtgacaagtactgcataacaaagtattggcttaagtctgcatgacaagtattggcctgatgcctggttaattctttgcatttgagaagaatgacttttacctgggcacctttatgtatccagagaagcagaatgactaatattaaaagctggagagaaaagtcacatagtctgtcctgaattctggttctgccacttattaaggtgtgaccctgagcaagctgctaaatcttccgagccttctgcctgtagtctgaatcacaggatcagaacttacctcaaaagacttaaatgagtcctagaataacatggggaagtaaaaaatgaaatgaaataaagacttatgtgaggaacagatgagaaaatgcacctaaaggactttgcatagtgcctgtccaaaatgttcagtgttaattactgtccttctagtgattccagagcctacacgtggttctggtgcagtgggaccagcttgttatggtgctaacaggagtgctcattgcctgccagtcactgtgccaagaagatctttgtgtaaacattcatctcatgtaatctttataacaattcttcgagttggagatggattatctgttttacagatgggaaaaataaggctttcaggtagcttagccaagaagtcttaagtggaattgtaggagagaaaattgtaggagagagattttgtttatccttttgtatctatgtgaatgtctttttaccatgtccatatattattttcaattttttttttttttttttttgagaaggagtttcactcttgttgcccaggtcggagtgcaatggcatgatctcggctcaccgtaatctccacctcccgggttcaag

SEQ ID NO: 42414 - DNA, 2592 bp, Homo sapiens
agaatacattaaaattcacacaacaaaggaaaatacttacagaaataaatacaagatcagcttctttgatggcatcatcaatattggtagaaaaaaaaagattttttcctcgacaggattctaccacttcttttagtcctggctaaaaagaaaaaagaaaaggaattgtacatatagcttgccagtgatatgagataacctaatagtatagaattacatttgttaaagggcatggtaatattgtaatttaaaggtctaggttgtgctcaaattacctttgtagacaagttaaggatcatataccaaaggccataagtgcacatctcattttttaaatagggacagggtctcactctgtcacccaggctggagtgcagtggtgcaatctcagctcactgcagcctccgcctcctgggctcaaatgatcctcccatctcagcctcccaagtagctaggaccacaggagccatgaggcctggctaatttttgtatctttttttggcagagatggggttttggggtttcactgggttgtccaggctggtctcacattcctgggctcaaacaatcctcccatctcagcttcccaaagtgctgggattataggagtgagccaccatgcccagcccatttattttattttattttatttttttttgagacagagcctctttctgtcacccaggctggagtgcagtggtatgatctcggctcactgcgacttccgtctcctgggttcaagcagttctcctgcctcagcctcccaagtagctgggattacaggcatgcaccaccacactgggctaattttgtatttttagtagagatggggtttcaccatgttggctaggatggtcttgaactcctgacctcaggtaatccacctgccttggcctcccaaagttctgggattacacgcacaagccaccacacctggcctattttattttttcatacagggtttcgctctgttccccaggctggagtgcagttgcgtaacagctcactacaaccttgacctcccaggctcaggcaatcctccctgctcctcctcctaaagtgctgggattataggagtaagttaccacgccctgcctcataagtacacttaagtaaataaagtaaaatggaaattgccattaaacttgctacaatcagaagagcagctcatttaatgctttgtcattgtttaccatgtgactaactcataagagttaaccattaactatgagtatcaacacaattttcagaaaattcaaggtcttctgtgatttcaagcaaatatatgattttgcattgtcattatgaatgcacatttttactcccaataattcaggccatagaactggctgtgaaagtcaatttactccatatatgcttaaataaatataaatttttctatatgcttaaataaatataaatttttctaagtcctattgcaaggaacccttttatttaaaaaaaaaatcccagtttaacaggagatatatttatgttaagaatatggaggggtataaaaccacttaacaaatattcttataaaaaaaaaatcaagcctaaatctgattggacctgtacctttagatctaactaccaatttacattaaataaagaataagttgaaaaactccaaggaactgaaccagcaaaatctagactgaaaaatttcttttttttgagacagtcttgctctgtcaccctggctggagtgcagtggcaccatctcgtctcactgcaacatccacctaccaggttcaagtgattctcgtgccgcaaactcccaagcagctgggattacaggcgcacaccaccatacctggctaatttttgtatttttggtagagacggggtttttccatgttggccaggctggtctcgaactcctggccttaagcgatccacccgcctcagcctccgaaagtgctgggattacaggcatgagccactgtgcctggcctagactgtgataatttctagccaataaacaaactggtttcttcaaccaatagatactggttgaagcacaactattgtgggctaccagcctgggcaacatggcgaaaccccatttctactaaaaaaattttaaaaaatagctgggcatggtggcgcttgcctgtagtcccaactattcaggaggctgaggtgggaggatcacctgagcccaggaggcggaggttgcagtgagccaagatcgggccactgcactccagcctgggccacagagcaaggccctgtctcaaagaaaaacaaaattatcttttagagatacatgataaagtatttatggatgaaattataaataatcagcatggtggtagttgggaaggaggactggccacgtagataactgttgaaacaagatgatgggcacacggagattcattgtactgttatctttaattacatgcttgaaatcttccacaacaaaaagcaaaaagaaaacatacctaaaccactgaagctcactcttaggggagaaacttcaaacaatatccatccataatattatggatgtttagaaaactatgtctatagcaaagtgaaagcccttcaggggccataggtctggcattacatatagaggcaact

SEQ ID NO: 42415 - DNA, 4538 bp, Homo sapiens
caggttggagtgcagtggcgcaatctcggctcactgaaagctctgcctcccaggttcatgccattctcctgcctcagcctcccgagtagctgggactacaggcgcccgccactacgcccggctaatttttttttgtatttttagtagagacgggatttcaccatgttagccaggatggtctcgatctcctgacctcgtgatccgcccgtctcggcctcccaaagtgctgggattacaggcgtgagccaccacgcccggcccccattttctatttctacttttatgtaccctctggccctctattctgctgtcagagacataggagtgtttccttattaaatgggttattttgaaatgagtttttacctctgtattttgggagagtcacaacaaaccaaaccgttccaaaactactcttcatgtaaaatttcataaattcaaataaacattccaacccagaaggggtcactaacaaataacaaatgccctactacaatctaaacggaatataatccttctagccccagctctctacagcatattttgcataggtacccaggagctaacgatgggcattatagttggatacatcagcttcacacattttaatcatttccagaaattaaacagtaaaagatgcctgaccagagaaaaatatttaatcagtaagaaagccggtattaattttatgtctaagggttatcatgtaaagctgtggaagtaaacaagaaggaagatggattatgcttatccagttatagattttgttagaaaaaggagtacagcaacgggagaagaaatgagatcttttcaatcagggttgtctaccccttaccttaaactggatcctggccactaataagcacatctcagagcagacagtcagctctttcatttccagaacccccctgaagaaagactactgttctccatttcttaagggatttgaagaaactcaaaggctcactgtgtctttgaggtctgtcgatagacagctactgctctgtatgcccatgaatagatccctaccagcgaacccctcttttctctatactagaattcctaaccctactaagttatcttcctatatatttataggacgtataatttttcaagatctcacacaaacatggtctcccgaggcacccaggaaaggccttccccgacatcaaacagagcaattctgtggtgtagggggccaacaatggattccaggacatcccggacagatatcacggcagtcttagtattttgctctcaagagggctttctggcttcgtttctctttggtttcttaagaggggcggcatgagaaaagcaggagcccctcaggtgagcagactcttaaacacaaacaaaagactacgactctgcggccaaaatgaggtccccaacgagagaaccgcttcctgtggtgggcgttcggctttggaggcggcagggaaatctcatccaagtcaggaaagtgggtaaaggcagaaagagaaggggctggaagactcacgagtcttgaataagaagcccagacgaccacatccccaggacagcagttccaaaatgcggttcccgccctaagccccaaagagacgaaggtcgtgagacgggaagcccgggacccagcgcagcgagcgaccgggagcagcgcgcacaccccagccccgctccctccacatcccgcccagacctgggagcatcccgcccgggcggcggggccagcctgggagcggcgcttacccacttcccagcagcaagcgcagggaccgctcctatcccgatcgttcggacagcaccttcctacgggccgcgccgccgcagcttctccacccgcgccccgctcgatctgagctccctctcggcgcacgcccctccctcaggctgccacgcgttacactctgagtcccgggcctgagcccgtatttaaaggcttttgcctgcgaaggcggaggcttcattcccccgcagccaggccctcctggattctgccctcagctgcttcctagctccccctcccgctacacaaggcccagggccaggtccctatttccttcacggctcaggggcggggagactggggctggtcctggctgggagggcctgccccgcccctggcctagctgggcaaatccgctttggccagctcagcggctccgcccctaccgcgagcggcgctgggcggggctgcgtgcgtggcgtgtccgctggaccaggggacgggggcgcgccgcaggtgtaggagctttgcgcgcctacctggcggtcgtgggtcgaggaggggtcaagaattgttgtctagcagccctctccccgctgccctgtcctggccgaggcaaaggccgcgtgcgctccgcgtctgccaggctttagggctgcgcggacactgggtgggtggtgggccgaggcgaccggaaggtcctggccgcctttccggtctcctcagcaccctggagcgccgccctcgggtttcggtctcctggatctgcgggtcggtctcggcgggcggattactcctcgcccacaacctcgaggccccggggtcaaccgcgccctccgggccggcaacccagggtttagtcagattcctcctgacccaccgcttctgggaaagaggcgcctcccgtcaggaggatgctgagttcctcatgactggaccagtgagtgtccactccctggtccctggcgagagaggcgggacccccacgccctcctggcgctctttgcagagatgttcctcaggcccaatccgggatttgggatgtctgtgcgtgctgtggagcagagagtttgcaacatgtaagtgccgtgcgtgaggaagagtaaaattaacctatggagcctgctcatttttaatgtggagggcagttccgttcctttctttcgccgcttcgaggtcattttaacactcaaatctaacatataagaaaaaaagccaggcataatcatggccttttatttccctcattaaggattacatcaggtgacataagccattttaacatacatcatgaagaaagtgattagtaatttataaaggcacattaaaataccatataaattacggttttcttgataggatcatgatggtgactttaagaaagtggttgaatgtggatgaaacagtttgctgtggattgtagcacgtgtggcaggatatgtaggcttgttggttggttgttttgagacggagtctccctcttgtcgccgaggctggagtgcagtggtgcgatctcggctcacctcaacctcctccttccagattcaaacgattctcctgcctcagcctcccgagtagctgggattacaggcgcccacaaccatgcccggctaatttttatatttttaatagagaccgggttttgctatgttgaccaggctggtctcaaactcctgacctcaggtgatccgcccgtctcggcctcccaaagtgctgggattacaggtgtgagccactgtgcctggccagtatatgtaggctttctgcattctatgcagttcagttcattcatccaacaaatatttaatgcctgttgtgtgtcagacgttatcctaaagactgaagatgcaaaagggattaagactcaattcctttggccaggcacggtggtttacgcctgtaatcccagcactttgggaggccatagcgggcggatcacctgaggtcaggagttccagaccagcctggccaacatggtgaaaccccggctccactaaaaatacaaaaagttagccgggtgaggcggtgggcacctgtaatcccagctgctcaggaggctccctgttgcagtgagccgagatcacaccactgccctgcagcctggggaacagaacgagacactgtctcagaaaaataaccaaacaaaaaagactcatttccttcttgcaaagctcacaggttgggtagaagagatatgtaaacaagtaattgcactagatatgacaagtacatctttttgaacatacatagatttaagttatctaatacagtttgctttgtaataaaaaccacttatcttagtcccttcattttgaattcaacatttttctatttagtattcacctcacattcttttttagtattttggtagaatcagactcttcaaaacggttaataggatttcagaaattaagtcaattttcagtgccagctagaatggacctttggatttaggacagaggttctccaaatgtgagctggggactgtagacaatctccgaggttctttctgggatccatgaggtcaaaaagttttcatgtgttacttgcttttttcactcttgttctctcagaagtgtacaatgaagttttgtggagactataatgtgctatcaaagcaaatagaattaagctgttttttaagtcagatattagagatttacaaaaatgtaaaacaatgccaatcttatcttttgtttttaaaatatagtaatttttcattaaaatatgatatttatgttaacatgtaatgggcttattgtcaattttaaggaattaatcttttatatataatttatcagttttcatttctaatatggtaaatacc

SEQ ID NO: 42416 - DNA, 946 bp, Homo sapiens
taagcctcgtgggttacatccttctaccggtataacaccagggacatgctgacaagtggggcaggcttgcacaatagctcgagcctggcttcgaggcagatgaaacatacaagtaagggcagaggtgttttgatgcagtaatgcatgagaggcttcagcttgctgaaacacagaaccaatcaatttatctgctctatcattacctagaggtagtggtccaggaagttgtgtgtcagagcgaatatgagaaatttgaaaaggagcagcatgagagcaaacagctcgctgaagtcttagaaacaagttaaacagctctggttctagggtgcttttaatagtagcagtctcaatgcgactggctacatttacaacataggctaaatcacagacaatattaataggagaggaagcagtgagctgtaaaacctgaataactgccattaattctgagcattgagctgaaacaccagggatttttattgttttaatatgcttaggtccataaatagatgctcagactttggaagagccgtcagtgaaataagtctggccacctggaataggcttgtgatgagtaatcacagggaggataaaagggtaaactttataaaattgcaaaactttgtctgatggataatgattatctattattcctttgcttcagccaacatcgtagagcgatgaagctcagttcccacatcctgacaagctttgataaaatttcctaagctttttatacatctcacagatgccaatgcatgtttacagtccgtgtttgcattctcaaaagctagttaaggttagcatttctgtagccatggtaagagaaatctgacacttcactgcctatggtaatcttgcaagaaaatgtgcatagagctcctgtgaccctttcatgatatgtaagagattgtactgggaccctttcctctggaattgtggccca

SEQ ID NO: 42417 - DNA, 2041 bp, Homo sapiens
gaagctgaggtgggagaatcacttgaggccaggagttcaagaccagccttggcaacataatgaggtcctatctctacaaaataaaaaacaaacaaaatcagccaagtgtggtggcacacacctgtggtcccagctaatcaggaggctgaggtgggaggattgcttgagcccaaggggttgaggttgcagcaagccatgattgcaccactttactccagcctgggcaacagagtaagactttgtctccagaaaagaaaagaaaaagattaaatcaaaagagtaacaggattcagatcatgttggccttataggtcataataagcttctattacatattaaatagaaaaccactgaagagggcttttcttttttttggacagggtctcactctgtcacccaggttggagtgcagtggctcaattacagtcactgcagcctcaacctcccaggctcaagtgatctcctaactcagcatccagagtagctggggcataggcacaggccaccacgcctagctaagttttatattttttgtagagacaggatttcaacatgttgcctatgctggtcttgaactcctgagcccaagtgatctgcctgctttggcctcctaaaatgggattacaagtgtgatccactgtgcccagacaccactgaagagttctgagcaaaatgcagatgatatctgactctcattttgacagaaccactccatctgttgtgttttgaaaaacgagaaacagaaacacagtgatatggtttggctgtgtcccatcccaaatttcatcttgaattgtaactcccacaattcccatatgtcatgggaggaacctggtgggaggtgattgaattatggggggcgggcctttcctgcgctcttctcatgatagtaaacaagtctcacgagatctcatggttttaaaaaggggagtttccctgcacaagctctcttctcttgactgccaccatgtaagacatgcctttcaccttccgccatgattgtgaggcctccccagacatgtggaattgtaagtccaataaacccttttctttcgtaaattgccctgtcttgggtatgtcttaaattagcagtgtgaagactgactaatacagacagttaagaacctgttgcaataatctattaacatacgagatgatgatggcctagaacagggaggaggcagtgggatagtgagaagtggtagaattttggatgtatcttcaagatagtgcttgctgatagatgactggacagtgtgagaaaaagggaagccaaggatgagtctcagaaggatagaactgccattaactgttataggaaggatctcaagagaagcagaaattctgaagatgttgaatttgaggtgccttgttagacatcccagtggaaatgcccaaaagacagtcatcagcatacaagtaatgagtcatgagaccagatgagatcaccaagtgagtgaatgtctagaaaaggaaataatccaggggctaagtcctggagcattccaaggataaaagttaagaggtctggaggacagacagacgcaccgagaaagaagacagcagatagccgcaatgcagccaggcacaatggctcatgcctgtaatcccagcactttgggaggctgaggtgggtggatcacctgaggtcaggagttcaagaccagcctcggcaacatacagaaaccctgtctctactaaaaatacaaaaattaggccaggcgtggtggctcacgcctataatcccagcactttgggaggccatggcaggcggatcatgaggtcaagagatcgagaccattttggccaacatggtgaaaccctgtctctactaaaagtacaaaaattagccaggcgtggtggcgtgcacctgtagtcccagctactcgggaggctgaggcaggagaatcgcttgaacctgcgaggtggaggttgcagtgagctgagattgtaccactacactccagcctggtgacagtgtgagactccatctcaaaaaaaacaaaaaacaaaaattagctggggatgctggtacacgctt

SEQ ID NO: 42418 - DNA, 1613 bp, Homo sapiens
tgtatatatttctccaccatttactctttggtctgtgttttaacaacattgactctacctagcagctgcttctatgactaaatgaataaatgatatttctgatatcacaatgattaaacactgttctaaaacaatggaataacacctatgaaaaggggaagagtaaaaaaataagacaatggaatatatacaaaatacaactacagaaataaaaggcagaaatgaacgaaagcaaccaatttaaaaaagtcagaagagaataaaacgtatttcttcaaggcttatttcaattcttaagaagcctcaaattcccacgatcctaaaacatatatttaattttaaaaaataactttttccaattgaatagtagcacaatactatccaattgaatagtagtatctaaatataaagatagctacaaaatatgttttattattttaagaaaaaagtataagctcactggagaaaatttagaatataagaaaaataattctatccctcacagtaaactactgtttaaccatttaaaagcctagctctcagaaaggatttttaccaactgctaaaagaactggggggaaagaaaaacttgccaatatgcctaaatgaatgttcaaagtttcacctttctttttagagttaggaagtgacattttacccacaggaatgactatatttggttataggcggggctggttaaagagtcacaaaagccgcacatgtaataaacacgtgttttcccatggggaggttcaataaaattattttcaactaggaaaacaggttttagctttacctgttgaggcaaatatttgagctgtacattgtagattaatgaatgctactggagaagtaaagaagtctggagggagggaaccaccacccattgtcctaacaatgcacatttctattgctttcttgtcttgaaggcatatatatcacccaaatggactaggttcccacaaaatttctactttaggctaggcactgcactagctcccacttctctaagctgttatatctgtggaatttgatgggacacccagtacacaaagtaataaaaatcataatgtataacaagtctctttacaattaccttactgcgtcttgtttcagtttcatatatataataaacaggcagctctgcttcagagatgttacgtatcagcaactaacctactaataaatgcaatttggcaatatgtaaatagccttaaaatgtgtgaagaaaaccagaacgtatcactccaaaatatgcctttttgacatagaaattattttggagaagccaggcacggtggctcatgcctgtaatcccagctacttgggaggttgaggcactagaattgcctgaacctgggtggcggaggttgcagtgagttgagactgagccactgcactccagcctgggcgacaaagcgagactctgtctcaaaaaaaaaagaaaaaaagaaaaaaagaaattatttttgagctgtaggcaattaggaagtagcaaacagaagaaaagctccctctattcccctcttttctgcctaaaggtaggatacaaattctcctttatacacaaccctacagacttaatagtccagagacagcaccagaggagtcta

SEQ ID NO: 42419 - DNA, 1221 bp, Homo sapiens
atctcggctcactgaaacctccacctcccgaattcaagccattctcctgcctcagcctccagactagctaggactacaggcgcgtgccaccatgcccggctaattttttgtatttttttttagtagagatagtgtttcaccatgttagccaggatggtctcgaactcctgacctagcgatccgcccgccttggcctcccaaagtgctgggattagaggcataagccaccgtgcccggcctgtattgtacattttaaacgggtgcattgtatggtatgtaaatcatatctcaaaaaagctgttacataaatggtgcctagagagcatatacatgttctaaactcatccggagagtcagggaagattttactgaagaaattaactagaagttgagagtgaaggaatgagttaaatacattagggagaggtagaagtagaaggtgtgagacttgggggttgagggcattctagacacaaagggaaaagaagtacaaaggtcctttatgagtaagagtatgacatgttggaggaactgaaagaaagccacactgtgctagaatctggatagcaaagtggtttaaaatgacacaggagaggtcagagggagtcatgccacaaagggtctttccggctatgttcatgattaggtcgttaccccaagagcaatgtgaagaacaatgtgaagcaatgtgctttcatcctggtgtgttctaaaaagaccacctcagctgcacgatagaaaactgagaaaagggaagccacagtaggtagagggaacctagttaaaatgctctttcaacagatcagcgacaacggcggggctccttggagaatgatattttaatgacagcatattgaatcactggaaggaagacaaattatttcataaatggtgttagctccctccctattctcattccttatgccaaaataaattctagacgcatgagtgatttaacttttaattttgagacagtgtctggctctgtcacccaggtgggagtgcagtggcgcgaacacacctcactgcagcctcaacctcccaggctcaagtgatccttccctctcagccttccaagtagctgggaccacaggtacacaccccatcttgctagttttaaattttctgtaaagacggggtctccctatgttgcccaggctggtcttgaactcttgagctcaagtgatcctccctcctcagcctcccaaagtgctgaaatta

SEQ ID NO: 42420 - DNA, 2682 bp, Homo sapiens
caaaaaaaaaattatttaaaaataaaaataattttttttgtagagacagaggtcttgctatgttgcccaggttggtcgacatagcaaggccaggctgatcctctggcctcagcctcccaaagtgctgggattataggcgtgagccattgtgcccaggctggaatatgctgaatataaaagtgcttgtgagctgctatgtactataggaatgtaatgaaaacgatattttactattactgtttctacaacaattcacttttatgtgggaagtggtgagtaagtcctgatgaccctgtgttaaatctttaaggccaaatgtcttctttggtcctggcaggaataaacaagtttttcaaaaatggtgtgcaaacacacacacacacatacataattacaaccagcaaatcagattatagaattttctgaacaaattcacctcaaaatatatctatttatatttatatatcaaaattggaatcacaaataaatggggaagggattgcaatttcaataaattcagtgctaggaaaacctacagtgttacagctcttttagaatttgtctagcaggctttccggtttttgctggaaagctccccagaaaaaattccaaaaagaaaaaacctactagcagttaaggaggaaaaaaatcagcaattctaccagataagtaaggttaacatttatttgatcttcagggaaggaccccctacagatacatacaaactttccatccattaaagtacagagagaaaacaaaaaagataaatacaatgaaaaatatcaaatttaggacataagactgtgcatttaaaaaaaatcccaagtaaaattaaaagagcaaaagaattaggggaaaaaaactccaaacattccactaatatagctggcaaagacattttaaaaatacagagcatatgcaaaccaattctttagtaagatggaaccatttatacactgcatttgaaattacaaactatgataacttttctggcaatacaaatccagatgttaaaaaaacgtgcatgccctctgaataattccagttctaagactatcaaggaaaataatctgaaatacaaaggtttatatacaaagatggttatcatggctttaaagtagtgaaaaatggggatgatctaaatatccagctaaaaagaaatatttaaattgtgatatacactgtaaagtattatacagccaaacgtttcttttttttttttttttttttttttgagaaaggctcttgctctgtcacccaggctggcatgcagcagagcaatcatgactcactgcatccttgacctcccaggctcaagtgatcccatcccgagtggctgggactacggaggcgcatgttatcatgcttggctttttttttttttaagtagagacggggtctcattatgtttctcaggctagtctcgaactcccaggctccagccatcttcctgcctcagcctcccaaagtgctgggattacacgaatgagccaccgcactcggcctcattttctttcttaataatatggagaaatgatcacaacataatgttaaaagtatatttaaaagggcataaaaataaacatagcaaatgcacttttttgttttttgttttttgtttttttgagacggagtcttgcactgttgcccaggctggagtgcagtggcacgatctcggttcactgcaagctccgcctcccgggttcacgccattctcctgcctcagcctcccgagtagctgggactacaggcacccgccatcgtgcccagctaatttttgtatttttagtagagacggggtttcactgtgttagccaggatggtctcgatctcctgacctcatgatccccccaacttggcctcccaaagtgctgggattacaggcgtgagccaccgcgcccggccacaaatgcatgttttattttatttttatttattttttgagacggagtctcgcttttttgcccaggctggagtgcagtggcacggtctcggctcaccgcaacctccacctcccggattcaagtgattctcctgccccagcctcccaagtagctgggattacaggtgtgtgccaccacacccagctaatttttttatttttagtagagacagggtttcagcatgttggccaggctcgtctgaaactcctgacctcaagtgatccgccgcctctgcctccccaagtgttgggattacaggcatgagtcaccacgcctggcctgcaaatgttcgtttttaaaggcataggaaaacacatacaaatgaaaaggctgaaagaaaacataaaactttaacatctgttatctctgggtggcaggattttacttttcactttgtacagttttcaaatatcatataatggttacatattaacttttataatcaggaaaaaaatttttggatgcagcagctaaatccagggaaggtcactcagtttcttcaacaaataaatggcaaaaaataaataaatcttaagagatggcaggggaacggttacagattaaaacaaaattaagagataccaatcctgattcaaaccaacctagtaaaaggacatttatgaactatcaggaactttgaacactgtttaaatgacattgttacatacgtacaatgtcaacgatcacatctaaaaagagtctttatctcttaggaatctcactaagtattttcagttaa

SEQ ID NO: 42421 - DNA, 4129 bp, Homo sapiens
acattatcatagagatttgtgaggaaatcttttaaaaccatgcttttaataattatggtttgccaaacatagaagtcccccattatccacaagggatacattcaaagaaactccagtgggctggacctggtgtctcagcatccctgtaatcctagcattttgggaggctgaggccagaagatcacttgagcttaggagtttgagaccagcctggacaacacagtgagatctcgtctctattaaattttaaaattaaaaaattataaaacaacccccccccagtggatgcctaaagcccatatagtacagaaccctatatatggactgtttttttcctatacacacctacgataaaattcaatttataaattaggcacagtaagagactgacaatagttaataatagaacagttataacaatatactataataaaagttatgtgaatgtggtctctgaaaatatgattgtattttcaaactgcggttgaccacagaaactgaaactcgggaaacccctgaaagtgaaaccacggataagggggcactactgtgtagtgaatacgctctaaaatttaaggtccaaagtccatgtctgaaaaatttaaattattactcaaaaaagaagtactagaatgtgaaaaagcaggttatgtactgaaaagcatatgtggtatgataccatatttgtataaaatatataaatgcaaaaaagtagtttagaagggtataaactaacattttggtgatctttgggtggcaggattattgatttttttttcctatctgcttttatcaacatcttctctattacacaaagtatttcgtataaccaaaaatattagttataggctagcataaaaggtaaaaagctgaaaaagaacttcaagaaatctttccttcttctaaatcagaaggattccaactacagtagtaagaaaaaatatctcaacggcaaacactggagaaaagattcgttaaggggttcatgttataccacaaggacatacccttcaaggaaataatctaaactcataactcttcctgggtttgataaggagcaattaactatcacgtactgttgttctttcttgctgttaaccactgaaacacctcaattaatgagttctcgggggtgaagcggtgttcttaaacaccacgttggaaaaaaaaaaaaagttaggacaaaaaggtttggttttctggtcgcagtgctgtcgacggccgcggagagcggcaagttcggagcaggctacactaaaggaatctgcgcggccagccaccctaagtggaagggaatgcaaagcctcctgcaacctccacagcgctgggcagcaagaatgcctcctaagcgtcccaacactccaacacctggaaggtcttacgctttccaagttataatatgtacagctgctgtttctgacaataacacacacaaactggaaggtctcttctgcaaatgtagctattacgtgtgtgaagctcatccgactctctcgatgcaaaagtaacacattctattaaggccacagcctcggttttgccaactggggcaactgaaaacatcctaccgactctctacagctagcaaaccatctcggctaaaatcctggcacatataaacagccactttggtgaagtctgcctttaaacagcaacacgggacttcgggtagagccggtaaccagtttatcacacactattagttccaataaagggtgctgctacctctttactgtcagccttggttccacttactgagcaaacagaaaaaggggatcctttaaattcgcgacacaataggagctaaaaagctctcgctttcagggtgtcagctttctcgtctcacttatcacaacaaaggacgcatcctagtgacttcaccgtacccagaaagggctgagggagacggtaaacaagatagtgtggatttcaggatttgtgagtttttccttccagctacgactctctttttactccatgatacgcctccacccgtcgacaatctgatcctaaaaataaaaccacccgtggctaccttgcccttgcctgcaaagccccgactctgacatcctgcagagaatacccaattgcaggctcttcgcgggggacgcgggctcggcagcagcggagcttctcccggtgcagaatcgccagcccggccgaggaaacgccaagcccgagaaacagccctgttctgccgcagccgccgcagtccccgagagcctgaggagcccccaggaaaaactggggcgaggggagggtgagccagcaaacgctggtgggagagggggagacactcacccgcccagacaacaaccgatggggcggggaggatgggggccgggaccgaggctcggcagaaagaccgcctggagcttccagaaggctgcggctgctccggacgctgctgccactgccgtttctggccgccggcttcctccccctcctctgttttgattcgagtgaccacgtcactcttagccacaagacccggatctgccggctcccgcgggcggcggcgcaacagattgcagcgcctggagactccagctgccccgcctgccgagcatgcgcatgcccagcgcctgccctgtgcgtcccgggaagccgggcgggagcctgcggcttcggacgcctacgacacgctgtgcgtgggggcgcggagtgcgggggatgtagttccggttgggaggggcgtggctgaggactgtgaagcaatcggggcgaggccgggtgtctgttcaactctcccgcgtatcgtctgtttcttcggcggcggacagtgttctgtaatgtgtctcccgttgcccgagctaaaggttttcctcgacggagtctttagaataccgtggtagaggtagacgcggttacaaattgatgtctgttgagacagtctacccctgtaaagtgtttttggttactcaggcccggatggaaattggagatggggattacaaaaatacatcaaatgtggctgttattgattccctttaccttaacatttttgcaccggaaacgaccaaaattaagttcaacaggaatattaataaaaggaatatgtagtcgggcttggtgactcatgcctgtaatcccagcacttcaggaggcagaggtgggcggatcacttgaggtcaggagtccgagaccagcctggccgacatggtgaaaccccatctccactaaaaacacaaaaattagccgggcatggtggtgcccgcttgtagtcccagctactcgggaggctgaggtggaagaatcgcttgaacccgggaggcggaggttgcagtgagccgagatcgcgccactgcactccagcctgggtgatagtgagactttgtctcaaactaaataattaaagatatgtgaccaaagatgacttgctggtcaggagataatggggaagtaggagggaatgctgtggctaggcagccagccagcccaagtcttagttgctttggttgtagagctggaataagagtgctgcttttacccaatcttccttttagagcaagttggtgcttcctattctcccattctagtctctgagtctccccgctaaattttgggggccctggaaatttcccaatttggcaaaatgcagaactatattgttttcttaggtccttcagttggcaagctttaattaaaatgggacaagtggcgaagtaaaagtgaatcccaaacaaagattttacgaaagtgcctctctgccagtcttgacggagaggtgaaagctgcaagctttcttactcagatttgatgaccttttcacttacccagacttccacctcagcaatttggttaattacccctcgacaagctgaatcaccttccccaaataagtatcatttacaagagctttttaattaaagtggatattgaacacaggtaaaggtttctagaaaattaaaggtttctggtaaaacttgaagtgtttcccagttaactaattgcaaagtagatacaaagaataaagattttggcccttaatctgcaaccttgaactctgcttactcaaattcagagtttgagatggaatctggtgccctaatgagctgacactgtaccaaagggtctttaatttgtgcaactccaaacaaaatctgttatgcttgagtgcacccatggg

SEQ ID NO: 42422 - DNA, 337 bp, Homo sapiens
ctacatagcaagatccccatctctaaaaaaataaataaaaatttaaaaacaacgtcttacttttcttgtatattttgtgtgcattattgttttcctcatttttagtttgttttatttgggacagtcttgctctgtcacccgggctggagtgcagtggcgcaatcatagctcactataaccttgaactcctgggctcaaatgatcctcctgcctcagctttccaagtagctaggactacaggcatgtgccactatgcccagctaactaaaacaaattttgtagggatgaggtctcactgtgttgctcagactagtcttgaactcttggtctcaagtga

SEQ ID NO: 42423 - DNA, 1383 bp, Homo sapiens
tgtgctgtgaaggcactgtgcagcctagtgtcgtggcatttccctcttttgggggacttgggattcagtataaagtccttgatttttaaaggcctggatgttctgccttccaactttgactatttttcacatatttggatagttgggccctaaaagctgcaagtacttaattggccctgttccttaatgggctctgtctggagctcagtggtccagttggagaaacaggctaaattaaaagctatttatctaaatgaagttggtctccttgtagagtcctgtggtgaatttctgtgatttgtgttgccttggtgtcctttcttagtcttccactagcacagccagactccttcttgaagacacttggattctttctctctctctgctttgagatgtggattgtggctgggcatgatggctcatgcctataaatccagcattttgggaggctgaggtagaaggatcacttgaggccaggaattcaagaccagactgggcaacagagtgagaccttgtctttacaaaataataataataataaaaagaagagatgtggattgctattctgatttctctggggctcattgaggacttgggctgtgtgggacaagtgaactttgacttgttatatttgcaggggcatagtttgaatccaactgtccttttggactagtgagttttgccagtctcatggctagagttttgaaatcaaggctgtagagtcttcgtttgcatctgtttgtatccttttttttttcccctcatgcaggacacaactgtctgtatctttatgtgtatatctgtttgtatattgtctatggtaccaaatgggcttataaataaagaagtcctcgttaattaagcaaataagcccaaatgcttttcaagtgtgattttagcaatctctggtaaataaacattgttttgtattctctttattttaaaaacatttttatttatttacttttttatagatatgaactctcgctatgttgcctcggctggtctcaaactcctgggctcaagtgatcctcccacttcggcctcccaaagtcagtaaatatagtttttaaattgttggtaaaataaaataaaaacatattcaaattttaattcaggtattttttgcctggctctattgtttaggtaggtttatgctgtcactgctagatgttttaatgccataaaactgttgcttctatgatatttttgatacttgcttatgaagacatgaaagtgtggtttttgttaaagggaagataattttgtatgatttagaggtgggatttttgtttgtttgttttttgttttttttgggttttgtttgcgatggagtctcactctgtcacccaggctggagtgcagtggtgtgatcttggctca

SEQ ID NO: 42424 - DNA, 1241 bp, Homo sapiens
gggtttcaccatgttggtcagcctggtctcgaactcctgacctcaagtgatccacctgcctcagcctcccaaagtgctgggattacaggcgtaagccaccgcgcccagcctcttcttccacctttttattctatttgggttcccaatgaattgaatgatgcccatccacatttatgagggcagaccctctttactcagtcaactgatacaaatgctggtctcttccagaaacaccctcacagacacatccagaaataatgttttaccagctatctgggcatcccttagtccacccaagttgaccccaaattaactatcacaccatcttaccagctccctttcccacatccaaacaatcactgaatcctgttaatgtaacttctaagtcagcttaagttttggcattctctctttttcagtaccaattcttagatcactgcctagactaataaaataatctcttaattggtgattctgcctagagtcagctcttcacaaatcatcctgtgtgttgttgccagggtgttctttctgagatctttctctaactatgtcatttccccatttaaaaccctctgcaggacaggacaaagttcaaattcctttacatctgaatcccattctccaccttatgcattgcactggaacattgtaaatctctttgtttcctgcacacatcatgctcttgtacatggtgttctgctgcctggaatgtcctttccaccttgacttcttgctgcatacctattcatcctttcaaatctggtgcctgcaaccacttgctggtgttctgtgacactttcttgaatctcacagtgagaatatcctcctctgcactatttcacgaccttgcacatagttcatttgtttcatacatcacacactgttgtgttacgtattgacatggctgtcttcacaactaggctctgagcaccttaaaggctgggactgacgccagtcacaatctaatgcaaaggacagtgctgttatggaaatgtttattgaactgaactgaaaatcctgccacataaagagagcttaggaaggacagagaagagatagaatgctgaaaatgccaagcataaactttgcagtggctgaattgtaagaaattcacccaaagagtcagctctgagtcacctcttttgaggttcaaaatcacacaaatgaagcaactgaacatagaatttaaccacttactttgaagagggtttcttgctagccattcaggaaaatacaaa

SEQ ID NO: 42425 - DNA, 2436 bp, Homo sapiens
ctgtggcccaggctggagtgcagtggcgcgatctcgctcactgcaacctccgacccccaggttcaagcgatgttcctgcctcagcctccagaatagctgggattacaggtgcctgccaccacacctggctgatttttgtatttttagtagagatggggtttcaccatgttggccagactggtctcggactcctgacctcaagcgatccgccgcgccagcaaaaacgttttagtcttatctgtactcatttactcattcaatatttattgagtgcctactatcaccaggcacctttgaggcctaggtttacagaaataaggctccccctcccccaccccgagtcccctgaagggtactgtaattgtttccatttctccaattttcactttaatatatgtgaattttcacatgcttcattcagttcagtggttctcataatgtggtcccggaaccagcaccaacagcagcagcaactgggagacttgttagaagcgcagtcttaggcccaccctacactctagggatgggcataggagtgtgtgtgtgtgtgtgtgtgtgtgtgtgtgagagagagagagagagagagagagagattgtgtgtgtgtgtcaagctcggtattaaataggtcaaagagcaacatctggcttctaaacccaccctcaggcctctccaccgagtacctgtctcaaacccaatctgatccaacaataaccagccttaattcaataatctgtgctacctgagatgatgggaataatcgtggtactataaatgttgcagaacaaaaacgactgcagtagattttctggggctacaccaactgaaaatgggccggaccgagatccgggagagcgttttcctgcgctagacacggcgttcagcctccgggttccgggtctagctgagtcagggcggcgttccagccgagtgcggcgtcggaaacccgttcggttgcgcccgaaccttcggtcagaggccagcgctggaagcccagaccacagcacccgggtttaaacaggagcggaggcgccgggaagggccgggggggccggctagggccggccagcttggaagccgcaccctcgcggccccagacgccggcagggcggagccacgcggccgcagccccagccgagacgcgagctcgtggctcgggcgtatgggggctccaacgggagcggctgcgccgcccggccgggtcaacgtcgtgcgcatgcgccgacccggcgccattttggtggccgggcgcggaggtgattccacactgaggcgagcgcggcggccggggtggtagtggcagtgttcgtgtgctcaggtctgaatcgccgagggaggaggcggtggaggaagaggtggcggcggtggcggtggtcgtagcggtggcggaggaggcgggtacgaatcagctgcgggcggagacatggccaacatcgcggtgcagcgaatcaagcgggagttcaaggaggtgctgaagagcgaggaggtcagaaatgaactcccggatatcccccacctctgcctggggcgggagggtcctcccagctgcgaccccgatatccccggtagtccctgggtggtcctccttgcggccgcccttctgcctgtgaggaagcagcagtgttcccctcctccttccgccgccttcccctcccctcccagagcgctaggatggacggtctcgcgggcgggtggtctggggtggaacatggtttggggaggtgatggacagggggcaactcctcggagggatggaagctcacaagagaacccgaggcggtggccgcagctggaaatgtggctgtggggtggggagggagcaggccgagcctgagaaaacccgggaagtgggttgggggaaggggaaaggtggtaactggatcccaagagcagtgctgctcgaaggcccacacttttgagggtattcggggttattgcctgtcaggccttcactgttcttttcttggggaaggagcagtgagtccttaggtattgattaaaaaggaaggacattcagagttagtccttcttagttgggtgttaggagtcaaagggagacataatagaatactgtcttatttggtggcaggggtaagggaattttcacctgagttagcaagttaattccaaataagataattatctcttttccacttaacccccaaattcctaggcctcatctttattgacatctcaatcttttgagtgggcaaaggcaaggtgtttggtgtattaaagacatgtaaatatttttagttaggaaacaaataatggaatgtatgagtagcttatttcaaaatattgtttacaagttacagatcagagagactgtcttaagacagtgcctctgtgactcgtgttgtgccacgaaacttcattatgatgtccctcatagttaacttgattcttacttttgaaaagcagacctattaaaaatg

SEQ ID NO: 42426 - DNA, 532 bp, Homo sapiens
tgttattaaattaaaataaactgtttaaaaaaaaaaccagtgaccccagaaggcaccacatggaaaagaaggaccacaaagtctattcacagaattgaaagaaacaattattcattttaagccactagattttgctttaccacacaggaacagaaatgaaattccattcattcttcccttttttaaatatgtcgttactgtgcacatttttaatgtgctgtactgaggcaggaaagataaaagctacatttcctagattcccttgcaatggagttgaagtcataattctcgtatagcccatcagaggcacttattcaagatttggaaggtgaaagttcagaagaggtggtggtgtagtttctgctgttgtcagctggcaagtatggagtgagctgttgtgtgtatgtgtgtgcgggcaggcacatacacagcagctttctactaactggctgttagtattgtgaagatagagggaagaagcatccattttgtgctggtactaatctattaaactgtgtgaggctctgtacca

SEQ ID NO: 42427 - DNA, 696 bp, Homo sapiens
agtttctctcaaatgcttaaaaaaaaaaaaaaagctgtcctttttctccctacaaaagaccaaactcactctcattctcttcacatttcactgtaatgtcttcaactacatgataaaagttacaactttttagttctacttagtttagattccttagaagaaagcaactatataacaaccaaagtaaatatggcgttattgcccctgccctctgccactaaactgccctgtgactgattttggtaaaggttacttgaatactttggcctaactttcattatctgtgaagtaagaggaggttccagaatttcctttaagatccttctaattctaagattatggttccactgtaaaaccgcttgttcctttttttttttttttttttttttttaagacaaggtctcactcggtcacccaggctggagtgcagtggtaggatcacggttcactgcagccctgaccttcctgggcttgagtgatcctcccacctcaccctcctgagtagctacgaccatatttgcattttttgtagagataggtttttgtcatgttgcccaggcctatctcaaattcctgggctcaagtgttcctcccaccttgacctcctgaagtgctgggattacacaggcatgagccaccacacccagccttgttccattcttgaaaactgacgagaacaggaccaaacaccgctga

SEQ ID NO: 42428 - DNA, 2205 bp, Homo sapiens
aaactcactcaaagatgttatctgagatacaacagtacctttcagagggggtaagagatctaaaaaacttggaactttaaaggccagactgagcagggtagcagtatcacaggagaaagcgccttctaccaaagacatcaaaatccgtccagacacttaccttcaggcgtttgatcatctcgtccgtggtgatcttgtcggtgatctcttttacccccggagggtaagcgatcttcccgtcggcactcacgacgccacagagggcagtggcaggcttgggctgcgcggtgaagtccatcctgggggacaacttttggttcacagtcctctaccggcctctatcggtcagaaaaccaaagttcagcgggaaaggggcgactttgtaacctcttttttcatttcaaatctctctaatctggaaaaggccctgtctccccagaggccggggacccggcagcggcctcgccacccgctctttcccagggatcgaaccccgccggccccgccaacccggccctgccagccccaggctcacggggctcctccgcaccagccgccgtggccgccgaacagcgccaggagtttcccattccgcctttcacaatgaaatccacccccgagcaccagggtccgaagtttggcggccccgggaggccggcaaggaccccaaggcccccgctcggcggtggggaagcacccagtcccgcccggccagtcccctccgggaaaccagacccgaggcctatagggctcggcttaggccgcaaaactagggacccagcggacccacgcgcagcggcggctgccgggaacaaaacgcccttgcccagccgagcctcggacccggggtagtccccgccgcgctgccacccctcccctgttccgctccctcacccccgcgggaggggaaaacaagccgccctccaccctcagccccacgccaggaagcggctgacgcgcctccgcacttcacattttgttccttcaacttcggctgagggaccccagctgcttctctggcccccggccgcttggcgcctccggcaccgccgaggccttcccggcaccctcgggcggccccaccgggcctcggacccgcggcccccccctccagtctccccttccgtcccctccctccagcagcctagggcgggagccgagccgccgccgcctttacctcctcctcatgcgggcggaaggtgcatcgagcgcccgggcctctgtcaggtggttgcgccgccgcccctagtcgggctgcacacaaagcggctccgcgggtcccgccgccgccgccgccgccgcccgcccgcccgggagcggcgctggggctggcggtgccgaggaggagcagccgccgcggggggagacgcggggcgagtgagcgctgggcggggagacagtgccgctctccgtctggccgaggaagagcagcctcgaaggctcctccgggagtgtgtgcgcttgtgtccgtccgggacccccgcggcccgcccgcacgcacctcgcgccggcccggaccgccgactcggacccggacgcccctcgcagaggcgcgcgcccggccgtccgtgccccgggagccggggcctcgcgcacacaccggccggtcacgcgagcggcgcgagagcacgcgagagcagcgcgcgctcctcgctccctccccttcctccgccggccgtgcatccgcctccctcgggcccgaggcggccgcgcgcagggcggacagcgccgccacccggttggcgccaatacctgccgcgcggggcgcctcccggaggacccgaccggagagggcgagaggaggaggagcccgggtggcgggaagcgagcccaggttcccgcggccttgcgagggcacgcagggcaaacagtgctttatctttcgcagcggcgatgagctggtgacttttgggggtcatcctgagggacatagacgaaactggttgggaggtagttaattgctcggtgaaaatgaactgatttcctcctcagggagagatctgcaaagtcaaggaaagttgtgcaatggggcgcagcgtgagcggctcactctcgggtcttctgacagccacccgagttgcccaccctccttagatttctgaagttaatattttgaaagctgcaaaacatgaaaatagcattgggtcgagtcgttctcaaggtatggtctttgggccaccaggcctcacaatcactttgggtact

SEQ ID NO: 42429 - DNA, 972 bp, Homo sapiens
ttggagcattatgatatcatgcttatataaaatatatttaatatatttaacttcatttgcaggctattgaactctaggagttgccttatgaataccattctgggactttgaggattttcctaagtactttccgtctgttcagtactgggaataataatataaaataaatagtaagaggatagtactatctatagcgttgaaaacactgacagagaaatggactttgccttcagaaaggtattagcctcaaaggtttaagtagtcctagaacttggaaacatatatcttttttcctttttcttttttcttttttttttgagtcttgcagaattagctagaatggaaacccatatttgaatgtactaaaataattatcacaaggactctttaccctgggattggtgctcttgccctggccctaacgcctttcctttcaaaacagaaaccagaccaaaccaaacaaaaatgtctcacactcctcaaactccattctatttagcaacattcagcatttatctttcaggcaggtcatcaccaaacattgaaaagtctaacttcttaggcagggactgagaggaaagtctagtgggtggaatgtgttacttggccccaggcccagctcatattttccatgaacaaacaccaccttagcttagggtgaatgtctttaacgacacctctggagctggcctccctcaatttaggagatttttttttttaaagtacaatcaaattttgagaacctaaataatttcattacaaagaactttacatttccttttaacaagcatttacagaaaaattactatgaggtcaggcgcagtggctcacgcctgtaatcctaacactttgggaggccaaggcacgtggatcagttgaggtcaggagttcaagaccagcctagccaacatgtcaaaaacccatctctactaaaaatacaaaaattagccgagcctgatggtgcatgcctgt

SEQ ID NO: 42430 - DNA, 3381 bp, Homo sapiens
gggactcgagacctctaaatacaaaattcatacaaaaggaaaaattcccctatttttctatatggatggtttcatcagaaaatttatcttcttgagttctctccttatatattactagtttcttgaaaaagcactacaacgttctcattgtgaataagtgttccagttagacctaaacgacaaaaaccacttgcacttgccccaaatttacactctgtttaaagcaactgccataacaaccaacaatgtatcttcgatgcaaagggacactttgtcatgaggttatttcgcttctctattctgggaaaaaccactgcaagtggaatgaaaagtaaccgcaaagggaggggacggaggaagtaaaaaacaggcaaaaccaccaccactaccatcaccaccaccaccaccaaccagaaagcaaaggtgaaaaatttgcgtaccctgaaaacactaaacatttcacatcagaacccagaacaaataaaccagggaaagcagagttgagagaaaaaaaatggtgcaggcttggggacggactcatactacagcggtcgcaagagggaagagcacgtctttgctttttcttggcatccgaaaactcaagctcgaactgggggcaaaggccagcggctgcggttccaccggctaaggcgcacacattccccgagctcagaccgcacgctggcagggccgatggggctgggcagcctccctccaccccgtggcagtcgcctacccctttgtctccccgtggggctccgaggccgcgcgcccggaagccccccgcgggagggccgcgcgcgagaaggcgggttcccgtgcccgccgcagcggccacggccctagtcaggcaatgccgaggccggtcgctcgcctcgccgtccctcccaacttgcagcctggaccccgcgcgcgtcagggctcgtcccagctctgctttcctttctcccctcacctcgcgaggccgaccttgtgtttgttttgttttttggggctcgggagagtgccgagggctagaaacagctgtggtttaccgcgccgcttattttggcaaaaattccgggcctgttgcaatgttccccagcgccaaacagctcccgccttccccccaagcagaacccgacactcgaagaagggcttgctcctccagggaccccctgataagaaaagtggggaccacggcccgctctcgggcgagacttggggggtgggcgaccggaagcagccgaaccggccgggcagggcttgctctccaacgggagagcgggagcgggagaggtgggagcgcccgcgggctcaagtcccccgggccgccgcgccgaggcggagctcggggacgaagcagaggtcgtggcggacagccggcgggcttgggggggggcggtgggcggcgatccacctgggcgacgtggcagccattgccggcgcctcgagacccctccccacccggccgcccacccgccctctcgcggcgggcttctgcgcggctgctcttccccggccggacggagagcggcagtgtctccccgccgggcgcgctcgccgtgtctcccccgcggccgcagctgcttgctagccttgcgcggcgcgggagagcgcagtggcgccggcgggaaagggctgcggacctgcggcgccgcgttgtgcgttcgacgacgcggcaccggcttcgacgccctctgcccgctccagaagcaggtaaaggcggcgggtgggaggcagggaggcgggtccaaggtgagggccctggaggttaggggtcccggggctccgagccgaagcggagggcctgaagcagcggcgggcggcgcggcgaatgaacccccaagccctgaatgtggggcccggcgcgggccgcctccgatctgacccgcgggcccggctgcccggacggaagggaagtgaggcgtcggcgagaggcgggccctggcgctcagcccgaggccgggcgaaggcgggggccgcggccgcttccttggcctccgagtgcctggcgggcctccaggccccagacacacccctctcgaccccccgaggtttcctcccagatctgttcccgccgggacctgaccttgcgcccctccaggcgccttaggtgtttgccaggcggagccttctgggaacttcaggccaccttcctgagcacatagtcctagcagagccgtttatttactcagttcaagtccagacacacagccactcacacgttcggattttggagactgcggggagactttcccctccccggcatttgtgtgtctttggccctcgtcccgcctcccctgcccccatctgcaactttgtccctcaatgggacccttctagagcccctctctcatcgggactctctctaagccgtccgtttggaaattcatcctcaatagagtgagtcatcttagcgggggcacagtttatctctcatgcgcttttggttaaaatagttttttttttccctccgaaagagagctagagtaatagaatgtagatgacaggtcagtgtcagtgttggcttcaaaggctcttcctttcggcggcagtctttgtaactaggatctgatatttgtggcacggacaggtttgtacacattctcgccatgcagtggttgtaatgtctccatggcacagttctggcttgaaggcaggattggctgctttttctactcgacatctttgagccaatcagcaagggctgcttgcctggagactggttaactcagtaaaggtggccattggttgagctcctagaagaaaatcctggagatgaacctagcctctcagaaaacaatgactgatttgcagctgtattaaaaaaatgttttcttttaatcccaacatcagccttttcactccgtttttattacttccagtgtttttctttcaaacaccagctgtcttttgtaactcgttttaactctcatcctttaattttaactaaaagacgcgctttaggaaatgtaaacatcgtgtgttctgtgttttgataaacgtggttccatctgcctttctaacattgtttactgctaaaggtcagaaataaacagttttgagtttcgctgccaggaccttttattatttaagtgccgtgctaggatggggggtaggagcgaggggctgtagtggtggacatggtgggaagaataggaaataaatggctgctcttttgcaaggaggctacaatttagttaatgaaaaaagactaacctgtaaaacaataaagaataaagcagttgaaatcagcacgcagtacgtacgaatgccagtttgtgtacttgttgactttagttaatttgaaggggagatagaagtactgtatttcatagaaaaagtgggcttaagttatggtagaggcatgttttttccttcattaaagtatattaaagt

SEQ ID NO: 42431 - DNA, 1171 bp, Homo sapiens
gtagccttgtttaaatagaacataataaggcggcacagtctgtctgtagaacttttacactaattgaaacagatatgggtgcaatttacaagtgagtcaccagagctaacccaagggcagttgttgcatcgtagatctgttgtcttggggaattgacttactgaggtgttggactgaagatatttttttaaaaagttttcagacagccctaggtaaatcactgcacatgtgtacttctcaaatacatctcctccctctcccctttctcttcctcctcttcatcgcttctgtctgcagcccgggggtacctctctcacccaactttgattgctctagcatcaaacagtgctgtgcccatagtaatgctgaaccacatttcttaagtgaatcaatcctcacagtcatcaactccacacattaattcatttagtactttaaaattttccaaagtgcttttccttgtcttattataacaattgccagcatttggtcagcactctagaggttataaagtactttgtgtacactgtctcctatgacatcacagcaatgctgtgggttattattacttgactcattttgcaggcaaggaagctaaggttcaggaatgctaaatgactcatctgtgaccatgtaactaatgcttggcagaatcaggatttgtacttagatctcttgctccaaactcccttttttccattcgatgatgctttcatctgatgctctggatgaccctgtgaggtgttagtgtaagagatgaggtccaggagggtgacatggctcatccaggccacacacatgcactcactgaccagaagtgaggtcttccatccaagccttggctgtcactattttcacccttattgtcagagcatatttttttaactgaacccacttactgtgtggttgtctgctaggcattcattgagtaaacagatattgatgctatctctgtttaacaaatggaaaagtcagaaagaaggaaataatccataaatccaggcctcaaactgtatttaccttacttctctggatactgcatgcaaacccatacaatttttttttaatctcttgttagtgtagatcctttcattgagctcaaacctaaatcaacatggcagaacattttccccggcttctctgttatttactggactcccattttttggag

SEQ ID NO: 42432 - DNA, 702 bp, Homo sapiens
tgaggccgttgcaaggctttacaagacggattgtagctcaggatgtgaaaagattgcctcatcatcatgtgagtcatttaccattattatagacaatcctgctgtgccaaagggcttttaatcagaaggaaacactgaaaaatggaatcagggctaagaaacgcttggcccagcctgatgggctgtggaggatggtctgagttaagaatattttttagcctcaagggagatgcgttcttcactaagcgtttgcagaaggtgcagaaggtattgttctcagcccacggtgtgtgttttgttgaccttgactgcgtttttcagcaagaaggaaaggctatttgcctgataaatggaatcggagctcagcgtctcgctcctaggccccctagtggttgtcttttgcaattaaaaaaatgaagtgacgtgaggtcaacagcaggctctttgggtaacgatcgcaggtgactagagtgtgctgcctttgacgctggctcccccagacttcatcaaagctcaggggagaagccttgaaaatcaggagctccagagggacagacgcatttcctcacagaacgcgggacaggaaggcaggaaccttccgttgtggatggtgaagagcttgttctgtcttcaaacttctgaaccaatgtcctgcattccatgtatgtggctcatggttctgaccactgctgctttaaaatg

SEQ ID NO: 42433 - DNA, 1118 bp, Homo sapiens
ctactcaggaggctgaggcaggagaatctcttgaacccgggagtcagaggttgcagtgagccaagattgggttattgcagtccagcctgggtgacagcgagactccgtcaaaaaaaaaaattatcttttttcacaaagcttctcctgtatacttccagtgtgttagttacccccttttttgcattgtctctatagtgtggacagagttttatattcacacttatgacacactaaaaatctgtaatttaaaaatgtccacagctgtgccttctagattgtggccactgtgatgacaggaattgtgtcttatttatcttcacattccatcatcacggtggacattgtccaagggctgtagcaaccaagtaccgcaaacaaggtggcttgaaacaaccgaagcatactgcctcacagttctagaggctagaaatccaaaatgaagttgttgggagggacgtgttctctctaaagattctaggggagaatccctccttgccttttccagcttctaggggacccctgaaacccttggtgttcctccacattctaatctctgcctctgtctccacatggggtttccctacgtgtgcatctgtctatgtgttcaaatttctctcttctcataagtctgtatatttctaccagtcaagattgactaagcttcatttcctgccgtttggctaatgaaaacaatcgccatgtggaatattactttttgtaccaaaggtgcttctctggtctgccgggtcccctagatgtagtgccttttccctgatttgagaatgtgtgttctaatcctgaataatcctaattaggattgaataaggcccaccctaatacagcatgatctcattttaacttgaatacacctgcaaatttaaggtcaggcacggtggctcatgcctgtaattccagcactttgagaggccaaagtgggcagattgcttgagcccaggggtgtgagaccagtctgggcaacacggcaaagccttgtctctacaaaaaatacaaaaatcagtgggatgtgatggagcgagcctgtagtcccagccacttgggatgctgaggtgggaggatcccctgagtctggggaggttgaggctgcaatgagccatgat

SEQ ID NO: 42434 - DNA, 1607 bp, Homo sapiens
cactccagcctgggtgacagactgagactctgtctcaaaataaataaataaataaataaataaataaaataagtaaatatggggggtgtgagagaagatttcattcctttttacatttccttatccaggttacagaaactaaaataaaataaaattcctgctttacacggtttgtaccttaattacatttagaaataaatgactcaccacaggttgaaagtgcaaagattaggattattcaggactagaacacacattctcaaatcacggaaaggtcactatgtctaggggaccccggagaccagagaagtgcctttggttcaaaaaataaattctacatagtgattgttttcattaaccaaaccgcaggaaatgaagctgcgtcaatcttgactgtcaggaatatatagactttggtatgagaaagctttgaaggagacttgagtttttaaaaaattgagaaattctagtcaagaagaagagacaatggtgtaattcagacatgtgaactgtaaaacaattcaatattttcatagaaagaatgaaagcctgattcttctttgggtctggaaaaacagcattttgacaaatactggctgggaggtgggagggccccctttctggctacaaaccaaagaaggattttctttactccgtctctggcccaaagactatggttagagccttctgggttcagtcatttacagaatagtgactctacttgcaggccccaaggttcgaaggttgatacagaaacccaaagtgagaaaatggccttggtttctgatcttggagatttgaagcagggctgtctatctctaaccctgagagtcttgggccaggttgaaatgaattccaaaccaaagttgatgccatcatccatgttttgttaattaattcaattaataagtggtacatgactggtagtaattgggcagttgcaaaggctcagatacagcccacaggtgtccctgtaacccagaaaatccctacctacagaaagggatttgtcttgttctgcaccagctatattgaattctgaatgggtggttttgcaggaagtaatttaagctgtaagactatctgagccttcataagtaatatagctgtagaacatatagcaattgagattctcacattagataactgggccaaagtccagagaccagctcgtaggagagagatggctgacatccaggagttctttgtccccaagaatggactctgagcattccaattctggccccatcttgggcaactgctgtagggtcaaagctacaggagtttttcttttcatgggaactagttctaacatttgtttcaatcctttctaggagaagtagatagtaacttatagtatcctgaaaaatgttctgcaaaagaaacaagtgctataaaaaaagatcagcagtaaggaagaattaagaagtagaatagggcagggcgtggtggctcacgcctgtaatcccagcactttgggaggccgagacgggcaaatcacgatgtcaggagattgagaccatcctggctaacacggtgaaaccccatctttattaaaaatacaaaaaattagccgggcgtggtggcaggtgcctgtagtcccagct

SEQ ID NO: 42435 - DNA, 568 bp, Homo sapiens
caaggaggcaaataaagtctgcaagtcaaagagagaggcctcagaagaaatggacccttctgacatcttgatcttagacttcagaactgcgagaaaatacatttctgctgtttaagccacccagcatgtggtattttgctatggcagccagagcgaactaatacattagattacaccatcgtctctcgaaaaccctccgtggcttcccgttctattccttgctaaacctgaagttctttaataagttctctgaagtcaaagttgaatgaccttcagggcgctaggccatctagccccactctcttcccctaaccttatctcctgctgctctggatcattcggtgctagccgtgcaactgtgaaaggaaaataaaacttaggacgccaactcactctaccaaaagaaaaaaattaaactgaaagttgaatcatgcaagaagctgcctttgctgttgttcctaagcagatagcgacagatgaaaggccaggtatctccacaggtatgctcactttaccttgaagtgccaatttactgagggcgagatgaatacacaattggcaattcccc

SEQ ID NO: 42436 - DNA, 870 bp, Homo sapiens
gcatggtgcaaagtcctgggtggtggtctcctgagacctgtgtgatctctttggcagccatggacaagaagggcaagaatttctgccttttagcttctgtgctatgcatgcgctggctaacaagcagaagatgaggcatcattacactgggttcccgaacttctggttaactcttgagatcctggtgccagaagaatactgtcactcacagtgggagattcctcaaaattaagaagggggatttagatcctaggtagcaaggaaaaaaaaatcccatgattgtgccagaaacttggattgtgcttacaatccccgtgagtttttccagtcgagccctcttgctttgccctctccagtgtctctcctgtgggggtagggcctgtccaagtcccgtcatgcttcagtacctaagcaggtgcattcgctcccttcctgtgcctggagtcctgccatccattgctcaactccaatctcttgttgttttaacatttggccttcatccccagggcttctcctggctgcagttcttggagtcaagtttcctttcatgaagctgcagtttgccagctaagccaatcacagatcttgggacttggatagaaatgaccctctccccacccccattttcttgactcttccctctaagggtcttctctgaaatccctagatatgaaaagagtgatacattgaggctaacaggcccagatttgttaactgtggatgtgggcaagtaatctgaccttaggagcctcggattcctcccctgggaagagaaaggaaatcttttgactacaaagatttcttgagctgctgaagcacagtgatcatgattctaaccagagtgtcttttttctaaaactctacttcttg

SEQ ID NO: 42437 - DNA, 2413 bp, Homo sapiens
caaaaccttctggaatgctggtcatgttactcctctggatgttggttacatggatgtgctcagtttgtgaaaattcatcaagctctctatggtatgtacactactgtatctatgttactcttttaataaaaagtttaaaaaatatccacgtaaagtacttgaccattggcatatatggtaagttactgtcagccattattcttatctcctgctgaatgatcatcatctaagactttaacattattcccaaacacaaggaaaatgaggaaccaaaaaaagacatgctcgccgaaggcaggcttgactgagcactcagtggcacggctgtttgcactaaagcgttgggtaatttctaagtagattattttggctgttgtctcttatgcacaagagattccctctataaatgctagagcacatttagaatcagttgcatttccagaatttctctccttaggggagtgtcttatttggaaaggggacattaggggtttattgggaagctgagtctgcatagtactctatataagattgagaaagggtcaaatggccaaatttgaatgggggtggaggtgtgagggtggtgaggtcgacggaagtaaaactatctcatggtgctgtcagtttggaataaaggtcgtgaaaaaggagcggaaaaatcccagcaaaaccaaactggcatggcccagtgttatcacaataccattaagtgcaaatgttttgacccagcacacccccagcaaggtcatctcagaaaaaactgggcttcagtgacatctcttagctgccttagaatgactaaggttatttaaacctcatggttggttaatcattaatgaagatttttgacaaacaaagtagaacgagccaagaaagaagggtggctaaaaattagcctaggaaaggtcatatttcttgcatatgcagggattagtgttgcttttgtttctggtaactgtgcagaatggagtttcaaggaaatatgatcctgttggggaagccaatgtgtctctgaagattttacttaggattctcctccactgtattagtccattctcatgctactaatagagacatatgcgtgactgggtaatttataaaggaaagagattcaatggactcacagctccatatggccagggaggcctcacaatcatggcagaaggtgaaggaggagcaaaggcatgtcttacatggcagcaggcagggcagcatgtgcaggggaactgccttttataaaaccatcagatctcatgagacttactattgtgagaacagcacgggaaaaacctgcccccatgattcaattacctcccaccaggtccctcccatgacacatagggattatgggagctacaattcaagacgagatttgggtggggacacagccaaaccatatcatccaccctcagtcatctggaggactataggcctccatcacctttgctgagaagcctgcattcctgtcccatggggggtttacgtaggaacagtggggacacccacatgcagctgctgtatgacccaagaggaaagggtgaaggtcccagaggctggaacctggacctgcacaagaaacaggtgggcagccctaaaagctttgattgctgctataaactcctggacaagctcagagttgggaggcatccccccctggggccaggaaggcagcaggaagggagtttttcactaggggcagctctagcttcagcagtgtagataaacgcagggctccaccatttcctgaaagtcctaagaaggaatgaatgattgagggttctttctctgtgattactggctcccctagcttccttgtcatagggaccaaatctcttcctcccacagttaacacagggccatgaaccctatttaatgttgaacagtgcaaaggttggatttcttcacactttctcctcctttaaggcagccaccctgaactgatttcatggacttgatgataccgtgttctttcctccgggcccaggcatttcccgatcccttttccccctactcatctgcctaactcctattcatcttgtagatctctggctcgagcctgggtgtgtgccccttccataaaacagtcttatcatgcctgggagtttccagaaggcagagggtcaattttgttgatttatttctctggtgaatcctgcatagttggtactccagcaatgaatgtttatggaataaacaggtgaataaaagaataaaaaatttcagtgaatgaaagagttaaaaaaatcataaaaggatttaaaatggaaaggcttgatagaattaacaaagaggaatgcagtcacactagagtttaaaaaggagatgggaaaggaaataactgtctataactcgtctcattttttttttttttttttgagatggagtctccttctgtcacccaggctggagtgcg

SEQ ID NO: 42438 - DNA, 1060 bp, Homo sapiens
aaaaaaaaaaaaaaaaaaaaaggaaaaaagacaataaaacttaaaaaaaaaattgaactggagggaagaatcttgccccatgtaggattctgtgtttatgggaaaacaggcaagaggttatcccagccaactttaaaccagtcagtagagaagcctagcctgtgagttctggtggagactagtgtatcagagtctcccagattcctttcatagcaggtaagctgtctggcagtgtgattctccactggtgatgtggcttatgcatccatgtgtaagcctgtttctcacctaatccttggctaaagcactttgcagaagctctcccagaaagaacatgaagagacttgccacattggatgcaaaatgtccaaccatctatgtagatgccaaatcccctgaggtaggaccctcccagcacacagctattcttcccaacactaaaaatgcatgagtcttcactgaaggctgctagcattaaataaacatggcaatatatttgaaataaatcatttactcacagttttgtatataaaacaagcagaaaaaatataccttcaaatcaagctattattattctgaactagggatttttgttatgttttagggagagtttgaacttgttgggttaaaataaaatttcaaggcaaacaggtaaagcagacatcatcaaggatttgaattctctttttagcgtttgttcagagtagctttcattaggattttaactttgaactgggacattttagagggcaaaggataccagtgtactactgggaaatattatcaatgtttacataccagtgtttacctaggatcaaaatcatgcatgagtttactctagaattaataagactaccggtccgctgcactggctcaggcctgtaatcccagcactttggaaggctgaggcgggtggatcacaaggtcaggagttcaagaccaacctggccaagatggtaaaaccccatctctactaaaaatttaaaacaggccaggcgcagtggctcacgcctataatcccagcactttgggaggctgaggcgggtggatcacaaggtca

SEQ ID NO: 42439 - DNA, 1547 bp, Homo sapiens
ccaaagtgctgaaattatgtggtggctcacgcctggccatactgcccctttttaaagatcaggagattgagggtatcaaataacttgacccaacttacagaattgaaatgtaggtcaatctgatgacaaagccaaagctctttctaccatgatactcattctttgctacttacttacttacagcaggtttagcaatagccagtgttaacaggataagaccacgattggtgagaaatggacattggctgatagagtggaaggaatttccagtacagacacatggtaaagttgttgggaaatcattactttctaccatccccatcgcttcccctctgcactctccccaccactcttctaagctttcaaagagttctgcaaactgtcccatagcctatttctggctctttgtaaaggagttaacatattcaaactatgtttttagacttaaaaacctatggaattaaattcttaaatggaaatgttgaaggactagaattcacgtaatcgcaatgttcaagtgagaacatgggactgtgatgaggcagtgattccacgcccaggctctggagccagactgcctcgcttcctatctcttgactgtactacttgaaaaacaaatgccatcacacaagtcactttctctccttgagcctcagcttcaccatctataaaatggtgataatattatcattaacattgttgggaggattaaaaagtacctggctggttgggcgtggtggctgaagcctataatcccagcactttgggaggctgaggtgagaagcttgcttgagctcaggagttccagaccagtctgggcaacatagtgagaccctgtctctacaaaaaatacaaaaattagccaggtgtggtggctccagctactcaggaggcggaggtgggaggattgcttcagcctaggaggttaaggctgcaatgagccgtgattgcatcactgcactccggtctgagcaacagagggtaaccctgcctcatagcaaacaaacaaaaagaaacaaaaaagaaaaaagtacctggctacagtaaatgctcaaggccctttgttattatttcagatggtcaagaataaatgtttttcaaggatcttctttttgtagacaactgtgtagtcacagtttagagtcgttaattatctgcctggcaagatactttttaaaattaaaatgtaaagaacctgaggggattcactcccaaatgtttatggacaaactgaaagggcatttacacagatattaccttctacatttatgtgagaaagtgctttaagacactgtacatgtgaaatgtgtagttataatggctactactatgttctcttttatattttctaattatgtaagtattatgttctttttatcactactttgtattcctgcacgggagctttgtgcctacccattgaatgtagtaggccctaaatattgcctgttaactaattatggtgtcatataccatgttaaaattaaaatattacaattactgaagcaggtttaagagagaaacccgggcataatattcttagaaaa

SEQ ID NO: 42440 - DNA, 2151 bp, Homo sapiens
aaaatttgtgtgtaaaaggctgtttactcagggtggaatgtagtgacacgatctcagctcactgcaacctccacctcccaggttcaagtgattttcgtgcctcagcctgggattacaggtgcataccaccacgcccagctaatttttttttgtatttttagtacagacagggtttcaccatgctggccaggctggtcttgaactcctaacgtcaagtgatccactggccttagcctcccaaagtgctgggattagaggcatgagtcactgtgcccagccaagggtatttttcattcgttaaacttcttaaattttactatcacattggggattaagtttaaaaaaattttcttaaatttatgctcaaacagatttagaaagtgaactttttgctgggtgtgctgtcctagcactttgggaagctgaggtaggtggatcacctgagccttggagtttgagaccaacctgggcaacataatgagaccccacctctaataaagtcaaataaaattaaataaaacaaaataaaacaaaatgaaagtgaacgttcccaaacataaacttacagtcattataatggtgtgtgaatgctagtcttctcctcctaatttgaaactatattagtagtttgcaagtagtagttatatagtaacagtatggtctattattactgtgttatattacacatgaatacatgtacaatatgcaccttctggtggtatgtcaaatagtagtatacaaaaataacataggtctttttgtaaaacaaatgacaaattgcctgtcctgaaacaaaggctctgaaacagactgacatagtcaaacattagcttcagttttaggtgtgaccttctgcttttatttggtgaacattagtcatttcagttgcaactaggaaacaatatctgctactatagaaaaaaacagatcctgattatgttgatgtcatgttcattgaccagttatctcaaggcaataattatagtagaatagcattcgcccaggaatactctcaacattgaaaaagtcatgagttaaaatactttcttctataaatgtttaagtttaatgtggggtattttggaagctaaaaatattttcaaaatcaactatatttatgacaatatgaccatagtaggctgtttatgagaaaatataaaaaaggaagtgaactttctggtgggggatcacttaaagacaaaatgcattaaatacaactttaatccagaaaatatgtgttctttttattcattgcattgtttcaatgttgttccacctttccagctctggtgataattgtttttttttcccccttttcttttcttccttttttgggtacacagtgaaaaacaaaaaaagatagcttaaaaaacaggtccttctgcaaacatacggcgaaggttaaactctaataccccatggcttgtttactttaaaaatttggaaaagtaagcaccatgagttcattgatatgagtaggaacctgcgtcatcctgtggtatttgtgaatattgtgggctcttttatcaatttcatttgtttctaagtctttccaaagaactctattagaaatgagaccatctgagacaggtcctttaacacagaaaaagtaaaattcgccttctattatgaagtgattttagatattaaaggctctttccacttctttatgcattgtttgaaatgtcttagaaaagttaaaacaatagtgtttatagtttattttattagctacacttgaagcatctcaaaggcagtgatgcttattttatccccagtgcctggcactgaatgaatgtttgaataaaagaatgaatggatagaagaatgaatgaatgtgcactgtcttttgcaagaaacatggtaggacaaagctacaaaaagagtttccttttataactaacatccaccaaattgctttggacatttttttcacgtatctatttactaagttttgtgggagagccgtgcatgggggtgcatgcctgaaatcccagctactggggagggtgaggtgggaggattgcttgagcctaggagttcaaggctgcattgagctatgattgtgccactgcactccagcctgggcaacagagcaagaccctatctctaaaaaaaattaataataaaaataatttaaaaaaacttttg

SEQ ID NO: 42441 - DNA, 1770 bp, Homo sapiens
tcaacattcattgaatgtttatcatgcaccaggtatggcactaagcattccacatacatcgtcttatttaatcattgctacaacctcatgaagcaagatctatgatgctactcattctggagatgccagaactgaggtataatgaggctgcccatttgttaaggtcccttagctggaagtgaagaagctggggttcaaaccccaggccttctatggaagaatccaattgctgctgcactccaatctggaagagtagaaaactgaaatctgtgctataacaaaaatgacaaatgattctatatgcattatatattacagcttcagagtcaacatgaggagttaaacctgaatggcaaattcatgaattgttaaggcctaccaggtaggaattttttcaagaaccccaatattcagctttaaacagtaaatgatattctcaacctaggttagaaatatagataggagttcaactttttgggtgacgaatagagaatatcagataggcataaatatcatgggctcagaaatatctggtgttctgacttgtttcctagcttcttaaaaaactatcacactttagaaagtttttgaggactcagagaccccacaaaatgagtaaacaaaactgcaatttcactttctactgcttagttaataatctctaatcagacagttgtttcctgctaacacctaacaaaattatccacctctttcaaatagcaaagaaaatgaacatactaacattcttacagtggaaatataattttacaaataaacacaaattactgaatctttacatatgattcacagatggtggtgatgagattatcatgcccctccccactccgtctttgtgcactgacatttgaccctttttataatatgcaccttgtaccagtgaaacctaaggcaccagttagttactcattaaacttgggtgctgagggctgacttgtacaaattacgctgttaactgcccagcctggcctctgtgcagaagtggaaaaaagcaatcatcatagctgtgaaattctgtcatatcggcagaattgaactacaaattgcagcaattcgtacctgacctctgatctgtgaagttagtctaaacctttgaaccttagcttggaaccgagaagcagcactgacttatacaggacaaggtggctagcaagcgttctccatcgtgaatagttaacactgtgactgttggtcgccccccacacccacctcccccacagagtcatccagagtaaaagacacaaataacgatgatcttgagaatggcagacgtcttacaaaaaggcatttggaacaaatctaatacaagtatacaatttcaggatgcaagtctttttaaatgaatatgtcaaaataagaaaatggaatctgcaataactgaaattcttggatatttaatactttgtgatatgtacattaaaaaatttcctttacaaattagaccaaagtagagttcaaaatgaaatatttaaatacatttttaatcaaatggtgccatctctcatttgtcacattttaaaataaacatattacctaatctctgttataaaatacaaacccatattaagccacctttggcaaaaagcaatcagggaaaaccagttacacttttctttgaacccaaacttatcttttgacactaaatatcagatgtaggctaataaaaagtataagaatatgcatttctcacatatacattttgttgcaacattgattcatcataatgagaagggagaagggttaagagagaag

SEQ ID NO: 42442 - DNA, 635 bp, Homo sapiens
atagaaatcgaaacagtgagtcctactatatcagcaaaaatttttaaatttgggctgggtgtggtggctcatgcctgtaatcccagtactttaggaggccaaagtgggtgatgacttgaggtcaggagttcgagaccagactggtcaatatggtgaaaccccatcacagatttaaatggaagttgtaaaatcttacccccagtagaggatctttagaggaaatggggtgagggttgggtagagggcacatggattgagcaaccttgactgtgattcccataaatttagaagttcaggcaggaggacttcccccatgtaactatgattcaacagagcacacatcctgtttaataacaaaggcatttatgcaacattcattctatgtctctgggtaatttatatgttgcttgatcttggtaatgtgcaaacatttttagccagttcttaactgtcaggtgatctctgattgttgctgttttctatagttgttgtctagacactcacaaggattcaggtttattttggatcctaaagtcaaggccagtatttctttaagacttacttaaactggaagagtcctaagatttcagtagccacaaaaaattattctctgtgctcccccaagagggacagac

SEQ ID NO: 42443 - DNA, 1047 bp, Homo sapiens
agacaaataacccaacttaaagataggtaaagagtctgaacagacatttctctaaagctacacacactctttggtctcagctgcagaagccaaatgacaaagagaacgtcatcgtctggaaagcatcgcaataagatgcacacgatgtgccaccgctgtggctctgaagcctaccaccttcagaagtcaacctgtggcaaatgtggctacattgccaagtgcaagagaaagtgtaactgaagtatcaaggctaaaagttgaaacaccaccaggactgatcatatggggcgcctaaaaattgcacactgcagattcaggcatggattctgtgaaagaacaacacataaacccaagaaggcagctattgcaacatccagcttatctcacgaatttcagtgattagtcatgccataaaggttctggtttaaaacctgaactgaaaaaaggctaggcacggtggctcacgcctgtaatcccagcactttgggaggcagagataggcagatcacttgagctcaggagttcgagaccagcctgggcaacatggcgaaacctcatctctatgaaaaatacaaaaacatagccaggcctgggggtatgcgcctgtagtcccagctacttcggaggctgaggtgggagaatcacttgagcccccgaggttgaggctgcagtgattgtgccactgcactccagcctgggtgacagagcgagaccctgtgtccaaaaaaaagtaaagaaaagaaaaaaataatgaagtcacactttgcgagagtgggagaagtatggcagatgctgccacttattaccctccacttcagaagggcacatttcaaaggctcccatgacacctctcctgttccgatcattgtttccaaggaacaaagctcaggcatgcacctgtggatgccatgatgtccatgttccatgttctccactaatttcacttcagactagaaccttatcactaaaaacctcaccatgcagaattatcttacagagaagtttccttatgacacaatttttatgtcccaatggctgcctggcttt

SEQ ID NO: 42444 - DNA, 726 bp, Homo sapiens
tagaaattaaattaaaagaatattggattacttatttgtgctgaaagtcccacccaccaaaaattatcaccatttaatttgtccaccttctattcacattccttattttggtcatggtttttgtagggcctagatataagtcatttgtgagttatctgccaatggcagattctttaccaaagaagtacttggggaggaccaaggactgccaacctctgaagacaaaaaattgttgtttgtattttgtttttcagaataagcacaagattccttaattttcctttaggcaaagataaagatttttatctttaaaagatgctgggctatcagttaggcacggtggcacatgcctgtagtcccagctgctcaggaggctgaggtaagagaattgcttgaggccaggagtttgaggccacagtggctgtaattgcaccactgcattccagactgggtgacaaagcaagatcttgtgtctaaaaagaaaaaaaacaggctgggcactgtggctcacgtctgtaatcccagcactttgggaggctgagatgggtggctgatcacttgaggccaggagttcaagaccagcctggccaacatggtgaaaccccgtctctactaaaaacacacaaattagccaggcatggtggtatgtgcctgtgttcccagctacttgggaagctgaggctggggaatcacttgaacccagtgaggcgagattgtgccatcgca

SEQ ID NO: 42445 - DNA, 2506 bp, Homo sapiens
ggagtgcagtggcacaatcttggctcactgcaacctctgcctccggggttcaagcgattctcctgcctcagcctcctgagtagctgggactaccggcgcacaccaccatgcccggctaatttttgtatttttggtagagatggggtttcaccttgttggccaggctcgtctcgaactcctgacctcaagtgatccacccacctcggccttccaaagtgctgaggttacaggtgtgagccaccgcacccagcctaacctgacctttaatttgctgttatcttgtctaaatttaacagaattgggggtggggtggggggagaaagtttaaaagtattttcatgaaaccagaaccaccatttagcaaaacctttaaatggaatgaattcccgagctcacagaagtgcaaattgcaaggttacacattgcctcccagaaacacaggacctggttctgaactctttgctaaaggattctgattcagcccactgtaaaatctcaagcacaagtaggttttccacttactctccattacacacatgtccctctagcaaaaccaaaaacagcatttgatggaagctaaagattacaattatccggggactccgagccactaaaaaatagagtttgcaaagaaatcccttttgcccccgtcttcccctcaccatccctgccccttccgcagaagggaacccaaatcgtatgcaatttgaaatttttaatatgaatatactaaagtaggaagcacgtacctgctaagcacctggcgctctctttccctgcttgctctctcctcccacactctggcaacggaatgcccttcaaaaaccatggctcagtgcttttggtaaatgttttacgagacactaaacaggcttgtgtcccaccctcagagcaaacaccactgagggaacacaatataatggtcgaaaagatatcatgtaatgtacaataatgaaaatgaacaagcaggctctatttccacacttccccttaagggggaaagcaatgtcaaactttcaggtggtgggggcggagttgccggaaaggctcatagaaataaaccttgacgctggaagcgttagagcgatttttttaaaggtggcataacgataagctcattgttctaatcctcaaacaagtcttggcttgctgagctgaaaaactgtcaaaggcaagagttaataaagggtggagttcaccggcgaatatgtagacgcagtagcatctccacattgaccacatattcctatttatcagagaaaatgcaactcaaaaagtgctcataaaccatcctccacaataaccaaaggtacttcccattttccatatccttcaagttattcacagttaagacccaactctgctccaaaccagaagttttgcattccattcaagttaacaattacaactgaaggataacagaaacttgctggcaccaaactattagaatgtcaggtgcctcctggtaccaccagggttaatgagataaagagagggtgcccagggatgatctatctgcctggttttacagaaactacctatagagattgctagagtcttgggcccatgcaagcagcacgcactcatcggctactggaggactgagtgggacatctaagacatgaaaaagcagaattacttagctacagtcaagcccactcgctaaaaagagaccaagaccgtctagagaagaagccagaattggctttggttgcagaatcacacccacaggcaggataggcaaataagataacccattctctgtccccacccactcctccaatccccaagagagtgctcagaattttgcatttcctacctttaaaatatctgctggggtggaaacaaaacaaagcaaaacaaaactgaacctagaattgagatcatgtgttttctacactccagctgtgtgaccttgagggagtaacttaacctccctgagcccgtctcctcatctataaagtacaaatgtctagaaacacagaagttatttccaagaactgacagctctccagctccaggagcctagaaaatggcacagagcagttcttgacagttttaaaatgtcagaagggttgttgtcattttttggtctcctaccttatgtggatgggttccatcttattttcaatgtcctcctgttgcagaagcttccggttagtcctgggactaaagggcaattgacctcactcctcctgggtctgactgactaatctgttagggtgggtaccataaatgaccgttttatctgcctgcccggggcgtggcaacagggcctccccgccccccagccctgcctgtcagctccttttgctttcacaacatttctcgtcttgccctctatcacagtgagctgacccgcctcctaacgcctcatccgggcctccctttttctcttttttccctctcttcctctctcctttcttgccttgcttccctgagaggaacataatgggtgttgggggagggcgatgattctctttttcttttctttcttttttttttt

SEQ ID NO: 42446 - DNA, 1614 bp, Homo sapiens
gaatcgcttgaacccaggaggcagggttgcagatcacagagtgagactgtcacaaacaaagtgataaacataaaaaaagagatgctggtctttcatattggccagatttctttaacaaaaacattcacctttcaaacaatttttgttttgtaaatctggatttttattaaggtgaggcacactggattattctaaaggcagttgtgtatacagaagccaggggcgaaagaacttcgaaaatagcctagaggaaagaatgggacaaagagaggaaggggaaaaaaaggataaataggggaaaaaatgcaaaaactggagttttttggtaactaagaagaggggcattttaaaagccaaggcttggtaaaaacctagggaataggcttaagtagaaaggagatttgggaagctccagggcccttggacacctggcagtgagcatcagaaagaaaagtaagagttcttaagaaaaaccaatcaactttgcatttgccctggggctggcctggcagtgctgctatcagaattcagatactggcccagccctgctctagggcctgaagtttggctcttgcctcttcatttcagtccctttagctgcccatccaatctagatccccggagtgctcaaaggagaggcaacaagaagaaaaagaaaaagaaggacaaactgaaatgcaagcatggaccttagatgacgattctcacagctctcccccttcatgggaccttcagaattcattcttgtgaaagctgtaagtcaaggaggacacagccagaaaccgtgactcatcaaattcccaaagccaagaccagaacacacagactctggatccaaggactcgctttctgctttcagaacacgggatcctgcctactttgtagtatttcaatacaaagctgatcaagccgagggtccccatctactccccgccagcctggctgcccttccctgtcttcagagttttctaaatcatagagaagatagagtttaattccatggtgtttgagtcacaggaccttagaacacttcagaaaacgattggccttaaaaaatggttgggtctgtacaagaaagtcactgagtacagaggatggcaaacatttctgtcatgggctaggtaaatactataggctttgcaagccatgtgttttctgttacatattattcttttatttgtttctttttgttttttgtttttggggtttttgttttttgtttttgagacaggatctccctctgtcacccaggctggagtacagtggtgccataacagctcactgcagcctcaacctccctggctccagggatcctcctgcttcggcctcctgagtagactgcaggtgtgcttcactacacttggctaatttttttattttatgtagagacagggtctctcactgtgctgcccagtttggttcttttttttttttttttttttttttttttgcaaccttttaaaaatgtaaaaaccattagctagagggccacacataaacagacaacagaccacagtttactgatgcctgacttagagcaatggaaaagggctggcagcattgactggtgactgctgcatgtagtgagactaaagatagtacaaaacctcacca

SEQ ID NO: 42447 - DNA, 1432 bp, Homo sapiens
caccaccactccgggctaattttgtatttgtagtagagatggggtttcaccatgttggtcaggctggtcttgaactcctgacctcatgtgatccacccgcctcagcctcccaaagtgctgggattacagcaagtaaatacttttgattagctaggttcagtgtagaagattttattatactactgttccaccaagaataaataaagctgtgacaaatgtctcattcctgcgatcccctccaagaaagactacaacgtacctcttggataagaaaatactgggctatgctaactcctgcagtccagctcagtaatcatttgttccaaagttcttcccaatgcaatggccaaattaactaaggttgagcttctgattaacatacagtgctggaaggaactttgacccacagaaacctggcatttgacttgcttcggtgagtccaacctgtgtcacgagtgcctgtttcaagggtaataaaggacctggctgtttgcttacagcaaatggaggtggtgccatgtcattatacagcttttacctctcctgtccacctaacccttggcaaataaagtctgcagcccacacatcagtttttggagtgatagaatgaaaaagggtatggatttccaaactgaaaagcacctaagttctacctggcattctgactaaatgttagctgcttaagaaacatgaatatggtaccaagatcaaagggaccagagtagagatcaggtgtttgagcaggtgcatattataaccatccaaattgtgcctcagtgaacaaactgctctctctgctagctcctgggttcccttttagtgacatgttataaaacaggaatcagatgcaaggaacagaccacagtactagagagttcatgtctcttcctgttctaggatatacagtgcccctccctgccctgccaaattcataaattcaaggtctaacccctagtatctcacaatgtgactatatttggagacagggtctttaaatgggtaattaagattaaatgaggtcacggggatgggccctaatgcaatataaccagtgtcttcataagaagaggaaattcagacacagacaacacagaccgagggatgactgtgtgagggcacagtgagtgggcagccatctgcaagccaggcagaaaagcctccaggtaaacaaaccctgctgtcaccttgatcttggacttccagcctccacaaccatgagaaaataaatgtctgctgttaaagccacttggtccatggtattttgttatggcagcctaaacaaagaaatacactgcccctccccacatcccccaacctcatctcccaggaccagatgagtcgcagatgagtaaggaggtcaagggcatgataatcagagtggattaactgtgcaattaaacagtggtaaacaggagagcacatgctctatcca

SEQ ID NO: 42448 - DNA, 1357 bp, Homo sapiens
aagatagaggaaaaagggattcaaggggaaatgggtatttatattccagagaaggaaaaaatagatatgcatgaagaaactcgtcttaaaacttttaatttccaaaatcattctctctttgaatagatgaaactgtcaaggaatgcaaaaaaaaaaaaacttccttatgcaagaaacattttgaaaaatttagacatcttccccctctcattatcctgtaactaacaaacagcacttttttacccctaggttcactgaacaagctgccctcttgtggttctgatatatttcctgagcacaaaagtgggctgttaggaagctgtgtaggtagcaagcccagcctgcccacaaatatttgtcaaggtaactgagagtgaatgttctgacctgcttctacatgagaggtatacacacatcactatgggcttgggtcacagttacaaaagaatgaagaaaatacggtggccacaaaatacatatggttcgaggctgacaaattcaaaagacaatttaatctctgtttactttgctgcttaattttaaggccctttagtacatactttcacttttgcaacgtggaatcagcatatcagaagcaagcacgtctcaaacaaggtcagggcaaagaaagcagaactgcaaactccgattctaccatctgtgaatatattcaatattcccaagatatctttgtacaaagaaagaaaacaacaaaacaaagtaaacaaatagtacctaataaaaacaatcctgcattttattaacattggcaagcagaatccagatctctaataaaataacaagcacttttaaaaaagaaaggaaaggagggaagaaggaagtacacaaggaagagggagggagggagaatcaaatagcgtacttttctttttttttttttttttgagacagagtctcgctctcttgcccaggttggagtgcagtggtgggatctcggctcactgcagcttccgcctcccgggttcaagtgattctcctgcctcagcctcccaagtacctgggattacaggagcgtgccaccacatccagctaacttttgtatttttagtagagacagggtttcactatgttggccaggctagtctcgaactcttgacctcaagtgattcacctgccttggcctcccaaagcgctgggaattacaggtatgagtcactgcatagccacagcataattttcaaaagttacactaaaagaagacaaaagatgacacaggcattgactcaaaaactggaaacattttctcttctagagagcaatccatctttatacaagaccttgtttaaaagaaaaacatagaggccctaagacttttttaaagataaggatttagggg

SEQ ID NO: 42449 - DNA, 2099 bp, Homo sapiens
gcttgaactcgggaggcagaggttgtagtgggccgagatcgtgccacagcactccagcctggtcgacagagtcaaactctgtctaaaaaaaaaaaaaaaaaattagccgggcgtggtggcaggcgcctgtaatcccagttacttgggagactgaggtagaagaatcacttgaacccaggaggcggaggtagaagtgagccaagatttcgccactgcactccagcctgggtgacagagtgagactccgtctcaaaaaagaaatgtgtactaagcccctcctatgttccaagcactgtgctagtgattgtggtgaatagggcagatccagcctttattttatccctattacaaggtatttatccctattacaaggtatattaccatgacatagatagcatttgcccctcagtaatggttttttctttagaggctacttcaccaagacagaatataagctagtttggattatatggaaaagcagcctttgcctctatttctggcaaatagaaggagagagcctaataaatatttttcaagtgagtctaacatgaaatcaggctgtgtttctcaaacaattacaggtgacaaacacagaatacgatatggctagcccataatgtgggtgttatttctacaataacgaatcaagtgacatgggtatgcaagcatcatttcagaaactatacagagaagctgcattttctccctcaagccccaaagtccaagataatgtcaagtgagaaagcctgaagcaaacattggagatcttatctaaattttttaaaaataagactgttaaggaagaaaaactgaggtgttgtttaaatataaaagattctatctttgttcctgtgggtgaccaacaccagggtagagaaaatcttgattcagcaaatattttttgagtttcatgaaatatcccctccaccatcctctaaggtcccacccaaatcgggaagactcttggtggtgcaaaaataggattattgttgtttttgcgaagtcaggccctttattagagggtagaaagaacacttgttcctgatttctcaacttctgattcctgttggcagcacataatatgccccagccttgactctcaagcacaacaaactgcaaatgaaatagataagtcactgttccttcaaatctgtacattacaagccatttctagtgtttaccttttttaaaattttggccaaattacttgcactagccagatagctgttagagagattagcaagtaggtctgagaatcactcacccataaccacgcgctcactttcttgatattactctcttatttttccatcctgaccctggcacaatagttaaacaccagcctggtcagcaaaacagtgttgtcaaaacgcagccaagctgagttttgacccacagaggtctgacagttgtcaggaatttcctaacatggccagggtcactgacagttaaaggtttcactggtatcacctgcaaaatctaactccactccatgaaaagtgcagaaaactcttaaaatgctttctgtgctgcctaaggttctgattttaaaacacaagagtatggaagttcagacttttggttatctccactttgccaaggcacaggtgtttgaggaatgagcatgtgcatggcccagcactttcttaccactcttggatgatcaagagttcaaagcaaccttgccaggtgcatttaaaaaaaaaatctaaccagagctcacaatacaaccaattccttggattgaatgaggacacctcggctctccctgctcccggcagtgccagcctttggtcacttgccagtccaggggaagccaggaggtgacctccccgaccctctcctgcctagtcatacattcgaagttttcatctattttgtatgatgcagccatctatgccctctttgactgctgaccaccataactaaaaagttgctgctaggctgggcgtggtggctcatgcctgtaatcccagcactttgggaggccaaggcaggtggattacgaggtcaggagttcaagaccagcctggccaaaatggtgaaaccccgtttctactaaaaatacaaaaaattacccaggcatggtggcaggcgcc

SEQ ID NO: 42450 - DNA, 2665 bp, Homo sapiens
ttttttaaaaaaatttttttgtagagatggggtcttgctatgtcgcccaggctggtcttgaactcctagcctgagcaacatagcaacagccaccatgcctggcctccaagcctatttcttacaaaggtgaaactttctaactactacctagcccctgtgatcaacttacataacatatatgaaagcattttggaaactgtaaaatatcagacaaacgtaacatactaacatcacaatgagaaatcatttgtcatttttcttttttaaaagagacagggtctcactctatcgcccaggctggagtgcagtggcatgatcatggatggctcactgcagcctcaaacttctggcctcaagtgatcctcttgcctgagcccctcagggtgctgggattacaggtgcaagctcagctcatttctatttttgaagttagcaactgagggttgtttcactttctagatactttaaattcccgtgtggcaggcactgttgtaaacactttgcatgtgttatctcatataatattcacagaaatcctgatgatgatgatgatgatacccattttatagatgaagaaactgagataggatgacattaaataactttcccagggtcacagagctggtggagctgagtgattagattcagacaggctggctccaaagtccatgctgaatgctacctgtgactcaagccaggagaaaaaaaggagttgctcaaataaagcgtccctggcagtaacgaatcattaactttcagcccactccaaggaatgggtggcctgagggtcacgtgctaaagaggaaaccctgagtgagtcaatcatgaacacatgactgttcttagttccttataggtttgcttcctcaaatagccttcctggagtgctgagccaagagatggattgggaccagtttcagttctgggaaaggggctgaaccccatctagccaatgcctgcacccacgcttcagctctgtgcatgctggtggccgaatctaacacaggccacagggacttcctcaaactgggaaatgcctgctcatgttgtcaagagtcctcagcaacagcttgtttgccgactaaacaaggctgccacctcacacaggcagcctcagaaagatcagggagttaatagttacatgaagacagctcagagaacagctcaagtgacagtccagacaaatgcagatcgtataatgggtacctggttagattctgtttaaaaaaaaaaaaaaggatgttcctctctgctatttattccctgttccaatttttttaaaaatcctgttttccctttcctgatcctcccttatggtatctcatacttaaaaaaaaaaaaagtctgggataagctgatagtcacaaagaaacaggaatgcaacaaaccagaaacccaaagccccaaatctctgccttatcacagaccgtttaaaactctggagttttttcctacttcagcacatatctcaagattagataaatgtggtaccattgtgttactccctggtgaagaaaccaacaaactgtccaataaaaattacaggaagctaggagcggtggtgcgtgcgtgtagtcccagctactcagggggctgagatgggaagatggcttgagcctaggaggtcaaggccagcctagacaacacagcaagacctcttctcttaaaaaaagaaaaaaagaattataggaggtcactgttttggactaaacttctgcaactagggcccaatagaccagactgaaaatcaaaatggagtcacccaggctaaagttccacatcacaaaacagaaactaagttgttgtctgaccttctcagtaatcaggacgaagaaataacaccaaatttcttaaatgggccagtttcaaatctttaattggcataatgaaactccctgctttaatccttaaagtaatctgatgttatttttctgttgttctgtctcctgttgtcccattccttacaaaaaaagtatctttgaaacaattaatatactttaagttctttccttctactttataaagccaagctcttctgctcggctgactggaacccttttcctataatatggaaggaagtgttgcccgattctagaaactcaaataaaagcaattgagaactttaaactaaatttgttgcaattttgtcttttgacacataggattttcctcctgacacttatagacaattgtagaataaatggcctccctctgcctccattttctacttccattcattttcagtgttcttagctttttctttctacatgcccaccacttagatttcattgttcttccatctgaaagctttgcttatggccttttctatcattttctcttctaccttaacttctagagttattatgttacctaggacaagagatatgacttctcactgcctcagttcctcatctgtaaatggtgctgtgtagcagggcctgctgtaagggctaaggggtaacgcacacaaagtgcttggcacaatgctacacacagtaggtgctcaaaatgtgatagcaagctgggcacgatggctcacgcctgtaattccagcactttgggaggccagggagggcagatcacttgaggtcaggagttcaagaccagcctgggcaatatggtgaaaccccatctccactaaaataacaaaaaattagccagacat

SEQ ID NO: 42451 - DNA, 454 bp, Homo sapiens
tattttggatgcctaggagagcttcaccatggtaatctgagagagcatcacttcccaaaacaatgctttacccctcaggaaaaatgcttgttcataaataaaacaatgctatgctcatttataataggagtctctccatttccagaagtccaccatttcccattcagatttcaaatgcagaatctttgacctgtgactctgcaaaaactagcatcaaagtagagtacaggggaatcatccgtttgcaattattaacttattttcctcttatttacaccacctggtatcacatttactttttcttttacttttttttttttttttgaggcaggtcttactgggtcgctcaggctagagtgcagtggtgcaatcacagctcactgcagcctcaaattcctggactcagcagtcgtcccacctcagcctccctaatagctaggaccacaggcatcca

SEQ ID NO: 42452 - DNA, 472 bp, Homo sapiens
ctcccggccacctccttcaagaagccctcctgactgtctccctcctttccactccaatttctttctgtatctcttttgtaagtactatcactctctaccttgattttttacctagtagtacttatcattttctatggtttattattttatttcatgggctcctttaagagcacctcgaggttgaagactgagtattactgtatgattaatctttgtattctatcttttttggcaggcaccacagattgccacgcaatagacattcctctcttctttgctaagagagctccaaggtctcgtagctaacagatggactgcttggcttcaaagctcttgaaccttaccactatgctatcaagcaccccgtgtgcttaacactatgcattcttcagcttttcttggaggaggaaataatcagttgagacaattatctccataattctggcctgggaagggggaatagccatcatta

SEQ ID NO: 42453 - DNA, 1857 bp, Homo sapiens
ccggcccccctattcatttctaatgtcccattcagtgcatatgataagaaataagatgatttgcagaaagaactatgaacattagctctttgtttattaggcataatttgtctgtgtattttttgaactcctcaacaaattgtgatgatgtcttccaaatcaatttagaaggaaacaaacaaaaaaaaaaaacccaaaatccaaataattctaaatcagccacaaaccatgactgacaatagtcagaaataactaaatccaggctcttcatctaccctcagcagactttatgtactattgccttttttttactgcaaagaaccttcctggagtctgtactaccttcaagatggttttagggtccccaagcctagtagccacaggattctaacagcaactgaggaagcctttttcagtgaattatggatctaaacaaggcaaatgaacgcagagagggaactgtgcctccaaaggccacgaaaagcaattttgccaaacctaggtaattgtccaaaggagagaacgaagccagggctagcaaacaaacatgacagatcagagaattgttttgccactttgtaaaggcaagatcaagtatttgtacaaaggttctggggaaaaattaaagactcaaacaatgactctagcacttccgtttcatgccaggtcaagacaaaaatacctaattgagctctgcagctgagaacaatctaaatggaatcctgtagcagcaattggcacttgtggaaacctcaaaggtgaaaagagatagttaagaaaatttgtcttgacagttactttcagaaaatcattaattataattaaatgacagtagaaaaggtgataaacaatatagtaacataagtcagtcaagtgtaattatctgtagggcatgcgattcacaaaatggttcaaacagagggctacacatttagatgtaaatcacaaaaagattgccaaagaggaggctttgatttggaaacagggaagctctgaaatggggaagtgctgaaacgattgcgacatccccacatttggccctgccttgcacgttacttagtcatcagcctccatcaaggacttgtggtggcagagaaaataaaccacagaaaacatggcagcctcctgggagaggtctgggagaaaacccatgctcattcagaaaggtatgttcgtggttgtatttcgagtaaaacgcattcagtcacgcttgaaatgtgtaaaagcctgtgtgtcttattcatttattcaacaagtatttatggagcacctactctgtggcagacgctcctctaatgtgcttgggatacaccaatgaatgaagtagacattctagtcagggagagacagataataggtcacacaattacatagtatgctacaaagcgataaataccagagagaaagcagggtagtgagacagaggatgcgggcaggaaggaggaattgctgttttaacctggaggaggcagagcaaagacttgaaggaggtgaaggagtgaagcatggagatgtctggggatgatggttcaggcatcggggcagccagtgcaaaggccctgtggtatgaatgtgctgggcacaccccatcaagaaaaggagtgtggttaaagcagaggaagtaaggatgtgtgtggtagcaggcgaggttaaagaggtgatgggactagaaataaagtcattcactggcttttgagtgagatagagaagctctagaaagttttcggcaggggactgacacgagctgacttctgttttaaaaaagtcactctggccaggtgaggtagctcacacctgcaatcccagcactttaggaggccaaggtaggcagctcgcttgaggccaggagttcgagac

SEQ ID NO: 42454 - DNA, 3701 bp, Homo sapiens
ttgactattaaaaatatagagattggtaaaaaaaatgatgatgatgaattctcaatcctacaaacttctgtaaacgcaaaaaccaagaggaagataataaatctttaataattgattgatattcagaatatcttgatctaattaatttaaagcatggcctacctagccaggtaaaggacggcacagctaggcttatttcttcatttgacacatactgaaagttaataatgaagctaggtgcttgggaaatttctgagaccccatccttccagcatgcaataattaagtcaaagaggccaacagtgtgtatatcagaacaaggtgaagggtaaagcagaccagaaaaaaatattaaaaaccaaaccatctcctcctttctttttttccttctgttttcctttcagactgggttgattttagttccctccaagacttcaagtcattgatctaacaaagatcattgtttaaattaatagcaacacaaactcccacaaagtgatctcttcttatgctctaggttgagtactttggtttatctagaggttgtgtgttacgccgctgaccacctttcaccttttagaatcggcacctgcaattctcaaatgctctggatctaattgccaaccttttgagctcaaaacttcggcaactccttcatgttgggttgtcaaccctttgctttccctcccctgagaaattcgtatgaccttgccttaaaacttttaaagaatacattttaaaatctatattcctgctaaagaaaacagtgagtcattaaaataccaccagataaaaaaaaaaggtttgatttttagttcaggtcggtaatggcctgtaagtaccttgaagatggtatcttcctatcacttatgccttgggacagtacccaagagtggctgaacttttacctaattaaaaaatgagtcatttatttgaaaaattccacttccatttattttatctgatttcttaaatatccggtcaactgctaatttgtcagatgtcataattcgtcagtcctacccttttctacaggctgaatttttaatttgaaacaactacacctctaccgagtgttactttcagacgtaaattactgcaggaagacccccctctgccttggttaacacttaaatgagatgcctcctgtccaggacgcttcctcagtctcactgtaataatctgagtctaaagtcacctgtgcttctgggcggtccaatcatgtattttcaagagtgaaaaaaaaaaatcagtttcttttatgggaaaagattcatcactacaggaaacacgatgggactgactgtatatgattatctgccttcccagaggttgacccttttaaaaccgttttataaaccctttatttcccactaaatataccaagagacagaagatgagtgatagcatgagggataagagctaaagagagaagaataagaaaaaaatatacacttcaaaaattgggacccaaatgtaagattaagggacaatagttagaaggactaccaaaaaccaccttacctttccttgttaagtttttggagccgcccacttcagaaattaacaccattcacagcccaggagcaacttaacacagctaggaagtcacctacaacatcttctcgtccgccttctttttaatgtaaaaccaaaataaggagtgtccagcgactccccaccgcgccgcttaaagcaacagagcgttttaggcttaactcccaggctctgggaattccagtgggtcagaattgcttaaccttggagacttgcagagagaaagtctccaggaggaccgctccccaaaccctggtttctctctatcccaagctgcacattccacagtggaaagcgggagcggcgacccgaaggcagcgaagttctctcgggctcagctcccgaggccgggagcgcgcggcggttccacccgcagagcggcgccgcgtcccggctgcgtggggcgctgcgcacgggagcgctcagcgtctagtctgcgggcccttcccggttccctccctctctcctcccgccgcccgccccctgccgaggccatccgcctcacagtagcaaggttgtctctcgtctactcccttcccttaaactcaccaaaccagatttttactcccaacaccggcaacttcccgtaaatctgccctgaaattttatcctgctggctgagcctcccctggctaaaggccagtgccacattcctgttgttttttaggagcgcagatacctttgctgaaggttcaaagaaaatcggccttgatggcagagattgggggacttgaccagacggacttctctccccgccccaaaagtcacatgcctttcagacacccagaagtggcacctgctccacctgggggcatctgtccgagtcagacgctcggcccccttcgggctgctccgagaaacccagccagaaccacgttggagaaattaggaacctgctgctgaatttcaagccgatcggaaccgccccgctccccttcttccccccataaacaagtcgctggacgaggtgggatctctgcgacccccgcgtgcccggggagagctcccggggcgagctcccggggcgtccttacctggggccgagcatggcttggccgcgcgcaggcaggagcgtcacgcggacggggccctgacctttgccggggccttcgcagcagggcctggggcctgggcgctgctcgttcagaagtggctcattttagtgcgctctgacctagagttacggagggtttctagaaagggaacaaaaaaacactgcatttagaaacagcagccaagccctcgcttcaccttgcctgctctctggggagttggctcgaacccccaccccatcccaattcccaagaaacccagatgtccgcaatccgcgccccaccccctccgccttacctgtttatacaagagttaaggagcctcccgcatttcagtggagcgctaagcctgtttgtaggcgcggaatgggccaacaggaatcgaattctgtgactaaacaaactagaagaggaagcaggcaccaccaggaacctaaaacagagttgtgatttcgggttgcagtgtcattcagctgaggggaaagaaaaaaataccgggctactttagtgaaagaatgttccaaaaatggttctttgctggttgagttaacacatgcaaagagcttagaacggtgcctagcacacagtgttagctgccgttattgttgttgttattcttcttattattatttacattatggcttttttctgaagaagagtgtgtggtcagagttagacatgggctgtagcaccagcattgccactcaccagctgtgaggccatgagcaagatatttaatctctcccagcctcagtttctggaagattctaacgatgggatttttacaaacagtttatattcattgctgacagtcttgaatacaatgggaaataaagtccctgtaaagggtagccaactgaatttcatctcacttaaaagttacaagattgacaacagaaatggagataaatttgcctgcattccatgaagctcactaacgggaaggaaattcagggcccagcaatcacccatctgctatgcttaattctcatttgtattttggcacttgacctggtgtcttaccctgggatagttacttatcccagactgggccggacaaataatgacccttgccgtttgaaaagcagtatg

SEQ ID NO: 42455 - DNA, 917 bp, Homo sapiens
agagatggggtttcactatgttggccaggctggtctctaactcttagcatcaaatgatccacctgtctcggcctcccaaagtgctaggataacaggcatgagccactgcacctggccatatttgaacagtggaaattgtatataacagtatgctacttcacattttcttcccaactcttcattcagtgatgtcagattagtagcttgaaatcagccagagtgggaatatttacactgcagaaatcagcaaacactacagacaagcccttctgcctcccccaagctggtggttaaacatccaccagcacaccactggctcaaaccagcacatgcagccagggtctcttggaagaaaactcctattgctctcagagagaagagtgtgtggttattatcccgttgcgcctaaatcaggggcccatgaagaaataggctattagacatggccctcttatactgttttcttaacgaaagtaaaataaataattctgagcccttggcccacagccaaggtcctctcgggttcaattcttcatcctctatttgcaagagctaatcatagtgaagggtgcacgaagcaaccgttctttgtgttcagagtgaaataatggcttgtcatccctgagagtacgaaggctctgtactcctcagtgcagtgaacacaaatcccagtcgcatggcatctggctttttctttttctaagtgaatcagagtctttatgagtaaacgtttagctttttcctccacccactctggcccagccatgaccaggagagtgttttttgtttttctagttgaattgactcaccgatagttttaggaacctgttggtttgcatgtttagttctttttttttcccccataccagatttgaaacctagcatgtttagttttgatctatcagaaggagctggaa

SEQ ID NO: 42456 - DNA, 1399 bp, Homo sapiens
aaaaaaaaaaaaaaagaatattacccaactctttggttatgataaaaagcacagaaaggaacagactaaaggggaaagtaagaccagatttattaaagggtagtgaattatattattaaaaccagtgactcctccctccttccttccaaactaaccccaaactcagcttatctaagtaaaccaaaggaaatttaatcttagcctctactatagattcagtacattctggctgacattttaaaccctgttagaaatctggttggtgtccaagcacatgcaatagtagaatggagcaatcatgtagataactatctcatttttctttcactctgaaacattgacaatgattctttgtaaaatgtctcaggacattgaaggaagctatcgacaaacattttgcagaaatctgtcaagagttgattactgcaatttatataatgtggaaattttatttcccaggcttcatgtattgcatgattaaaacatgcgtgaaaggaaatgggtctctaggctgccaaacgtatgagcaaccaggagtcaaggtgaaggtttaaagggtggtgttttcagctcctgagaggacaaaatgatgacctcaaatgacacaggcagaactaccagatacacactggtcccctcccaatgtgggcaaacattaactggcaaaacaggagaaatccatacctcccttcatttctcagaaatccttgcagccatgccagtttaggtggggagtaccatgttggagttccatgctatgtaggtagggataacacaaacatctgaaattcacagacaaattcaagctcttattttagcaatttactttcaactgaattagtttcatcaactctgctaaccaaaagggatactgtaaccaaggcctatgttgtaggcaggagtccaccctcttttccattcacatcctgcagaaggaactactgagtcacaaagtacgtgaataaagttgccaaggccatggctcagttctaagctggatggaaacgctttggaaactgaacattggagtgcagtcagaagacttcattacagtgtcacacagcacaccaggtttacctgactcattctcagaatcaaccacccaaggcaattttagattttttctttgataagtctcaagtctttttaatgtggggaagagacatatagataatttaattctactcactgtagggtttttatttgagattttacctatgcccacctactcttccccgtataaacagtaaacgattctcaccatttctctggatatacacagtaaagtcatgcttgcaaatgacaaatgaacactagggtactgtcttgctcatactcttcaacaagcatgatgacattttctttcataacattgtactctaacatgacaatctttttt

SEQ ID NO: 42457 - DNA, 978 bp, Homo sapiens
gagttcaatggttaattaaatgatccaaagagaatccatcgtcagcaaccatctggttaaagtgctgggggtggactaatcctcagactatgcaaaacttggttttgatctttagaagcaaaagaaagcagcagtgcacaactacctgtgcaagggatggccggatgaggtttggaagctgagggctcatcagtatacatactgtacgacacagacacagaaaccctttctcagtagaagcagggcaatggttgtcatggatgaaatgccaggagctgcactcctgggaagctggccagtgtctggatcgttaacatttgtgtgtcttacaaaagttcatgtgactgagcccagagtcggttaccttttgagtgagttcagagtcttccttctacctttcagggaacttaaaggacttaatttctgagaaaaacagaagttgatcatggaaaataagcaacaattttgggattttgaaagaagttaagtggtccctggccaaaggaactcctccaccaaagaaaggaagggtggggggtcagggaggtcagggaggccaaattccctgacactcccactcaagaacattttattctgtgaaaagaatacaggccagaaatggttttctggttcaccatggagtgataagcgttcttctagagctatctaggcccctggaaccctcaaggagtggagtaacagctaacaagtagcaaaggggcaaagaaaaactgcccagacaaagctgggaattcagtgcattgcttattcttatttatttatttattttttggtaaagaatagtttgcataaagaggctgacataccccagttctcatgttgtggggagtacatgaaattaattttaaaaatacgtggtactagatatttttttaaatcacaccctcttggtgaacaccgtatttagcatttacataacagttttgatctctgttgtagttacagatgatttttttt

SEQ ID NO: 42458 - DNA, 2590 bp, Homo sapiens
agcctcgtcggaaggggaatgtgtttgtttaggggcagtgtcgcagacaacatattcatagattaaatattgcaaaccagacttcctaatccaatggcagcaagataacaatcactgggtattcaggaaaagcaactctgggcctcaaagagatcttcaataaactgtctgctcaactgggaaagaaaagaagaaaactaaagagtacatataaaacgctaaaacttatagagaggagccttttattaaatgatacctgggttgctgctccacaagggttctcaaaagcgggagtgatacaatgtggaaaccacccaagtgtccatccatagatgactgaataagcaaaacgtggtatatacagacagtggaatattaattactcagctttaaagtggaaggggtctatggccataaaaccctgaacttgccagatctcatctgatgtgggaagctaagcagggtcaggtctagttagaacttggatgggagaccaccatgagaataccaggtgctataggctttctctctttcttctctctccctctctctttctcccctcccctcttgtctctctctctctttctctctccagctgttgttggacatcagaagaatattccagttgtatccggtgtctaccgtgaaaaaaagtgttcttttttgcaaaagtgccagaaaggagtggtgagattcatcccaagccaatcatttctcatgaaagacactgtgccataaccgcttttcacacacacaagaaaggagaaagggaggaaggcagggagaaactcagcaaacagctcaggatttccacagcctaccattccaaacctttcgcacttccagaaggcttcttgatggagttgtggcaagctcatgggggaaatgcttcaccccaacgtaacccagaccaaatatgccattgcacaggaagtgggtgctgagtccaagtgtgtccatatgagcaaagtaacacagattaaacagtgattcatttcataccaaactgcatccatcattttaaaaactgtgtcatcatcctactccaaactgtatgtggcatcttctcttcctcttctgccaagcagagcaaagactctaggttacagctcatgaaggtgtaaattgggttgatatgctctatggaggcaaatggaggaaaaagaaaggaaggaaaccctgaatgggggttgggggcagggaggggtaagatttactctgctaactacatagatttctggtcattttggactgagtttcattttttttttttttggaggcaaggtttcactctgttgcccaggttgcagggcagtggtgcaatcttggctcactgcaactttcgtctcagcctcctgagtagctggaactacagatgtgtgccactacgcatggctaattttgttgtgtgtgtgtgtgttttgcttttttttttttttttttttttgtagaaatgagatctcaccattttgcccaggctggtctcgaactcctgggctcaagaaatctgcctgccttggcctcccaaagtgctaggattacaggtgtgagccaccgtgccttgctgggttttgatttttaaattttttattttgcttcctggtattgatttttaaaagtcccctggaaaatgccttgcatttaaaaaccctcacaccccttacgataacctattctgtccctaaaattaagactataactttcaaaacactttagatgaaattgtgctaggccagagtaagtgatcctatttatttttttaaaaatatgtatccaaaaagtacagggggaaaaaaaacctatagtgttctaactatagcaatttcctcctgcttttatccctgtgtctgaagtgaggtcatttttgtttgtttttggcaagtgaacagagaaaagaagaaagaaaaacacacacacacaccctagacttttcaccccctcctcctaaaacagacacacttgttaatttacagctttgaaaatcatctgggtagttcttccataattcaccatcttccttggttttctaggattttttttagaaccttcagaccccagagggcatttcacttgaagatgctactcgtctcatcccttcagaaggtgggctgaggtttccttaagaatcttctatgagagtggtctgcaattagaaagttataacaattctacctgtgagggtgttctacaatcagaacactgctctcactctccctcctcctccccatctctctctctcacactcacgcacagacaccacacacaccacactcacactgaaattaagagtgaaaactgttaaggctaaaaatactacagagagaaaagcatctttgctaacacttaatactcagaacaactttttgaaagtgaaaatgacgatgctttacctgactgattatcaatgcagctgccttttttgtttgttgcttgtttttaagagacagggtctcactctgttgcacaagctggaagccagtggcataattatagccttgaccacctgggcccaagtgacatcctctgcctcagcctcccgagtagctggtactaaaggtgcacggcactacacttagctaattttatttat

SEQ ID NO: 42459 - DNA, 520 bp, Homo sapiens
aaactcccagggaaagtaatctccaactttaaattagattatcaatcatatgtaagggaagaccaaatgatattttgacacatgccagatctcaaaaaaattccatctacacatgctttctcacaaagcagccaggcaatgtgcctccccaaaagagggtcaaaaccaaaagagatggcatccaataaacaggtcaatcaagaattcccaacgtgattgctaaggacaaattccaggtcaacagctgtgcataggcctcaagagtaaacagtccagaacagaatgagcaagcagagagcccaagaaaaatgtcacatgcacacatgcaagaaccaagagatgtgccattgtgtttgaccttatttgagaatttggggataaataaatagtaaataaatagaataccaagcaacaaaattttaatgtgctatacaagaaagaaaataaaataacagtatcctgcatagctcagctgtgaaaaatatttacagtgaaaacaaactgagatataactatctta

SEQ ID NO: 42460 - DNA, 491 bp, Homo sapiens
gatttatccatcaagactccacccagagaccacctttctttctaatttacagcccccatccctgcagaagcaaccactccctcctccttggcctctgtatgtttccactgcagcacatgcaagccggaatgcaaggcccgtggctgccacacatgtgcctggcacgcaggaggcacttagtgtttactgagtgaaatgattacacatggcacagtcgtgtttctcaacaaggttgtcgtaccctgttaaaaaatttgacctcagccggacacggtggctcacgcttataatcccagcactttgggagactgaggagggtagatcatgaggtcaggagttcgagaccagcctggccaacacagtgaaaccccatctctactaaaaatataaaagtcagctgtgtgtggtgacgggcacctgtaatcccagctactcaggaggctgaggcaggagaatcacttgagcccgggaggcagaggttgcagtgagcc

SEQ ID NO: 42461 - DNA, 1127 bp, Homo sapiens
caccattatatagatgaggaaaacggaggcttacgagttgaagtcaagacacagaactcattcaaatccacgactagtgactctgttcctcaggatccttcaaggcctggctccatgccagctgtgttttcactctctccaccagaaagacaggatccctctcattttttaataattttccacagtcctcttgtcatccatggaggttctctctttctctgcaggccacctatctgttcatgcctccaatctcctgagcagaattatataaaccgactcaggcctaggacctggctcactcacccaggtcccgctgtgttaacaaagtgcctttgcatgcagtggaagctcctcaaccccaaaggccccacaaccacgtgactgatcctgtgctgcaaaaccgacacatgagcaaaagccaaggaacaaaaacagacctcgttccagtgcttcaaaacttacgggaaattcaaggtgacttattttccttgaccttaaaataatgtttaagttttataacatggctgataatcataaatggaaaagggagttttcttttcccctggggccctgagccagccctccaatttggggccaagattgttgagaaaatgtgccacgatacttaatttttggccagattccagaaaaagtaggggagaaaaatgagtttcaccatccgtacagcttgggctgctttcacaggcaccgcgctcttgcaaaatacagcctaaaattgacttctgcatatttctctttgccaagttgaccattttgttagtagaacctttgattctcagaacctaaatcaagtgaaaagtcaaatatttttaaaagatcaaattatctaaaaacttcagctctgcctcagtacaaaatataaagctcctggctttatatacacagatagtgactaattcagggtgttaacttcttgtacctgaaagaaaatggaaggcttccaaagtactgggatatcacagaagctgctgaaagaagcagtttactgaatggtacttctgtgtcttcacagttttaacatgctcaacggtggaaaacgaaaactgtttgaagtggctaaaattcaatgcttgctttgtttgtaaccagaatagccaaaactgaat

SEQ ID NO: 42462 - DNA, 694 bp, Homo sapiens
ctttcttctccagactaccattatctacattgtaaaaaaaaatttccatcttcgtatctattactacatttcagcactcaaactaagccaaaggaggtaaatcacgtcatagaaaaatgaacacaacagtttccagacaagcctatcaagagttgaagagttaagcagctattgctaccagaagagtttagaggaatcatctcctttgacctgtgacctttgtctaagggttttaattaagagaaaagcaaaatctggacacagaagtcaaaagatatttaaaaagtcaccctggctttatctgtgcatcagtcattacttcaagtccaaacaggcaggcctttcttagcaaacagctttcctgattagcaatcagattctggaggcttccatggccacctccagccctgcagtctgaaaagcaaatacaattcagtccaaagctcctttgaaagcaaacaaactaagcataaaggtacaccttcaaacacacttcagcaagattgaattcattgtccttcaaattacatttaggaaatatctttttcctttctatttttcaactcaatgttttaattaataagctttcctgagaacatttgctatctatatgctttaccactctccccacaaaaattgcttacttcctctgaactcccagaggacaagaaaaactgacaaatgaacattagaa

SEQ ID NO: 42463 - DNA, 3840 bp, Homo sapiens
ctagggagtatttattagctgcttatgtagaaagctgacttacccactgaatgtccaacagaaatggtctgcaatgtctgtccctgtataatatatgttttcaaaatgaattatttcactttactgcctcatatggggttatccatgctgtttcattcacctggcccacagtgagagcatttggcatttatttaaacacctatgtttttcaggacattctcttcccctgtcgtatataagtatcttaatgccaaatgcacacactgcagaaaatgaaatgtgttggtggcttttgtttggggaaagattagagtatataaaatctggccaagcagactggaggctcacagccagaattatcccaacagaaatggcaggtctccatgccccacccttcaaagttcgaaaacacaaatgagtgcaagtctttgaaactacaaatccaactccatgaggctggacgccgctttctccccaaaataaagccaagaccattgaagttggcataggtggcttccagttgtggcttcttccaatatttgtgccaacgtccttctctcttctctgagagaggagaggaagatgagaaagaggataggacagaggagaggaaaaggaagagaaggaaaggaagacatcattacactatacacaaaaggctatcagcatgtatctgccatttacacatgctgggactctcacaaataactgaaaataatcatttggggtggtctccaaaatgagcctggaaggaacaaaacaacttttccctatccggcccaatccgctttatccagcctctcttacttatactaacctgattttgcttaaattattgtcagcctcagcttttcacaggagctttcttttatggattttccatccagcaaatgtttctgttccacggctgggcagatccgaccacagcatgcttggctacagaccacagcagctcacccacagcaactccaacctgggggggcaaaggccagaagccattataaggactcaaagtcatcaactttctctctctcaagggcacatatttggcaggataacctcaaacatgttcccaacgttcaaaatcattataaacagaggcaacagcttacaaggtatcctaaagacaagtgtgggctattctgaggggaggattgaaatatttaatcatttattgaaaaggtttggcctagtgattatgctctgtttgtgggaaactgaaaagccagatgttttaattaaccatggaaaacacaagctacaactaaaatttcatgaacatactgatctgccccgtggaaaaccacaggaatgttctggcagggctcagtctgaattcttgggacacagagggctggaatcattccccttaggaactgaaacagaaaattaacttgctcaatatgctttaaaaagtaaagcgaaacccagatttaatctcaaatataaaacattacaggacttcaaagggcaccacaaaaagacacataagtgggggctataaaaaattctaatgcggttcaggatttagaatatatttacattgcaatatgaatggtgtaatagaaaattttataggctacataatccaaaggggaaacgaataatctttcatttcctaatagaggaaattatatatgaaaccaacattcaacaagtaaatcataaatattatcaaacgtataacataactgggcaaaaggaatcccttaactatcctgctgccaaacatgtggcctagcccacaggcgctgccatgctttagctagaggaatcagggcttaaggaaaaacagtgtggaaataacttatgctcactggtggtgcagctagcaattctggcacagaaaactcaatgagggaatcttatgaaagcaattagtgaacattaagagctaatagattaagaagtcttcatttgttaattatagtaacagttatgacgacatctgtatatgccaaatattgaaagtctattcaagaggggacaggacaaatgttattttcagatactgggtccacagttctatttctgtaaatcaaaacagtcctcgtcacaagtgtgctaagcataacattacattaatctctaccttcagttgaaacctcagtcccaaaaatcatctcgaaaggaacagcagaaaaaaagcaaaatatcaagttatatatgtatggtatgatcccaattttgttctacaaactgagtgcatataatctaaagacacctaagtatgaacaacagcacttttgggttatggaatggaaagctatttgtattttctttctagtattttccaaattttctacaattaacatgtattttaagagaatttttaaataaggggtttaagactgcaggaatacaaatcagaaatggggtatctatgctatattagcctgatcttcggtctgcctcttatctgaacagagctaacaaatgaagaagtatttatctgatcacagaagttcttaatttacacgttcaaaacccaagtgtccagtaacacttccagtgatgaacaacactttcctagaaataaaaaattcttttttactctgcaaacttgccacagacagagaaccatagttgtttccctccctcacctatcgcatccaaatttctctatcactggccatgccataaaactgtcactaagttaaaagaacgggctgggcatggtggcttatggcctgtaatcccagcaatttgggaggctaaggccagaggatcacttgagcccagacgttcaagaccagcctgggcaacaaagagaggccttgtctctacaaaaatttaaaaaattagccgggcatgttgggacatgcctgtgggcccagctatttaggaggctgaggtgggaaggtcactacagcctgggaagtcggggctgcagtgagccatgttcacgtcactatactccagtctgggagacagagtgagaccttgtttcaaatacacaaataaattaaataaataaaagaatgcctcctggtgttacctactcacaggagcagggcccttaatgactcctggcacactcatttctgatgctcttggcatcctgaaaaacacaagacacaatggtggaatctttacactggggccttggcaacccattgctctaataagcccgtgcccagagaggtaaaatgtctttccctcagccacacagccagcaaagcaggaatgagagtccagaccatttgcctccactttgaccaagtgctctttccaccactatgacatttcagcatgaactcttggaaataaactttgtacaaatcacgtgcaggtattaaattcataccagcaaaaccagaagaagaagacagaaatttattctaccaaaaatgaaacgcatgcaggagaaaaagtgaagactcaatcctaggctaaaaaagacacagctctgcctagaacatgttcaactgaagaaacaatgagtgcactgtgcttgggcagcaggtgtcctgaacagaaactgcctatcacaccgaaagctttctggtcctagcactggccctgttgataacactacagtcccactgttcaaagaagaacaaaaggctttcaacaagataaaactacacttgcaccaagccacctgtgagagacaggaaagatgcatgcaccagtgttagaaataataaatgtctgaaggcatcaagtctggcctcttacttccaaaatgacccaagtcttaagggaaagacattagtggtttcaaaaattaagagatgccaggcacggtgactcatacttgtaatcctagcactttgggaggccaagacaagtggattgcttgagcccaggagttcgagaccagcctgggcaacatag

SEQ ID NO: 42464 - DNA, 2552 bp, Homo sapiens
ccctttcacttctaaaaatacataaattagcaaggcatggtggcacacgcctctaattccagctactcaggtggctgaggcaggaggatcacttgaacccaggaggaggagattacagtgagctaagatagcagcactgtactccagcctgggcaacagagtaagactgtctcaaaaaaaaaaaaaaaaaaaaaaaaacccgggcatgatggcacatgcctgtggtccagctattcagaaggctgaagtgggaggattgcttgatcctgggcggttgaggctgcagtgagctgaggtctcaccactgcactccagcctgggcaagagaacaagaccccgtctcagaaaaaaaagaaataaagaaaacaatacagtcactaataattaaaataatcctaatccttcatcgcttatgtccacacagccttggagtaagagcaggcttttttctctcttcttcaagattatttctttgaaacattgtttacttccactttttgtgttacatctacctatggtatccacgccacaccaatcagaaacccaggagtctcacaaaatgggaatagtctgaaaagccaggggagagaggaggacaggtggcaatgacaaactcagaaacaatccctgaaaggtctttactgagctcccttctcgtcatcctttcccgactgtgcatcagggcaacaaaggcatgaactgtgaggctgcgcataaagccgcggcccgggctgatgtgatctggctttgcgagagcccgaacaaacacaatggctctgtcccgcctcaactgagaagtcaggcgctgggtgaaaaaagaaaatgctttttctccacccaaaaccacttctcaaacccctaccatatattcccgtgacggatcctgaaggcaacacaatgtcagcagtttatttattccctttgatgcctcagttctaacagtaaacattaatgtctgcagcaggcaaacggaatcagggtcttgttggtatttcacaatgaaatcatagctttgtggtgagtattgttccagtaacaccttaaagtcatttgtaagataatgagggtaagtttaaatgtagcagtctgataaaataacctctaacccaagaatcacaaagtagattaaagcttactgaagtcaccaagttatttttctcaacagaagactaaacagaaatgagaactggatttgattcatagattgtgaaatccttttttattcaaaaccttggtcatatgtcagttggtctttggcctccgtgaatggatctggcaaaatgtgcacccagacactgccaccatttgaggatcttcaatgtttggccagctttttttttttttttttttttttttaaatgaggagtttccctcttgtctcccaggctggagtgcagtggcacaatctcagctcactgtaacctccacctcctgggttcaagcgattctcctgcctcagccacccaagcagctgggattacaggcgcgcaccaccacacctggctaattttgtagttttagtagagacaggtttcaccatgttggccaggctggcctcaaactcctgacctcaggtgatccacatgactcagacttttttgtttttactaatgtcacagggaaggtctctccttttcaagcctgattccagaaatatccaccaagccaattcaacacagctgaaatttctatgtcaaaatgaccaggcagacaaggcaagaaggaacacactggagcccactcctctagggctgtgaaaatttgtttaattttgggaaccattgatttactgcattaacttacttaaaaaaaagtattggaatatttttattataaaaattagatttacagtattgataaatttacaggttaaaatgtctgggaaagaagaatataaattgtttgaaagaatgagggttcgttaaaaaaaaattttctttcaaaaagaatctatcacaggtaaccaaaaaagaactactatgaaaaccgaaactggcatccaacaaagtctgtgactgataaccttagggcagtttggaaaagggttcatgtaataactttccctgtaggatttcaactaggggaaggcgaatattaattaattaataggttcactaatgtttttaaagctgttctgaaacaagggatgaagaaattaacagatttagaggttgtggttccaggtctgctacttatgacccaaggataactaacagcctctttaacctctgttccatcatctataaaactaggatgatactattagccaacttcatggagctgtcaaccattcaaactgaatatgaaagcattattgaaactataaagcactatattcatccaacaaatatttactaagaaaccactatgctgctagatgtggcattaccaatacaaccatgaacactaagacacagctctttctgcacggactgactctaagggaagctgtgatctgtgggaaggctcagggggctaaaggaacatgcaggcggcacctaatcggaattccagacaaacaccaggtattgtgacgttcccaatacttctgg

SEQ ID NO: 42465 - DNA, 2124 bp, Homo sapiens
tggaataattcaataaaagttaaacactaaaataaatgccatgatattagatgtgaggaagaaaacagcaaaagactggaaggcaaatcataaaaatctaggattctacactcaagatattcacaagtattttaaagttcttactttaaagcaacctaaactgaaaactgtgtagatcatgcatcataggtgaagtttatgtacaaaaccaacatggaagccacttatcaggacttggccccatatcagaaattagcaaacatgtttgaaataaaatgtttaagacatgaatgtaacatttttcacatttctccaccttaaataactaaccagctgctggtcatgatattcccagataagagggtctacactctaaacacaaaattctgtacagaatatttaagagattctggtccccctggctctgttactgaaatataaccagttggtaataaaacacggacaaaataaaaacagaaagactcacaccaatcacagaaagcataaagagtccaaaaagagattctaaccaaataaagaaaatgagaccatctgtaaaactgcaagcttattgtctctttcctagtaacattatatctacacccaattcccataaagaatgtatttttttttagcagtttacagcattaaccaaattaaaccagagccctcagaggacaagctgggttacattagacagaaagcatacttccagcttcttccccctcccaatcctgcttggcccccacctaccagcccaaaggtcaaaaaacaaaagcagaatcaaaaagtaatatataaaaagtcccttatgagacactgcaaaacattttctcttactatcactacaaaaaatgtcagtaattctggccgtaaaccaaagtaatccaaaaccatgggtttagttcaattctgaactcagacattttgtagcttatctacactggcccatagtttaggatcaaagttttaagaaaaagaagcaaaacaaatgaaaagctaatgcaatgagggaaaataacacaagacagcttatttcataaagcattttgggttaacaaaaactaaaattataagaaaaaaatttgagatcttattaatatctaaattgaaataatctgaatatgaactcattttgaaaacagccagagcatgccttacacctctacttcaggacttagctgaattaatgcaaaatttcactgtcaaatatattacacaaatgcaattgaatgaaaatagtgtaccaaaaaaaaaaaaaagcatgaaaatgagcaatgtctaaataggccatgggggaaactgggctgatgtcctgggtcctgctctttggttctggctctgccaataattaacaccatggaaagtggttgccttcattttgtggttcccatctgtgaattcagagggtcagtttaagtacacaccacagatgctatctgctctaagacttttctgccctagaactaaaatgcacagatgatacagaattgaagcttttctgggcagtgaaagacaggaggcaaacaagatctaccacagttaacagctctggacactcactgactcagctgacagttattctggttatgaaacaaagggaaaaaatggggagctatgcagccctgaaagcagtatcaagaactaccatgcttttctcattctgcattgtaaaatgcaaactgtaacataaaaaatattttgctttaaaataggttttgttcttaattttgtaattaacaaatatttattttaaaaatcaagaggaatgaaatatattgaaacaaagggattcacagtggttatttaaaggttaccttatcttcgttcatacaatattaaattctttgttttatgaagagatgataatgcagcgatggacacacacctggtctgggtccaagtcccacctactagctgcacagcctgggaagtttcagtttccctgtctgtaaaatgaggacaatatggttgaataacatggtctcaacagtggttgttgggagttaatatgagttaatacagggtaagtatcccttatccaaaatgcttgggaccagaagtgtttcaagttttagatttttcatatttgagaatatttgcattatacttaccggttgagca

SEQ ID NO: 42466 - DNA, 842 bp, Homo sapiens
gcatcccttctcctggaagctttgccccacacactccccacacccaagcaggataagtgctcgtctgggaagcactgagtatttctcccagtaatacgtatcacatagtaccgtcattcattccttagctgtcagcctttctctatagacccagagctccgagcaggtagaggcagtggccatcctggtcagtgtccacgtgtggcatctggaacagtgcccagcacttgggaagccaaactgagtgaacagagctggataagccaggaggccactgctctcattcaggggagagatgactgtgtcatgggaaaggaattcgaaagatataacaactgagcttcttaatttctctctagtcaccattcaaaacactgaatgaaatgctttccaagtcaattatgttatgaaaattcaacagtaaatctgatctgttgagtgatgtccacaaaagctcacatccctgtggaaagtcagaaaggatcatggtttgagcccttttacaagcaaaaattaggcataattctaggccacatagaaactgccacctcattgggataacaagtttaccttcttttgttttcagaataattctgcaaagcctcaaagcagaggatggaaacatttcaaatcctgctgacatagtctgcatctttgctttgatttttaaatatgattccaagcaggcagataatgttgtgacccaattacggggtattttggaagtagtaggcacccaacttgggagtggagctggtgggtgtaaagggaagagttactaagcaagcactaccacctgcctctcaatccttcacgggattttacagagaagggagctatgg

SEQ ID NO: 42467 - DNA, 3027 bp, Homo sapiens
atatgcaatagttttttcccaagtaattttggagtcagtattcacattactccagctaagtgtaaacaccagtattttgcactttagctcatcaagctttctttttttcagaaacaggatctcactctgttgcccaggctggagtgcagtggcgtgatcatagctcactacagcctcaaactcctaggctcaagcaatcctcccacctcaccatccagcttttcaattaccactttataaaaatttcagaaagccagttcacattggctccttgaaggtgaatttattcagttaaaagtatccattagaagagggaataaaagcataggacctaaaaaccttctgtggaaaggatctcaactttagagtcgtctctcaaaggctctcagcaaatatctagagacgtggttacatccagtttacgaagactgtcggtgacttcggggtcatacagtacatggacaacgaaagaacagcaattgaaatcttgtacttgtaccccaccaccttccgccctatgatcaacccactgtactctactgccacctgtgttctctcggcatttccccagcctggaggtttccccattctcgccacaaataccatccttcacgaacgatgccatttctaggatgttgcaagttatgataaacaactgttgaacaaatattgcttacaagctacaagttgaaaacgagaaggttgctacctaagttcatgaagaaatcccctttcaaggattccatctgttcctaaaaggccagccacacaaattctaatactctgcattattatggccatttggggacaagattttaaatctgaaaccatgacaagaaaaaaaaaaaaagcaagatttaagagagtaaactccagaaacaacagatcaaactgccattgtgtttgttttttttaaatcagtgaaatattaaaacaaatgataaacccatgccaacctcacaaagtttcctcattccttggaattcaaacaccaccgatggcatcattttatgataatcctttgggtatttcacgtaagtaattagacacaatgtaaagccagtgactgagggacttaaacaaactgtcccctccgagagcccagttggagcttccgacactgaccttattctcctctcaattttaaccctcctcaaccactcaatccatccaaaaacgtctgtgacagtcgtggctctaaaaccgcgcagaacttgactacagaacggtcggtgacaactccacatatgatttatccaaattaatttatttttttgaattctagtcccatgctccctcggctgtttgccccgaacccgtagtctacaccacttcaccgacgtgaagaccacctttcattgtttctatgggtctcagcatccttccctccgtccagctctgttctcgccgcacaaatgtcatttctagcgtaccaccctccattccgcccggtgggcagcgcaggggctttcgggtcccagtggccagtttcctggagtcggtcccctatgcacagccattttctagttaaacgctctctctgccaccgagggggaaaaggaacttttcccccctttcatgtctcatgggctggcctctgaacccctcgtggagaagccaaccccggctccaactccccggcaggagcgcgctgccgcccaggagagacagccgagcggcacagcggaggccggtgccaggacaagggggtgtgcgctcttcccgcaggcgcccaccctcacttttcccctctgcagtccccacccgggcgcaccgcctccaacccggtctcccccgccccaggccctgccaagccggggctgctgagggaaagagggcgccgggaagcgggagggatggaagtcaaggagagtgagcccgcagtcgccgtgccactggccctgcggcgcgggcgcagggcgcacgggactccgcagcaggcgccccgctgcagatgccgcggcagctgctgcaggtgtggctgcggctgagcgggcagcagtggccgcggagccccggggccgggagcagaggagaagccgccgggggaacccgcagccgctcgccgcacgctgctgccgctacccgggtgtttccccagcactctcgtgctgccccggaatccggggcaaaggcaaggaagaaagctgggctcaccagtggtgcgcgcggcgctcgcctcggctccggcgcccagcggctctgctccagtctcgcccttcccggagcgcccagatcagatgcggttacagcgcactagcttcctacttgagaccagaacgggctccggcaactgagcatgctcagtgccgttccgcgagtcccgcgcagggagcggcgctgacgagattccacttctccaggctttggcagcggctgcgcgagggaaggctggagggacccggcggggagggggccgaatgggagaaaggcggggccggggggtgggggccgggcagaaggaggcgggccgcgctcccagggcgacccctgcaggtggaggcggcagggcctgcgggaggcaccctccccaatcgcctgggaacacgcagggaggcaatgggtcccccagtaagacccaaaggcaggacgtgcagtgcagcccgggtatcccctccgtgtggctggtgtctgtctgcaccaaaaggcagttgggttaccttagccctggcttttctcccacacgccagcattcccttgcaataggaaaatgtccccacaggagagctgcccacacccacccaggctaactgcaagttgtaggcgacaccttctccttccttctacctcctatccccacccccaggcatatgccgcacacacactcttctttgatccggaaatcacaagataatatcaggggagagatacaactgccggagaggaaaaggaggttttcctttccattgccaataatattatctataactctaattgtaagcgtgcaaacaaagccctgataagagtcgagtctcagtaaacggtaaaccgtgctctgccccagacgctgtgaatgacatccccaaa

SEQ ID NO: 42468 - DNA, 2023 bp, Homo sapiens
gaatttatagtccggccgggtgacagacacctatcaaataatcactcaaaacggttatttcaaacaggtagagtgctgggagggaaatgcacaaggtgcgaatagagtgtatagagggaccctcatgcagactcagtgaggttgttacgaagggatgggaggggggctgccttgtggaaggtggtttctgacttttgcactccaataacctctccaattaacaattatctccctcagaccgagctggaggccagcaatcatgtccctccttcctacaacataaaaacaatactgtcacagagaaatccctataaattcatgaaaagtgtttactcttgggactgagtctctgcaccccaagatccacctaacacgtccgtggaccaaggacagtcgagggccacagtagacctcttggggaaaatacaggctctctgaactggagagcctgtggttcttagtctgtgatcttcaaggccaaagaggcaaggaaaccagcccaagaccaccattcccgtcaggagcggagatcgaccagcctccaaccttgcagacgggtcctctttccaaggcactctattcccggacctcacagctcccctcagatccccggaacccggcctggccaccccgctctctctcgggggtccggggtaggtgagcggagcctgcccctcccaggtcggtctcttcccgacggagaggaaaacccgcggtggagtccgcggcggcgggggggggggggggggggggggcggggcggcgcgcgcaggcgcagaggccgccaggttgggccgaggaggcgccctgctccacacctgatgcaatcagccttccggaaacgggtcccgctgccgcgctcacccaggaaacacttccgcgccctcctctggccgctgagctcccggggacgggttcccaaactcccccggcccgacttcgccacgggcggtgttctgcgccccgtcggggatacgccggagaagtcgggaagtcactgcctgggcacacaaaatccctgaaatgccctgacagtgacgtcgaaacggccaccaagcgttgcgcagctgcaggaggaaattcccttaattatgaatttacagaggggactgatcggggccggagggaaggctttgacccttcccttgcttccttccttcgtccgcctcccaacacattgtctctctcactgaaaggaacgtttaacagcagttttaaggcagtatggagaggaatctccatgccctctgtcttgctaaatatgtaacagcactttagctttgctacataaagctttcccaccgcgcgctcattttataaatacgtaattggtttctgcatacctcatcatttcagtttacaaagaaaatcatttctcgtttcaccacttcatgcaatttttatatctattgtgagtgggtttttttcttcatgctgactcacccattaattgttttccaaggaaatgaaatatccaagaatattccaagagcatgttttttaaagcatggaagtaaacgctgtgaacagtagataaaactgacctctcttaagtcccttaaggccaaaggtcctcctagggagttgggggaaggaggcagatccaaggaattttatttggaaggatacctcaagaccattctagaatcaaatcaagatcaactcttagactttacagatgacatttacctctctgtggcccagagaaataaatgacttctttatttagacaaaccaaaggcagaactggcacttgaagccagatttctcaaaattccaatctaatggggaaaaaaaaatgttttttgcacaaacaccgtagggagtgcaatactatattacaatgcagttttacaatccaaagattacaaaatacaaaataggtgacaacaaaagggatcctattacttgttcctgtgacgtcattagtctttaaatagtccatgatcaacaaatatccagccacttctaagtggcattgaatagccagagtctaggaattaaatatttcaattaaacaggt

SEQ ID NO: 42469 - DNA, 3364 bp, Homo sapiens
gctatctttctcacaacccttactagaatattaatggaaattctaagattctcacacttctctctgttataattcattaatatgtacaaaaatctctagctgctttcaaactggtgaccccattggaagaacttgccggtgggggtgaggagaaacctgagaagagggtcagattcttccatcactgtcccaaggggcatagactctgtgaagatggtcgtttctagcctgtgatttcagaaattctggcaggtccccctgcccttggtacctcaacataatatgaccagtgatccctgaaataactccaaaggaaacctatgccactggtgaaagatgttcctttcctatcaaatgcaggcacactagcagcacagtaaagcagtggttcccaaacttggctgctctttagaatttcatggggagctgtgaaaaatgtgaattcctgagtctgtccagaaaaccgattcagactctccagaggtggacttccagactctgcagtttgagaaggcttctctccatctgtcagagtaagaaaaaaattttgaaaatcaataaaaaagaaaaaagagaaggcttcttaggaagttctgagagaagagttggccaagcatctgacagctggtcctgcagcggtatttggaaactactgacatataccattagtgtgtgtagatttcagaccccttctggggagtgagtttcaatgttgggagtgagggtgggatagccatttgtccacaaagagcccatttttcttcccagctctctctgctcaatgtgctgagtgagatagtgcttctcagcctctttgaacgctttcttgtccctctgcctgcactttggttcccatcacgtcagccttgaaggtggagtggcctgtcagcaccacaggcttgtgactggagccacaggatctcctttatctcctcagcttcaggctctgttgtgtgaatccaggctaagagcagttcaatgactcagggttaagaggacacaccgccatctcttgactcagccaggagatccttcctctttggcaataaaaggacacaatgctttgtagagttgccacttaatatagatgagattacagtttgtggactggatgaatctagagacttgttttctcacctatgagaaaatatgcaaggcatgggaacattcttcatagtagtaaaaattgaaaatatttgtttttttcatccattcactcaacaaatatttgttgagcatctctgatcttatcttctactactgtcttgcttatacctctccaaccacactaaccccgctgatcttcttagaacaaaccaggtactcctctgccttaaggaatctgctgcagcctggaactttcttacccagttgtctactgagctaacttcctcaccttcaaatctttgcttacttctcaccttctcgataggggttaacgtgaccaccctatttacccctgcaaccagcttcccttccttacactgttctaccttttatttttccacagctctgtttaccttttaatacactatttcattgattaggtcatcgtttatcgtttgagttcctctcttgaatgttaagtttcatcagggcaggaatctttgtctgtttttttcaccatgtgtccctggtacctggcatggagtctggcacgtaagagacacttgataaatatttgttgaatgaatcaactgggagccggaagagcagcatgcaatacagataagatcactggtgtcatagagctcatgatttattggaggtgaatgtaaatgaattattacagaaatgcttatttagtgataattgtgatagctaagaaggaaatatggagttgtatctgagagtatacgaggggcccaacctaattagggggccagggatagtttgttgaggcagcaacacttagcctgagaccagaaggtggagtggagtaatccagctgagggagctgggaagacagtggaaagaccctcttagatttcaagtagttttcagttgtccggcttataacaaccgggcatgctgacaaccacatggaggtgcctctcttttctcttgaagtagctattcaaactgagtttccaaaaatctgtagactacctctacaccaacatctgaacaccaacttcagaatatttctcttgttacagatggatgctctttgatgaataacatttttgatcttctgaatgtctccttaatcagttgaaaacaaattaagttttcaattgattaaataaatttactcaatccactggataaagtttaaatatttattgtatcagtccactgaataaataaagtttaaatattctcagcaatcaatcaagagtttaagagatcttatctcagaaacaaaaccacataaaggctgaggtaaaagagcttcatactgagaggaaagccttagttgatgagatgagcagttctctaggtattcttcctagcacttgaaataaagtactttgcacaaggcaactaaagaaaatgtctgtaggaattaggtcaaagttgtaatagttaggcaaggcacggaggtttacacctgtaatcccaatgctttcagaagccaaggcaggaggatcccttgagggcaggagtttgagaccagcctgggcaatatagagagatctgtctctactaaaaataaaaataaaaatagctaggtgtggtggtgcatgcctatagtcctagctacttggggggctgagatgacagaatcacttaaactcaggagtttgaggctacagtgagctatgtcatgccactgcactccagcctaggtgatagagtgtgggaccctgtctctaaaaccaaaaacattatagcagttaattcccttctagagatcacctggctgcattaggcagttttttcctttttattactcagaagaacaaacacatttataagaaaatatacaggtatgaaataatgagtcagtggtaaatactgtgaaaaagattttgaaagcttctgagtactaacagatcttaaacattcacttgttaattcacctctgggaactcaatctttgacctggaaacaagaggaaaaacagcatcctttcttgagcagtatgttctcagcttccgagctgcccaggagattgggccccagatgataccttagaaccagaatcaatgcttgtgggaggaccatgtaggctccttcatcagaggcatatagtgatacctccattaataaagcctctggggattctgtgttctttttgctttgtttctgttttattttgcttttttgctaagttagccaggttgtggaggggaatggtataacttcaactgaggattgtgctggttgtgaccatgtcaaaagaagcagtaactttatc

SEQ ID NO: 42470 - DNA, 3797 bp, Homo sapiens
caaagccatatattgtattagtgtaccagagtcattttgtggactgtttgctttgccatgtttctttatggaaacaaggtcatcttctgcccacacgtctttagccctttcccatgcttgccttctttatctcttctttgtatacttttccctccctctgttttggacagcagggtggaggtgaggatcagtggtctgtactcagcaactgcttgtttgtcaggtccagctttggtctgtttacattcagtccccttgttcgtgcctttcacaatgattctgctggatgactatatccacctcattttaggtgaggaaactgagggacacactgtaagtgggagtctggacaggactggtaagacagcttggtgtgcagttaggagcaaatctggcgccaggctgtctgggcttgaatccaaccctccctgtccaccagctctgtcccctggtttcctcgtagggatgataacagtcctatcttacagagctggaataaggactgagttagtcaattatttgtaatgcacttagaacagtgcctggcacagtataagtgccacgtaagtgttttcaaagcaaataaactaaagcctgtctgactccaaagctggtaatggtggaatttgaggcctgctttttgttccattcccctattatagcagcagaattggacaaagattaaactcggattctggatggggaacagagatttagaggctgaggcacccagggacctccagccaccgtcagaaacctcttgttagcagccattctgaagaggggaatccattagcttgaggttaggccaagaatactgagctcctccggacccagcgctgggctcacgtaggtcagagctccctggtggcctaccagggtatacccaggcaacaatctaaaaggtagtgtgtgccccctcacccgcaggcgggacctggcctgcctctcccatgctatcattcccgcctggtgctctccacaccagctccagtcttgctggcccgctgtgggctcctccacggggaagctcattcctaccttaaggccttggcatccatctggaattcttcccccaaattgttacacagttaaatctccctcactcatgtcacctcttcaggacatttccttacagacaccttccttgatcgtcacttgggctgtagtgcaaaacagaaggcatgctcaagtgggagtggccaaggagagtttaaaggaagggttagaaagaagtgagccggatcgggagaccattatgggatggggaagcctttaccatacctaggcctgggaggttgagtgggacaagaggagatgaggaaccttctggaaaccccctaaccacctgcaggaagggacgagataaataaatgcacgtctctcttcagctcactgaccatctgcctacctcccgttaatggaaccgcgactcacaggtcagcctcccagccaaaaggggggaaggctatcggaaattaccccgcgctttttctttccatgtcattatcttctcctcttttatcttaacaacacccgccacaattatcttcttttgatttacatgtttattgtctgtcccggcccccaattccctctacaatgtagatacctcgagggcaaggacttccaggtagggtgtgtgtgggtagggtgtgtagggtgtgtgtgtgtgtgtgtgtgtgtgtgtgtgtttccatctctgcgtccccagcgcctggcccagtgcctgacgcatagtaggtgcacagtgactgttggttgactgcatcgacagactaggacacaggtagccttcctggagaagaaaagctcatcagggtcgtttttctttttcttcttacaaaaagatcaggtggctgtgtacttcccggcgccgggccaggggctgccccgccttgcccctacctctgcggccaggaaggactgcaggtgctgcgcggccagtgcccgcgcgtcctactgctccggtgccgcagcgcccgctcccccgggcccgggtgcgccccactgggcgcgcgtctcccatatgatgccagacccatccgcccgcccctcagcagccggcggggcgcagggacgtgcggggcggccagcggattccctctatcgggccgggtgtgaacgggagggagacacgcagcgctcgctccgggttatttttagtccgtagctgtgctccccctccccgggggcggagcggccctcgaaggtggggaggagaagaagctcccggcgcctccgcgctcgctcccgcgggtcactcacggcgcgttggagcccgggcggcgccgggaacagctgccgcggcgtcctctagcagcgcgcggctctcccgggacctgcgccggccgggggcggggagaggcggggaggggaggccggcgggcgggaaggggcggggagcgcgctcctgcggcggcgacggcggcggccgtcctcatcccggcgcttgagaggacgcggggctgcgcaaatggcttgtcccgctctcggtctggaagctcttcagcccctgcagcccgagccgccccccgagcccgccttctccgaggcgcagaagtggattgaggtaggtgcgggtggctggcgggcggccttgcactggcgccctgagccacggacccgcgcacgctccgaccgcaggtccagccttgcctccccccaaccgcccccactttcttttgccagctgctccaggtcacccccccgggcctcggcgagccgcgaaaccttagcgctttggcattggaatcccgggcgagggtgggcgtgaaaggggacactgcagtctagctgcgcgcgtgagggcaggaagggatcccctgcgcgtccatccttcctgcccgctggcctcgcaaatctcagctagcgccgcttccaggcgctgccaagggaagcgcagtgctagcaaagcgttgcaaaggcgcaggaagcgcgagcccccagagacttcaccggtgctcgcatttcggggtatcttgcttctggtcccacatttcgccccttgtccccctaccccgcacccttccggagcagagttggcagtgtcttcacggaggcgcatacccaccggagcctcttgctgtattcctggcaccgggtcaggtgtgaggctggcacagtgcgcagggcgggggtagcttgcaagacccacctgcgagcacgcatccgcatagacgctgcccagcctttggcaacccccgcccctctccatcccaaggactgcagggtcggttccgaagtacgggctacccggtctggttggcatatttcacttcttaaataactcgttggcaggccagggaaatcactggagctctcggctctcagtcccggaagcgctcactgggtgatcctgattcacgatgtctatcagtagatgcagcttggtagccccgagctcccgaaatgaactgtctgcggggttcaggacgcttgaagggcatgaaggggaaaggtgaccccctatgattagtgcaaggagcctcagcttcaatgggtggcctttctggaggcttagtggaaggtatgaatttggccttgtttccctcagtgacaagcagccctctttgcctggtagttcagaggaggaagtgtatcgctaaatcatgacccagcaatgttgaagcttccagaattccgcctgtcacttagtgactccccactccgttcagcattgtggttcccaagaagctgctagagtaacaagagctccacgtacagatttaaacctgctgagcttcctgcagaaaccaccctcacttaatgctgctctcctgctccagccagagacc

SEQ ID NO: 42471 - DNA, 466 bp, Homo sapiens
attcagataactcagtcctttgaaggttctctacatattactgcctttcatatttgaagatagatttggaaatgattgtcctctgggtgtaaagagtccaatatatactgctgttgtttccacacagcattgtcatttcctaccagggactctcccttttaaacttaagagttggcacggaaacattattgctcaaaagagccacccattcccgagtgtgtttgacaggtctttgtaaacaaacttcttcagccttgctgaaattagtggaaaaatctaggctctcatgtttacagttgacgtgggttttcctttcacctaaaataaccattacaagtaagatactaagtaaaaaacatactcatttctacttggtatatgaaaataatatatgtttgatgtattcagtgaaattccagttaactcataactctttgaggccatggatggagaggtggcattatta

SEQ ID NO: 42472 - DNA, 819 bp, Homo sapiens
ctttttggtgacttttcagtcatattacatatgactgaaatatatgtatgtgtatgtgtgtgagtgtgtgtgtatatatatacacacacacacacacacacacacacacacacacacacacatatatagagtgcagggcatagcataagtttattaatgtttcattgagaaggtaagactgaaatacaattacagaatattgaggaaaatctatattaatatatgagtttgaccttaagggtaggtcagtggaccttgaactatttggttggcgtcaggccgtgcctgtggtgtctcttcattggccaacacaatggcgtctttgtctgggaatctctacctctcattagggtggtcaacatatcacagtggtctttcccttcccaaataactgtgagaacaaaagtgccaatacaagcataagcccttgccaagtacaacaacatgaggttccatcagccctaaagaggggcaacctaagttggtcatcacagcaatgggattttcagtcttgctcaacattggggatttgaatagctcttaggataatctcttctctagtggttaaggatatagtccccataaaagaaatctgcttatgggcaatattttgccgaaatctgaccatccactgtctgatgtgatggccaggctaccagactgaggttaaagagctgagttatttactgacaaagtcaccaacttcttctagctcagcatcttgctcaataaccactgtgtgcttttgtaggcacatgaagagaatattcaacaacattttcccattctttttttttttttttttttgagacacccagg

SEQ ID NO: 42473 - DNA, 845 bp, Homo sapiens
tttcatgaatattcagaaattataatacagttggagcactgcaattggattaactcttagtcctataatgtatgtcatacagactgtgagtttgcagtaggggtctggagccagttcatatgactggggagaagggattgtgtctgtttcttccccactttgcattcagtgatatcaggttgagcatgaattcagctaaggtgggaatgttgaaaccacagaagctggcaaatgctgtacattaggaatctccctattcccatgagaactggttgttaaacaaacattttagaacacccttagtcctaggtcatttctcaggatgacttgattataaagaatgtgggagttgaacagtgaggacacatggacacagggaggggaacatcacaccctggggcctgttggagggtggggggcaaggggagggagagcattaggacaaatacctagtgcatgcggagcttaaaaactagatgactggttgataggtgcagcaaaccaccatggcacgtgtatacctatgtaacaaacctgcacattcagcacatgtatcccagaacttaaagtaaaataatacaaaaaaagacattaaaaagatttttaaaaatacaatcaaggaccttttagaacacagtgagtgttttaacaataacacaattgcctcttatttatttatttttagagacaaggtcttgctctgtcgcccaggctggagggcagtggcatgattatagctcactgtaaccttgaactcctgggctcaagtgatcctcctgcctcagcctttcaaagtgctgggattccagacatgagctctcacacctggccctcacaattgcctt

SEQ ID NO: 42474 - DNA, 407 bp, Homo sapiens
ctcctgatctgcccgccttggcctcccaaagtgctttttttttttttctatagattcttaatagttatgttatcttgtatttatcataagagtttagattgcttttctcagcaatcggtgagcttcctgcacacagtggccacagttcatctgtggttctgtctctagatactgctcatcatcattgctcaatacatggagaaaggcctaggtaaactgaaccagagattctgaaataaatgtagctaaactttgttgggctgtcaatgttggcactgttttcactagaacataatgcttttgacaaaaatgtaaagacgtatgaaaaaatgttttagaacctttccaatcacttcttggtgaacaaagttagtattatagagaggcttagtgatgtttccaaaatg

SEQ ID NO: 42475 - DNA, 676 bp, Homo sapiens
ggattagcataaatgattttatggcagaacttcagctctgagaaaactctgttcttcaccatggcggcaaagtggagcaaggtggtatggcggcctcaggaagcacttccatggagggggttattagagaatttgagcagaggccctcttagagctggagattactcctcatcactcactagtgggggtcccctgcctcattgtaggcctcactggctagtatttctactgatggcctacagttccattactgagtgcatggacagcaactttggtcaaaggtcaaagtaacatgcaaatcagaccgttgttaccagctaataatgccaggacagaagctaaggggtaggggtgtgtgtgtgtgtgtgtgtgtgtgtgtgtgtgtgtgtgtgtcttcttggagggcagggcagggaatacaggccccgttgtttttccagtacaacagaattaagaataaaggaagatcaagagaaatagtttaaggcagtgtttttcaaactgaaagttaccacccgttgctaggttataaaatcagtttagtggtttgaagccaatataaaaaaaaaagaactagaatagaatataataaaaaaacatagtgtgtcacacaatgaaggcaaaattgcttggggcaacttctgtttcagttatatttatgtgtgtgtgtgtgtgc

SEQ ID NO: 42476 - DNA, 924 bp, Homo sapiens
aacttcaccctaagccctgtgctattacttctaaaacttacggggaagctaaggaggcagtgaagacacctcctcagccctggtctcccccaccagcacaccacctagcacagacagcaccagctcacggccgccgcagtccctgggtggcctctacgggaatcctggggcagagatgggattacgaaaccctaaaccactcccgctgcgcgcgaatcacgtctggcaggctgctccagcccgcagtccacacacccccgggcctttgcgccaccgcaccaatttgcatccccaacgaatgcgcgctgccctgatccccgagcacgcgggtattaatgatcataaaaaactgggcgattacaaaaagagaaagtgctaaatcccgggagctggggcaagatttcaaaaggcaacacaccgaatccaagtctgtactttaacttttttaataacgatttttttttttctgggctggaagctcgcactgaatcctggaggaattgctaaatcggattaaggttatattttgcaacagactggatggagcaataaaggagagcgcgcggaaatgggacttcacccatcaattagatctctattagcagccaatgcaggcttcaccacaggaaatgtcacgtcccagccctagcggaccctttcgttccccacccccagctctcacctcccctgtccctggagttaaacaactcttctggcgcacacattggaactaaacaaacccttttgtgtggaatacggtttttgtgttttgttttttgtttttcttattgaacttgttttggaaccctgtaccacctgccttccccaaccccagcgcagcgagctaaccccgggacactcccaccccggccggctgaacaggttgcagcgcgacacctgcgctgtctgctgggtcgctcagga

SEQ ID NO: 42477 - DNA, 699 bp, Homo sapiens
aaaaaatcaaataaatagaggctacagaactgcctataataaaaattattttagaagagcttaagtccctgtcccatacttgtatataacactgctacagttataaaccatagcaatctcttttgaatgaatgacgagttcagaccaagggccttttattcagtttacccagtttcattattgtagttcatcattctttaaatccttcaagccagtcttacaaataagcacaaaaaatgaaaaattaccagccctgaaatgttttattagtttgcgtctccccaaggctacataatgttatgcaagtgaaagaccatgaaatcaataaaatctcctagttttctgctggccagtccgaatggctattggccttgagcacaaaagtccacaaggactggtaaggtcgattttgtgctattttggtctccacgggctgaatttcaaaattcaacaggaagcactagcagatagcagatccttgggcttcggatttatttgtttctcttgttttacagaaagaccagcctcagtgacagtcacactgtatggaacagattcaactggcccactcttttttaataaataaatgacattaaagagtctggcagttctgggaggcagggttttatgagctaatcacacccctggggggaatttggtagtgtgtagtatagtctcaccctgggggtgtgattaccc

SEQ ID NO: 42478 - DNA, 336 bp, Homo sapiens
atctggagaggcaatctagctacagaggctttgtcgagctgcagtgggctccacccagttcaaacttcccagcagctttgtttacactatgaggggaaaaccacctactcatgcctcagtaatggtggatgcccctcccccaaccaaggtcaagcatcccaggtcaacttcagactcctgtgctggcagtgagaatttcaagccagtggatctcagctttctgggctccatggtggtgagatttgctgagctagaccacttggctccctggcttcagccccctttcctggggagtgaaggttgtgtctggctggcattccaggtgccactgaggta

SEQ ID NO: 42479 - DNA, 2922 bp, Homo sapiens
cattaacatgttaaacataggctgacttcctagaactaatttgaaaggaaaaccctaactttccacgcctaagtagttgctagtcagttgtgtctaaactacaaaagggagggggtataatgaggcatgtctgatctcctgtcccatcatggctggggtccccttggccaagaaagggatctatccagtcagtcgacagaccccttacttaggattttatttttagtttatatatatataaatggcttcacaacgaatttcctgacttttaatttgcccctctgttcatcctccaccctgttgccagagagaactttctaaatctcaggatgtcacacttctgattaaaattgttccatggttctctggatttcagggtcaagttcagatcctttcctcagtacacccctgcctgcctctctagcgcaaatctttcacaatcccctgactggtaccatcattctggtcacactcaactagtcctctcgctgtcctgttacttcttgcactttctgttactctgtatggagttcccttcccgttttaaggcagaagaatatggtatggcggtagggaacctaatgccctttctcgctgacttcctagaactaaattgaaggaaaatccttactgtccacgcttaagtgaataaagggccagatactactccctttgcaagccccaacctgttctgcgcagatttgggaaattgaaagtacctctgattggttgctttttgtaaccaatcagacgtttgcatagaagtgtaactttgtaacttcttcagcctctgattggttgctttgcgcaaccattcagactgattgcgggccaccacttcatttacatgaagtgaactccaagtggccaatgggaaacctctagggggtatttggacccgagaagactctgtatccagggcccttgagctgctgtctcactctcccacactctggagtgtactttcattttcaacaaatctctgcttttgttgctttattctttccttgctttgtgcgttttgtccaattctatgttcaaaacgccaagaacttggacaccctacaccagtaacactttcagccaactttttgtcgttcaagatcaaggcccggacttaccttttccaggaaacctccccagatcccttctgatttaggtaccgtcctctgtgctccctgtgattaaatcagcctctacacatattacacaatcactatgctctgatttccgtttacttgtttctcttttgcaatctgtgtcatattcctctttttatccgccgtgccaagtatggagcctgtcacatagcaggcctcataaatacttattgaaagaattaataatagacgtagaaccaacgggcttagtaagcccctggagaaaggaatcaaagatgtttctgaggcctctatatcaggaagtgcggaaatttcatggtttgagaatgggcaggaaagatcatttgtgagctgtatttaatgcaaaagttgctcccccatcctgatttcttagctcactgggccaatcggcggaaggacaggtggggctcaaattaggagaaaaaaaccacacttcccgtcatgcctctgggcaccgctcccgtttccccctctttgtcaccgcctcttccccacggaaatgaaaggagcacttccgggttcggcaataacctggagccggcggcgtaggttggctctttagggcttcaccccgaagctccaccttcgctcccgtctttctggaaacaccgctttgatctcggcggtgcgggacaggtacctcccggctgctgcgggtgccctggatccagtcggctgcaccaggcgagcgagacccttccctggtggaggctcagagttccggcagggtgcatccggcctgtgtgtggcgcgaggcagggaagccggtacccgggtcctggccccagcgctgacgttttctctcccctttcttctctcttcgcggttgcggcgtcgcagacgctagtgtgagcccccatggcagatacgaccccgaacggcccccaaggggcgggcgctgtggtaagtgcgagggcagggtagtctggcttgatttgcaagagttaggaagaagcaggaagcgttgcgagtcccgaggcgttccagaagctcagtgcattcaggaatgggattaatgagttggggtggggaagttggagcggggagaggggaggtcctgagcgaagatatggagggaactacaagtttgtttctgaagcgacaataggctgacctggagctggtggcccccacctgtatgccatggaaattgggccttctttcctcttctcccacctcggtcttttgtttaccgtaggccccaaggttaaagatgccgcatgagattgtgccatgacacacatgatccatgacacacaccacgtggagcacacgagtgccggcaaagaacgtttctgcctagtttatacaatcgtatatagaaattatgcaaagggaggagagcggtggtctttttcttcttcactttgttctttatgaagagaaatatcattatgcttttgtaatttttttaagatgctgatctggagctaacaagttatttgtgcccggagcattgctgtcctctactttttaatccataagtagttaagtattattctgtgtgaccacaatgcagttaccacatttgggaaatattacctaatataaaatccatgtgcaaatttccataattgtcctttaaagctgctttctcttcatctgggattctgtcaaaaagcatgcatcgatgggctggcgcagtggctcactcctgtaagcccagaactttgggagtccaaggcgggaggatcgcttgagttcaggagttagagaccagccttggaaacatagcgagacctcatctctactagaaatcaaagaaattaggcggggcgtg

SEQ ID NO: 42480 - DNA, 554 bp, Homo sapiens
agttcatgtttttttcatttttacttattacttgacaggaaggtcctgctttataaaattcaattttataaattgattataagaaattcagttgggcatatatatgaagtgaagctattaaaacggtagaataagttcatgtaatttttttctattgacaagtgatttaggtgttgtgcaattatgatgcaattcacaaaggaggaagagacactgcagttgtttatgtctcatgataacctctcctctggtaatttgcaggttgcatgaagcagcaagcttttaccaacgtgctttgctggcaaatgctcttaccagtgctctgaggctgcatcaaagattaccacacttccagttaagcagagcattcctggcccaggctttgttagaggacagctgccactacctgttgtattcactcatctttgtaaattcctatccagttacaagtatccttttctaccttgttaacaatgaaattgccaactaagcatataggagatctcttctgattatttcagcaatgaaggcattccatgaagcctgggtttgtt

SEQ ID NO: 42481 - DNA, 1366 bp, Homo sapiens
taagtagaactcccaaaggacagctttcctggctgaacaagatgtaaacagtttacgtgatttccaaccaagcgcaaaagtacaggtgcaaaagaagacggcagacaccaaacttcccctgcagccacgccctccccactttgggagtctgggtccccgggaaggaaggcctccctattggtgctcaacgtgttacgtcacttccgctacctccacggcaggcgtcgctaaatgacgttgccgtttccgggtcacccaggcagcttgtggcggcgaagccatcggtgttcgctgatgtccagtctatggagtcagttggtaccggtggcggcgcggaggcagaaggcggtgtccgagtaggggcctctgccccaccaggatgttacccggcttggccgccgccgcggcccacagatgtagctggtcctccctgtgccggctccgtctgcgatgcagggcggcggcctgtaatcccagcgaccgccagggtgagtgtcccgcgctggccgctggctccgtagaagccgaactggagggccaggctgggctcggcgcctcgcctggggcaattcgcccacttgcctttcgccaacctcagaaccttcctttctggcctccgcctttccagttcagcctgcgcagcccgcgggggtcctgacaggtctctgactctgatgccttctgcagccctagcatggcccccgcgggaacttgtgggcacctcgcgggccggattgcacctctgaagcctaccgctttgtaccaaacaaaatgttacgtgcgcatcgcggtgtcccgcggttactcacctccgcggttggaaattgcggactccgcaaagttccagggtctttggagctttccagcgcaccttcatttagcacttggttgagattttcttggccttctttttcttactctcccaacttattttcttaaattttctaaaaggaaggaggggtgctactcactacggatcttttggaagaagtacgaaagtatccgacaatcattgaatgaacccagtttgggtccgaaaaacaaagaaactcttcagttcggctgagcagtctttttggtgaaaaggtggcagttgtagtggtaacccagaaaaaaaggtggttgaagagaattttcgtctctctcaacattcttttctgactcaaatttaaatggtttgagagtttccaaaataacattgaactaatcaggcttaccttcgtttttgccgtagcttgacacacattgcttgacactgagaactgataggatctctgagggagaagacagaactaagtccacccttaacctaatccctccattcttgggatgcagagagtatttaccgaaacattcatgttcgaag

SEQ ID NO: 42482 - DNA, 1754 bp, Homo sapiens
agggtttcgggcaaaagggaaacacaaaaacgaaacctcagacgcgagccggtgggactccgctgcaggaggcagaattgcagaagctgtaatgcagggaacccactcggcacccgaccccgatgaaggctccccgcgcttcgagagccaagggactacggatcaaaggatcctgcagccggggaaaagcaaactcgcttcgctgggagctcagatagggggttgcaaaacggtgggcgccggaggcaggggcggcgggctggggatctgctgagtggaaatcgaactggtggggagggaggtgggcagggcgagtgagctcagtgactgggacctaatggtcacactgcggtgcaaagcacgcctcggggctcccgcggagaacacccattcgagggtactggagcctggaaagggtctgcgagtacactgggggcagcgcggggggaagggtcccctaggggccgggcgcgacagtcggactgccgccggggaagaggtaggatgcggtctcttccaggataaacacacacgctcacacacacactcgcttcccgaccccgggctagccccgagcctcggcggccccttaccttcggcgcgcgagcggatctccgacacggtcctccgcatggtgggcatcgcggcggcggctgcaggtgggtcctcagcccggactctgcacctgtcacggcgtggtacacgcgggagacccggctgcgccgcgcagagcgctcagctgcagcctgggccgcgccgccgcccacctagggcagagctgccgccgggcgcggcccccgcacgccgacaggaggaggagaaaggcagcggtggcggcgaaggtggcggcgcccgcagagctgggcgagctcttgctgcagccgcggaggggcggctcggcgaggggcggagctcgggcgccggcgccgggggaggggcctgcggggctcgcgctccccctcccgcggccgctcagcaaggaaggcgggtgaggggcggggagagccagggggagcctccttcgccccgccccgccccgcttcggaccgtatcacgactcaaaggggggatcaactcttagcctccttagtcctccagcgttttcgctccgccctgtggagttggttgacccggttcctcctccaggccactcggactctctcacatcttgctcagaaaggaaagactgctctggctgctgcattctcacgaatcccctcccgctacccctggcttttgatcgcagtggagccgcccgtcgtccggaaagagctgttgggtctgagccggcaggcgaaggcgaaagggtctgggactacaaggtttagctcccagccagagcaggaaaggaacgactgactgttcgccatctgggtgtaattctaacctctctgcacgcccagcccgactcgtggcctgagccgcacttgtcctcctgcctcgcccactagcaacaggctgccaggtcgggaggcccctggtgcccatggtgctcttgtccatggggcttgggtgcatctgggccccgcctgcaagtgggcccggtgcatctccctagttcaggctctgcagcctgacaaggcactgaaatagcaattaagccaactaagtattggcccaggtggttcacaaaagactttttttttttcttttagttaaatctgcataaagttggatgcagtcgttttatctgcaaaggggagaggagtctttgtataaaatccataaatatgttaaattttaatttgccgatg

SEQ ID NO: 42483 - DNA, 1532 bp, Homo sapiens
aatcaatgttatggcccgtttcctttcagatgcacttcaagattagctctgtcactgacaacatggggaatacatttcgacctccagattttaaaagtgccattattattttgccattaggtagaaggctaagtctcaacgttgtgctaataatagcatctttaagtccctggactaagacctcggctcctggttcgggaatcagactgcctgggcggcactccaggctccacagctccccacctgtgagctcctgggcaagtcactcggtccggatttccagaggtagtttgggggaactgacagtacacacaccacagggcagtagtaagaaagagacaatgcaaaggaattggcacagcactcagcagacaatataagctaatatgtactctgtctacaccctgcgttttagggagtcaatcgaaagcctccactcacgtgaccactccactacccggcgccaagacgcgctgatgtcacgacagcgtgcggcgtgcagacgtcggcaagctgcgccgccgcttcgggttgcttccggatctggtacttgggcagagctccccggggttcattgtcttcgcttcacaggatctgtttgagtcctgtccaccggatcctacggggggtaccttcgaaaaaaaacgggctatgctgctgttgcgtgtgggtaccctctcctgacgcctccgccgcccgggtcatgtggaccctcgtgggtcggggctgggggtgcgcacgcgctctcgcgccacgagccactggggccgcgcttctggtggccccggggccccggtccgcgccgacccttggggctgctccagagtcctgggctaccgacaggctctacagctccgcagaattcaaggtgactgccccctggaatctgatttagccaagttttcaaacgttggagtgccccatgcgatcttggacatgtatagggctttctgggactagctctgaaccctgcttgcaacttggtacagggaggcagagcggagagtgtgagcactgctcaggttcccgaccctccactcctcactagtgtgaccttgggcaagtcactaactttgtaggttttctcattttcaatgtcaaatgttgatttgtttacgcgagccactggtcgaagtgctttgcgtttattcatctatttaattctaaaaagcctactaagcaagttgctagtaaatattaatataacgtccattttcctgcaaattaagtagctatgtggcctgggcaagttactacattgtcactctcctacttcatttgttgaatgcagaactgatcaaacatccagtggctaatttgtgagatttgtgtgatgtgagaagtggacttttttagactaatacctagaatgcaggaagttctcggtctgtctttgtagttttatttcattctacctcagccagagcaaacctgtgtaattttgactctggtgggagagggtgggaggttcaacaactctgataattgtgaatggatacattttagtcagaaaagtgaagtgactgaaggca

SEQ ID NO: 42484 - DNA, 1224 bp, Homo sapiens
gtgctgattcattttggatgtgcatcgctaggaaaaagggctgctgaatataaatcgcaaaacttcaatggtggatgacaacttctacacccgtgaagttacacagctagttaatggcggggccaagaccagaatctacacttgcagaacctctgctctgagcttttccctactcaacctgacctgtcctgaaagcgtaagggtggcctggccgcgcgtgtgggaccgacccgaggagggacgagagacagcaaagaaggctgtggttcctgcccgggaggcgggggctgcagattcccctcagctgcgcgtttgcctggccctcacttggcaaaggacagcgaatgcaaatgaggatgactgttaggaatttttaacgagtgtagagagaggtgtcaagaagaagccgcgagagaggagagggcagggacgccttctcccgtaggcacaaatccggagaggacaaccaggtccgcgagtggcaatacgggagaccccacgcgcccccagcctcgaggttcctgagcacccattccgccccggcccggcgtcccagtctcagcacaaaggccgcacagggcgaagttgccgtcgggtcccccgacccgagtccccttcttggcgcccccgccgcaccccccgctaaacttaccggcagacccaatggttcttcgatgctggaacagcgggaacaagcaacacccaaccacccgagagcgaccccagctgaccagtggagcgcgaatcccacggacccggatgcagataaaggcgcaggaaggaaccgcggcgtggctggcgggcgctgcgcatgcgcaccgcctttaggacgcctgaggtgagacgcgaggagttcggtccgagtgcggtgcggctgggcgctcttcttgcctggaagatcgcagtttctgggtcatcactttacgctactttcccctcccccccatctttcaaagagggatttgcagtagattctttaggcttatgagatttagtatgtaagaccgtagtgctcacacgtactttgttgcttatgttgctgtttggcaacatgaatatatttgccatttatgaatacatttctctctctactccaagctattgaatgcatatttgcaaacgcaatgacagataagcgtcttgtgtcaaaaaactcatcaaagtttgcaaaagggcaaacagtaccatgggaaatcgggagcgtctcagtaagagaaaacacta

SEQ ID NO: 42485 - DNA, 648 bp, Homo sapiens
ctctaatgtgtttaataaaatccagcaaacatattaaaaagtatagtttttattggacagtgggatggatagtaagatttttcattggaaagtgcagttagcataatcagtaaagttttgatcagcagtttccaatccagattgtcagctgtgttgtacaggtatgtgtagtaaacactgcaaaaaaagaggtgtggacttcagtccacactgaagttgtgatgtaactaagttgatgagtaactaagtacctgcattctgaaagtgattctaaaataagttcaaaaccatttttggaagtattttattaactgctttaatggaataaattattatttcccctttttatcttgtgctccttttgcatttcttcatttcttttgttattttgtttttaatggctgtggcggggggcaatggatgtcataacttctccgtttcagactcatcacaggttcatttccagtcttgtcagttctgtgaaatgtgccatatctgagatccacacaattgatttttttgacactaaggtcactatgtagtagatactaactaatagtagtaagggaagaaaataaaagcacatggaaaggaaatacacatgcagagaagaaatatttcatattggaaaaatatccacaaaaatcc

SEQ ID NO: 42486 - DNA, 894 bp, Homo sapiens
cacactgtctgccctaaaactcactcttggggaacatcatcttaatcctgttcagtgaaatgtcaattaataattacccctaagccactttctatctggccatacattctaatttctaatccctggatatttctgctgctaatataatcatgaactatttagtttagtgacaaattttttaaactgatttgttaaacttcattagaaaaggcactacgttttccttacgcttcattcaaatttttttttcaaataaatccaggaatttttttttaaggaatactatgtatgtctcatcagtgaggtcgcatgttaataatcaggcatgtgttcaaaatttattctcaaagcgggggttcctacctttgacctaaaagacaatacagtgactctctgcagtatttgttttatcatttcctgtcattaggcaattctcctgagttgggcaagtatctgaagcaggcacgcttgctgatagctggtcactggccagcagtcctctggcccctattaaaatcagaactgggacttatgcaacttctggttcttccattatgcaaaattaaattgtttgaaaagttaatctgctgactcgttgacccactgctaagcagaagaataatgtaagacaatttgtgtagcctaaaggagacctggcttggagtgtggggtagaaggacagggctgactagaagcactagcttagcttcagggctgaacatgttgccatgtctctaggggaagtgcctttacctagtttttctaatgttttctaattttctctgagagatgttattaacaataaacactacatgacatttggattggacctactctggagaaggcaaatgactctatcttcaactcgcaatgaagaaatggacacatgaatga

SEQ ID NO: 42487 - DNA, 697 bp, Homo sapiens
gtcacttggttagaccatggttatgtgagggagagaaaataacatatctgtatagaaagcggcctccatggttcattttgcgcatcttaatagtcaatgccagtcactgaagctgttgctattgctattgattatgaaattagcactgtgagtcataaaggttttgcttactctcctgccatccgttttattgacttaggaacaagtgagcttcaaacagcagtattcgctttgtgcatattgaacatggcagaaagcaaacaagcaaacagcattacttttctctaatattgtctgtgtgcttccaacctagcctcgaagccttcattcacaaatttataaatgcctgtatgtttgcaacctgaaaactccagttcaagatgatctcaccctagggaattcaatacatccctaatcatctaaatagtactcttgacctttgctattagtcagacttgaatttcccaattgttcacaattgttctttcacaattgttcttcttttctcaggtggtagatatttccccagatgttaaatataagcttcttaaggactgatgtgtcaaatttatttatttttccatgcaaacattattttattcatttgaaaagaatttatcatgaatttattcagcactattgtcttttgctttatttaattataaagggttatttaataatcttgagcttcagtttt

SEQ ID NO: 42488 - DNA, 900 bp, Homo sapiens
acaagccaggttcttttacagactggaagtcaatgggtacatcacctcttgggacgatcctaactaaagtaactcgcccagttatttctcttcctaccaaccaccctcaaggggggaggcagggtccgcttcggtctttgtcacattgtattccagcacctagctctgtacctgctgtccggtaggtagggagcctttgggaggttatgtgttgaatgaattaagaaaacgtatactaagaggcagcaaacaccgacttaagctttcaaagcccagtctggtgtgggcgcttctgcgcgcaaagcccctggagctgcacctctaggctgggggtggcgccccaagctgtcctcctaggctccccagggaaggcggggaccaaccacccgaaatcacgccccttcctcctcccttccctagggagcttgcgaaggcgtccgggtcgcacccggcctgatccgcacgccgggctgtcgcgaatcccaggccccgcgccgcttcccccggtacccgccctcacctgcgggcccagctcggccggcagcttctgcagccgccacaagggcgtcccctcttccggctccatccctgcgcgaagctggggcttgggtcacgtgtcaaggctggccgcttgtctaaagctacgactcgcccacgtgactctcgccggcggggaggggcgtggacccaagaagtccctgtgcgcttgcgcagagaccgaactaccgctttccccgtaaccagggagactgcagtttgcagtgatgtggctaagatacccttgtgctattaaaggcacatttacgtatctttcaacgcagtttgtacctttgtttagggttctattgaactttctctgtgctctttagaaaaccgtcgaataaaggtaaccatcttttt

SEQ ID NO: 42489 - DNA, 1788 bp, Homo sapiens
tgaggaaaacgaccaaatcagaattgtaatatttttcctcatttcttttctagtcataaaaacagtaacattacatattatttatttattttgtggtagggtctcactctgtcgcccaggctggaatgcagtggcgcgacatttttagatttgatctcttttaccctccaaaaaataattgtccagtgttccacgtttagctaaaacagtgaattgttagaattgcagcaaaacaatgaaccaaaccgtcaaccgcgagcaacctgtacttgggaggtgaaagtcagaggtgagattgtaagggctctgggtcactggggcatctgcgctgggcagaagggcagctcggtcaaacagctggagctgggagccggtcagttgccaggccctgccgctgctacgtcacggagggcggggcggtgggcgattggcggtgcactgcagctcgggctgctctgcagcctggcggagacgggaggaggagcggagggagaagtaggttgcgagctcagcacaggctccggcgctggctcccgcagctgagtttgggagatgtctaagtgattttttttttttcccggaaggcaaatggctggcgtggaagcacaacccgctttcactcttcgaatttgtgcttagctcttttcttgtaccttgcgactcgtgaccaacatgctgtgatgtgtgccgagggaggaattggtaagagtgagacggcgaatccctctgactgtcccagccttctgcttcaccgcccacccgcttttcctttctgtttctctctcctgtttctccccgctccacttccctagtcgtgtttagatttgatgacatggctcaaaactacagttctgggctgttactgaactaaaaaaaaaaaacaacaaaagataaaatgattacaccattttcaatcatttgttaaaggggaatttaaaaatctattttaaatgctggattttgtaaaaaggtaaactgcacacgcgggcgcacacgggcacgtacatacacgcattctcacacacctttgtacacgcgggcatacacgggcacgcacacacacgcattcacacacacacacactcctttgtcatcccgttgtgaaataagcagtttaaagaaattttggttatctgcctcaaaggtgatgaaaagggaaggtgttgaagatttagcccagcagattgattccttaaggttgattccctaaggttgattccttaggaagaaaaaggtgtttgtattggagctttctcggaaatagttttcaaaggagtgctacaaagaagcccccatgcttcccccaaaacactaactttaaagaacctagttgttattcggggcaccctttattttacgttgtaaaacatgtagttttaatttaccacgtacagcagagagacatcagttggttagggaatggatggttattttggtgtctgggaccctgtgcctttagaaagaatatgttttaactgctcttatcatgctagctcaggtttttaaaatgtgatctgaataagaccaaagtttcttcttgcgttcttttcatgctggttctaagcagggagaaaaacaagtctgtatggacagagcaaacctctaactcaaaatcaaccttgagagatgcatcaacaaggacaggggctcctcatccaccaatatttacttgtatcagcctttaaatcatgtaggtcacatttctgtgaagaatagcatcatcgaaaacccttgctgacttgtgaagagcaaaaatcattgcaacggagtagtttgttcagtgcccgc

SEQ ID NO: 42490 - DNA, 1148 bp, Homo sapiens
tttatcttactggtcaaatggatatgaaaataaaagtaatgaaataaggttgatgtggcttgtttcaggggaatccataccttaaaggagctatgtcctacaaaggcactttgcttatttgttcattgttttcataaagaattctgaaattatctgtctgatccattagaaaatattatagatattgatgtctagtttatttttaaatgttttatttataaaatttggctgagatcaaatgcatatattctcggagtgttcacatatacatttaatctcaaaaaccacttatgtgattaaagaccaacaacaaaagtattttcagtttttcagtgctttattgataaaaaggtgtttataagtataagctctcttctggggagtcctgtgtggatttcggtaaatgactcagtcattcccatcacctgcagatgtttaataatgccctaggaccattctgatcccaaatatggatcacatgattatgcctctactttccttcctttgggaaattcatgatatgaacttcattgcaaaaaggcttagcattattttaagaattgatgaaagtgataaaacacttcaatattaagggtttaaccttgaattcttattttgtgattcaaaaaatatttttaggactctgaagttgatcctgagaagttttccagtaggatagaatgtgaaagcccaaacaatgacctcagcagattccgaggcttcctgtgagtaatacatgatgaacatttgtgggtgtaagtggaattgtgtgttgcaatcgtacttaatttgataaagtgtttctgtgcttatacccttgttaaatcactaaaggtcgtaactttagccacctactaaaatagtttggcttattttaattatttaataagtatttatacacacacacatacacatataatattcattctggaggtatcttgtggcatccatatcccctttgccagggcagctagaatttggggtccttacctaatttcaggcatcagcccatgaatgctctatggccttgagccaagttatctacccactttgatcctcagtttcctgatttttaagagaagacaattagacctacttcacagtgtgagaagagcaaagttcccaaatcattttttgaaatgagaatt

SEQ ID NO: 42491 - DNA, 728 bp, Homo sapiens
ggatacagacatctgatagggtagggacagggagggaaccatgcagtggaaagagggaaaggcttagtcttaatcaggagataatgctggaattaaatcttcaagaatgagaagatgctaggcaaacaataaagtgaaaagaatggctggcatttcaggctgagggagcaacataggcaagagcacagaggcccaagactacagtgtatttgtattgttctatgtggctaagtatgtctggaatgtaggtgagcaataaggcagatcatgaagaggccagagcctgaagggccttgtgtattttgttaaaaagaaacatttatcctgaagttattggggttagtattagaaaagtccttccatggaaattttagatggtcttcatgaaaagaagttaggcagctgcccctctctcatcagaaacattctcataagccatctcttaggatgagtccttttcaaggatcatttcctctagctgctgactgtgaataaagtttcctcttgtaaatgtcagaatcaggggctgccattttttcacctgaggtcagatctgtcttagggtgcagcctattcagctgtcctcttcccacagctgggcacgctgactccctgatgagctcagacttgcccctagcaggatgtatttggtttatgcggtggagagaacaggaaggaactctagtctacactctgtggtctggagcatatagcactctgcaaagaat

SEQ ID NO: 42492 - DNA, 1792 bp, Homo sapiens
agcttcagtttccttacctgaatcccacctactttgggatcgtctctgagtatattaatcagtaatggacataaagtgccgagcaccaaatcaggtaaggcccagtatgttctgtttactaaggctgggaagtgtacaactcacctctgaaagatggccatctcaaactattgaaaaacgccttttgcttaaagggttaacctgcagttaagctgaggtcctaacccccaaacttatggatatagcatatctacttagacttggaaggtaggggcacctgggttctttgaaacaacccagataactggaggagaaagtggtctcaagtgatcaacacacacaggcattaatacaacaacatctaggaacagaattatttaatacgaacttctctttggctcataaacagaaaaggaagtcaattgcttcaggaaagttgattttcactgtttaatcgtttgtgtcctgttaaatgatttacacgctggtggaacacagaggtctctggattctttctcccaggctcctccgcttttctactaccgcatgcctttcacagcacactacataaaatctctctcagtatccctagttaccaggattgcatataacaaagccacacagactaaacctaacaggggaaaaaaaaattaaccttgcgtaaaactaaatacaagcacaatttaattaactcgcattccagagtcatagctcccaatttgctaagtctagaggattggttacacaacatccaagcactcagcagggaggggagaaaaactgctaaaatgtttccagaatcttcacaggactcacatgttcttttatactggtaaacaggaatgatggcccctgtgaacaatctatagccatccaatcaaggagacagaacgagccagggcaataaggggtaagaggttcaaagaggttgaagtttcaggagagactacaggggaagaaatgtacagaaaatatctggccttaagattagccctgagtcaagcagagaatggtctactttatccataaagagggaacgcattgagcagataacgggaagtcaaaaactgtgctcctattcctatgaactctcattgctgcaatttgagcagatacagagtctcctctaaaaacacgctatcgatcaactgaatatgcttaaccccgagaggtttcataacatgaagatatgtcagtggtggagggtgtgggaggaggggctgaactcagaatacaggtgatacttctgagagaaggttcatttttttccacttgacaaaagggtaggacacgtgcagttcccaagccatatcacacgatggcagccatactcagcacgtagtcgctgtgaggcacacacagggaagaattcagcctgatcccctcaactggtgagaggcatggcgacccagtggatttcagctaagagatatcttttctgaagggcatacttggcttgtgattgcgactgagtaaatctgaaataatgaaatcccacttctaccaatgattacttaaggtaagtgaaagcccttcacagtttatgcctactcctactgtttgcacacatttctactgctttttttccccctgactggtttatcagagctccttgtgttgcaattattttctcccagtgtttcctgtatttgtcttttaaatctatagcttcttcagctacatgaaagttttgcaaacgtgaagtctaacatgtcagtctttatggtttacgtcttcataaaccatgcttatatttgtgatagaacaaaaactctgtgagggcagtgaattt

SEQ ID NO: 42493 - DNA, 966 bp, Homo sapiens
ctttttcctttccactgaggatgaatgtgaagaaatacctatgctgcaatatgaggcagagataaatttcttgttcctaagaagtatgacatattggaacgggttggcaaaggaatagtgttcaagcttcctctagagaggctttgagagagtctaaactttgcatctgtttggcgtgaggtttcctccctaagagaaagggaagtagaagaattttcaacctctgaattttaagggagctgttcaaattgtaatttgacatactcaattgaactaaatgtagtactctattttccctaacacttgtgttgctccctagtagtaaattggttgtttacttttgaacatctaccttggaggcactaaagagtaacaggatgatctatgattggaattgggttcattacattgtaccaacttgctcccaacatctgttctgtttacacaatgacacattcagagtattcagtgcttagtgcaaacaactatgatcttccaatatttgatttctccttgggctttcacacacctcagctttggtttcactgaatgatttttggaagaaaaaagggcataaaataaagctataccaatgaatgagagattgagtgataactatgaaagttttgtgtatacaacttctgcaactcaaagggctctctgatggtgttagcaaaaaaccgtgtaaacacccttgccctctgtcaggacacaataaaagctgtttctttaatatcacagtatcattgtctgtttttaacttttctatttacatagtaaaggaaatttttcacttaatatttaaaggattatataacgatccaatacaatattaaagcacacagaataatgttgttcaaatatataatatatatagatgactttttctacttgtatatgttcacttagaatgcttttaaaatttatagctaaatccagctacaagaaaattttcatttcttcaat

SEQ ID NO: 42494 - DNA, 1781 bp, Homo sapiens
aaaatggtttaataactttttataaatgcattgtttcttctcattgtctcagggttatgccaaaattaatttcaaaactatctgcttaaatgtgtccttggacaataatcaccagtaagtcctgacttcaccccctttctggtagcggtctgacgttcctttgcagagtttcgcttccatcgataagttactttaaataaaaagttaaaataaaaactagaagccacaattgtgcctatgtcagtcatcgaagtcttgtacaggagtccgtcttcgcagcgcatcgttctcagaagtttcccgcgggaggaaagctccactttatgaattactcgaacagcttccctgggaatgcccagccccgaagcttccctgctgaattcaaagtcagagctcccagggctcggtcccaggaaccgggagccgtgcaaaaagcgcgtacactgccatccactggccccgagcaggtagtagcaggagtgaggcgcctgccacgggagctcaggaactgggtcccagtaagatccgacaagacaccacctcccttccgcccgcacagcctgccctctctgcctgcagctagcgtcaccggtcggtccccgattcggagcagctgggaccctcgcggtagcaagcggattccggggccctaatgacaccgaaggagaggggcagccgcaaattagaccttcttcctgggggctcaggccagtagggactgtccgtggtgcccttccctttctttctcctcctgaacgagagccaacgctgccccttcccaggactggatctgagccaaccaaatcctacagcgcagagcctgcgcccccggcggccagccctcctgtgcctaggcaggttcacgccggagaaagtttgcacgcagggacctacaagttcccagcactctgcaagagggccagttctgggatgccagcacttaggacgggcgagtgatccccaggcaccaactgggggccggggaaccaagcgcgagcccgggctgtggagggaccgacacccaggcgctcgcagctggggaagggggcttacgtctggggcaggcaagactgctgcacagtccctccagccacccggcgcccgagacgccggcgcagacaggaagctgtagatccccgaggggctggctccgacagctccacctgcagcctcccctgccgccagtgtgcagccaagtccactagatgcttggagggcaccgtgcggaggagggactctgcaggaaaggtggcatcacccccggcatggagaccggggtctccggatcgagccgactcgaacactgaaggaaaccctgcccatgaccctgggagggtctcggacgccgggcgaccggggtggtggtcgggaccagggccgtgcgcctgggaactgggtgcagggcgctgagcgcggaactgtcagagcgggagctcaccggcggctggggaaggaggtggcatcgggcggaggagaggacgggggcgggaggggctgaccctgaattcaccgggactaagaggccatcacacctggctgcggtaggacagcgaatcatcgatcttaccggctttggggacccggctctgcggcagcgctcttccggagcgagggcaggagactgtttcatggataaaaagtctcgcttattcttctgtccacttttatcttggtcgcttttctctcctctacgtgtcccccggggaggcactacggatgattttctccaagctcaagagagacaaactgaactttaagcgccaggggccccatattttgtc

SEQ ID NO: 42495 - DNA, 2050 bp, Homo sapiens
aattagcctaggagaaaaatcattcaagatactcaattctgctccacaccccccaaaaaaatgtatcctgaaatgcattccaaacacaaaaataaaatgatttcagggattattccctcggccccatgcacaattgtgtgtaagtcctccctggctccacgaaaacatggtcttggatgaaaagtattgatatatcggaggcaacaccagatatgtccacagaaggacatggaatttgtaaataggaactacagtcaaggaaggtatcaaaagctcaagtgcttacaaggaataagacaagtcaagaaacaaaggcaaaggtaaagatgacaaatgacacctggctccagaaatgagagagaatgtgagatggaatgcccaagtccaatctaaatgggatttctgtgactcagccgagctgactgttgccatgcacaaagataactaaagccacaaggttgttaaccagatttttaaaaacgacaaacaaccgctgacaatcaatccacatttaaaactctgtgttaaccaaacaacattatagaccaaatcagaacaccgggccacaatttacaactgatggtctggagattcaagtaggcaagagtggagggaagtaacaaaggtaataccacctaaaattaagatgaaagaggtgcgatggaaatctacctagagtgccgaaaagagcagccacccgaaaggctggagaagtgggcccgataacaaactcccgaacgaggggaaaagcagtgaaagaaagaaggcgagggcggaggcggtcctgactagtaactgccttaggaggcatccaggtgagcacgcgggcgggagccattctcaccgctggctgcggtagtctgcagggcttgggatcctgcggggctgtgcctgctccctgcagccgccgtggtcgcgactcctccgggactggtgccagaaggaactgcgcccaccgaccccttctctcgccctcctccggcgccgcggagatggactccatttcctgagggggcggcagtggcccgtccccgggatcggcctcggccaccggccacctggcgccaggaagcttccatccctgcaaaggagaaaaaaaaaaaaaagagtggaaggaggtgagcgcagcgaggaccgaggcgaaggagggtcagtgcggaaacccggtgtgaggggccgagtgaggaaggttcctgcagggcggcgaccgggttttaggaggtcgcggccctgcctttaccggagggcgagtccccgccaagcccgggctttggagatggaccgaagaggggagggaggactaggtacagaaataaaccgcggagcaagaagcacacagtgccgaagacagaaagccggaggagaagtcgaaaccgcctcctcagcctctgcgggagcgtggtaggggaagagtcacagactgaccctgcgtctcccgccgggaaccaactgcagtggtacaccccacggaaagctacgtctccttaccgactgcgcacgcccccaacagactacaactcccagaagcccccgcccgcgttccggcgactgcgtggcagcacgggccgcttccttatccggtaaagtgcgggggttgggtgggagggaaaccccaagcgcctgcgctggcccgaacaggcctttgggaactacaactcccggcgtgctctggggctagggaggggtcgaaggtcataggggcgcgtggtggtggaggcgggcgggtccggagggtttcgtgaccccacaatttgcttctgcttctgcaagactgccctaaactcacctgggtatgaggattacatggctctgtccctaattggctctctgccatcttttattagccttgcctttgagcttgcggatgacaggaggtgtcaatgtaaaataatcaaaagcgcgaagtttgaggatagcctacctagaaacaccgactccaaggaaggagtcagcgttccgaagtagagatttaagatttcacttatataggcagaaactgagaggttttttagcaggattacagcattttctcatacaaggttagagaata

SEQ ID NO: 42496 - DNA, 2025 bp, Homo sapiens
cccgccagccctgcccactccttgttttgtaaatacctgctatcaggtcttccaaccttggtttggttacttaacctcactctttgcctctaatccctcatctgtaaactgagcgttaatagactgctgtgagatttaattaatacataatgtgcctgcatatgtatggtataacaaggatatcataaacattagttattaataattcgtggaaataagtctttccagttttggcattgcttttcccttaaaggtttatttcaaatacccctatgacccagaaaatggggcagggtagggggagttgcctgctggagacagaacggagagtggatggatatagcgggcgtggacggacagcgacagaagctgataacagcacagaagggcaaagtctgctcagcagcccccaaaataaacttgagcctggcaatcggcgcagaaccccagcagtcagcagcttcggtgcaaagcaactaacacctgaaggcttccaaaagcagcagggctctctctagcgggggagccttttcgaccagagaggagccagaagggggcctcagtgcagcctccactccactcaattcccggagttaccttggcgggctccacgctccgagagacgctgttgctctatgaggcgtgtctgtgtttctctagttcgcggctccagcagtcgcgccaaggggcagctgctactcctgccagatacaccagttatcacaggccgctcccaggcctgcgggggccctgagaattcgcaacaagccccgggcagcagggctcggctggcgctgaggccccgcctggccatgcccattggcggaggctgccccgggggcggggtcagggcgccccattcccagaccccgcagccccgcccgccgcgggtgcgtgtggagaggcccaggtgaggagcaagcgcccgcgttccggaagcccgctcccggggccatgggggcacaggtgaggctgccgcccggagagccctgccgagaaggtttgtgtctgccctgagccgagggacctggcagctgggtggcgaagagaccgggtgggcggtccccggacacttgcggagactggaaaggggggctgtaccgactctaaacgtagtcgttcactcattcattcattcagtcagtcggccgtccagccaggcgttcaacacttatttatgggtgcctaggcgattcgggctgtgctggaaaacctgagtggaataaggcaggtgggactcccactcgattcgcgaggccgaccagtgtaaattaccgcgtgctgcgtgtgggacggggaaactcaggatgctatgggaagaatcccgagtccctctgagaaggacgtttcctctgactcaggctcccttccagagtctgcggccgacgtcacccggtgggcagagggcgtgtctgcctggggggcccgtgggagttctgcgctgcgccctgcgctggctcccggggatcgagcaccgcgagaggttgggcgcccggggccgcgggggtgggcgttgggcaagtctgggccgcccacgtctctcctcttccttggaaatgaaaaggtctccaaacccatgagcctgtctgactcgctgtgcagtcactctggctgcttaaggcgagagccgtactggagaggaaacctggaaccgggagcactcgtttgcaggctcttcttactgcttctcacctgagccccgtgaaatctctgggcgaggctccttgcccttcgccaagtgttcgcaacactggcgggttttctgcagtctccatacagaaggccccgataaaagtagggaagggggtagggggagcgactggaaggatgtagatacattgaaatgatggttttcgccgtaccaaggggaaagcagctttttaatttacctgataatgcagtaaaggggaagggaggcagtgaaaggcatggtaagaactactatatatatacacatatatatatagttcccttacacatatatatatatatatatgtatatacatatacacctttgcaaaggtg

SEQ ID NO: 42497 - DNA, 1854 bp, Homo sapiens
ttcaaacgattctcctgcctcagcctccagagtagctgggattaaaaacgcttgccaccacacccggttagtttttgtatttttagtagagatagggtttcaccatgttggccaggctgatctcgaacgcctgacctcaagtgatcttctcccctctgcctcccaaagtgctgggattacagtcatgagtcaccatgcccggccttgccgtgattctttcgatgatagcaatgtcttaattattctgttctgtaaatttagatttgtttaatgatgttttcctaatggtgaatactcctatagatttggggggatgtagcgtagcagccagacaaagggaaaaagaaaaaaatcatgctggtgttcctttctctctctacaataagcatttgcctggtgtagttgccagcatgaaatactacattctgtgggcaagtttcccactgtgttctgtgagaataacttggccccagtaccagagcccagctcttgaagggatttctctcactctagaagttatttatagcacactatatcatgcaagtctagagttcctcagataagaaaaagattacattcaggagcatatcatgactttaaaacagctgcctggatctcgttaagctactgagatactgttacttgcttatagatcacttacaatagagggatatctaacttcatgggcctatggcaggtatttctggctattccctacctacacaccagatttaaccattctaattttccaagctggttttggtttctgtgggtaacctacaaagctgtaggtattcttgagcaagtgaaataattctctgcttactacaaagctacctctactagatttcattagagtcaccaaatatgtcttcaatattgaagtagctaaaaatttctattgaaagccatttaaaatgagtactcatctgtcaccattttttgcatcttttgagtttatcacctggtattacagtttgtctgcatctcttaatattaattatctcctacctgctataaaacatgttacatcattctttttagctagatcttcccatgtatttgggttaaaagtccactgctttgcatgagtcatttgtttttctcttctgacaagtaagcccattttttatatcaatatctctgcttgctttctagtgggagcaggagaggctgcaaattttgctgcttatgcttttgcacctgccaccttggtcacccctctgggtgctttgagtgttctcataaggtatgtgagcaacagggaacttggcttctgtaggtattttaagaccaagataaacttaaaccataataaacatatggctatggatatctaaaagcaaacacacaaatctagaccaacctgggctctaaaagtctagatgaacccaaattatttctgaggctcctgggaagctttggtcaagtcactcaggctcagtttactcattcataaagtgagaacaatactttttcttgcctgaaatcacaaaaataacttgagaagactataaaataacagtagaaataggaaatagactgtcacattattattttaaaaacctaagacacagtgagtttgatttcctactaacataaatgtgttttacatttgtaacactgcaatgaagcatagaagattttttaaatctctcatcagaacaaattgccagagtcctgtcaattattttcctcatcatagtggttaatgaccatagttatcagaggacttttacaagcatggtgttttggttaaattttaactctcactacaattcttgcattgtttgctggatacttctgtttggagaccctgtagttttgatagtggaaacaggaataattttccta

SEQ ID NO: 42498 - DNA, 913 bp, Homo sapiens
gatgagaaggtaagacacgggcaatggtatttttgaaaagctgtcagatcattctagtgtgtgaaaaccacaccaggaagaggaagtgaaacactcacattctccagcccagtggtttgcgggcagaagagggagagtgatattagaggggttaaagatactgcaggggcaggagggccaggtagagggtactggcaagggcagggaggcttgcattctgccttgtgttcagattcctggagggaattgccccacgaactgtctggaaagcagccatggacaaactctgcagcacagcatgattaagcaggggagtgagggtagaggcaggagtgcaaaattgtaaagttttagctttttgagctattctcagtccctgtgtggtatggacaggacccagaagctcccacatgtgctcaagatggtcctctggaagcagctgagttgaatcatttcccaaagaaatgacatggcactcacccttcaagagcaaggtgacctgcagcccaggctgaggggccaatgaagactgtggcagagtctaaacttacaccataagcctgcagtgccagcaagagctggggtgaggtcaaatcagccagggagaactcctgtgccctagccaagtcaggaaagaccagtccacaccagtcaccagctccacctgcaaaagctagctggataagcagcaactaggatgataagaaatgttgtggagatcagaggtgccaagagacactgctccaatacaaacagcccttccccttcacttcaccgctgtgaggtcaccttgccagggctgagagtcacagtctgcattggaagggctactaattgctagctgttagcatccactccagtgggtctgtgtctgtgtcaaatcagttaattatgttgaatgtcactcctagat

SEQ ID NO: 42499 - DNA, 1014 bp, Homo sapiens
tggggagatgggttaaatatgcctctggtatagttaggctaaattgtaactgtgaaaggctgtgttctctgtgactttttatattctccaaacaagaaagaacagagagtgagagatataagggtgattttctattacaatcgtcaaaagtagagagcagatttatgggggcaaagggaaagaagcatcattatttagggtatttgaaatcttattacatttagccctatgtaaatttccagaacaaatgcataatgattgatgactatttgcttctctgtcatctatcatttttctaacctggtagaaatataagaaattgacctacctcttgcccccaaccaaccagaaaaatgaagaggcatcaataagaaagataattgctcaaaagataagttgtacttcaagcttttaaactatttctatagggagatttgctcctgttgagtgcctgataccaaagatgcattgcccatcaagggcatggctccctgactcacccagctggaagttcccctcttaccggctgcattgtgctggtgataccagattaactcagggattgattgaaaggcgtgtctttcagccacataccactgtcctgagtcattcttttttatctgataatgttttatggcagcctccgtacttctacaatcaagaaaatgtgaattactagaaatgtgaaagatcaatttggatctaagccaactcattaaacaacaggactccagttctaaaactcatcctagcaacactacactgagaagtagattggctaaattcaacaagtgcccccccatgccaagaaaattcctcaactacattattggggccttagattcaaacataacttcagccaaagttgtctgagtgacaagaccagtgttcagaaaagtagatctcataatgaatacatgtaagtacatattgaatatcaagtattggttaaatgaatgaacacatgcactgtaagcaattggagatgggagacaagaagggaggaaaaaccaa

SEQ ID NO: 42500 - DNA, 2006 bp, Homo sapiens
aataaataaataaataaaattgtacatttatttgtggacttagggttgtttaatgtctgtttttccccaagaactgtaagttccataactgtatatttcaggttgttatatctggtacatcgtaagtgtacaataaatacagatggaacaaataaggtgatttgaggactgaagtaacgaaggagtgttgaatgcctgtaaataccaggcatggtagcccaaactgtaaatgtttttcctgttagtttcatagttcatgaaataataataatcactagaatgtattgaacatgtattatgtaacagatagaatagatactattttctctgcttttcagatcattcagaagtttagagacattaggtaactctgcccagaaccaaagcactagtcagtgctgatgccaggatttggacccaggttgttcccatttctatacacatgctctagtacttcaacctagggcagtaactttcgtacagtcattagaacagtgcttggcacatagtgatcaataaatttcagtgatcaataatgatagctattttatctacatattaataaagctgtttttaaaaacagcaataaaatgaaaaatgagttttctcataattggagtcattttaaaaaggatgattttttaaaaaaacacatatataaatcaaggcccaaggaaatgaggtagcagttgtagccccagagtagtttaattcagatgatccaacatccacagtataaacaggctgttatagccagagcctaggccttgtctaaacagggtaatcaatgagcaaattaatgaataatgaaagggtggaaagtaacattcctaggtagtgagtgtccattcactaaccaccaggcactgtgttagctactttcacaaatgtctcctttaatcgcttgtaaaatccaaattatatgaaaaaaagtctcatttttctaatttttctgagcaagagattttcatataatatctgtaaatacatacaaaatctctgacctggctttgcaagaggcctgtttttgttggtcagcttcagctcaggatagcagtgagacctcatgaggacatgctcttgagtagatagctgtggaactgctttttttttttttctgtcctttttttatagagatagggtctcaccatgttgcccaggatggtcttgaactcctgagctcaagcaattctcccacctcagtctcccaaagtgctacggttacaggcatgaaccaccatgcctggcctcttttgttttcaatttttaaaaattgccatgctaatcttctctgtatcattccaattttagtatatgctctgccgaagtgagcactttggaactgttttctaaggaaggtgggttcagtcacctgagaactttgatttactggagattagaatctcgggaagggctaaatggctccaatagagacaggaggccaagtgaaggtgggaaaagagagaagagatcctatgatggagctgaggagagtgactggagagagaacagaaatagctactggagaaatctcatagagtaatgtagatgagtcatgtgtcctgaagtcatctccttctctcctccaataaagtctacattatccaccaaagcttttgaattcgaatttgttttaggagagatgtactgagttaggcctccaggtgggctttattagtagcaagaccaaccaaggaggttctctcattcaattgtatttgctgcctggttctcagagaagcacttgtcttaatgcctcaatgcatattacctactgccacctggtggaagcatatgctaattttaagataagtgcccaagtgggatgaaggtagggggagatgctcaaactgaaaatctaaatttataaaaaacatatgactagtctcaggccgttctctacctgtaatctatcagtcttctcatctgcaaaatgaggggctaaaaaagtgattgctaagatttcctccatcttccaaatctgtaattgtaacaaaaatagattt

SEQ ID NO: 42501 - DNA, 1634 bp, Homo sapiens
gcccaataaataatcattgcgagaagaaaaatcacactatgaaagccaaacagctccctggtgttcccttgcttggcatgactttccaagacagcaggcatctttatttacaggttgaagtgttgggccaaaattcattccaatgcaggtatcaaggagtattcatttcatgatcattttcaatttacagcagcacaggtgttcccagtaagtaaatagacagcgcccttccacaggcattctgtgattacagaagccattctttgaattgttttgccgattaacctgcagagggaaagctcttgagcttttagcaaattcccaacttaggcaggaactcatgcatatcaagggcctttgccagagtgacaaaaatgccccagagataggcaatgactatttgcctgctggaaggaaatgtggaaagaatatattcgggcttgaagattatcactgaaggagctgagcttcctctcccaggcttacatctgcgctgttcttttcatctacttctcattcctcagtaaatatctctaatgatgagcctcaggccagcaaatcagaaaaagggcatcgcatcagatgtaatctctgtgacctttagaaaccggcacatctgtcatgggataggcagttggccctcccatctttggtatttgtgttttttccttggaaggatttgcgcccctctgtcctctaggagaggctcctattgacattccttccacccccagaggttcctgggtggcaacagctgggctgattgggaacaggtttccaccagggggcactggaagaaagcaaaagtgagaagcaccccttctcagaatagctcctaaggtcatctctgaagaggacaaaggaacagatgtgaagaactgtggggcccgggctgcgcgggaagcaaagccgctgtcgcttcctcatgtctaatgttttgaagtttacatcgtcacctccagttcatcccctggcatttccgatgtcagggtttcgttttgaatcagtgccttgagtgaaatgcattcctactgaatttggtcatcataataactggcacatggctagtgatttatatttaaaaacatggcttgaaactggctcagttttgagagctgccttaacccaaagaccaggcttgttgcccaagccaggcgctccaggttgtggttttaagatgaggaatgtctgataccggctgcttttgcagttgatgggctgtggtgagtggggaaagccttaaaaacttgtggctttggaaaaatggctctgggtgaccagagctgattctgtaagtttgctgcaacatatcctttttgtttttttttccagaaatttacagaaaggccaaacttcctcattactctgccataaatgcccaccactacatccttttttttttttttttttttttgagatggagtctcactctgtctcccaggctggagtgtggtggcacgatctcagctcactgcaacctctgctcccgggttcacgccattctcctgcctcagcctcccgagtagctgggactacaggtgtctgccaccacgcccggctaatttctttttgtatttttagtagagacggggtttcactgtgttagtcaggatggtctcgatctcctgacctcg

SEQ ID NO: 42502 - DNA, 1167 bp, Homo sapiens
ctcttttttcaaatgacaaaaccaaagtggctgaggttaagtcatatgagtaggatatttaacccccaaatatcccttgactattcccctcctggaatctgcctttccagactccaagcagtctaacttccccacaaaactcatctcgtgtcagtaccgtgagcctgtgaaacttccttaaagtttgttagactagctaaccgcctccccccaccaaaaaaaacctaatccaaattcagagtttcgataactaaaactagcttgatatattacctagctaacttggggcatttgtatttctacgagaagtttctaggaatagcaccctgttttggcatctcaggctgaagaggtatttgtgggccagtatctccctgagcaaacctcagatcacacaatgttggcctcttggggagaaggatccagggagctgtgtttctctctgccttaattcttgtgctgagtcatcctaccacagcagaggctgttgggagggaagagctttgcaaacttcaagtgcagaaaccatttaaacaaggagggaatactctccctcagtaacactacccactggtagttacccaccctcctatttatatcttccatccactcattcatttattccatagacttaatagtgtggtgtaggagaaacagcacagacaaaaggtagacagatctgggtttgaagcccagggaagacatgccagctcctggggatctcccagctgccatcagaatgactcatctagaaaagcatgaaggagcaaccatcccatctaggcagctggtgtggattccccaccattctctccatccgtcctactttcttctcccagtgtcttttgaaaatgtctacttctacttttattgttttcactttgcatctgaacctaatgtaaaatttcactatgaaaatgtgaaactaggatctatactttcttagttatacttaagttataataagagagggtatttttcaccttttaaatcatgctgctttaaattgtataaagctcaagcttatcccttcttgattaatttttcagattgttttcaaacttttctcatatttattcatctcaacaattttagtagttcagggatggaatgcgttctgttctacttgtattatcattcttaaaagcaacccaaaacttgcagagt

SEQ ID NO: 42503 - DNA, 812 bp, Homo sapiens
tgagaaagcaacaccacagttaccacaactggcaccctatcgatatgtgtaccactggcaaacatccagagaaaaacatccacagcagacgacccccaacagagttccatgaacatggttcagagatgtcaaacacatgaacctacccgaggtatgcatttccaccagttaccagaactccaaaacataaccagactaccagcaccacagatcaatttaaagagtgaatcacctgtgattagtgacctaataacacaatgacacaattacactcattgcaaatgcattgatatctgggaaaaaacagaggcaagagcaaagactgaaacatgtaaagacacaatgggcaacaatgcaacctaccttatgtatataataataacagctgcttacatgcacttacctaccaggacctatcctagccactttatctatactgatccatttacccctcaaaaactcctatgagggaagtattattattctccccagtttaaaggtgagacacagagagattaagtaatttgtcctaggtcatgcaattaataagtaacagatttagaatttgaacccagataatctggcacaagagtccatcctcttagtctctcactccctaacttcacagaaattctgtaaactcagagatggacctagaccacagctaaagtttcctacaactaagaaggaacagaatacagctgataagctgattctagaacttcaagaaatatattatctcatccagtgaattttggtcttgtttcctgcagatattttcatcagaacacctatcattagaaagtgattgt

SEQ ID NO: 42504 - DNA, 748 bp, Homo sapiens
aaagaggttggtggcaaaaggagagaccaggagggtacctgcatgaatggcttgaaccctaaaggacaaaggggttttgcaggaaggcagaaaagtgatgccctagaagtggcaaagggaagctaggagtaggctacagcagagagagctacagggaaggcaatgctgttactctgtgaggaggctctggtgtgggagagttgattcacagtggaacaatgctctcaaagggccactggaaagatttgggaaggcagccagcagaagaatggaagttcaaaatcataggaggcttgagagtacatagaaagacagttgattagaaaggctggtggccaaaaaaactggggataagaggcaaggcctccgcctacactggctgagatcccagatggtgtcagagaccaaatgaggttagcattcaatagtctttgatcagcatccaaagagtaggttgacgagtaatttttccgatgtctatgaagaacagatttctctaatgttccactcatggcaaaatccttttcccacccagatccatttgtgggctatgccatagggcaggatggaggggcgggggctgttggtgaggaggtgttgggtgtggcacctcctttcactagggcagggcttactgacctaaaagggacacagcaagctgaacatggtgcagagtctacagggatgagaggcctgcaaggcaccaagtaggcacgaaggccaaaaaagtagtggatgaccaagggca

SEQ ID NO: 42505 - DNA, 2026 bp, Homo sapiens
tacacgtccacgggaaaaataaaataaaataaaatccacaagaaatttaggattaaagaaaattaggaaagtgtacactcccaggtcaaggccctagtttttccaagaagtacatacattggccgggcacctgttttcaatattcaaacacaacttcccggggcgaggtgggcggggtattgggggggtggggaagagaacgtgaacttcactgggtgagtcacgtgcaactgcggaacatcttggccgatactgccaaattttttttttaatactttaagttctaggatacatgtgcacaacgtgcaggtttgttacatatgtatacatgtgccatgttggtgtgctgcacccattaacttgtcatttacattaggtatatctatctcgacactgccaaatttcaatcaagatcgcgccgccgcccaacccgaaaggaggcatcagccctgctcgccgctgggacgtgaccccaacgctgaacttgccgcagggcggcctcaggcctggaacttcaagaaaaaggggcgggtgttccttaggagaggtcagtgcgggagttggagaagtggagaatctactgccggcaggaaggcgaggctgcgccactgcgcgcacctgtccctccttcccggaccgaagaggggacccagagacggcgcacccgcgctcactgcggcacggaggggagaaaatccttccccgttcctcgaggggcgtgtggaagccgcctcttgccgcgctcatccccctccccacccgtcctcgcccggagtatcgcactcccggggccgccccagcccgcccgcggcgcccttacctggctgaagcgcggctgctgggcggacctggggagactgcgaggtgcagtctgcgccgcggagtccggagcctagcgccccagagtccagagcaaagcgccccgccccgccctctgatctccccgtcccgcccccaatcaccccgccccgccccgattgctggccccgtggacgccctaccccgcctctgatcctgcaggcccgcccagtcctcgatcgccccgccccggtcgcttgggccctgggtggcaggtttgcgcagccctgcggcgatttcaaggcaagtgaccggaatgggtcggaagcgcgtcccggtgagtttcagggagcgtcccttaggtttccgggggcggcgttgaacctccctagccccagtcttcccatcccaggagacccgcccctagtggctcgaacgcccctagccaggagagccccgagtagtgccacttgtggaagactacgtgcctgtcggaattaggaaccgcacctccccttccgctaagcggtgggaggccaggcgggtgacgcggagcagtggagccatgcagcctgttttaccaaaagagtaagtggttttcctgtgaaacccgagggagcagtgcatatctgatacacttagagggtcacgtgcactattaatgtgttaacattaaactcactgaagagtagaaaacacatgtaagacttaactgtgtgccaggcactgttctaggtacttcacatgtactaaaagttctctgaagcgtatattatcagaatcccccttttcacatacggtgcaagtgaggcagagagaagctaaataacttgcctaatgtcacccaactagtaaattgagaagctgggttgagaagctgggcttcaaatccaggtcttcctcctctggagtctccactgttattcacggctatcctgaatcagcaaaatctgtgtgcatcctataccaggaactgttcccatgcctggggaagatgaggcaaggactctgccattaggaaacttttattctactgtaggagaaagacaataagtgattgtcgactaaaatttaaaaatcaagctgttaaagaatgaaagttagttttattcagaagtcttactgaggactagagatggaggcctacagccctggaggagtcttttagagagattcaagcagatccctccaacacagaacttcccttctcaatttagaaacagttggt

SEQ ID NO: 42506 - DNA, 1530 bp, Homo sapiens
attgaccatcattattataaaatttactatttagataagtgagttttagtacagtgctatttaaagtatggaactgttactggtgtgtgatcagtacagaaattgagactaagcatttagaaacctagagcaatttgacgtagcaatcttctgtctgttgaatctaataacaaaaaaaattttttcaattttgcatatctttttaaaatttaatttgtcaaggaattcatttttagcatattttacaaaaacatcattctcctatggagactatttggaaatacaaataagaaaactggttcttaccacagatagttttagaaacctgttttagtgtaaagccatcatttagtataaagtcatctattattactgttactctgaagtggttactgagcattacaacagtaggtaggattataagttgtttactaaatatgctagatttattaactcatgtatatatttattgagaaaccaaaatatttgaagtacttgatgaagttgatgtgctaaccattgcctgtctgcccatattccctcttggaaatattacaggattctgctcacttctgactccagcctcagcatgctgtaccatggtgggctaatattagttagtctaataatatgtgagtctaatattatgtcacccaagaatctggaattgggacactgagagactgagtgattaggtcatagtagtcacatgaactgaaatgtcaccagttgttacaacaccaaacccaacgccacatgtagactgatgttagagaacacagaacatgagtaagcaggggttctgagatagaataagggggaagggggcaaatggcaaacatgcaagaaacagagagagagcccatcaaaatataagttaggtcctgtcactcctcggctcaaatcctgccttgtcttatgtcatacggagtaaaagtcagtcttcacaactgactacaggctgtaaggaatctttcctccatctctctgacttcattttccaccacgctctttgacactcattccagtttagtcatccaaccttgtttttccctgaagccaggcacattattgcctcagggcctttgtacttgctcttctgcttggtatgctcatccgcagtttcctgcctggttggctccctcaccctccttcagagttttgttcaaacatcatcttctaggcgaggcctgccctgagcaccctatttaaaattgcaatcccggccgggcacagtggctcacgcctgtaatcccagcattttgggaggccaaggtgggtggattacttgaggtccggagttcgagaccagcctggccaatatggtgaaaccctgtctctacaaaaataacaaaaattagctgggcctggtggtgggcacctgtaatctcagctgcttgggaggctgaggcaggagaatcacttgaatcagggaggcgaggttgcagtgagccgagattgcgccacagcactccagcctgggtgacacagagagactctctctcaaaaaaataaaataaaattgtaatc

SEQ ID NO: 42507 - DNA, 2831 bp, Homo sapiens
ctacgaataaatagctacgtggttttaagtagaacttatagtctacttaactttcaacaaaccaagtattgagtgtccactgtgtcagtgtactagacatgggaagcaaaaatgaagtgtccttaaatcaagtaaacagacaaaaacaaacgaaaaataattcttagagaaaaaagcaatttaaaaaaaagtgcaaacacctattgagaactattgatcacgtagtgctagaatatgcagaataattagatctttgtggaattgttgggaagaggtttcctgaatgagagagtatgggatttaagaaaagaatcagatatggcaggcggagaatatggcactagaaaagctaaagggtagaagcaagtcagtcatggcatgagtccacactcaggtgtaacaggactggatcattgttattaaactaagggtggaggcggcaactgaagaaaagctgcaaacacaagccaaagccgttcacaattgacctctgaagaccaacgactgtgataatgtgatcaaaacaaagcatttaagttttgtttaggtttcctgccgcattctaaaggcagacttcacattcttacaattttcttcattcttcagtatctgtcagcgtgtttaactacttttaacatacaacttttaaaaaagtcaagacacactacgaggaactttttccgaaggaagtgatccaaagaacagagtgtgagtcaataaacggagaaagggagtagagaagcggtttactatcccccgcttccgccccagtgtgctgtaaactttaagtcgggaaaactatgttttaaccgatgagataatgcctttaaaagtgcttagcacactgtctggccagtaggaagcactcaagaaattatgattattttgaccttagacctctcttaactgtctgaaactggggtttcttattttcaggggaagaaacaggacacaggcagtctagaggctcctgccagccgagacaatctccaattaaaagtcggcatcgattaaatatttgctgaacaaagtaaactgtctctccaccgccgggctgagcgcccactcgagatccggcccggaacaagggcgagactggcccgcgggtcccacactccctgtaaggggtggagaacacgcccacacgcccagaccaacaggcgaggctgttcgaggaccttgttagccacctcagccccgcccgccgcgagccttctgctggcctcccgttctgcagggaccctccctagccagcccggccgcgtcccacatccgccgacacgccccttccggcctaatccccgcccctcaagcaccggccccgccccataggccccgtccgtggccccgccccgccgcgagctggcgccgggtcctctcagcgcccgccggcggccgcgtccacccccgacgctctgaggtcaccgactgggccggcccgcggggggcggagggacggagggaagatggcggcaggggccggatattggcgccgcctcccccaatcccggagccggcgcagatgaggcagttcggctggggccagcggcgctttggaacccgaggtggggggaccctggcggtggggcctggtcctgctatatgccggcgcctcggctagagtgagcggcggcgacgcctctttcctccgtctctttccctgtcgctgcgagagcgagcgggcggcggaggcggcggcggcggcggggccgggatggaggacgttaactccaacgtgaacgcggaccaggaggtgcggaagctgcaggagctggtgaagaagctggagaagcagaacgaacagctgaggagccgctcgggggccgtgcagggcgccggctcccttgggcccggcagcccggttcgggccggcgcgtccattccctcctccggcgcggcgtctcctcggggcttccccttgggcctcagcgccaagtcgggcggcgggcccgggtcgggcccgaggcggacgagtagcgaagagctgcgggacgccacctccttgctagcggcgggcgagggcggcttgctggacgaggtggagccgctgcggcccgacgagctggagcgcctgtcaggctgggaggaggaggaggagagctggtgagcgcgaggcgccgggcaggagctgggcggggacgggcccgggggcggagagcgtcctctgagggtccctctggtcgggcgcctcgctttgtgtagccgggtccgctctcctgtggcgacttgtggttttcttgctttggcagagggaacgtcagctggagttgggggttcgaggcgtgcgcaagtaacagggttgtagctcgttgtcctttggattgtggaccttctgagtgctggaccctattggggtctgtgggttggggcagcttgagaagggctgttcgcctggggaggagtcggaggtgggaaactgctttgtaggcagggatcctgctttgtgtaagatactggctttcggatggtggccctgggcattctggatgtaggagaggggtctgcttgatgaggtatcaccaggtgtgggggtcaggggcagaccagagtcgtctacgtctatgcagcggttggtgtttgggacccatttctggcggggatggggagaccgtatgaatcagcactcccctttgggtagtggggtaaaccttgctttgtgtgaagagagggcagaggatggtgctgcttttttttttttttttttttttttgttactctgtgtgaagagtcaagggtggaacgagccctggctcttattttctaaaacaagaattgagtctggcgttttgcagagctctgaattgacagttatcacatccatctttcatttc

SEQ ID NO: 42508 - DNA, 715 bp, Homo sapiens
cttacactgatcagatcatatcatatgcttgatcaaaatcacagatagttttatcactgctactaaataggcttagtggcctactaaataggtttagaaacctactaactaggtttcagacttctgagcgtagtgtctcaggccttccatgacctggctccagctggttttatctgttttgtccctgccctgtgctttatcacacttacctgagcatgctctgcatttccgagacactgcttttgttcatcttataaatactgagtaaagcacatactttccccatcctgtcaagttactactcatcctctcaagactgcttcaatgcctctccttccaaaaagccttacccagtttctctcagttgtaatgaattactcctaactcttcctttccattgccctttgcacctttatgatagtactcatttcattttgccttgcaatgtttgttgactctgcctgtggtacttggctgcaagcctcttaagagagagagcaccatatcctgtttcttgtatatattctataaagtgctcttgccagtgctcataaatattgaataagctgtggatattagaatatgaaggaaggggctgggcacggtgactcacgcctgtaatcctagcactttgggaggccaaggcaggcggatcatctgagctcaggatttcgaaaccagcctgggagacatggcaaaaccttgtctctactaa

SEQ ID NO: 42509 - DNA, 1393 bp, Homo sapiens
atatttttttttccccaagtggaatgaaagttggaagaagcacagtatttatttactttgctgactggcgctgaagctaaaagtaaaagaaacaaaagaactctactttaataaatcaactcaagaggtctaccataactaccctatttaatttgtaagctgcctctaaccctcaaccagttctcccaatctcctctaccataatccattttgtctatttctaacatactaacatatttataatttaattacatatcatgtatattatgtactgtttctctctctatcctactaatgtgaatataagaacagggattctcttttggtttttgttgttgttgttgttcatggtaaatcccaagtacctagaacaatgcctagcatagattaggtgcacagtatttgctgaatgaatgaatggattctaatcagatagtcaaatgcaataaaggaaataaaacaggtgtgaataaatgaaacaggaacgggattggggaactgaaaaacaacactactttggaaaatatgctcagtgaagacctcactgaagaagctacacttaaactcaggcctaaatgatttttaaaatgagggagcaagacaaagcaccaggaacagaaaacacaagactgaacgtgcatgcttaaaacacagaaagaccagtgtggctggagctcaagggaagaagcagaggtggaaggggatatgagataaggtcagaatcagtagtcagggagcaagtcacagaagatctttaagaactttgtaagaaaattagatttcattccaaatgcaattaaaattcagtggaaagcattaatatggagagggatagaatctggctttctctttataaaaatctctctggtacctctggagaatggattgaaagagggaaaatgtagacccagggaagccattacagaaatccaggtgagatcattgcaacttgggctaagaggatggcaacagcacaggaaaaaaagcaaagtatttgagacttgtcatatattagtggattaatcagtgaggtgacaggaaggaattaacaatgactcacagcatttttacttgaatcactcataggatagtggtgccatttactcagatggagatgacacggtgctggcaaatagtaagctgcatcaggcttggccccaaaagaagacacaccactgcatgctgtgcagcttcacctgctctgttcttctgactgcctgggcagcctacttggcttcctacatacaagttttccagtcatgtccatatcgatcccatatgttgctatgtcgatcccatatcctctaacttagcttatgttgccttttttggcttagaatattcagggagaatctgcaagtttgtgcttctttacctcaacctgaactccaga

SEQ ID NO: 42510 - DNA, 2353 bp, Homo sapiens
tgtgtcttttttcccctacccttccaaaagaaccccagccagtgaatcgaagtaatattttccgcagttcaaaggtaagggcaaactcagctctactaagaactcttgctcctcaccagcacacaccctaacccccacccccttttttttcttttcaaatcttggcctaggaaagattaatgctcccatatcattgcaaatccacaaaaatgcgattttaggtggcgaggaactaaactaggatggcaggaaagaccggcagcaataaatcatttcgccctagaaaccagcctctccagaacgcaggaaaccaggctgtgcccaaagaacctgccgcccggaagcaacaacttccatcaaacggcaaataaaagttgcaaagaagagctcagcgcccaggcaccctgcccggtgccgaggctgagagcagcaggcaatctacaggccgagtcagctcgcgggcggtggccgcggtgtccgcagggctggctccggctccggaagactccgggtcccggggtacgccaacggcccggggctgcgcgggcacagcgcccgcacccctccccaggaccgcgagcagtgggcggagagaccagagcaagggaaaaggcggacaatgcccggctgggctggcgcgctccgccggtccccgccagccctgcccgccggggcccgccagccgccgcgctaagtttgctcctcagccctcccttcccagccgaggcggcggagccgtggtcgccggtcttcctccacctctgccaccgccttccttcccgcggggcggctcccgcgagtcggtggcgaggcggcgcgcgaccagagcaggacgcgcgagaaggcggcgcgcgaggggtacccgggcgcgcgcgagaagagccaggcactggaggggaaggggacgtgcgggagagacgggcgcgcggcgctgccggcggaaccgccggagctcgggcgggctttcggttgaggctggggttgcgccgcggtttggtgtccgttacgagcgccggcccgggccgcgccgcgccgcttgccagccatcctggaccgccttccctcggcgcccaccaggaaggacagctggcgagggccgacgacctcgtctcccgcccaggctgggctgccggcggcgggcatcccggcgcctgccccggggctggaagagaaagtaaaatgaagcgcctttccccagtcaacacctacccgttcccagtcctagtacagctgcctcgctcctccagcgccgccggtccccgccctcgggcccctggctccgttctcttgacaatggcgcgtcccctttaaggaataatccgatcggaaccgatctgtggttaaacctccctccgactctgattttaaccggatttctctctcgctctctcccagagcccgacgggcgcccggctgtgctgcgaggtcttcccaccccttccctaccccgcccgccccctggccttcctgattggcgagaaacactacaacaggaacagcagtcctcgccctccactggcctggccagccgccgctcaaagttgctcctaccttctccccgccccttttcccgggttggtcttccctctaatcattctctgccctcgcctctaacgttgctttggagccctggcagtcaaggctcaccctcccgcctccggaaagcgaactttatttttattggtgaaaggacatcttcctgtacacttgattgggcaaggaaagagctagtctgcacgctccctaccattattactctctctttacgggcttgagaaacacagccgcaaagtcctctccgctttgccttctaggagcgactttacctttaaatgttgttaggggtcgaggacaaactcatatcctatattgaggaaagctggaaagggacaagagaaaaattcaaaattttctcccgatcagtaatgtatccagagctggcgcccggatcctgcggaaccttatccaatgatccagagaatggaatggttagaattgagttagaatacctgaaagtccagtgctaattcctcctgagatttactcaacaagtttcatccactgtccgccctactcataccattgattgcactggcattttgccacccggaagagctttaatcaagttatctgcaaacctggaggtttccttgcttgtctcgcaattgttcatttagaaaatcatttccattacaagttccgtttaagtcacgtcctctgtgacgttcccgcgtttccacgagacctgttacttttttgaaaaaattaagtagatggtacccttatgccatcctcaaagtgtaggacttcgttcccccttgctagaactgtaggaaaaacaccccaggtcact

SEQ ID NO: 42511 - DNA, 1676 bp, Homo sapiens
cttaaaaattactttctactacttagcctacaggctcaaagaatgaaattatctcataaaagagataatttataaagtcgctctcaaaagagggacaacagagggttccggaacgttcccgccagccgccacgagaagaccagagaggtgcatcacaacagcccaaagtcaagcctactcccaacccccttccccgccatccagggaaggggcggggcagggttcttggtccgccgctgtcgcctgcgcagtcgcagtgcggctcgtggccgcagctgcctgaaagggcaaagggacgagtatacgcatgcgtctattcctaggctgctggctctcagacccgcagtgaggtctgacgtcatttcctgccgtaagtatacagtgcctccgggtcgcggtcattttgagcccctgtctggatgacttcttgcggctgttctacccctccccctccccgcggtaccttgcacttttctccctccctgccccctctcgagtccaccctccgggccttctgcccctgatcgcttggttttccttgcagtcgcctgctgctgtcgtcgggaggtgggtgaggtgacgcaaacagccccgttgttgccctccgcgtatcccctcaccacctttgcggccatccacgactttcgcaccttccgccattttcctgcctgtgagggtggacagatcgcgctcgggtctcggcctcctgagtgccggtgactgcgggaggcgacggagtgcttctgggggtgtgagctggggaagttcgtggtcacggatgcgtgtggggttgctgctcagtctgtaacggcaggtgggagacggacactgggtggaggatggagtgcggtaatcagcggttgtaggccgcttaggctttaatccagcgttgttttgtgtaaagaacttaaaatggtattgtcttaagcgccgtgtcagccctgacagtcttcctggtgtttctaggaaggatgccgttatgggaaataagagggtttcattttttctcatacggttgtagggtaaaggtagtttattcagcaggctccatccatccatgaattcagctgaccttttttatttcttttctctaattaaggggttggcatgtagtaggccttcatggcttattgactgaatgaattatggaagggctcagttgctgtcctcattgtgtatgccatttcctgtttccatgcaaattgtttttaaaatgagaataatcatgatcccacgtaaacgttctgtaaaatacggttacttgatctgttggtctgagtcccaatatatgagtttttaaaaaaagaaccaaataaaaaatgtatattcttggaattttatgcatttttttcttatattcttggggtggaaggaaatttggagatacagaatttgctgttagttttacctcacagggagaaggatatgtcgtctttgttattccataattttggagtgctcctttgtgggagaggttgaatgtttctgatgattatttcattttttaatatggaagctcagaaatgacttgaaattttttttctcttctattttggggaattatcctaatcattgggcatagattcgagaaacgaccaaaacataggatgtgaaagaacccacttccaggaggaaaaaatatgtctgttattttattgatatcttgatagtaaaaa

SEQ ID NO: 42512 - DNA, 3078 bp, Homo sapiens
ccagttgtttatcctctgcttactccttgacccagtgtctaaggaaggtagaagagaatcactatgccatgactaaatgtttgcatcaagcttaaaagcatcctgaggatccactggagttatttggaaaatgtgtttttccttttgtcattagtccatctgcaaactcaacttccagtgctcctcttccaccagcacacatacatgcactcactaatggggacagatcagatttagaatagagtggaaataccacactgtgcactgagtgtcgattatgtgccaggccaggggatatgaagaaggataagacaagatcaccgctgtgaaggaattcacagtccaaaaggggagatagacaagtcaacagttacacaacatgaaaagtatgcatgggatgctaaggaagaaaagaaagcagggtccattccatctagtcatgtcacaaaggaactaggactcctaagctttcaggaggatctgtggagggtagatggactctggggcaggaggaccaggttggaaggtggtacactagtccagacaaggagttacagggacgtgaacaaagaccctggtgggaatttagcatctttgatagagatgctaaatttgggtttggaaatgttggatttgggtgcctgtgggggcaaacagtggaattagccactgttaatatttgacgatttgggtctagagttccagaacaggggtaggctagagagatgaagttgggagctgccatcatagagatgagagttaaagcagggaactttaataaatgtgtctaaaaacagtactggagaatatgaacactgagcccaagggaatatcgaaaagagaagaaagattaaaaaaaaaaaagcaggccaaggaaatgactgagaaggaatagctgatacagaggggagggaatttctgaaggagggagtgaatcatcaacaccatcacatggcttagaaaagtggaccctggatttggcaatgatggacataatccaggtggactttgagcctcctcctgcccccagtggccactgcattctgcagccctgaactctacctctacctctgcttttcttctgcaaaatgaacctcttatatacaattctgtttcctacatcagttactaaactttgaggcatttgagccaaggggacccgtactcgcaccaagtttcatcacaggtgtctaatgtgattacaggggcagcacggtgccctgcacgggaaagtactggggtcagagagaccagagttcaaatcgtgactctttacccctgcgatccctttggtgcaaatgacttaatccgtctctgcctcagctttctccactgttaattgggcataatggacacaacaatggtgaggggctcttgcaggaatgaagactaggatgaggatgaggatgagggatacgtccataaagcccctgcacaccttccatttcctgagcactcccaggaagtctttgctgaccacgccaaattagattatctttgcttagccattaggccgctgccctatattgggaggcaaatatacctctcagcttcggtggccaggtcccctggcacccacttagtcctcagtctgcacctaaaagcaagccttccgagggtcttgccttgcaggtgtagctcccaccccccacgctggggtggtccggggaccctctgtttcctcagtggtggggaagggacccgtgggttcgtgggtgctgaccgacgaatgtgcggaggagggcgcgccccagcatggggggcgggggtgcttcttaggatggcttggaggggggcgcctgcagggctggacggcggacgggggacactgcactttctgatgcggtcggggaagccgggagtcagcctactggagtccgctgccatccctggccagaagcagccagcgccaccccaagctccccagcccctcgcccgtgccggggccgccggggtccgagttaggggagagtggggggcggccaccgctgcaccgcgcggccttcgaaggactgccctgcggcgccgcgttcccccgaggccaccccctcccgccgtcaacactccccggggcgggggctcacctgtgtggtctgggtcgcctccgaggccgagtccctcgttgccaagcccagcaggcctcgctcccccgtgactgcaccgccggcccgctccagcttcccgagtaccccacctgtctccccggcttccttccggccctttgtgttttcttctcttgctccgccccctcgcctgcccgctaagcacttaagctggtgaagtcaccctactgccacctggcagtcactttcgctgttggtggcaacccaggctggaacccagctcttgccggaacccctgccccatccttgaggcttgtcccgacaccgagtaggttctagttcctttgtgccttccaaatgactcccttcctccagcaatcacagccgcaacagccatgtattgcgcccccgccctaggccaggcgtgggcatcacctttgcactcctttctgcagccgtgtgtggtgcccactgtgacctgcacttcacagacgggtcatctgagttgtgcaggccactaagggagcctggagtcaaccccaggcctgcttggctcccaggccttctctttccattgctctttgtcggtcccctgctgcctcctgtccctccccaactctgacttgtggagggaagcctttgacatgtgggggtacctttaataccgatatcacttgttaccggagaggggtcccgatccagaccccaagcgagggttcttggacttctcgcaagaaagaattcggggtgagtccgtagagtgagagcaagtttattaaggaagtatagaaaacaggccgggtgcggtggctcacgcccataatcccaacactttgggaggcaaaggcaggcagatcacttgagctcaggagttcagaccagcctggccaacatggtgaaacactctctctactaaaaatacgaaaagttagccaggcatggtgctctatgcctgtaatcccagctactcgggaggctgaggcaggagaatcgcttgaactccggaggcagaggt

SEQ ID NO: 42513 - DNA, 504 bp, Homo sapiens
ttgattatcactggctaatgctatgaaaaatgtggttgatttagaaagtgccaaaccgtccatggcaggtttcagcttaaactctttccacagccctacactgaccttagccaagatctgaattcattagcagggccctgagtgattcagctcctgcctgcctctccaatgcagctatctgaggccctcccagggccctctggagtgactcatgttctctcctttcatgcttttatgtgcactggagagccagcctgaatcagccttcctctgcttctccacctctctcttactcattcttgaagactgggctctgaggtcacctcctcgtggatgccttgcagactcaagtttagtttctcaccttctgtgctcccatcgcactctgcaggggatacctgttatgcatatgtgtcagctgcgcttctggtctcccatgaccttattatttttttttctttttagagatgggagtcttgctatgttgctcaggctggagtgcag

SEQ ID NO: 42514 - DNA, 756 bp, Homo sapiens
tgtttatttctctttgaatgtgtctttgaaaagcatatattactggtttgcatattgtttaagtgatattgtattttatattgttctgtttcttgcgtttttcactatgtaccatattttaaaatcaatttctactgctctaagtatgtccaactaattgcttctacccacagcaaaatactctgtggtgtacctgcaccacattttacccattcactctcccagtgatgccatctccttgccaccaccatgctgcaatgatccaccatgtacatttccctcttcagcctgcctgggaatgtttccaggatatgtgctcatcagtggaatttctgagtcagagggcacctgcatacttaatttggttatgtaatgctagaagtctctccaaaataaatgctgttttcatatttttcttttctgtgctggtcattttggggtttgctgtaatttattttagctttgtaaaataaattgggtaattcttttttaaatcctggaacattttatattgcattggaattaattattctttgcaagtgtgagactataggcagtatgactacttgatgccaaaacccatatgtagaggcaattcttgaaaatattttcagtttcttccttggctattggtttgaataaatttttattgttctcaatctgatgttggcatcaggcaggaataactaggtccatgagacacagacacaaagatatgtatttttttggttttgtttatgattttgtgacttgctg

SEQ ID NO: 42515 - DNA, 2724 bp, Homo sapiens
tgctggaaattaagacgcggcaattcttaatccagtttcctgcggtaggaagcagctgacaagagaagtcccagtccgagttcggcgcgaactggacaagtgtcgtgggacaagtggcgggagacccggccgcgtcgcgccgggcgctagggacggacgcatttccctacttccagcagctggtacgagccgcccccaactgcgctgcgctgctctattctttgggaaacacttcgcgtgctttgtttcagacgccgacccatctttcttggtgggtctccagctccaccaatcccgcccgccactgggcggggtttcagggtcaaggtggaccaatttcccagcttcgcccctacacgcgctctcggacccctgggggtgactgacagcagccgggcccaacccgctgctccggagcatggcctccgccaggggcgttacggagacaaggccccaggaccaatcgtattggccagtggggggcggggcctcgttgccagctccagaccggcgctatgggcactccttttgtcaaatgagagacgcagcagggcggcccctgagccgcggtttagccaatggagaaggcgagatgggcgggctgggagtgcccggcggcgggtcctcagcttcgagccgaggtgcagtgagctggtggggggaccgcgaggcgagcgcgggagcctgggcggcgagccgggtgtgagctgcctgaaaatgcactcggatgccgccgctgtcagtgagtagcagagagccagccagcgggccggggccgggcggctgccaaactcgccactcggctcccgcagtccccgccccacgcctcgggtcccgaaacgcgccgggagcccctgcctgggaaccaccccttcccctcccggggccggggcgggcggtgacgctgcgggcggcgtggggcgggggcgggcgtggggggaagggaccggcctgcggggagggcggaggtgaggggggtggggactggctctctttcagtgttgggggaagggagggctggacgtgcgatgaagggccgagatcggagtgtccggggtgcatggaggtggaggcagcgttgggctgtagcgggcagggccggggatgtgggggggtggcaccggcggggagagggagggagcgagcgagcgagcggggcacaagggtgaggatttccaaagggctgagtggtgcgggcggctccgtgagaaaggcgggtgagtgcgaggggggcgcgggggcggggacaatgggaagaagggctggttggcgggggggtggggggggggcggcgaacaatggggtgggggaatgggggcagcggccgagcggggcaggagggcgggcgactggacgagggctgatgtaacgggaaagcgaggtggtgggagggactggggtgtaatggtagttggggagtcctgcggggcgggaggggcgttggaagggcggtgggtaacggagagtggtgggagtggaagatgttggggtaaagagatggggcaggtgtggaagggtagggcgattgggaggaagaggagaaaaaggtgggtaggatttggggtggcagagtgggggcaggggtggagaatatgaaatgggggtgaggagctagtcggggaggaaggggaggtggggcggagttgggcaggaggactgtcacgtccagattcggtccggagccgggctaagggggtgtcagactgtgcttaggggaggtacttcctctccctgtcgaggcagggtcccttgaaggggggagtccaagcttcggggtgcggagagaggagggggcggggctgaggtggaggagacggggtaagtgccctaaggttggaactggccgtggttccccccggacggcgggaagcgaggtcagcgctggcgcgggctccggcagcgggactaggaggcggggcaggggtgcgggctgcggggtttcagcagcgggagccggaggggtcgggccctgatggccgggtcgggggcttggcgccggggaggtgtcggggtccctggcagtccgtgggtttgatagtctgtgacgcagttgtctaatttctggctatcaggtgtgggggttggtgccatggaacccgcttccttagagggatggccgggccctaggccgcgccccacgcccggggggcgcgacttctcccaggcgtgctgggagggcgcttgaggggtttcctttagggtttgtctccagtcaacgggtatgaaggggaaaggcggtcccgccgaattctgggacttgtagtcgcggccgcgcccggccgcggttgggttgggtgcacgtgggtaactgtggaaacgggtcccggcatgcagcgcgcccttggagccttcctgctcggccaactcgtgctttattccccggccagctcctgcgcgctctcgggaggcggttgagttcccagggacggagcgactccccagcccttctcccttgggagagggagagcccacgccaggcgcagccctcttcacgcttaggttcttggtccccaagtgaatttccccctgcattttgtggccttacttgtggaataaatgcttggtcttgtaccatcatgcgcacgggttgtgggaaaacatttaagaagcaacacaatgtaaagcagcctttagaatggtgtatttaattttggcatccagtgtgtgtaagcactgggttccagcattcccttgcataaatatgagaacacagtggaggtacac

SEQ ID NO: 42516 - DNA, 1719 bp, Homo sapiens
attaagccacagatcacttcttaattattaattaaacaggaaacgggatagttgtacatttaagtccaatagctagtgaattagtagttttaaacaccatcaccttgtgatctcttctgccctgtctttttgtagttctaggttcagtctgtctcagtgtcttctacgttctaaataataatagggatgaaaacaattaacgttgattggcacataatatggaccagcactgtgctaagtgcttgacatgcaccatctcatttaataatccccacagtagcttcgcaaagaggttctgttatttcggctttatggatgaggacacgggcacagtgaagtttggaagcatgtacagggtcactcagttgggactcagttggagctctgactccaacccagggctttatgttatcagagctgattgacattctttaaccaaaatctgggctcatttaacattagtgagatggaaagatttttactgtgaactacccagtgattctgtgtgcttcagtgggtagtacagatcatttgtgctcaccttcagtgggtaggtggggtgaggagaatgaagctagggccctttgtaccatgtcacattgggagtgcagccagacgggtgtcctgaagtgactgagtcccttgggatagcaccagcaggcacaggcagtgtggtgggcgatggatggatgctgcctcccttgggcggatggtttcttctcccagccccttttttgagtcctgcaagaggaagaaaaagccagcagcaatatgcttggatagctttaactttggatctgtgttcagtgaaaatgctgagtcactttgaatgacctgttcccttatcaattttctcctttggcttttgtgccttgtaaatagcaaatatttattgatgaggagaatgaagttagttaacaccttcctcacctgctactttcaattcttttggtttttaccctgcttttcagctctgcaatctttttcctggaccttggccttttcatcgtgtgctgatagggtatggtgaatgagttagattcctgtctagcagtgctgaggttgttccaggagtggattggctactggcacgccagggattgagttgagagtcagggatagaatctacttctctggttgcatgttagaatcacctgggctgcttgagaaacacgtggtgccccacacccatttttatttaattgatctggattggggccctggtatttggtgtttttcagtcttcttaggtgattccactgtgtagccaatggtttcatttaaatattaatagcttaattaggaagctgggtttattttgggctgtggagatggggctcaaaagatgcagcagctcccccatgggcactgcactgggcagatcgtgcagacccttcctgctcgcctatgacataatagccaattcttggtagtgcttcccctgtgccacgcactgtttgaagcacagtgcagcattaactcatttaatccacacgatatccttatgaggcaggcactgtgattatccatttcgtagaaaaagaaattcctacttgtagccatgaaggacatgtagtatgaaactgacccataaacctaggttttggtttttcctagatttacagtatagaaaacatttcagatctttgtgttttagtaatttagcctcaaatgtgaatatatttgtttttacaaatgaaactgagacctgtgccatgt

SEQ ID NO: 42517 - DNA, 1454 bp, Homo sapiens
ttataagaaggaaattttaaagaaaaagtacacttaatcccatcaccatagcatagctattctgattttttggtaccttcctttataagcaaatacagattttttcataatataagccaagaaaatagcaaggtgtgacttttcttcttgtttgcctttctctgactttagaagggtgacattttggacataaagattaagctacattatttaggttccttgaaatccctgctaagtccttcgttttaactgaacccttcaagaaatttgtgtggaggtgactattcctatttttagccacccccttctttttcccccttttgctatagcttgtccatagggaaaataactggcattgggaataactgaaagccccattggcatgtgttttcattttgtgtatctcaaccacataaactgaaactgtaggtcagtattagtcaagaaaaatgaatcgtgagaagaaccagtgtgactaacaggttgtgctgtaggatgagtctgtgggaacaggctgtgatgccacagaccccctagataccagcacgaagagggcttgtaaatgaaattgagccatgttcattttccgtagaagagagcaggctggtttgggctgaggataaatgctgactccctgccttttaatctggagtagagtggagtggaggggcagcgggggcctggtgtgtgattatttcacatggatggaccttcagctcttcccagaattctcagttccactttgtaccttgccctctgctttccgtggctcctgaggcctgagcccagctcttccaagtttctgtctggccagttaaccccagtcatcctctgcacattctaggatgcagcttctcactttctaaaatctccaccagctcaatttctgatctccagaaatataatgaataaacccttcttcgctgggggcttttcctcctgttctctggttgtaggtgtactccctttcacactttggtactttagctctctgtgactttagaaaggatcggctgggaggttcaggggaagtgtttatttagaccttgatctgaacctggaatcccattttgtttcattagaatgaagacaaccaggctgggcatggtgactcacgcctgtaatcctaacactgggaggtcaaggcgggtggatcatgagatcaggagatcgagactatcctggctaacacggtgaaatcccatctctaataaaaatacaaaaaattagccaggcgtggtggcatgcgcctgaggtgccagctactcgggaagctgaggcaggaaaatcacttgaacccgggaggcagaggttgcagtgagccaagattgcgccactgcactccagcctgggcaacagagtgagactccgtctcaaaaaaaaaagaatgaagatgaccagtttacataatttatctaataacttccactttttgaaatatatctaagaataag

SEQ ID NO: 42518 - DNA, 635 bp, Homo sapiens
ttcctgggtaataggggaaagctacctctgattttataaacttcgatgattactgtgttgatttctgtccttacaaatctgttagagcagcaaactcaaaaagaaattatcttacattgtgtgcatttttttgtgttgggaaatggtgttccttagaagcgtggcactgtcactgtgacttctacacatttttttatacatggtacacagaaacatgtgggaagacttgagttgaagatgtgactgctttctgaggtcacattggtggcttacatgtcccaagccaggctctagagtcctctgaagatgtgtacgttgagtggccactagatggcaacctgtggttctggacagggtgactcagcagcctgtttcactattgggggccagtccaggggctttgtgtgttcaagacaccctttaaagcagattaaactctgtattggcaacattagctcccaaccccaggtttttaatgggtaccagagttagtaatattacttgtgttttttatgtttaaagcacaagaactgttcatttcctgcatttcagacaggatctctgagcatctttcaaacatagggacatctttttgccaggatgttgggcttgctcccaggcatgctgcagaactt

SEQ ID NO: 42519 - DNA, 1321 bp, Homo sapiens
gggaatttttagtgtttccagtcatggtcatttgcacatagccacaagtccactcacaggaaatgttggttatcagtgagatgccactattcagattgtgagtgcatccataatatctttctcttatttgctaggccgaagatggtgttagtgattgcgagctgctggctggcacccttgcagagcaggagtaagtgagtgctgttcagctttccagtcctgtgagtctgatgcctttcctccgtgttttggcatcactgccaaacatatgcattgaaatccttcatgatcatcagtttgtcagatgattatattgttgcaaagagtctgtccaggtcttttgtatcttttttttcttttttgtcaccttagtgtatgtccattgtgacggggacataggtattgatgatggtggaagaaggcacaatatatatcacagcaagactagagatttggggtttagtgaatgattacaaactctgcaaagggaaaactcttccagagcgccagtgttgtcagcccagtgctgcataagctgttgttcaacaaatggactttggccgagtcctgtggtgccgcgtgtgtttctcaacagtttactcgtttatcttgtggattgcttcatagtatggtgtgctgttgccgtctgccacacctgtgttacagggtaagaggaagttttccatttgcttgcacagtgtcatcacagaagtgtaagcccttgaaacacaacaaaccaatgcagtttgtctggcaaaaggcaggcagtctctagatcacctcttctcctgtcctcttctccattgggagtgcgtactgcagccctgagcaggacaatacatatggccaagggacaggcagagaaccctgtggaaaggaggtcccacctgtttgcatagaactgtggaactgggatacacctgccctcatcagacttaagttatgtgacctctgaaagaagggtgatgtggagccatctgacctggtctattcatggacagtcgttacacttcacaactgagaccaaaaggccagatctattgcacatcttccttaggcaacaagtttccttgtcttcatctaccttgattgttgttgttaagtgaggcccttacatttgctgtattaagtcccaattcagggtcatggctagaaatggtttgtatactaaagagtacctcactgttaagcgtccttgcagtgatgatttattttatcaggaggtatatatggctgcatatgtggcttagggtggtggtcacagcatcatcccttaatttgaacatttagattccactgcactgggctagccaggcacttt

SEQ ID NO: 42520 - DNA, 2098 bp, Homo sapiens
aggtgcctatggaaaattcagttaagttcagggctggagacgtaatgcgtaaatttgaagtggagactgagtaacggatcagactgccccacttatgtgtaaagcaaaaatagaaccagatggaaaaacaatcatctgaaacagaagctgataacttaggcgggaaatgaggaaagccaaggcacaatttaaataccaactccaagaagttttgtctcctttcagtttcactcattcctctatgttttattttactgttacaaatctgcagcctgcctattgtctttagctgattttttctgcatgtatttggctgtatgactttaagctccttgaagagagattttacgtcttttatcttcagaatgagccctccagtgacatatatctaataggtctctaaaaagttaattatctaagaaaatcgttccaaaggtcaaaacttgactcatttttttcaacaatgttttagaatgagactttttaaagagaaactactataattgttcaaaggaaaagtaagttaggtaagggggaaagttactgaaaattatctgtattacaataaatcaccctagcgattacgtgtatgtatatattaacacacacacatatgcatgtacatgtatgcatacgtataactagattttggggggatgaggagccttttaaaccattctaagttacaagtttacaatgcaggtcaggaaatcttggataaatcatttttaaaagtgaacaggagatagttttagactggtgactaaatcttcaaaaaccaaagcgtgaggggaaatctgggatgtctgcatattggagatggcagaaacaaaaaacaaagatggcaagctgacaccggggcaacagctgacccgtttcttgtaagaggagccttctcgctggggctgcggttatttttatccaaatctctgctggcggctgaacggggtacgtccctggcacgtcccagcgcaggcttccaggctggctcgaccgcctcccaggctctccggaaggagacccctcctcaccccctccgaggatcagccaggccgggccgagcccgaggccgcccctggctcctggtccctagcttgtgccagcatcctcggcggggcacagctcctcccgccccgccccgccccgatcggccccgccgaacccagaccctgcggcccgcgccccccgcacccccggccagggctcccgcgggcccagccggcaggacgcggcctcccccgctcctccagcccgcggccgcggcggtactcacagacctgttctgcagccgccgccgccgctgccgccatcttcccgcgcccgccgccgccgagctccccgcccgactgtgcccgcccctccgcgaccgcaccctgcgcgcctgcgcttgcgccctggcggggactgggggcacccgctgctcacaccctcccctccccagcccgcatccctgacgacccgcatcccagccctgcgggctcaggctctgcggcggcccctgcacctaggaccttggcctggggcgcgttgtattgcacaggggccagaaggggcctatggggattccgctccaccccgggccgcctgcagattcctcagaaagggcaccctcaaaaatcgaggacgcttctccccttcccctttgttccccatcgctgaaagatcggtgccatccggagctgtgaggctctctttgtttctcggaccaaggtctccttggctagggtgggaggggccgatatcgagaccacaagtggacgcggaccggcgtggtgactgcgtgggcagaagtgaacgagtggtcacttaggtggctggagtcttgaagactgagagtcctcaaggaggacgttgaatccttcgggctgcttgacttcggaggcctatgaagtctgatgtttttatcctgcgatactggggatggatttttcatttagtgttggagatagtgttaccatgtatatcctcgggaacctaattgaacggacatttactgaacaccgggaagccactcaaatgtacgagttacttgagtagacattcattgttccctgttgtagatataatccaataattattttagctgaaaaaaaatgca

SEQ ID NO: 42521 - DNA, 1687 bp, Homo sapiens
ccaaagaggtgatctcctgagagcctagccccaaacttctatagagacttaacttctgcttttctggacacgcgtgggcacccagaaccccgaatggggaggaatgctgtagacgccctgctgccctccagcccgcgcggctgcgcgtctcagtccacccctggggcgcgcggctgtcacccagggcggggcggcgcgggcgttgccacgacgcgggccgcgcgcgtccctggcagccaacccgtccacgtcaaggtttgtttaataatcgccagggtatctatggccgggctcaggcggctgctggggagccaggagaccgcgcgggacggcggatgaggcgcggcggctgcggcccagggcacctcccctctggcttcccgaacccggccaggtccgacccgagggggaggatggaaacacctgccgcgctctgagccccccagaagagaacacccttcccgccatatcaccccacggtcctgcggaggccaccgcctggtccccccaagtctccatcgcgcagcgtggggccgagaggaatagtgagcgatggcggaaaacctgaaaagactggtctcaaacgaaactttacgaacgttgcaggaaaagctagacttctggctgaaggagtacaacgtgagtctgggtgaaaaacccccggggttcgccctcccataggttccagcacagcccttgtcggggatttcttagggctggagttggtggccactttgcaaagcctccgcggttgcgattcctaaccaggatctcagctttcgaccgggatcgctggggaaggaaggacatgtgtgtacatgcccttgtctcagagcttcgggaggcggcgcgcaggcggcctgcggagcgcagcactaggctgcggagactggagagtgcttccaatcagtggtaactaaggacgccggcgacctagcaatagggaagccctgctgtccgcggctggtctggtcatgcctgccactctttcccatcccccttgccagcgcaatccacaccgcctgcttccccaatcccgaattattttttactacaaccctctcctgcccagggtttgtatcagaatggatttgtataaacacacacccaggagttatttacccagaaatcagcgaaacggacacttgttaacgttgcgggtttcacttgcgtgctggtgggcctggaaattgaggcacagttccaacaccagggcggattcaggcctttttccaggcatttgtgagaagccagtattctgtcaccaaacccatgagcacttttcaaatctcattaatccctactcgcaccctgcctccccataattccccccttcccccaaatagaacggtgagtgttgaatttgctttacattcggtcggtccgtcttaaatagggatttcccctcttacataataagtggagcggccaggcaaaagaactgtggaccggaaattagcccccccttgtttctacatttggctctgcatagaactagctgaatgacggagtcaaattatttaacttctcttggtcttagtacctcatctgtgaaatagcagagattggtctagatgatatgtaaatttcctgttcagattttaagtttttgagcctagattagcttgtttctgagatcctgcctgttatgaggtccttaggcttccccattcaccctttaaccagt

SEQ ID NO: 42522 - DNA, 2162 bp, Homo sapiens
atcatgggctcggactgcatcagaacccagtgatgtccctggctgtatccatgcccgccagcctcccctaggtctacagcggatcaggcaggataaccctggagacctcctccaagcccacagcccgccccacccttagggcctgcaaatattaccgccacagagccttgtccctttttcacagatggggaaactgaggcatgcggagcaaattacggtgctttttcaaaccaggttgaagttcacttctccagccacaattttgcactttttttacagctttattacatttccgatttctccagatacacaattgctattgcaaagtgaattttaaacacctcggaaggactgaactcaaaatgagatgagggcagtctggacgtccaataaggctgtcttgaccgcaagaagaggatgggtgccccccacctccagcttatcccccaccccctccccggggacgttcaggttcggtcgcttcccttccctcaagccgcttccaccgcaacccgagggcggggggcgcagcagcgcggccccgggatcgccgggcgggttccgaggtcccggggctgagacgggcgccgggggctcggggaccctccccggccgctgaggtggctgcggccgcgcgcccagctcgggggccgggaacttctggcggcgcggaccccgccgcccccgccgccccagccaccgggcgtgtgtgcagctcgggcttccctttctttgcctcgccgcgagtcgggcgcgaccccgaggcggctcggccactcaccatattacagatggaggcgatgtttcggacagtcattagtctaaaggttgcagcgatccctcaccgccatctttacaaggggaaaccgggactgcccatggtggcgcgctggcggggaggccgggcggcagcgcggcggcctggggtccggctttcagtttggctgggagagggaggccgggaggaggaggcggcggcgcggggagggcggggagggagcgcggaggggcggggagtggcggagcgagggagcctgggccgcggccggcggcgcggggaggaggggcggcccgggcgcgccgcgtgagtccgagccggccgctcagagcgctccaggctgggttcccgggccccgccgcgccgcctccttcccagctcgcccgcccaggcctggcctcctgcttttccatttgattccctgcctctttctattcggactggaatgccgggccaggctccggggcgcgccgctgcggcagccgcacctcgcaggtcccccggccgaccccgacgcggaagcggcggccctcctcgccgtcggggagccagggagccggggacggtacggtgcgcggggtggggaagcgggcggcccaggccggggcgaacccggggccgccttccgtcctcgctttttcctcgtcgccttcctcctggcgggcctcggcagcccccggtgtttattttttggcgaggggtaggggtggcgacgtccaacttttagttcctcccgagggttccaaccagatggcaccggcggggacccaagaagtaaaatggggcgaggacaccggagcggtcagagagccctcgccagctgcgggccgggcgcccgagaaagggcgccgggaagggggaggaatccgggtctgggcggaggccagcagcggcgcgctcgggcggcttgtgacattagcgggtccaaaggagacgtcccggttccgcgcaagcactagggactgtccaaggagtggaaagaacgaaaacaaaacttttccatatcttcaaggcaggcatacccctctcgggtgcacccagcctctagttgttgagatgggcgctgtatgggatcatgcacatttcccgcattaaaggtcgtggctgcgggctcagagcgcgagtctgtgcaccacttagcagataggtccacgcgaattgaaggggcccgtttctgaatgtgtggaacagttacacatacaaggttgcaattcgatgctttcaaaggagaaattgtacaagtgagatgcgtgataaattcttagatcagtgtatttaatgacaaattgaatcagaagaaaaattagttgaagatagcttttatctaaccaagagtaaagatttgagagccgttgattgctaatatccctagaatctggggagg

SEQ ID NO: 42523 - DNA, 1841 bp, Homo sapiens
ttacggtttaggcggacacagatgatgaacacacaccggattagtgtggctttaagaaagggaatcccagggccttaggccaaccctggagtaacctcgatgccctctccagaagggcacccgaggaagggtctagggcccaagagcaccaaaatcaccaacgccggggattggtaggtagcctgaaaaatctaattcagagaaggatgctccgcgcgcagacatggcttatccccgtgctactgcatgagccacacctaggccggccccggacaccgacagccaatggccgggcccgtcccgccccatccgggattggctgtgcgtgccgcggccctccaccccgccccgctcaggatcttcccgggattggctgagctacccgacctctccaggggatcggctgcgcgccccgcccttgcccagagtcttcccgggattggctgcgggcctcgcgaccctcctgcttccctccccgccccgcgccgcctctctggtttgtgcgcccgtcgcaggtcgcaggcctctttgtcagctggagttgcgcggtgagtgcatctccagtcttcggctttcggtctcccgcggggagggcgcccggccggcccgtgggtccgatcaggggctgggctcgcccggtgtccccacgagctttgcccgcctcgagctcctctgctcccggcggccagaacggaggggtagagcagccctcggcggcccggggggcgggcggcggtgcccgtcccggggctgcgcgaggcacaggcgccgcgcccagcggaacagccggaggttcccggcgcaggtctgggcaccgtaacaattttgcgctttgcttccccagggctgacgcgccactatgtagcgggtttcgggcgggccacgcgtgcgggacaggaacccaaccccagccgaccttgagctccaggagttcgtctcttacgtctgcggaagtgcagctgcctcagttcttagcgcaggtatgttcctagccttgagcggggtgggggaaggaatgagtcagcctggagcacgtggccagtgggaccggagggttccccggcgtctgtttgtcgccaaggtccgaatccggctccccttaactggaaggaaacatccatgtaggggctcaccaaacaaaacagctgtgtttctagtgtggtttcagacttagagaagcagagatccacgaggtattgagagcaacgcggaaaatagtagtgaaccctgtaaaaatcaaagaaaaaaaatcacaaagcaccctttcctgtgcccttttaaggttgacccagtgctttaagaggctaacacagaagggtaaagtaagtctccataaaacccagagaagagactggaaagctcctctttggatcctgtctggagtcacaactgaaccagaaaaagtttcgttacaacttgagcgcctttgtgattttctttacagtttatagaacaagcaatacatttcagttttctttggttaaaacgtcattttaaaacttttctttctataggttgacaactacaggcacaagccattgaagctggaatgtcctgttgctggtatttcaattgacttaagccaactatcccttcagttacaataggaaagtgcctctaataaggccaaatatgcgtactaacttgtagcaaccacgtgtccgtgcagtgccacaggagctagagcagtgacaatgctggtggcaacagggcagtgtagcaggtgcttcatgttcaccttttcaaccttttcatttaattgtcacaactcggaggtggattctgttagggacaggctgccccaggaccactccgcccccgctaactcaatgcagctgacc

SEQ ID NO: 42524 - DNA, 1068 bp, Homo sapiens
acggcggctaatcccccaagtatggtaacatactgtactgcaccccctaaaagtgtgttaccaacaggaccacaaacaagtttgcccactgtttttaatgcaaatgttcctttcaagatcgcaaacccttcaatacacagggcctaatccagtcgcgctttactactacgggttactcccgccaactggcaggggagccgccccgggccccgcggaaaaggcaggtgcgcgtgagggaaagcatgagagcccgggccgcgcccacctcggccccaggcactacgggtcctgcgggtcccgcgggtcccggattcgaggcgaagcggcccagagcctgcggctgctcagacctcctcaccgcgcccacctcccagccacctcctggctccaggtccagagcaggagcaggactaccggggtccctggcacacaaggagcagaaataccttgaggggcgggaccaagtagcccagcgctggaggaagacccgcaccctcgcgggagttctgagagccttagcaggccgcgacaacactgggagacgtgtctgccaatcaccggatgggggcggtcctggggggggggtcatgcaattggctaagcacggagaagctctcgttccattggccatttttccggcctcaagcccacccctaggcctgaatccccgtcgcgttccgccggtctgcttctcggccgaaaggctggggaggaggagaggaaacgcctgggttagttttggttccttctgctggcgctcaggctgctggaagagtcctagaccttcacccgtggtcccttgggcccgtttcacgcccacgttctgacatgtcctgtggtattctgtacctctgccttctaccctgtgtcccacgctgatccatcctaggcagggagaaggcagcgtcgcagggacaatgccaaaatcaagatatttctcttagagctttctaatattaataccttatgtctaggtatggtatacaataagcatatatatattttataaatctaaaaccactccccctcattaaatcatcaaactagtcccaatgaagtaggtactgt

SEQ ID NO: 42525 - DNA, 924 bp, Homo sapiens
ctttatgggtccagccctaaagtgatatgtatcacttccaccgcagttcattggccataactagtcacaattctacaaaggaacctggaaaaaggagtctaactgtttgctacagaagaaaaggcaatggagttttgggaatacacaggatggtctctgccatagacacactgttaagttttgattggaacattaatgtaaatatttccttaacaactggcaagctgcaggttgtaggtaaaagattattaaacccttttcccttctgcataagaatttaacctttggttaactttttatctctgtttccctggaaacctgataaaggaagaatgtcaaactatgcagccaggcaagattgcttatgacaaaaatgaccgctggttggtaaactgcattaaactgaaagaactataaaaatttgatagaaagccagagctttgggcttctctgagtataatgattcttgaataataactggacttgtcccttggaggagtgctggaagctatgtctgtggagttcttacagaggaattagctcctacaggatatgaggtttttaagccaggggactggtgtattcatcccatgtgaatctagctctctcactcctgagctgtcaccttgaaaccagtccaagtagctcctcagtagctgcgtggactgcttcaagcttcatggatggtcatagggactactccaaggaagaaaaatgccttatgctcccctgatggggagctactttcctgtctcgggcacacttgtgtcaagtgggagccatgaccacagagctgacttatttgttagatacaaacatacagtgccttgggcccacattccttttgagggcccatgaaaatacatttttttaaatcagaagaaaaaatactttaaggtgaaagtgatgttttcatatgtaata

SEQ ID NO: 42526 - DNA, 535 bp, Homo sapiens
aaaacagtgcttgtgcttggcatatggaaggagctcaataaatagttgctgaatgaaacaattgcctgttaagtgttgttgtgtcaggaattatgggagatttctattttccactttacatgcttctgttttgatttttaaataagcatataatttaagtgtttaattaacaacaacaacaacaaaattctgtgtggaggctgaagcaattccaccttgaaagctaatctaccatgttggctcctgatcaacacctgttctaggaagacctctaagatttccagtttatcgattgttgcttgtgtaagagcacatactcactgtaaatcctgcccttaggtcaaacatccttgatgttgtaatactttgattgttctacatataccttctgaaccagccctcccctacggtatgtaaaccctgggtctgggagttaatggcatggggatccaccattgtgtctcaccgctgtctgatacacagacgtggcttctgttaaacatttaaagtccctattaaatgtttctttctaaga

SEQ ID NO: 42527 - DNA, 2894 bp, Homo sapiens
tccaatattgctccaaataacatgatatccgaaataaggcaaaaatgcaatgttcctgacaagcattgcttgtgacggcaataatccaatgtctcacacttcagaggccaatttccttctggtgatttctctccaattcatcctgagtggacagaatcactcaagtcagagtgatttatatttagtcaatcaattctatgtcagcaggaaaactccactgggcccatgaagtgcaattttcacgcttggagtttcctttattgctaggccagacatttctgggaaagagacccagcatatcaaccctgaagaccaaacacaaccctcccaaaggatgcttaggacatctaaatataacaaaacttacgccagcctgaccttgctcattaagaacaagacagtgcatgtgttcatgcaggatgcatcaatgatggtgtgtacgctcttgttcacctttagactaaggatagccataataaggtttgttgtgatagcctctcacagtgtatactcaagatggccagttaggaagcaaagcagcccgtaaagctatagaggccctaacatgtccaatttctacttgataagtaaagaataatagtgttggaatgattttggtcagatgggtcctctcatacccagatgataggaatgaactgcagcaaatttcccagggtgcaatgtgttcaatagatattaggagccttaaaaaggattataacctttgacctagtaattccatttctaagactttctcctaaggaagtaatcaaagataaggacaaagatttatgcacaaggatgttcaaaagctggaaacagctgaaatgtacaaaaataggaaaatgcttaaataaaaaatagtaaatcttataatacaacattaaaaacaaacttttgaaaatgaataatttgggaagtacctttcatataaagattaacttgtatttaaagccctgtttatgtaggtgtatagatagatagatacttatatgtatatgcttatgaattgaaataagtttatcaaaatatttacagtgactagatggtgagaataaattctatttaaaatgtttatcttcatacttttctaccataaatagatattacttaatttaaaataataccattggcctgattataaaagaacacttactacttcaacatcaggagaagaaataaggagtaaaagttcctcttggattcaaaggggttggacaaccctgacacttgtaaatgtgtgattgtatcaacgttgttgaaattctttccttctgtgagacatatcacttaaaaaaatcacctccaaacagacttacaaacaaacaatatataaagttatgcagctgagcttctcagcttcccaccttcattttcccagtgggttctctggtggtaacttactgagttaatttagattaatatggtaggtcttaggtgattactctgctttagatcccaagcaatgctaattattatcataaaggacaagctactcggaggtttaaagttcaggcacagagaccttgtctacatttctgttatctggctcaccaaattacaagcgtctggtgagtcaatatgaaagattccaaacacaaaggtcaacgctgggctactgatcttcctgaccctaactcagagccaagaattgcaatgcagttttctcctcccacactaaaaccattagcaaccagcttgtcttggctgattcttttcttttacaactatttttgaataggtaatagctcttccggtgcccacatactaaattagcatgtcatttcatgacttttcttctctgtaaagcctttaatgtgtctgtaacagtactgtacttgctaatgttaattcacattaattagatgatgccttttcaaatcaaactatggtccctctgaaaattcacatgatctagagtggatgtggaaagccagtttacacacatcttgtgagttaatcggttactgtttcagaacaactttgcaacagacaactatccagaaccttgtccagttgttttttagaaataattttcagagagcctcaaaaggacaaagatagggaaaggttaagaaactgtcagtcttatcatctgtctttctacatccccatccagtcagtcactaaatcctaatcattcaaatagctctggtgttggtataccctcatcgactcccatgaccctatgcctgaaacaagttatcctgtgagatgctttcagatctcagagactagatagctgttcagcacagtcctttccttcctgggtacacagtagcccacgtttcccagcctcccctgcaaataggaaggatcatgtgactgaccgagggtacaaatgaaatacaccaccgccacacagggcagataaagacttcccatatatagtcctaggaaccatggattaaacaagatggagctagggtgcctaggctgtgtttaaatgagagcaaatcatgactacctgttcctgccctttgatgaaaatttggtgtgaagggtcttaatgctagggtgggtggttttggcttctgttcaagtgaaatttttgccccacattccttcttccagaattgctcctgtggccacctcatcatgtaaccctaaactgtgcaagccatcatcgaagtggtagatattttaaaagtgttacattcttttagaaatgagctctaccttgactaagcatgtacatcttttagatgacaatatactaataatgtgaaattttcaagtaaagcagaaacccattttagaatgataagcacaaacttattgggccttttaattcatgacagagttgccacatgtctgaggtcaaatctaaatgacctgaataattttacatgtcctgtgagtttcaacaacacaaaattgcaattgtttttaaa

SEQ ID NO: 42528 - DNA, 655 bp, Homo sapiens
aaaccccatctccactaaaaatacaaaaattagctgggcatggtggtgggcacatataatcccagttactcaggaggctgagaaaggagaattgcttgaactcaggaggtgaaggttgcagtgagctgagattgtgccactgcacttcagcctgggtgacagagcgagactccgtctaaaaaaaaaaaaaatcctgaactctgacctctgaaccctgacatgctgacaagccgcagctcactcaacatgaaagggaaggaagagcctcagcataaaccctatcctgccaagaacttcagccactaaatggcacagctgtgtcacaataaacaaagagaaataagcagaataaataggtggggagggaatgtcggagcctctcggtccagaattagtaggcaatacacgcagacataaagaactcggacttcgactccagatgggcctacatttgaattgtaattttttcacctaatagttttgtgatgtcacataagtcagttcacctctctaagcccagtcttcctcatttgtaaactgggtagtaacacctacttcacaggattgctatgaggtataatgagggaaagtacgcaaggcattttataggcactcagtaaatggcagctgtacttattctaaatgttttcatgtt

SEQ ID NO: 42529 - DNA, 918 bp, Homo sapiens
tcttgcccattgttcaggtagaatatatctttaattgtggctgcactgtgctccttataaaagtcatacagtaatgagcttcagcccacaggttctattggtacagaaacagctcaagcagtttagcagaaaaattcaatcaaatacaaaaaacaactcaagggaacatcctatgcttaatggttaaatggcaatagaaaaaaagacaaataactaagcagtactggataaagctaaaaccttaatctcatgcttactcagcagcaaaaagaaaaagcaaagcaaacattaattatggaagatttagtgatctgtatggttatagttgtagaaacacttccaatctgtgtttacccacgctgtaactcattgctttctgcaaatttaaagaaaccttttgcctgacagttcaaatgcttggttacagctaagggaacaatagttcaaccactttgaaaataggctagaggacaaagtcctcacacttcaaaactggtgtgtgtgtgtgtgtgtgtgtgtgtgtgtgtgtgtgtgtgtgtgtttagtggctttccaacttcataataaatctacgaaagggccaacttcataagggagccagtctgaatacaaatatatttagccccatcctccctacatggcaaggaaggagcaggcacatcactatgtaactagattgcacgttcattcattcttaacgactgttaccaaagattcccaaagtaaacagtagtgaaagccatggtattacagtattgaaagcaatctattaactcatgccttttcaaaaccaatgagagaatagacctagttgaaaattcttaattccatctagtaagataaatcttgaacacaaaatgctagaaaaaagggcggggaggtctaagtacataactgtttaaattgtctatccagtct

SEQ ID NO: 42530 - DNA, 640 bp, Homo sapiens
tcatctcagtataaacattttttattcctactctctatcagcccattaatgattaacactataatcaacacaaacgtattaataatttcctcttagaaaacagtaaagcataagaaagactgtttttcatatagatttctaatgcataaatggattaactcagtatgaggattttaaatcaataacacaattagattacttaaaaaccaaacacatatcccttctctgccacatttttctgactctaaaggatatactttgagttcctatacattagtacatgatccagtacacagatcagcacttgctccactggggaactctaggctggattgattacatctgtgtgttttggctcaaattcaagccatggaaagttaaggattaattcatgtgtcaaggaactctaggacaaagagttagtgacagttttatagaagctcttagaagcaaatgtatctgcctgcttcacccttctgtcactcacctccatgaagaaggttcatttcaatcagcataatcttatatgcaatgattatacagtgactccagtatctatcactttggtaggtgacaccattgtgtctatatgcacatttgtatgaagcttcaaagccttggaaaaacttgatgtgttgaa

SEQ ID NO: 42531 - DNA, 1841 bp, Homo sapiens
tccactttagacaataaactctgtgagattagagaccgtgtccatctagttcatctttgtatcctcaatctaatatataataaaaggtcaataaaatatatgctgaatcaatgaaagtcccagcaatgtggggaatggtaatgaagaactccagagcaatgcacttacctgtgagatccagggttctgtccacaaaaaccactgatgccctgcctgcagcagtcttcttcctgttctttgcaggggcataattggccagatccgcagcgatgacctgacttaaggaacctacagcaaaacactcctcccgtactcctaaatgttcacacagagaactgaggcctgacactaggcatctgatctgcagcagcagctctggggttagcgtagtggagtccacatcacccaggcttcccagcttcctcttgtccggtcgggcgctattaaggaggtgcacatcctggggtagcagtgggaaaagggatgcaaaagctggagtcaaggcaaagtggggagcaacaggggcaagcaataacgggacatggaacacctcggccgtgtagttcatgttgcccatccattcacacagcttctcctccagctgctcgaacaccggctgctgcccctccatctcggccgctgccgccgctgggacatgattagctgtgaggtggacagcgtggctcacggttgtgaccaccacacaatactggaagtgactgcggcagatgatgtcccgtaggatctccacggtccggcctttcagcaggcagctcagcacaaacactgccttgggctgcttggctccaccaccaattgcgtcgggctcgaactctcgcaggtgacagtcaggaccccccaccgcctccaggagacgggtggatccgcagccccagtgcaggctctcggcgcaggcggcgtccaggtaaaccacagcccgtttcactttggccagcacctgctcccatccttgctgggtaaaggacagtacgcccgaggcgctcatggttggggattcgcagacttgggaaactacggtgcaggaacttctttcagaactcaccgcttccggaaattgggctccgggagactttgacagtctccacagtacacgtggtcggcctctgacacgctccctgatggcgctcggtgatgacgttaaactgagcggtgattggctagagaggaggccgggagtgaggaaggatggcgcggtcgggaaagaagtgggtggggctctgtggctccgggcttcctcaaaagctcgtggagatcaggtgtttcctgagatggagctgaactgagttctttccgtcgctcggcctgtctgcgcagataatcttctcagataatcttctcatgttccttgaaaagtctccgaaataaaaacctaatccgaaatttggtatcttccttagatatgaacacgtctccaaaagtacagccaccttctcaatctaaactcagagcaactagaaaaagataataaaaacaaccgtgtgcaatattttgggtttatagattgctgtcacatacgttatcgcccacaagcctcataacaaaccctgttgttctcattttcactttctccatctttcctccctcatctcatcgtcactacatcttataggcttaaaaactctcagaattcagcccttcctctccatttttgctgtcacaaaaacccaacatcatcgctcacccaggcaatgatctcccaacattttctgacttttgatctctttaccctccaattctattttcttcctaataaacaaagttggtcctacaactttcctgcttaaaagcttctcctagcccagttgcctataggatacatc

SEQ ID NO: 42532 - DNA, 1409 bp, Homo sapiens
agagtgcattcttcatctattagttttgcttttgttggctgtgaaaattaattttttgagaaatagtactgattgtgatttcttctctattcagtgaggaaagggagtgacaggtaatgattctgtatcaaggctgattaaagaataaaagaaggcctttctgaagattaaaaaacaaataaaaagttgagaagaaagagcacgaagagtagaagggaacaatggtgtactcgccagcaatggcaatacgggttattaaaaagaagggtgggggcggggaaccctggccgactcaggacgccacgggaggaagccacgcaaaatagcaaaccgggatcctagaggggcggggcccacctcagcgcgcaggcgcaaccaggcccaggtggccgccgcggaagcgaagccacctatacgcgccgcgccgcttgggtctcctgcgcatgcgcagacggacctgcgctggaggcttcatctttgccgccgctgccgtcgccttcctgggattggagtctcgagctttcttcgttcgttcgtcggcgggttcgcgcccttctcgcgcctcggggctgcgaggctggggaaggggttggagggggctgttgatcgccgcgtttaagttgcgctcggggcggccatgtcggccggcgaggtcgagcgcctagtgtcggagctgagcggcgggaccggaggggatgaggaggaagagtggctctatggcggtacgaaacttcctgtctctgtctctcgggttctctcaggcctcccctcttggccctcaaacggccggcgtccctggcctctcgcgccgccgcttcgggcctctggttgggagtcctgtccggcctgacttaggccgagcgcggcgtgcgcgtgcccccagtccccgcggcggtctcccgcctggcccacgcccaccatgcgcatccacccctgtggcggccgggccgggctggggggctgtgaccggtcctggcccccggcttcgctgtgctttccccgaggcgtctcgatcgcctagctgctgcgctctttacccttgtttttttctgtcgattctgaggtggtggtttttggtgtctgtttttgccctgtggccttagggtgcccttcctgtcccttctttcagaaacagtcattctgtaataatagctaaataaagttaatgctgtacaactaacgtcttgtttcttgatggtcagtttgtatggaatgcacctgcaagggtacctccttgtctgaaagtcgtgctttaaaaataattaattaagagagagagagagaaagatggcccataaagaaaactctgaatgtctcctgtattaaggtgaagttattcttttttaagagactaccgtttaacctacatcatggaggtatctcatgacccttcggcttatagttttcag

SEQ ID NO: 42533 - DNA, 858 bp, Homo sapiens
attttggtgcaaaaaaaattgatatcgatgcataattttttcatagtatgcattttccgtgaactttttgaagacctctcatattgtcaagctgtctaggactggtcggtagcttaaaactttaccaaaaaaaaatgcacaagaaggaactgatgaggatttactcatcttttttccgtcctttggctcctgctaatatgacttatacattgtaggcacttaataaaattttattgaccaagtaagtaaacactatgacacatgcgtgtgtgtgcatgagtatatgatttgtgtttgcttggtgggaaatgtgctgttgactttagccaattggaaatgtgctgttgactttagccaattaagtgcatgattcttctaagttcaagggcattactttccagaaagtcaaattgtttctaatgtggaaatgaatatatgtgagatagcattgctgtctctagaatgtacatgtttataagtaaggaacttaatgcaaaacttgataggaaataagagtaaaataaattgctttgccaagcaggactcataaattttctttgcataaataacacattgtttatagaagatttggctaaatcctctaattcttctgcttcaaatacatgcacagatattactgagtttttattgaaacttaaaaagtgttaatgtttaaaccacatttgatattcaggttgctgaactgtagggcattaggagtcaatgtttacctaaatttgactaaaatgtttaaggccacagaggcaaaaagtggaggaattttgagttgttctgaattatcccaggaaaaaattacactctggaaaatccaagtgaagtataagtaaaggtttctga

SEQ ID NO: 42534 - DNA, 945 bp, Homo sapiens
agacacaaacacaaaaaatctaaaagaagcaaagaaggaaaagaagcgggcagtgagcctgcccctgaacaggagagcaccgaagctacacctgcagaataggcatggttttggccttttgtgtatattagtaccagaagtagatactataaatcttgttatttttctggataatgtttaagaaatttaccttaaatcttgttctgtttgttagtatgaaaagttaactttttttccaaaataaaagagtgaatttttcatgttaagttaaaaatctttgtcttgtactatttcaaaaataaaaagacagcaatgactttatatccaagaaaggaatgtgaatgagtcacttaacagggaatctaaagagctgtgttagctgtgtacatacacagattatctgagaaaaggtcaagggttccacttgggccacagtttttttgttaatcaaacaccactctcttaagaggctgcatcacaaaaggcaacaaagggcccctctaaggcttgagattaaaactagtctttatcattactgctgtgacactcttgcttagtatattaagagactcatacatttttgatatcacaactttttgatggcttttcaatattctaaatttgggttcctggtgaaaccaaatggggtacactttcatatccaaattaataaaacctataaggcatctgggtggcctctatgaaataaattaattaattacccatagtgtagtttctaggaggcatgtgtacacacactcttcattgtggcacaaatttaaatcgcctcatgaccatgtctgtgagccagggtcaagctggtttggccttcttgatgcattttccaaggcccactggtggagcagcatgagtttttatacagttactaacgattgtggaaaaaaagagctttagccatttcttactaaaaacaaaacaagttta

SEQ ID NO: 42535 - DNA, 1046 bp, Homo sapiens
ttacattgtcccaaattctacaggttaactcagataaagtttacacttcaaaaggaaagagtaaaaatggaggaaggaaccgattacagaccattagaaaaatatatttctaaaatattttcatagagaaaaagtattgctttgttgctcaggctggtctggaactcctggctccaagtgccttggcctcccaaagtgctgggattacaagcatgagccactgctcctggccatggaggaatcttaagcacacagagtgaactgcacccaaaatttctcaagtgagtcatttattcctgatagtagtgagtcagcatttcaaaaacactctgtcatttataaatatcagaaacttttctatgttaaaaaaaagtaaccatattttatagagtcttctttcacacctgctcagtgcttaccaggcagccttgcctgcggtgagcaagagatgtttagttgtgcactgaggggctggatgcaatggctgaaataccacaaatatggcatgtgtgcatgtgtcctgtctcatgaaccagtgtccatgaccatttcctttcttaaccagaaaagcgaccaatgtcagcaatggaaaaagaaaatcatctgtgaaagcttcacacccagggttacctgactttggctggagaggaggagagttacgtatgaaagagatgacttttctatctatcttttttcgccattctcctcaccctactttggacaccttacaatgttccttgatgtttaaaaacataatttatggtaaaatagtttaagctaattaaaaacacaatgggtacctgaatatttctcaaactataagatgtatttccattttagaatatttgctttggatatttagaataaaacattttagacaagtaaaaaagcataaagaataacagaatgacctacccatgtacctcaaaaccctacatcagaaataaacattccatgtgcacttagtcgctctatgactctttctgctcataggccttgcctccccacagaggtaaaccatgcaaaatttgatgcctagcattcct

SEQ ID NO: 42536 - DNA, 2170 bp, Homo sapiens
ctacttgggaggctgagacaggagaattgcttgaacccaggaggcagaggttgcagtgagccgagatcatgccgccgttgcactccagcctgggcgacaagcaaaactctgtctaaaaaaaaaaaaaaaaaaagaggaataatagtagctacctcatagggttgttgtgaggcttaaatgaggaaatgcatgtaaaacactcagcaccacacctcaaatgtagttgaaagagtaaggagagcgaatatatatattgcatttattatatgtgccagtcattgttttaaatgtttttcactcattaattataattattcttcctcatatgcataatggtactagcgcctgaaggtgagggtttcaacacttttttcttcaatctatgtaaaaagatgataatactttctgcctttagctacatacgtgagaagtaggctaatcaaagtaaaaaatattgtatacccttgggaagagaggggtcacagaaggtggaaggtgatcagattgcgtcatccctgaagtccccctggaagcccagcccatgtccatccagccttatggggagttcatttaccttcaggggcagtggtgttttcagaattttccctgccctggtcggcatggttggcaactgcactcccgctctttgtccttcgaagaacactcaaagctcgatttatttttttaaatgatctgcttctaatagtggatctctcaaagggccgtgctgaggaatagcgacaggaggaacagtagttatgatttaatagaaataatcatttatgtacatatctgataagatatacacaataagacattaacagtgactacctctgggtggtaggattgtagaatttgcttacctgtattttttaagttttctacagtgaaatatgtacgacgtgcttaaaatcctgcttttcttttttgtttctgggctgaactgaatacaataccacttttcttgagcagcatggctgaaaaattactgacactgcaggagtgatgaatcattaggtctagtttcagcccctttcaccaagtcagattacacacagttttaatgattggaggtacttgcggtttcatttcactttggcgaattggacattgggttcctgccaaaactaccagaacgatttccccttaaaaaacatttacagaactttccacagtaagtattccacagagggcaatcgcaagccaaggagcccattcccggacaaccacccatttgactcacccctagttcggttgctccggccagagtccactgggctgattgctggctgcccgtcctctgccgaggacacgtaggcagggttgtctaggccaggctcgtctgtcattaaggagatggtggcagctgcagaaacctctggggagggagccgtggctgtgaggctcgcacagccgtctggacagccatcttgtgagcgcctcttcctatctttggtcaggccgtagtgggaggcacctttacagctgtaacagaaccagcggggaggtgaagaagagctttggctctgctgccattcctcagtcagccctcttcaaatacaattgaagaatgtataataggcttgttgaacttggaatttgatttgcctgccgctatatcctctcttcccttttcacacatcggtactcaatatacatttgccaaccaagtgaattcataatttgagattttttaaagacgcccactgcattctcttaaagcaatctctacattggctgctggaatgcaaatttattcaggtcaccatggtgtctacatgagtagggtttgaggctggcaatgttcaactatttggtaattcctgcttgctggtgtttattttgaccatgaaagcccttagtcacaccctcactcttcttttggattttgttcccagagcactgaacgtaaatataaagctcctcccagattccatatttaactgttcatgcaaacagaatcaccctcaccacaaagccacaggagtgagttcagcattgctatcctctagtggcagcttggtggcttccattctctttctctgggctggtctgggagggcctccctggtgttgggggctcccatgatctgagaagtgtcattcattgccatgttgtctaccattaagagagtaaaacagcttttgtggtttttagcaaaaacatattt

SEQ ID NO: 42537 - DNA, 1166 bp, Homo sapiens
tgttgacatatgctatatgttagtttgcagtccatgataagaaatttacacaatgaagtttatcagaaaacacaccactagctgggactctcatagcaaatacctgggaactcataggctgtcctattccaggagggagcgggattccatgtcaggtgacttggatagtgtcccaggttgggtaggttaccccagcaccagcagggcctccttgccagatggccaggcagagactgggaggttcctgctggagggagctcagagtatatctggaaggtcgttattaccaacccagagaaccagtttggtgaggttggctcaaagggcatatttagtcagagtaagggagagatgtggtaacagggaggaggaagtctgggtaaggattacaagtagcacagtcaaaatgcgcttctcagttttcaacagagtgagggagaagtagtaccttagccccagccctgagacctaactcctcaattcttgccaacagcaggagagtgagcccaggaaatctccagacagccaaaagatgatccaggtgataagggcacagccaggcagtgtccacgccaaaaaagaacagaaagtttggcttaactctatttttgcctgtgtttttctcctggggcaggagtgtaacctaaaaacactccgggatacacggtggcccttacacaaattaagaatccagaggaagggctcctttggcaagggaactctcgggaggctggagccatgacagagctccccaggaacattctagaagacaggctagatttcctggcctttggtcaccagcctggagtttggcagagccctcttgtgcagagggtgaatgaagatatttggtcattgccttccctgctgtgggctgttctcagcattaagttgtcagtgtgcactaccattggggttacccaatggggtctattccagaaaagggaaggtggatttgcctactcaagcccaaagagcaagggccactgaaattgccttctgagtaataggattggcagacattgaggcacgttgcaaagaactgttaattataatctttactttctctctaaccagctcagaaaagagctttatgggaggaatatagtttgaatgagaggcattctgttcattctcccaaatactctgtggattgagatcagcag

SEQ ID NO: 42538 - DNA, 1510 bp, Homo sapiens
acagctccagcaatggccaaagattttacttaaataagcgattagctctgggaatcagattctaagtggaaacatgaataattagtgaattaagtagtctctttccagagatgtgagtcgggtgctggatgttatcttatgtatatgcaacatgcaagaaagacacatagagtccaggtacttgtggctgcctaatcacaggtggtgccgctggctgcggtgccttcagctctccactgtgactctgatttacaaacaaggaagtacactgcaaatcccttggcctctgtgtgcattttggtcatggcctgattgccactttgtccttttgactttcagagccagctgctacaagtttcttttaatcaataatccaccgagtgaatgaggcaaaattagcagcctggaaacttctgcctggtgagatgaagtcagcacatgtattttcagtcctaaggtcacacttctgactctttttggttctacccctaatctttatttttaattgctagcagttagctctcttgtgtcatggcggttacccagggcagctggcatctggtcaaacaaaagtaaaacagttaattaggagacaaaaggatgccctccagtgggcccaagttgtctgttctcataaacataagagttgtgacatcagggcagttgcacattcttgtcacccttggatttgtttggcgacgctttgggggtattttgccctaaggctgcatgagcctttacacttgaggttggtcagctttttgttcttaacagagactgaagacttatttactggagttatggtaacaaagagaaaaaagtctaggcttttacttatcatttcattttttctcccagaggtttataactaagtgcagtttttagatatgtttatggactctggtcttggagttctttgatgaggaaaggtaatttataacagtcaaattggccttttcaaccttatcacatgaaataaaaaaccaaaatgttggaaaggagctgatgtaatagagactttcaagctcctcatctgcttcgtggcttttcaccaacaggaaacaatgatggcagatttggggactgtcataagcatggggttttccattcagaaaggtaaggtaggtggggattttatttctcctttctcatctgcgagcaaccggattagcactgattgatttggttccaagaattgagtccattccgagattgccaacacacacacatacctcccaaacctgcttttttgcatggtcatgtaaccaaggcagctaacagtttaaaactggaaacaaagagaagtcatgaatgaaaagcaggcatattaatttagctttacaagtgtgccctttccaaagccaggattactcattccctggcagcctacagcatggagacctgagtctgctcaaacgccatggctttagagtgtcacttccatttggtgtgggattttaaggagagaggctccaactcagcagaaatgtccaactgtaattaaaatcct

SEQ ID NO: 42539 - DNA, 1481 bp, Homo sapiens
ctacattcttgtgcatataaattttcctaaacttgaaaaaggccgtcttatccccatctttcccaatggaatctgtgtttcaaaaagataacaatatagtgttcatgccttcaaacaggcctggtagaaaggaaattaacatacattatttatctcgtatatatgtatgtttctgcctgtaataaataatggggattgagcacttagcacaagagtaagcaactgccaaatgcagctctgggttcagacctgtatggggcagacctgagagccaggcccctttccctaccatactgaaactgacagcaaagccgctcagctaaggggatgtgcagaaaggacgccctggggtctcctgaggctgcagggcggccggggagccctggggtcaggagggcaactttctggggcacagtgctcgagtcacctctccgaggaacggctctgcctgcactgcttcttgtactttgtttacccgcccctaggaaaagagctgtgaagatgatcgtagggagcaagcagtgaggcggcaaatggctctgagaggagccacgcagacagctgggcagccgtgccaagaacaacaggaagctcgcggccccacccctgctcgctgcagccctggcctggagacccagggttatttgctttgaagggccctctgcagatgttacataaacaaaacctccattgactccagttctgagcctggcctaaaatagcccgcgggcttccccctaccactgtgcagtttcgccgccatcccttttggtccccttgtgtgctagctgcttccctccattgaccacatgtgcagacaactctcgccagtgtccctaagaggccagttccctggggaacaaaaagtggggctcgtttgccttccctggcaggtcagacacaaagcatccctgtaagacctttgatggctactggccaagggacacgtttcccctccccagggaggcaggaagctgggctgaggcacagtggggtttggtcagcagccagcacaagagggactgtgctttctctctgtgtctgtgtctctttctgtgtgtgtctgcgtctctctctctctctgtctctttctctctctttcctaagggcaagctctccaggtaagggcacgagttcttcgtcagcgtctctattttcacttgatgtaacgactgaacactctactcttgactcttcctccaagctcctataaaattccctgaccccatttgcacttcagctccttcattctgcagaaaaccattccttcgtgaacatctggagaatcacagatccgtgccacagcacggggtcactctgggccttgccactcaacatgggtccctggaagctattatcatcttttccctttgacctcctgcacttctccaggatcttaactcataaaataaaaccaaaaacaacaccagcaataaaaacatatttatgtcaaatacttactatgtgcctgatacaaggct

SEQ ID NO: 42540 - DNA, 1768 bp, Homo sapiens
actttcacattcttggaaaagaaatacatcctttccactgaagataccaagctgatgagttgagagcctgggacatttggttacaaccttgctccatcctggctgagcatgactgaatgaaagcagcctagaaagtcttccaagaaacagcacatggcttagtcctgatgacaatagtgactccctagactgactcatgcctgaaattggtatcccctaaaactatttccagagccaataaactcccttttctgcgtaattccatgtgagatgaatttttaccacctgagtaatattgttttaaatgacagcttcttattagctctgaacaccttagcaataatgtcaagagtggaaggagtactggtttgggagtctgggttgtagtcctacctccactcactactttcacatccttgggctaatcgctttatctgtgtgggctcacttttctcatctgtgaaagaggttattggaagagaggaattctaaatgtccctttgaaggccataagtcttgtctctgtgataacattgtatcaacacttcaagttaatctgaggttctggctccaactgccacctccacaacccagtgacaaacaacactgatttatcttaaaagttgaaaactaaaaggtccataatatacttttagaaactagaagatagaacaaaaactctgtaaaacattgctaggatgtagatttctccagaagtgtattaatgaggtgagtaatatattaatacattaactatggtaactattgtatagattagtcataaatattttgttttaaaaaggtctgccactccagttttgctgagctaaagtaaacgaagatccgagttatgtcaacagatgacacaagtgttcagcagtgaggctgtttgttctgaggagggaaacaggaagggaagctggtcccactcccagttcttcttcatcagacctccgttatttatttgatgaattagcaatcctcacaacttcagacacgatcacaaaatgatattttggaaatgctactcggactgtataattcttccaacccttcgttgattcccaagtgccttcgggacaaagtgcaaacccgttggcgtggcacatgagccctctgttatgtgagcctggctctaattccacatcccagtgtcatctcctcccactcctctttatgtgccttacctaaactaagtaaagaggttaatgcatagaaaatgctaaacatctggcataatttctggcatttagtaaaggcttattatacatgttggctgtcattatggcacactagttatactcacagttccctaaaggtgcagtactggtcctggatctgtttgccctgaatccatcctccctctttgcctgctgtgttttagttcacgatggctgatccttgcaggctgcagttcacaggctcttgtgtctcagacttccagctggttgggttaggccaggaagacacactggcaaaaaatggagggtagaaaggagggagaagccagggtatttctctccttgtttccttgggtgatttctgcagcagtgactgtcttctctgtagttccagctcttgccaaaacaggtccactgtggttcagcttctggttccttcttttttcctttagcagagtcggtagtggcttcctgcttcttgatgctaatctctgcattgcctcatcactcgtgttaactctcagcagctctctctaccatatagccaatcccctgctttccattccctgtgctgtacatccttaaag

SEQ ID NO: 42541 - DNA, 945 bp, Homo sapiens
aagttgtctgaggccttgggagcccacccttttcaccagtgtgccctggatgtaagccatggagtaaaaggaaattattttggatcttgaagatttaatgactcccctgctgggttttgggcttgcatgagacctgtagaccctttcttctggccattttctttctttttgtaacaggagtatttactcaatgcctatacccccattctatcttagaagtaactaactggtattgattttacaagttcatagtttcatagacaaggcttatatagccttatctcagatgagactttggagggtggacttttcagttgatgctggaatgagttaagactttgggggaatgttgaggtccgttccaagatggccgaataggaacagctccggtctgcagctcccagtgtaattgacacagaagacaggtgatttctgcattttcaactgaggtacccagttcatctcaatgggactggttggacagtgtccagcccatggagagtgagccaaagcagggcagagcattgcctcactcaggaagcacaaggggtcaggggatttccctttcctagccaagggaagctgtgacagactgtacctggaaaaatgggacactcctgcccaaatactgcacttttcccaaggtcttagcaaccagcagacaaggagattctctcccatgcctagttcaccaggtcccatgcccatggagccttgctcactgctagtgcagcagtctgaaatcgaactgcacggtagtagtctggctgggggaggggcatccaccattgctgaggcttgagtaggtaaacaaagcagccaggaagcttgaactgggtggagcccacagcagctcagcaaggcctattgcctctataaactccacgtctttgggcagggcatagctgaacaaaaggcagcagacaacttctgcagacttaaacg

SEQ ID NO: 42542 - DNA, 481 bp, Homo sapiens
acaatctcaaaaatttgaggcatcaggcacttctagaagttgggagagagtagagctaaaacaagcagtatttattgaaagtctgtttaagaagcagttagaccactcatatcccttctcttatcccatggagccaggtgacaggctctctctaaccctaaagaagacagagggttggtctttgaaaaggtgagtcatagtctctagattagagaacgtcagtcacagctgaggatggagatgatgtaataaaaatacggagataaaatgaatgtttactgaatgttgaaactcaaccagtcatctccccctacttggctctcaaaacattgaaaatcagatttatatcctgcatgcaaaacactagtaaaggcttctctgtagaccctgatcaattcccaagaaaagacctaacactcttagagttcccccagaaaatagcctatccagctcaccccaccatgaagttcacagtcaatga

SEQ ID NO: 42543 - DNA, 1066 bp, Homo sapiens
cacaacacacaagaaagtcataaccaaattatttaagaagaatttctcaaaacactaagacaaaagccgtctcttctaaatgagtaacgtggaaggtaatcttgttcccttactgctgacatgtagctttctgcctggggttttatctttaactccctggtaatccaaacggagcaggaaaacctcagacaatagagcctcttttttgctttacatccacttttttggggtcggcaccgaacaaccatcattaaatggtttctggcgcaaagtggcaggcttgggtaagctgaaatgtttatgacaccaaaataaagatgttccacactgctgaaaccggggagtcacgcagagaacaactgaaatggaattacacaccaaggtttacttaactagcacgactttaactcgtgtctgcctgatacacttaccaaagagaagtggcagaaacccagggtggacaaaagagggcagtgttcactatgtctttcatctcagctcttcgctctttatcaaattgccactgagccaagagaaaactatgtccagcatttcataacacaggaagtggggaagcagattagatattgggctctgcagtcaccacaaaataagcagtgtgctcgtaaaagtcacttttttccctagacgaaagcttaaccattggtgagttttggggtttggtttctgtttttcagtatgatcggctaaacctctccaggaaaataatggaatatgtaatatttctcaaactataacaggttataaggtttatttagttcaaagcactcatttttgcagatgaggaccaggtttctacatttgtcagtggcttctccttgtgctcagatatcatcagtatgtggggaggggaagacagacttccctcttggagctatttagagaatttttagtcatttcagaatagaatccatgtacgccctgtacacaaaaaaatttaggtcccagaaagggaatcttgtcccctgccctggatgtcatcatattgggtcgaacttcattcacattctttgggaaaagcttatgtggacatgtcattgtaccc

SEQ ID NO: 42544 - DNA, 467 bp, Homo sapiens
aatatctttttaggctgaggcgggaggttggatcacttgagcccaggagattgaggccagcctgggcaacagagcaagacctggtctctataaaaaattttaaaattagccaggtgtggtgtcacaggcctatagtcccagctacttagtaagctgaggcaggaggattgcttgcttccaggagttcaaacttgtagtgaactatgattgcatcattgcactccagcctgtgtgacagagcaagatcctgtttcaataaataaataaaggggggattacataatagcacaagtaacaaaaatttccccccataattgcattcttctgaataaccacagtttatattttactatttttctttccagtcttttttctagtcttgtgtacttacatatattttttaaacaaaatttggttcatattcatctggaatggtcttttttcactgaatatcagattgtgaattt

SEQ ID NO: 42545 - DNA, 324 bp, Homo sapiens
aataaggggcatgctcacagccagtattcaaaatgtcttgttgaaataagctcaaatacaatataaagatattaccaaccagcttctctatgaattactcactgctctacaaaaatgtttccaactttcccaacacacacacacacaaatctctactgttgcacaatcctgcttgtatttttcagattggcttgattaaaactgtgtgaagtaaaattcaacctgttgacctcactcaagatacctggaaatgaaaagttggccatctgagtcattggttttattttattttgggggggaaaataaggtgggagtgtaaatatc

SEQ ID NO: 42546 - DNA, 3591 bp, Homo sapiens
ccctcacttagtatttggccttcaactggcctggggtggagcaaagacaatggtctttttttaaagacacccaggattctaatggacagctaagtttgaaaaccactaataattattttctaccctattaacctctccacgtagccaactacaatcaagtttactgattacctaggttctgagcactttgcccactattgcattttccacttgcccaacaaagtgcttagcttttcttctccttaacagaggaaacattacaactacagcgtcgcctttttaaatgacaaaattctctagcttttctttgacatgaggaatgtagaaggagggatagatggcatgacaaagtttggaaatcacttctttaagcatccacatactccttaggcttaaaacagtgcaaaaaggtcctaaaagtcaaaataaaatcaaatggcaggttatgaattctgtgatatatgttaaaagtttaatatccatgatatttggttatacttcttaagctggtgacaacacttagaaagtattattgtggtgaattaaattccactgtcttgtcatggtgctgtgatggcaattatgcagtgtttttaccctgttaagtcacctgaacataaactaacaggtactaaagaaattaaagcattacataagcatactcaaacaacaatatggctggtcatacgagaaatgcaattattttgctgacaaacttatatgagaagtcttactgtttccctaagttattcacagcacatcccactcactcttcaccaaaatataatgaagactattccagacattctcagacttgctggctcttttgtttcactgaaaaggtgaagaagtacagagatacctgacaagtatggaagtctgatctattatttgaacaagagatctaaaatgagagagtatcaatgtaatacatcaagtggtacaaaactgtggacttcatagtgaaacattacaaaacttcctgcttccggacagctcattatttggttcaaggcttcacattcctttgtcatggtctttccgaaagctttcattccttattaatatcagacttttaatgttactagtgggactttccaaattaacaagccccaagttcgtgccccaaggaggagcttcaggactacaattttccctcagtaacctgagcagagtgtatgtccctcacgtagttgttgttgttgttgttgtaaacatatttctttctgtatatcttaaatttgtgttcaactatatatttttatcacgtacaattacaagaacttgcattagttctgcggaaattagtggaaaaactgggagacctgtgggtatgtgtgaaatagacacgaaacggagcttcgctgccaattgtcactggggtctcacacggcccagatctggcctctgagccatgtcactgggtgcaaaggcacagacaaccacagggtaactgggcgagaaaacaaggaggctccctgtcaatacacgtacttccaccctgaagaggaagggtggcccgcagggcagaccctaatgaaaacccgtgcctactgggatcgtcacatcgcccgggcctgtagggcctgctaaaggggtgtgtggaggaggaaggacagcgtccgtccccacttcggagacccaaacaaatgaaaataagccaagttctcacttcctggttgcctactctttcggaaggcccccgacaccagacggacacaggggaaacggggctcccgtggagtaacggggcccaccccagcccgcacctcccgccctcgccctcctccgggccttacacggtgacgtgaccggagccgcggacgaccaccgggtccggcgagtacttgagcagctgctcctccagggcccgctcctcgtcctcctcttcctcatagatttcgtcgaaatccgccatcctgagcctccgagctcccctgcccaaagggcctgactcccggggttggcgccggggtaccggcgggcgaggcggcggaggctgaggggagtcgccgctgccgccggctccgaggccgcggagttcgctgtcggctgtctcggctccggctacagaggggatggggtctggaccgtcgccgccaccgccgccgccattaccatcagcaataacaacaacacaatgtcaacatccgcccagaggccgacacctccacaagcacagacgccgctgccgccgccgcagcagcagcaactcaggaaaccacagcaacagcccgagccacccgcagcgggagcagccggctacggcatcgcgagacttcccgggccaacgggcgggcgggcgcgtgcgtgggcgcgtgggcgagcggactggctggcgggcgggcgggcgcgcgcacgtgcggcctcgcgcgctcccaggccaccgtctttcctctgcttctacccgcagacggcgaccggggcgcgcgctcccgccggcgggcccccctccgccgacttctgggtggcggaccctgggggcggcggctccgctgactggaggccgcgacccgcgactccgacaacgcagcttggaatgtccagtgggacatgcagttccccaaagtcatctctaaccaaaacaaacaactgaaaagaaaagccctggctggaatagacacatttttgtgcgtgtcattgccagtttatctaataatcgcatctcgcttttcctcaggttttgagtctatgatgagaaccagagtctcttttttcccaatttgaggagtccagcagagacactgcaaacatttgtgctcaccacaggatttttcaagacatctccaaattcaaacatcttatcccttgatccccttaagtataatccaatatatgaggccagcgatgctggtatttttttttttttcttacaagaaatctcaccgtagtcatgctatgaaaaaaaactgataaattacctggattccatattagaagatgcagtttcttgccccaactctctcaccaaacataacctggtttttgttgttgtttccttaaaatcttagggaattcctttccttttcttaccagttcctaccacaaaaaagacctgaaagaaagggcagaggagaggaagaaaaggaggcaggaaggaagaaaggatagaaggaaggacgagaagaatgaaagaagaatgggagagaaagaaagaaggggaggaaggaaggaaaaggtttaatggagtctacttagctgcctagtaacagttgaacggtcactttgggtacttggtttcattaagcatataaacagcacaggggaaggagtgggcttctgagaagagagtcctggacagtgaggatacaccatgggagaagaaaggatagttctactgagcccagcgctggtcaggctcttcaagtgcagtgttcatgtcacagtagtcggctttagatgggtcactgttgacgtggagaaagtgcaaaggaggtcaatgaggacagtgagagatgccaacctccttttggaaacaactgaaggaaatgagtgtggttagccaagaaaaaatgaaggaaaaatacagtagttgtatcagacttattgtatccctccctggagggtatttgttcattcaacaaatatcta

SEQ ID NO: 42547 - DNA, 1957 bp, Homo sapiens
gatgaatgatacttattatcgctattattctcatcatctaagatacttcaatttgatgtagtcaaatattctattctacttatctacctctctaagtgagggctactctgtaacatactgctatggaaagatcaggaatctgccctagacatgtataaataagtactttatgcccaaatgagtataaattttacctctggtataatttctatggggagataaaactttaattgccatataggaaaccactggtgaatttgggatgatttgatgtgcttgttttgggttgcttgttgctgttgttgttgttgttgttgtttttagagatgaggtctcactatgttgcccaagatggtctcgaactcctggtcttaagtgagcctcctgccttgccctcccaaagtgctgggattataggtgtgagccatagcacccagcctaagtttttaccattgggaagcaaatgttttgtggagaagccatagttttgaatagcaatttaaagatgaaaaatagatgatagaggtggagaaaggtgtcaatgggaaaccccacatatggtaagataactatgtgtgccatggaccacaaacaggctagcctggtcgaagcaaaaaggttgatcccgaacataatgggatgagggcattagataggtaaggaagtgactgatggaaaatcaagagtgatagctgatgatgaatggtgatactgtatatgattttgtgcattgatataccatttttcctttctttttccatctacatggatctcaaaaatgagcaatcttctctctggaggtggataagacagaacattttgcaagccctttaagtccttcaggaaacacaaacatcctgtgatctgtcactcaggattctgactcagactgggaatctgagcaatgctcatggcaataagccaggaccaggccctaaacatctggctgctccactgtatggatctttggcatgttaaatgtcaacagaccttgtggatataaagttgactcagtcagaaaacatctacggtctacatggaaaagaaagtcttttggaaagaaaagaaggcagggtgtctgaaccctccatcaggatttccctactccactctatttctattagatgagagggatgaggaaagagtactcagccaccttttcaagtcatctggtggtcagggctatttgtaactctaatctcatattcataccagtcgtttctaaatccaatcccatatttacaccaacctgtcttacaaccttaatttggtttcccaggtgtattccagttccactgtcaaatagtaagtactggattatccctagatagactcaccaaaagattatacaagtccttagaggagggaagtgagactgtagaagagactcagcatccaacaaatatatcacataatatattcaaactactctaagtactacaccaaaacaatgactttcctgaccaccatcctaaccatgacaccaaccctgggtaatttcatctcatcatattgcttcaaatattatatatgctttaaataatataggctgatgccatttttatttctactctcactttcttttttctttctttctttttttttttttttttttttttttgagactgagtcttgctctattgcccaggctggagtgatctcggctcactgcaacctctgcctcccgggtttaagcgattctcctgcctcagccagccaagtagctgggattacagggatgtgccacctcacccagctaattttgtatttttagtagagacggggtttcactatgttggtcaggctggtctcgaactcctgacctcaggtgatccacccacctcagcctcccaaagtgctgggattacaggcatgagccaccacgcccaactccaatctcaatttctgttaaattcagatccatatttccaactgctactctacatcaaaaatttcc

SEQ ID NO: 42548 - DNA, 2159 bp, Homo sapiens
gtcattctttggccaatttaaatggaattgtgattatattaggcccatattgtttggaatctaactaacttgtctgatctcagaaaaattacaaaaaaaaaagaaaacacaggtaaaaacccctctcaaggacagcaatgacatagttaactttggctaccaatgcaccttctacattcataattattgtcactgatgctttagagcacccagaatagtgaaatagtgtataactgagacctattaaattctaacaggctaagcacagtggcttacacctgtaatcccagtacgttgggaggccagggcagacaggtcacttgaggccaggagtttgagaccaacctggccaacatggtaaaaccccagaaagcaaaaaattagagtatactcaaaaaagtataaaaaattagtcaggcgtggtggtgtatacctgcaatctcagctactcgggaggctgacacatgagaaccacttgaactcaggaggcgaaggttgcaatgagccaaggtttcaccactaaactccagcctgggagacacagccttgctctgtctcaaaaaaaaaaaaaaaaaaaaaatcaaacaggtagcatagagacaaaatctgtgaaaagctaaacactgaattgatataaataaagtgttctactccttatctcaaaatgttaaagtgctatattttccccactcacataaaaaagtaacaatttatgtcattcaaatgataaagaaataactcatttattttattaaatatgaatgtccttaaggaacaagtattatctttaaaaacctgttcagaattggtaattttatatttacatctatcttctgaattatattacctttttaccacttttgtaggttactatgataaattcttgccttaacaacagctattgattttaattattgagataccaatgatctcgtagggggatgccaattattacgaagtatctgtggaagacaatggtgctgtgtatgcatacagaattagggacactgtcttgctcaatcaattttcagtcaatgagctcatcagctaaatctgatggactgacagagaatccaaacagagtaatacaatgactaagacagtagttggtttgcccagagcagtcagatgaggaagggcatcgagccaagtccagagactcagggcagactccaaatgagctctagctaacaacaagacaatatctcttgttttcaaccctgtgtaaattataaaaacaagaggatgtggccattatggtgtgtttcccaaaaactgttcatgtagctgtgatgtgagcagctaaagaattccacaggccgacagtggagggagaaccttagccctaatctcagggccactggatttagaagcatccacagtaaatccagtaacttattagttttcctcatttagccaggaggtctggaaagggaacttgtctcccaccaaaaacaaaatgatactttgattgcaagtctaaatccaggatctgattttggcaagtcgtttaacctctcaatatcttattgtggaaataacagttaaaaaaaaaacaaaaagtcctatctagcttaaataattgtgctaacccaaggacataactggttagagtctttataaactgcagtcctgtatacaggtaaaatagaatggtgaggaagcatccacctagaacactgacattcttctttcaatccttcataaattattgagcatctcctctgccaggttctgctttatatgcttaggaaagcatgtaaacaagatagcttagatctcattcattttgaagcttccactaggcctttgattcatgtgcaaccagcttgcaaaatgctggtcatacacaagttttgggctctgccctcaagcagaggggcatggagaagattatgagacagatgatgatagtaataagatgatgcattgaaatcagtgcaaatccatttcatctccatcccaacctcacccttttactgcaccattgagtttggggtttggtttaggaggtcctggatgtaaattcaccctctctttgaaataataatggccctcttctcatagggtggttgttctcaatgaacccagtagacataaatatcctgcaggagcttccattctagcagggagattcagacgataaacataaacagaag

SEQ ID NO: 42549 - DNA, 2187 bp, Homo sapiens
atcctccctctttccccacaacattccatcagactcagggaacgtcatcacacatcaacgtcgtcatagtttgtatactgagtgctaagtatgtgcaaggcgttgtgccaagggatgtcaggcttaactcacttaatgctcacaaccatcctgtgagaagagggtcattattatttccatggtcagagagaaggtggattcacatccaggacctcctaaacccaatcccaaactcagtggtgcagtgaaagggtgaggttgggttggagatgaaatggatttgcactgatttcaatgcatcgtcttattacgatcagtgtttgtctcataatctccatgcccctctgcttgaggacagaggcgacaaaacttgtgtatgactggcattttgcaagctggttacacattaataaaaggcccagtggaagttccaaaacaaatgagatctaagctatcttgttctcacggtttcccaagcccaagtagagcctggcatactataggcacaccatgggtgctccctgagtacatgaacataaagatgatccacaggtgggtgaacaatactgggggcaggtgaaagggaggacctcgaggcaatactgccagagcccctcctgcttagagtgtccaggcttctacatggggagacagcgcaccccccagacactcccgcccactcctttctggctcgctgagtgacgccagtttcaagcctcagcccacgccaggctccaggaccagcagagcgggtctgcgcggacagaggcactgggctgcgcccgtagcgcaccccaccaagaggaaggcgtgcctagtggggaggcggggctccaggggccgggcacacgcagacacactcctgctctctctacgcacgttctcacactctcattcacaccgcactcaccctgtgcacatccccagtttctcgtattcctcacattcacacattcatacactcatatattcacacacacccatgctcccaaacacgcttcactcacacagctccgcgcacagggatcaaagaccacattgggtacagtgtacactgcttgggtgatgggtgcaccaaaatctcagaaatcaccactaaagaacctatccatgtaacctaacaccacctgttcctcaaaaaactattgaaataatttaaaaataaaaaaggaaaagcaatctcattccctaccctcattctaattcacttttcacctcttcacacaccatcacgcccacgtaccttaatctcactgttgacagtacacttatgctcgcgctcatgcacactcgcccccacctcgccttcgctctttacacgagcttgcgcgcagacacactcaaggactccctacccacttacactcacgcatgcgcacaggcgcacacgctaactctgcctcctcactcgcgctcgtgcatgcgcatccgtcgcggagaggactttgtgcctggtgtgggagcgggtgtttggtggcctttgcggatgggcttgttttgaggctgtggggtcagtgcgatcgtttagatttccttggtttcccagtgagaaataagttagccaggaagagagagaggcggagacccagggagaccgagactggaggaagggagtaggttgaggttttagagccgtgggagcaagagcgccgggtaggagctgtcgcgcagagagcacctcgcgcagccccagagcctgtttgtttaccctcttcctcggagcggcttctccagcgtctcatttcttctgcctcccttgccctcgcccaggtgtgggacgcgggcgagtgaggacagacttacaaccgtcctcggccgcgcagcacagggttcccgcgccctgtccctatgccccggggacacagggcaggaggctgaaaaagggactcagcgttagaaactatggttggaattctccccctgccacttgctatgtggccttggccagtttaccgttgtctcggagcctccgtttcctatctgaaataaggaatcattcattcaacaaatattaattgccatcctaatatatgtcacctctggtctggacatttggcatacactggtgaatacataaaacagacccagtttctgcccaggagcagtttgcagtcaacaagcatacggattgattatgaagagggcttttgaattaaataataaaatattgctttcatccactccaaa

SEQ ID NO: 42550 - DNA, 1204 bp, Homo sapiens
cctgacctcaaatgattcacctgcctcagccttggaaagtgttgggattacaggcatgagccaccgcacccagccggagattacattttgacatgaattttggagggatgcaaatattcaaaccacagcactagccgacatttttagtttccatatcagttgattaatctcaacagagtcaaccatccactccactccatctgtatctattaaactcattaaatgccttgtgttttcctgcctgaatatcttggccatgcgatttcctatatctggacagcctttctctctctcttcactatctcctcctacacatcttcctgtggattgcagcacacactgatgtctctcttttctctctttagtaattattgtaaatctctcttttacttcttagcaaataactgtcttggaattatttttccacttttctatgtcttagtttccagctagattgtacattcctggagtcagggactatgtcatttacttattcattccatagtgactgagtacctctggaatgtttttggccctctgctggggttacaaattggtttgtggtgtgctcactgcttttaagttgctcacatggggatatagacacaaaggcaaattattgcaattcaatatgataatggctttagtggagccacagacagaaaaagaatagctaaccttacctaggggaactgaaaagggcttatacttgacatttccacattgaccaatgatcccctaaagaatcacataaattccttgtaggtgataactcatgattttcacaattgatttttctgtcactctagagaaaccattagtcttttcatgaatttgtctgcagtattcacatgtgtggatgtttttaaactaccgaatgttaggaaaaattgtcaggccctaatgaattagaattttttttgcaattcaaatttacaatgggtacatatagacccctaccttgaagacggtgttccaggagtcaggaaattgctgcagtacatggtctacttcccaaagcctggatgattggtgaagaatggatgtctggagaataaagtgatagtattcaaggccaggcacagtggcttatgcctgtaatcctagcactttgggtgattctcttgagcccaggagttcaagaccagcctgggcaacatggtgaaacctcatctctacaaaaaatacacacacacacacaaaa

SEQ ID NO: 42551 - DNA, 980 bp, Homo sapiens
ttcaagcgattctcctgcctcagcttcccaagtagctggtattacaggcatgcgctagcatgtccagctaatttttgtatttttaatagagacggggtttcaccatgttagccaggatggtctcgaactcctgacctcgtgatccgcccacctcggcctcgcaaagtactgggataacaggcgtgagccaccgcgcctggcctggttcttcttactcttaaagacagctcagacagcagcccaagaagccccccgccccgccccccaaatctcttagtttgggtaaagcgccccgattccgtgtggtcatggctttatatttgtccctcttcctgttcaaataacttgtgcgcctatatagggcctggcccgcggtggaatggacgcggctgcagctggaatcgcatcactccctcctcccctcccccagcactgacatacgagccccagtgtcctgaggatgactccaaacagcgtcggaccttcaagtggaacctcaggcttgttaaggagtggcctggaactgcaccagattttaggggtgcctggggaggcttagagatgggagacgccctgacttggttcctttccagaacatttgggaacacttggcttggtttcagtcaccaaatgcggactcgcccagggtggacttagttctgaggtggcctcttgctccctctagtggtttagaaatcactgcaggcgggttaaagacgggtctggtttttctccgaggaggaatccgcattaaccatttagacatctactgcgcagtgaagtcaattcatgactacgtttttgagcaatccaataattaaccaaatgcacacacaataaggactttggaccgtcttgtggatccttggaggaccttgggttcattttacaatgcaaacctaacaggctgtaagtacccaagggataattgaaaatatgctttaatcaaaggcaatcaccctgtcattgtcagcctgtga

SEQ ID NO: 42552 - DNA, 1113 bp, Homo sapiens
cggctctgaaatgaactgtgaagttaccatttgtgggcggagagcgctggggccctgcggacggaagaccctggcttgaccggactaacagtgtcgccgaagcaaagcagcccctctgggtaggctgtctgtctcgcctcctaccctctggggcaactagcctaaaaacccggttctcaacttaacagcatgtggcccagcacccgcttttgccttttattccgcactctgatttttggggggatcgtttgttcccgctcattttctacaaacattacggtatcctgttagcattccgaacaaggggctgttcatatatttgccttcaatgatttcctgaagggacatgtggaagtaatagcgagcggtgcagtcacccaagctgaagatgcacgagagcgggtcgcgtagaagaactgcggcaatgggacccccagcgcagccccaggcgccctgttttcgaggctgacatcccaagatcctgtcctggttaggcacagcaccgcgcccgttggagtacttctctgtgactctcccctgtccactgcactgtgtccaccctcctggtgaaggaggagacggctgttggacatgccagtcccaacctggccactttggccattttcagagtgcgtgtgttggggtggggttgagggagaaggatgaaggatgacccccaaccccaacaggagaattcaaaaatcagagagcgatgaaggtgaacgcgctcccctcccccgctgtcgctgggaagccccactctgcccaggtctggttcctggagcatcagcgccccctttccctcgccggcaggatcgtttcctcccgacactggcctctcgccttgggcgcagggtttggggctcagctgtcaattccaaggaattcgtagggttcgacccacgcggcgggagggaacggagggagaatcaaaaggcatcctcccccacgacgcggaggcggtggtacgattcctcaaacgcccaagcttgagctttttttgtatgcgagatagaagccagggcaacctcgcccagataaccccgaaaacaaaggcacgaccagataagtgacttcaagggagtaaaggtcgttctatcggagaacgttcca

SEQ ID NO: 42553 - DNA, 2258 bp, Homo sapiens
tgggatttacaggcgtaagccaccgcgcccggccaggaacggttcttaaatgccgagagggcgcatgctagctctcctcagcattcccggtgagccgctacccacggccgtgcggctctcgtgcccataggaggcgctggcgagctcctgtaaccctaaacccctcggcccctttccccccacccgcccggattctcttcccgctctcccccctctctccacacccgcccggccccctctcgggtctcagttgaaaacaatgcaaacgcagagcgtcgtgcctggggcgcagcggcctctgcagctctgaggttcagagcgcggcgcgcaggggcgcaggggcgcaggtccccggagcggctgggcatcgccgccaaccccgggacaaccaagccgccgaggacttggtggaggtgggagggagagcggaccgcgcagtgttcctctgggtcccggggtcagaagccggacagtggcgggggctggacagtccgagcgcagagcctcccgggcgaagtctgcgcgcagcactcccggctgcgctgtcggggaccaggagcctgggctgcgggcgagctagctggcgagccgggtaagattcgcggggctgtcgcgccctctagtgggctccggggacgcatcccgctttccccagccccgggcggtcggcgccgctatctcagtggagcgcagcgctggaaccccgggggcccggagcggaggctaatctgggtcacctttcccctcctccgggcagccagtggactcctcgcaggctctgtgtgggcccgggaggcgccgggtggacgagagggggccgaggtctctgggtttggattgagaatgggacgtccttgtaattcaatgtgggagaagcaggggagtgtggaggaggacgggtcccgtgcgttcttggggggcaggcgccgtcttctgcgttccagcccctcgccagctcccttgccccgcgggcggcctgttgctgtttgtttgttttacgaccctgcgttattgtgcaacggtaacagtcgtttccaatcagctgcgcggccgtcgcggccctcgccaggctggtttatgggggcggcggtggcgcgcggacagataggacagcgcggcccgggaacggcgtcgaggtccaggcggtccccctgccccgagggggcggaaatgctgaggtggcgagagcgtgggttgcacagaaccctagtagcgagtccggctgagcctctgcggcctagcccagcagcgtcgtcttcccggctccgaagacgtcttcccgaagccccgctgccccggcgcaccagctcccggtgatggggatgatgatggggatgatggggagatgtccccgaattctcctggggtcccgaggagatttagccattttcaacagcagttttcctatttctgcttaaaccccgcgggctttcaactgaggtcaccacgaaagctaaaagtacaacctaaggaaggaagagactggaaattaacatttggggtagtggagctcagaattcctcgcagcggcgtctgtgtcgcaacccgtggacgcacgtccttggaccaacactgccatctgctggccactcgtaagaactactgcgacccgctgtgagaatgggcttcgcggagaccattaggaaggtgctttattttttattttttatttattttttgctcagtaggaccgtaataggtgactgattttcttttgctgtgaggctacaagaattgctggaagacaacatttttatttcgtggaaatttgtgttgtgtttctccttggttgttaatgctttgcatttacatagtgaacatcttattatcagagctggcctgtgaggagggtagtgggggggcattgatgttcccgtttctgagtgaggagacctatgtcggggccttggtgacctcaagccgaatgctcaaactgctactgctactcctaaggttgtgccattaggagtcacacccgtttggtgatattcaaaaggatatgtcattttattctcccgtggttaaatatatggtgagaggagagcaggcatgtttatgagcccagattgtcccataaaaggctcctgtttaaaaacactccagccccctcccattactggaatgtctgatggagctccgggagatcaaaacaacaaaacaggctctggtagggtgcagaggtcctggtaaacacaccctctgctggaaaacagggagaagtttccaccagtgtagacctgcacttggtttgcctgggc

SEQ ID NO: 42554 - DNA, 752 bp, Homo sapiens
atcagcctccttctttcaccccttaccccaaagagaaagagtttgaaactcgagaccataaagatattctttagtggaggctggatgtgcattagcctggatcctcagttctcaaatgtgtgtggcagccaggatgactagatcctgggtttccatccttgagattctgaagtatgaagtctgagggaaaccagagtctgtatttttctaaactccctggctgttctgatcggccagttttcggaaacactgacttaggtttcaggaagttgccatgggaaacaaataatttgaactttggaacagggttggcattcaaccacgcaggaagcctactatttaaatccttggcttcaggttagtgacatttaatgccatctagctagcaattgcgaccttaatttaactttccagtcttagctgaggctgagaaagctaaagtttggttttgacaggttttccaaaagtaaagatgctacttcccactgtatgggggagattgaactttccccgtctcccgtcttctgcctcccactccataccccgccaaggaaaggcatgtacaaaaattatgcaattcagtgttccaagtctctgtgtaaccagctcagtgttttggtggaaaaaacattttaagttttactgataatttgaggttagatgggaggatgaattgtcacatctatccacactgtcaaacaggttggtgtgggttcattggcattctttgcaatactgcttaattgctgata

SEQ ID NO: 42555 - DNA, 1846 bp, Homo sapiens
ctgccttctttatccatatatacacacattcatattaatatagttgtttgcaatcatagctatgtatttttatggttggttttgtttttcacttcacatattgtttcctaaacagctttccctgtttctacactcgtcataataattctcaatgactgcatgatattctaacatgtcagtgtatcataatttagctaaataaactaaaatgcaacatgtaaggtttccattttttgctttggagataatgttgataagagtggcagacacgtggtctcgtctgttttgcgtctttgcttctgatgaatcatattctggagctccatctaagaatccccatgcccagattagggactgcgagcgaccacccagcgccagcgcgaccaggaccaaggacctccgcggctgagcggcgagtccgggaggggctctgcgcgtccccgccccgcgccgcgtcaccgacgtcccgctaggctgagaccggtgcgccgcgcgctagtggccgctcttccgcgggctagcgggcggtgggggcgccagcagcgcggaaggcgggcacgcgggccatggctccctgggcggaggccgagcactcggcgctgaacccgctgcgcgcggtgtggctcacgctgaccgccgccttcctgctgaccctactgctgcagctcctgccgcccggcctgctcccgggctgcgcgatcttccaggacctgatccgctatgggaaaaccaagtgtggggagccgtcgcgccccgccgcctgccgagcctttgatgtccccaagaggtaaccgcgccccggtcccgagccgcggtggtcaaggcgctgagagttcggggcgccccggctcgcgggcagccagcagggggcagcagaggcgggacccggcctgggaggccctggcgggttcccgggcgcagcacggcgctccctcggcctggccccggccatgccccggctgctgcgtggctccggggagcagtgcccgggtgtccgcggacgccgagggagagcggagccgcttgcactcagctggaggaatgtgaactggtagccgcacggagcctttccctgtgggaaatggcaacgcatccgaatttaggcctggtcatgcgaatttaggcggcaaattgaagtgccccttgccccaaattctcctttttcccgtaccctgcactccagtggctcatactctaacttgaggtcaccgggaatcatttgtggaaatgaagttaggccggctcttcggcctcggcttcccccgtttctcttcccaacccttgcagtggggacaaaggactgagtcgccctaacctgcaccttggcaggtgcccctggggaaggtggcccaaggtgcaggtcataggcaggcccgtcccgaagctccatttgactttcgaaaaattctgtaacccagttcagcgaaggattaaatcgtcaggttttaaatagagacctgttataattttcttcttctcctttttccactttaaattcaggacatagctggaaagagttggccaaatactattcgagatggtagaaatagaacagtgccccttaagatgcatcttaggccgggcgcagtggctcacgcctgtaatcccagcactttaggaggctgaggcaggcggatcgcttgagttcaggagttcgagaccaggctgggaaatatagtgagactccgtctctcctgaaaatacaaaaaattggcagggcttggtggcgtgtgcctgtagtgccagctacttggaatgaaggcaggaagatcatctgagatcaggcattggagactgcagtgggctataatcatggcactgcactctagcctgggcaacagagaaa

SEQ ID NO: 42556 - DNA, 2348 bp, Homo sapiens
caagcctaactcaagaccatcctttcctgtcttctagtcttgcccactcaaagctccatcctgcaaaagtcttaaacagtccatttcaaaagcccagcatttttaaagggtctaaggaatagcacaaaacaagatgcacccaaaacgtcaaggccatactggacaagggcaacgttagccatttttggtctggggtaattataggcagtatcttaaaacaaggcttgaaaaatgtcatgttatttccaaatcccatttcagaactttaaaaaaaaaatagcattttgagctcctaagaacgtttttggcggtaggtggccacatggagggtggcacagaggctcggcgggggagagcggaacagagctgggcgtggcagtgcctgcgagtcagcgccacgtaaccagaggcgctcgcactaatttgacctctaagagagactaagcgcagggaacagcgggtgcggacattacggcggaaggctctggaggaagcagaagtgaaggacctcgcagtcctgggacggtggggcacagagagagaaagggagccccgggcgcggcgcggtgaggatgcgagcagaggaaggacacgcggcgccgggtacctgccgggagcgccggatccaatgggaggagggcccgcgccgcacctcaacctggcagaggacgtcacgacgccaaggcggtcgccgggccaatgggaggccgtcgcgggcagggacggggccgggaggagtcggggctgggccgcgccgaggcagctggctgactccagtttagccgccgccggagaggacgggcgccgagccggggctgcggacttcggcctgcccctcacctcactcccgctgcttgcacctcccggatggtgctgactgctccctaagcggcggcggcggcgagtcgtgaggacgcgccgcggaggctgttcggggtcgaggcttcccgtcgccggcacttcctcttgcggcgcccgtgcgcggccggcccggcaggcgggatggcggccgcggctccagggaacggccgcgcatcggcgccccggctgcttctgctctttctggttccgctgctgtgggccccggctgcggtccgggccggcccagatgaagaccttagccaccggaacaaagaaccgccggcgccggcccagcagctgcagccgcagcctgtggctgtgcagggccccgagccggcccgggtcgaggtgagcgggccgggatggggcgagcgaggctgcagggccggctgcgccgagtaccaggctccaggcctttgaaagcgccgcactccgccggcctcggctgggggaggggagcccggcccctgctcccggggtggagggcggtcggctgcgctgttttccggtgaggcctggtcttgcccgctcctttagggaaagggagagggagagtccaagaggagcccgctataaacgttgatctccggagggccaagatgctgctccgggatgggcgttttattgatcagatgtgtcttagagtagctagaaagactcatccctaccaaaaagtttttaacagaaggctgctaggaggctttttgtattccctgaggatcatcacatcggccatttcattgttgaaatagcttatgccaaactgcttacccaaattcaacttggcactgcctgtgctttttgccaaatatggattatgaaccatgactctcactttttaaaaatgtgctttggctagcaggaagtagcctttaggaacgcagaggaattagtctccggcagtacagcgtgctgcagcgatgtgggatgccaaaactacatttataagtaaaacagaatcctgtattttgtccttccctgaatagatactagaaatcaactttttaatctgttaatagaattagtccttagtcacttggcagcgttttaacatttctcccttctcccagtcgtgggctttgtcgtcatttccagtatctgctccctgaatcccggccagtgtggcactcaaacccccactcccacccaggccacatccagcccatctccacgtaactaatcttcccgaacattgaattctgccatcttgtcagaagtcgtcggtgagttgcctccactaatttcagtccagcctttttaggagagtgatgttcaggtttcttctgatctggctccagctcacctccaggctttttagccaccgctttcttgctcatatgctaaagggatatgctcatctgcaaaaaagaatgtgcttcaagagccctttgggacaggctttgtgctctcttgccagttcctccctaacacaagaccttttcaaagaaaaaaaaaaaaagacctggagtttgaagccacggatcaac

SEQ ID NO: 42557 - DNA, 533 bp, Homo sapiens
tttaacattttcaacaggctgattaaaatggaaacgctaaaaagttagcattagaataaagaagacaggaagaagaggggtcagataaagtggtaagaccttgcactgcataacaatgttttggtcaacattggactgcatatatgaccaccggtggccctaagattacagtggagctgaaacattcctactgtctagtgatgtcatatctgttgtaatgtcatagatcaatgcattagtcatcctttgcacttgtgcttgtggtgatgcttgtgtaaacaaacctactgtgccaccaatcatataaaagtttagcacataaaattatatacagtacacatgtacatgataataaacaatcatcttactagtttatgtatttactatacttttaatgatttagagtattctctatttacatttttttttttttgagatggagtttcgctcttgttgcccaggctggagtgcaatggctcgatctcggctcaccgcaacctctgcctcccaggttcaggcgattctacaggcat

SEQ ID NO: 42558 - DNA, 2823 bp, Homo sapiens
attaggtatttctcctaatgctacaggctaacctttcaagacattctgttcagccaaccacttatcacaggaattaatttccttcccccaagctttgaaaaccaatcagatttgaggtgtcccaagggataagtttcagagaaagcaattcattatctaaattacatccttttaagaatgtttattttcaaacaggtagaggggaatattgcacaattttctctaatcgcttaaagctacaaatcagaacgcaatcttcaaagtgaaattacctttgatttggggggatcagcgttatagtcaaatcaacgactgtaaaagtttacttcttgtgcttttcttccactgtaaaaatttttttattttttaaagaaggctaaaaagccttaaagtctaatagcacggcattctaatagcaggaaaccacaatctgatttgatctttcatctgccaggtcagagactaggcttttatcttgcagaattaggctcacctaccatcaacaagaggacctctacaaagctacaaacactttcaaagaatataaactctgcggcgctgcgtgtaggaaattacactccaggggccagagcgccagagccaactccagaaaacccagcttcactggcggaaagaaatctacaaacgccagcggcggtgacggggaacgggaagcgcgggtggacggaagaagagaaaccgagcgcctcgccgccaaccctcgaacccgcgcgcggtcgctggagtcagacgctaatagccgcgcgctgcctaggaacggaaccccggaaccaccaccactaacggaaccagcccgcggccggcaacggcggccgttcggactgcggactgcggcacgcgggccgggcgccgggagggcgggggttccccggaggagctggccgccccggcgccccattgggcgctgctccaaacgtgcccgagtggtgacaggaataaagtgggtcacaaggcctagcgggtccccagcgaaagctctctcggcacccggtccccgtctttccccgcctcccagctgctggaatcggccgcagctccgggcgccctcaagccgcccggccccgccgtgcaccccactcccgcccctgccccgcaggtaaccccagctgccccagagggcctctcaggcagggcgggcctcggcccgaagtcccgggaaaagacacactagaacgacacgccaaacttgggcttcagctcccgccttccccacccttggccgccgccccccggccccacacacgccgccccccgctccctccccttccccgcgccctcaccgtgtggcttgcggcggctccggcttcttccctcccccacccaggtctcccgctgcggtgactcggaaccactaccccgcctgtgtccaggaggcgccgcggctcccacctccagcagcacctggggctgtgagtggcgccccccacccacccccccaaaaattcgccgctcctgtggccagctcctcctccccctcccttcccttcccctcctccaccagcccaggagcgcgcatgcgccgccaaggaagccaaccggcactcggcaggccctgggcccaccgggcgggcgcctctcaccgggagcgctcgcggcggcggcggccagatttccttcgcgctctcgctctccggggtttccttttttaaaccggcagccgcaagccgagtccgtgattgcgccccctcccggcgcatgcgtcgtcagcgaccccgcgggctcagacggccggcggaggctctgcgctcgcccctcccctcactctccctttccccagcgcggctcggtgcgcatgcgacttgccccgttaggcagcacggagccgcgccaggggatcccggacgcccgaagagactcccgcgccccttgggccgaaatctggctctgcaggcgcaccgttccctgccccggccgggaacggcgccggttactagaaagccggggaggcggggcctggtcgggtggagggcgcggccggccggcagagcgctagccttaggtcctggaggctctttggctttccccccgtatgccgggggctaggaggaggaagaagagcttcctgccggatgagggatccagaggccagaaaaggaacccgctctcccttccaaagcaaaacactgccgacgccagcttagatttttcgggtgttggcaggagactttttcccccagtggcatcattcgtgtttcctctcctggtgctgggagagaagagttgcaaaggcgcctggaccgccagtaacatcttctcccatctcctgagggagcgcggcttgggttgcttcttcttggtgggtgggcctggggagacagggcatgcgccctcggccagaggagggaagcgaaaggaggtcgggatttatttgctcatttggagatttttcccttgcccttttattaaaaatcaagtgacagtgtaatggaagatggagaatgaagcatcagaaataaaccaggaccctaatttgcatggatttcctcgttggaacaacgtgtgactactacttatcttcgggaaattacttatcttgatgcgttaaggcacatttggtccacatgagaaagcacatttcagtgcttctactggaaaagagatctttacagtcttaattcctagtaattcctatgttttaatgaatatcttttggatttgaaataaaagccatctttttctttcaaaaaatgcacttttctggccgtaaaatcctccctttaaagtaacagtcacctcagtaaacattttcaattcttgctgtatgctctgggcaaaagaacatcaaactgaagcacttattca

SEQ ID NO: 42559 - DNA, 991 bp, Homo sapiens
acgcccgtcggttggcgccccgcccctccgcgtctattggccgctccctttttctcccatcgctgcttcttccttctctacgcggtcaacttccggcgcggagtttgtcacgtgcccggatataggaagtgttgggggaacggccgcttcccgttcaacgctttattgaggggcgtatcctagtggcccccatccggtctccgttttggaagacccgcctcggcacagccaggctcagtccggccttgcggtaagccttcggccgcggctgcccggtagtcccggcggcggcggacagacgagctgacaggcaccagggtctaaggcggctcctcagtccggctgctgtctccacgcctggggtcgggcaccgctccttctgaccttcctttccccgtttgtcccggtaagacgaagtttggtcagagcattctccagtcccttgtcctcgggtctaggagaatgcggagctgggagggcagtcctcacgggccccattacggttccgcccatcggaaccagattttgtttgtgcaaaatgaccctgatcgtaagctctttggcgtggtccaggagaggagagcgtgactgtgccttcctctttgtccaaattcacatcccggccccccaaccccaactcccccccaccccccgccaaatctcttaagtgtatttctctatttccttgcacagttatatcttctagatggcaatgcttcatgcattaatatatctcagcagcatacagggcccaatgcacacgggcactcacactgacaggctatttgtcacacagtgtggtggtccaactgagctgaaggaaacaaccagtacagagtaagcagtggatggctgcctttggaacgtggtcagatatgggttctcagacctggagaataattttagaggacctctagggatttatttactgactttcagaaaagtaccgtaaagactgaagagttaatcactcgactcttaggatgtaaat

SEQ ID NO: 42560 - DNA, 1925 bp, Homo sapiens
tttatggtaacttttcatgccttgaatcgtggtttaatttgcttcgaatggcttttattttttttaacatttcagggttgaacattctgatgagtcagtgattcagtgattcacaagcttgctgttctgtcttcaaatattatgcatttccagatgttatttattgtgtaaggtgattttaaaccagtatatttcaggacagtcatatagaaaaatacataccctacctggatctgcctcattaagaaatactaccaaaatcagtgagaagagtattactgtttttgaaaatgaagtgtctaacttaaaaaaaaaaaggcattcaatttttcaggccataaaacaagagtatagacacgttcatgtgtataaacattaaccctaactgagatcgattttaagaatactgagaagatccttaaggatctcattttgaaaatcacttgctatatacgtcagtaactcttgctttggtttagtggagttcagggaatagcttcattaatgtctacaaacttgttttatggaccttgaaattacagcctttaattcccattaaaaaaaaatgtctctaagttttgagtgatgttagaaaacaaataaaaaattattaccaccccagtttaagagctcaataattaagtaagactattttgattataaatggtagcagtggcaacttggtagtttttattgttgacaattgaatacgtaagttaaataatggggctcctcagcagaataaggtttgtaaaagaggacttttcagcagttgaagtagattgaagtttttatttggccttttttttcattcttttacttgcaaccagctttttaaaaaagaatctttgacttgaatccttaaatgctggcttgaactgttattttgtgtaattttttacttgcctcaatcttgtcctttctaaccatgttttgtgactaatcctctgtgagggagtgtctgggtaaagcttttgggccttaagtaacataactaggctacatgcatgagtcacaactgacctaaatataatccccaggaaatgattagtttgccaggtttctcctctaagggttagttagtgctgtttcttaaaagactaagagaaattagaaagataaatatatttgtagtcactatcagaaagtgaataagaaaaatgaacacggcaaatttagcttcttatggatctttccacttggtagttgatttggctgtcttttgaactttaacatgaagttcaaatgagatatgggtagtattttaaaaatttaagcctgtttacttttctacccagctaatattctttgcttactttcctctgcttttttcatactttttactctccagaactgcctaaagttacagaaggtgcgtaacaccttttcttcttctattccatatgtttttattagttgcctttgttatataccgttggttgtatgttttatgaaatgatgtactgggacaaatttattttaaaaatctacatagtaataaaattaatgatagtatttattattggctttcaaggacatatcattagaaaatacttctgaagcagttaattataatcatgtaaaatatttgtttaagtctacttgtgtaaggacctgtacagaatgatttgggcagtccctgccccctagtggctaataagctgtcacacatgacagttgaactttttcgcagtgaattaaatggactcgttgaaaggacaaggagatcggtaatatctctctaaagaacttatatactaaaatctgtaattgcctgtaccaaaagttttagtcttctttttgttctgggacaaatgaacgtatttcaggtcatgctgaatgtaaatattcattttcctataaaataatgaatactaaaagcatccagagtttgtggtttaaatcatgccccattaagtctgtga

SEQ ID NO: 42561 - DNA, 1210 bp, Homo sapiens
ttgatggatgaattctatggttctacagagagcctgcgggagatactattgtgggataattaattgcattgggtggttgtcagggaaagttgcagagacaacgtgatatctgcgtttggggattacgtggtgagcaggcgttcaccttgcaggtgaaggctactccgctgcagggaccggtactggggcggcgtttgttccccgcacgcagtaggtgatccacacctcccgccgacaggaggaagaggatgccagctcaggcaccagctgaggtttggcatttgctggccgcgggcgccgacctccagggggcgccgtggcctcgcgctgtccgggccgttgcatttccgggcactggggctccgccatcgtcgccaagcgcgtccccgccgcgagccgctaatcgtccgccgctcccgttaccggggcaaccgcggcgcctcctccgtgtcggccccgatcgtccctccgcgccattttcaaactgctctagcgccggagcccgtgcctggacggaaggagctagtgggggactcgaggcctgagggcaatgcggctggaggcggaggcaacggcggctggagctgccggtgagtccggatgtgggagccagagggccagctgcggcggtggtggcgccttcgccttctgggcggtacccgcgggccgggctcgggcactgccgggaggccgcgcggccgcgggaggaagtgaggccaggccgggtcagaccgggcggggaggggcgcggggactcttcccacccaccccgctcccacacccccttcccgtcaacacccgacggtaaagttgcaaaccggagattgggtggaggagagcttgggccgactcgtcaaggagcgtctgtgtgggccgtgcagacaggcttgctgttgaccaatggatagatttaaacattaaaatgccttctcagtgtagcagtcatccatgctctttgtaacaaaaatgtcgcaaagcgtaggacgacagcctttaattaacctttgcccagctcctttgaagcctctccactgctttccagcctttactactttgagttcaataagaaaggactctgagataaccacagctaacgggtttctttgttgtcgtttggggtttcttgtttatcttcttaagccctgtgcacacatacatacagcattaaatgtactggttttgagacgccaacccccagagttaagtagat

SEQ ID NO: 42562 - DNA, 1587 bp, Homo sapiens
tcgagaccatcctggctaacaaggtgaaaccccgtctctactaaaaatacaaaaaattagccgggcgcggtggcgggcgcctgtagtcccagctactcgggaggctgaggcaggagaatggcgtcaacccgggaagcggagcttgcagtgagccgagattgcgccactgcagtccgcagtccggcctgggcgacagagcgagactccgtctcaaaaaaaaaaaaaaaaaaaaaaaggaaaaaaaaaagcaaactctggtaagcagattttacatgtaaaaggaataaatttacttgctacaactgtagaagctgctatttagtcaacaaagatcttaagagtgtcagcaaattcaattgctatggggcctctctctaggccactggctgttttaaaaatggataaataatctagaaactttattttcccaattccccggcttctaaatttacggtatgcaacgagtaacaatgcaatttacagcttcctaaacatttcttcattgctcttcgaaaccactctagggggtagctgagcgcggagcacacttatttccatttgaatggaggggcggaggctagtgacgcaggagtgtacacacaggtcagggttagtctgcaccacaccagcacgccagaccccgatgtatcaaatccgaggtcaggcagtggtcctgaagctgagcaaatgtatgtggaagcaggctcaggcctagcggcacttcgcctccttcacacagacccccgccggacaccgcgccctgccgcgactcacttagcaagtctcgcggattaggtttgatcgcattcggccctttcccggatagctcgtcgcggatacttctcacagcgaagcagcagctcccagaagccgtaaagctatcccagagcgaggcaccatacgtaaatcttccgcgtcgctacgtgacgtcagtgcgagcgaccccgggccggctgcgtggagctggcgctgcctctcctgaagccgaggcgctaacttgagtgaagaggtctataggctttttcacttttggttatctgctcaggcgctccttggggtcgcgcatggtctcggacagggtttgcaaggacttcggagctaaccagtttggagccataaccctttcgtacttgccaaaaaactctgggcaagactcttgaattttgagccgcagtattctcgttcataaggtgagaataaaaacatcacctagggttgatgtgaagagagatgaaatcattgtgaaataggagagttattgctttcaaccaatgacattttctggaaacgtgctggagatatggctgcagcagtgacgcctgcaaacgacgttcctgtcatcatgatgctgacattttaattgggaagcagattgaaacgataactaaggaatttgacaggagcatttagtaggacctgtaaagaaattaaagcaggtccgaggtggagttttgtaaactatatgcctgaatagaactttctgtttccaagggaattgttacagttggagacatgtcaattattacaataagcgtcaagggcaataacagaggtgttttaaagctactgtctggtggcagaataatc

SEQ ID NO: 42563 - DNA, 926 bp, Homo sapiens
tcccccttttgaagaagggagttaatttttgtcatgttattaccaacgttttcattcattaggcaagacgtctaccaatgaatcttttccagatgcactgttccctatggttggcttatttccatttaatttatgtgagatctactaccagtagtcattctcaacatcaactagtcatctttccctgggtctgaagtctagcatcctcaagttcccatagcgataactactttcaaacccataatctgctcaatagctctgcccttgcaaacaaaagcttgtggtggttggaggccccgcgcgaaaacctttaggtgttgaaggacctggactggccgccacgccacactagcctattacaggagcagccacaggctccgggagactagaacccgcctgcagtcggggaggagccctgacccagctagaccaagcaaaccggcggtttacaagctggccagcctctggatgggtgcacacaccggggggcggggagggagagagcccctaaaaggcataagtggctgggagggtgggcaggacaggctaaagttcatggaagcgaggtgcccctcgtgcacgcctaggcaacccggtcgacgccacaggcaggtactggcttaggtcggagaggtcggtcctcccgggccctcgggcgctcatgagaacgccgactgcgggaagcggctccgagagatggagacgcacgcccccgccacccccaccctgttgctcaccggtgctgcagccccacgagtcccagagtgatcacatgcggtacatccagctgcgtgggccactctcctgaggcgatgcacccgaacacgccacattcctctcggatccccaactcctccagctccatgtcgccgccgaaagcacgtggaaggacctgccgctgcggccaaggtgtaagcaccaaccag

SEQ ID NO: 42564 - DNA, 1706 bp, Homo sapiens
tgggagtaacggacttaacctcatttctctttcagagcatttagccttcatatgcccttccctgcatgcttcccccaggccgtcaagacttggtacgctccaacttctgagtcgctcccgcagccgagaaggggccggggtatgcgagcttccgcagagtggggaggggccgccagtgcgcgccacttttcgcctgtccgggcactgcgccagcgcggggcggcccggaggcggggtcgcgtctctgcgcctgcgcggcgggaagccagtggggcgttgtttcgtccgatatccgcgtttcagtctccgcccatacccctccgggttaggcggctgtagcggagctcgaaaagagtggcgcagggtcgcgcggccccgcctccttccccgcccagcgaagctctctgaccacccctcttttctagagttctgcctcgcttcccggcgcggtcgcagccctcagcccacttaggataatggcgacagctgagggtgagtaacagggatccgggcccttcacggtctccctgacccccaggccgtgagctcgcggccacgtgcgagccgcgaaactctgtcccgcctccctgcagcagcgcctctaggcagccgcgcgggcgcacacgtggcccaggcgctcccgggcctccccgaactttactgcctcggggatggggagaaggagcaaagtagaggagaacgagaaatggccaaggggtggaaaggtgcctggaagtattatttataatcaatagctattgcaaaatacaagcaaatcagtcttgattcgtcaaaacctgagtcttgctttgcccgttaggttaatgacctttctaagaaggttaataattgaaacttttgaaagacctgtctagaggccgggcctggtggctcacgcctgtaatcccagcactttgggaggccaaggcgggcggatcacctgaggtcagtagtacgagaccagcctggccaacatggcgaaaccccgtctcttactaaaaatacaaaaaattagctggacgtggtggcgcgcgcctgtaatccccagctactcaggaggctgaggtaggagaatcgcttgaacccggaggcggaggttgcagtgagccgagatcgcgccattgcactccagcctgggcgacaaagcgagactccgtctcaaaaaagaaaaagaaaaacctgtctagggggcgtgtgtgtaagtagtctttgatgccatggtgtgtgtgtgtgtgtgcacgcgcgcgtgaagtagtctttgatgccacgatagcttggggtgtgtgtacgtgcgtgtgcgtgtttaagtagtctttgatgtcatgggtgtgtatgtgtgtgcgcgcgcgtgttgaagtagtctgattccatgatggctggggaggggggctgtttttaggtagtctttgatgccatgatggtgtgtgtgtgtgtgtgtgtgtgtgtgtgtgtgtgtgtgtgttcgttccagtagtctttgatgccacgatggctttgaagaactccaaaacctttaggcaaaaaagttgcactatcaggaaagattgttcttgctatttatgctggaaaaaaacaaatgctggttttttccacacacccagttgctatatgtatagtgaggcaaattgcttttgtggctgctgggtacattcttttccacatagaaagtaactgaattcagattttaaaaagctgtagactcaggc

SEQ ID NO: 42565 - DNA, 2663 bp, Homo sapiens
acaggctgcagaccagtacaagggttggggacccctgttctaagaggatgcaaccagaaggctgcccagtctgcaagatcaaatgtttcctcaaagtaactttcaacgtataaccagaaagactgaaagacaaaaagtagttagcaaggccgggcacggtggcttacgcctgtaatccctgtactttgggaggctgagagagggcggatcacttgaggtcaggagtttgagaccagcttggccaacacagtgaaaccccatctctactaaaaattcaaaaattaaccgggcgtggtggctcatgctacttgggaggctgaggcaaaagaatcgctttaacccaggaggtggagattgcagtgaggttcatcctgggtcacagagctagactacgtctcaaaaaaaaaaaaaaaaaaaaaaaaaaaaagctaggttcctgagggacacaggaagtagtagaagttgtaaaggtcatgacgagatatgagtctgaagagcaggccattcaatgaaatacaacattcacatcaagtgaatcactcacatcgtcttggtgtggtggctcatgcctgtaatcccagcacttggggaggctgtggtgggaggattgcttgagcccaggagttccagaccagcttgggcaacacggcaagatccccgtctcaaaaaaaaaaaaaaatcactcacatcaagtgtacccaacagatatccattcccttcgtacatctgaacacatcttgatattaacggtcgcaagcaaaccctaatattttatatctctagaacaaatatagtatccccatttcacaatcgggaaaacagactcccagaagctaagtaacttgtttattgtcagacatctagtgagtcgcagagccagggaactgaccacgggcattttcaccccattacccttccagcttattgccgactgctcccgaagggagcgaaaaggacaggcaaagggtttcaccaaaccctttgtaatgggagattcttgccttcttacctttcctcacgtttgcttctctgccagaatgtcttcccgcactttccccagaacccaagttctcctaatcatctttcaagatccctttccctcaaccacagatgagccgtgcctatttctccttcaaatgactccctatggcttctagttggtagtcttttatttaccacctcatagtccttttatttatatcccataaatgatcgtccggccccgcaccgtgggaccaggacgctgcctcgaccatggcggtctcctggaaacaggctgctttgagccgaaactggtgaccgtttcccaaccccgtccaggagtccgacgcctcttttctccaggccaacttcaagtgaggtgtatcaactctatccgcacaaatttcttgccacgagagcagaagattatgatctctgatgctgccttagggctgaagacactcccaactcggcgacgcttagcaatcatcgacttcctcctcctcttggctgcctcggagatcctgttccggggcagaggtctccccgccccgcccctcgtctcctccaagatggcgagcggcggcagcgggggggtgtcagtacctgcgctgtggagtgaagtgaaccggtatggccagaacggcgacttcacgcgcgctctcaagaccgtcaataagagtaagtgtcggggtgggcactggggcgggcccaggccggctggaggatgcggcctgtttccggcgcgcgagaccacctcgcgcgggaggcacgggaaggggagacccccgaaacccccccgtctattgtccgcccggctcgggccctagcgcccggaagacgcaggtctcactcctcggcttcaccaggccagcctggggtccctggttgcttacagccacgtgtacttctctttttaccctccgcgggaagcgagggaaggttttaaagagaccgcagctcccggagtccatttcaaactgttttcttatttgactcctttgctgctttatttcacaaatattccaaagtgcctccttttcttcttcgtcttgagcgcagtgatcaggactctattgctgagggagcttgttctctttggccgctaaagggggaggaacctgcttgggacacgtagtttagaggctggtgctaaccaggtggaagctgtacgggttctacggggcgagaggaaagggctggatctggatgtcaggcctgtcattcccatagatgagatctcttcagtgttattaagttaggaaatatgtgtgtggaagcaccaacacttgaaataatgtcggaagaaaagtttggcctgtttttttgccctgtaagggatgatttcggtttttaccgcctttggtgtgaggtttaattcatcatattcttttgttccttactacatacctggaatatggccatgctgcttaatgttctcggtggtgcgcagttcttctctactgaagatacagcctgtgcatgttagatttggaaatgtaattaccaaggcagggcttagctgttcagagtagcagtaacctaaaaggtgtgtcagtaacatgcaaagctatctaagtaattttcaacactctagtactgggttaacgtgaaaagtagtgattgtgcccacagtgcacttttggtgatttcagacattgaggaaaatagctacgaattag

SEQ ID NO: 42566 - DNA, 646 bp, Homo sapiens
gagaagaagagtgggaacttcctcctcaacttgctgcccatagagaagcacgcccctcttcctgatggctgtgggaactaggtcaacctggaccgctaagtttgaaccctatcgtggcagcttttcaaatccctttcctggactcctactccagaaggcaaaatggtttcggtttgtctttatttcccatcttttcacccaggtcctcaactacatgctaatccccgccggaccatcgttcagttttattcacagaaacggtgccttcaagaaatcaaagcataagagccttcggaagcagcatgtaagtgcaacgtaactttcccgagtttggtgacgatgaatcgatgaatcgtagactgcaggctgagccgcctgagctgggagcagcagcagttctcagggagccactgccccctggtgtctccacactggccaggaagcatttttggtcatgatctgtaagagattattgctgggctctttctgactcgtgccttcatctcatggcttttaaaatcagacctttcttcctcctctcccccactctgatttttaataagacccattttattataattagcaaaatagtgtatactccttgaagaaaatttgagtatgattatttaatttcattaatgtttta

SEQ ID NO: 42567 - DNA, 2304 bp, Homo sapiens
cgggcggctccccctagacgcgcccccaggcgagctggagactggggcactccttgcttggtagaggggcggggcgcgcctagcggccacgcgcgcgggcgtcggagggggcgtgtctcgcgggcgcgcgcgggcgtcggagggggcgtgtcccgcgggcggtggcggcggcggcggcgcggactgggtgcgcggcgcagcgtcctgtgttggaatgtgcggctgccgcgagctcgcggcgcagcagcggagcgagcgccgccgaggcccggggccccagaccctggcggcggctgccgcagccgagacggcagggcgaggcccggaggcctgagcaccctctgcagccccactcctgggccttcttggtccacgacggccccagcacccaactttaccaccctcccccacctctcccccgaaactccagcaacaaagaaaagtagtcggagaaggagcggcgactcagggtcgcccgcccctcctcaccgaggaaggccggtaagtggggcgctgggctgggggctcggtcagggtgggggagggccgcccgggcggcggcagtggcgggacggggagggcgcggaaggacgcggagtcaggcgctgtccagggctgatttgcagatactgtggctccggcggcggcggccccgccgggcgggggctggcggccgagcaggatcgggttacacagcagccgcccgggggctgggggcgtttgttgggagcagcgcgtcgcctggaccccctccccactggaggctgggacgccgcctccgcgctggcccggacgctccaccgagtcaggtcctttgaggccaaggagcggagctgctcgggcccgtagtcctgaaacttcctctgcttcctcctcctgcccccgggtcccaccgcagccccgcgccggcccgcggccctcctggccccctcccccagggcctctccctgtcgccggaaggcgccgttgagtgcggccgggcgggttgagtcagccccggggcccgggcggttccgcctgcggggctggacagcgatttctgcgcttcagccgtccggcgccgctggcccccgcgtccggccacccgaccgctggagctggcggggctggggcgcgcgtcctgccgggcgccgtgggggagtgaagttcgcaaacttccggggcgcgggggtggcggctggcccgtgtgggggccccctccggcgctcggagcccgacgcctcgcgagggcgcccgcggagcctccccggccctgggcgttgggcgagccccggggcggtcggaggggcccgggggcggtcggagaagcccggacgccggctgcgcggtaactttccgtcctctcccgggacgggggccctagggctggggagggggctgcctggactcggggaggactggttccggccaaacagcgcctcgagcttgatcccctcccccgttttagtgttggagagcgcaggaaaaggctcaggacgagtgtcggggcgactcccgcgagttggtgtgtaaatgtgtgcagtgagcgggccgaggcgagaggaagcgagagcgcccgagtttgcaaagagctgctttgtgtttggtattttgagaaaatggccgaatgcctatttcagttaggaatgccgccgccgaggcaggcgctggtggcagcagcacggaggaattcgtgcagcacgttgggctttcgggctgtgcctggacggtcttcctaacaatcgttaaaattccatttggggtggcagttaggggttagggagcaattagaaaagtcgatgttgggccaaattacccaatagcttgggctgttcagccccgggacagccttcgccctctgttttctgtgatggcatttgcttccaacttttgttggtacgtagaactaaaccggtttgtgtttatacacttgggtgaagcgggttactttttgtattttcggtttaactttattttcttagaacttcttactttttttaatttgcgagtgaacacttcgtttgagaatggcaccttttagattgagaagtaacgtagcatctagaaagcccaacttgttttgaagaaggtgatcttgtaatggcttccactaggcaagtaggccaagtcaagcacaatgcaagaaagttgctgattgtcgagttgagttgcacgatgattttattcgtattgaaaagcttggaattcagtgttgtggaacttcagcctgcagaaaaataagcttattaatttttatttgtgaagttttgaataaatcaaacttcctttttcacaagaaaaggggtccataaatgttttttcttt

SEQ ID NO: 42568 - DNA, 1638 bp, Homo sapiens
ttgccaggaaacgaagagggcgagcctcctaaaactcacctggccaaggggagatggtggctctgtcgatggcctcggagcccttggcagtgcagtaatcggactccaggagcgtgttaaagagagtggatttgccggcgttggtggcgcccactaagtagacgtccccacggtagcgccaggagcgctgaagggcagagatcaactcttccactccatagccggtcttggcgctgatcagccgcacgtccctgaccactgtgcgggaccagttcggcggattcggattctccccgtcctgtggctcgtccttgacggggcgctgtggcccttggtggccaggggccagcaggagcccggcgcgggcacagtcctcccacagtcgctcccgcagcctctgccggtagccaggagcatcctggggcaggaggtccactttgtttcccagcacgatcagctgcttggggcccaccagcgcgggcaagtcgggcagcagggcgtcgggcaggtccagcaggtccaccatgtagagcaccagggaggggccgggccgccgcaacgcggcgctcaccagctccaggtactgctcgcggctcacctgcaggcgtagagcgcgccggtggtgcgacagcagccagcagcgctggcacacggtccgtgccagcccgccgtctgcctccgccgtgcggaggaacttctctcggggcaggtagccgggcactccggcgtcctggcagtgcagctctgccccacagcccgagcagttcacgccgctgggcggcaatgccgggtccgggtgccccacgaccgggtgctcccgggacctggcccgtaggttttgctgtcgccgctcctcccgccgctgctgcctctgtcgctcctcctcctcctgctgttgctggagctcctgcagctgcttttcgcgggtgggttgcggctccggatccaggatgtactccgggaacagaaaacgctcctgcatgtcaccaccttctccaaagccctccgtgtccacggggtcataaggaagctcgcgtcccagactcgatgagtgctggaaggaggaggcggcagcgcacctcctctccaggagcggctcccggaggccatggcgcgctgccgtgggagcggatccacgaaggaaaaggctcagcagcctgaacggtaggcgagcgggcagcatgaggaagtagctccaaaggggcggagccaccagcgcgcacgcgcactagggtccgaggcgcgcatttgacccgagacgaaagcgcgtgggtacttgggagctgtcctggttggttttgcgtctaatcccgtcagttctcgcgatttaagctctgagactgagaacctacttaaagctatggcaaaggcactggaggattgagctaggtgggcagaaaagagcagtgagtgttttgggttttttcactttcaggcttaacgcctcactgctagcacaagccgcccttaataaatcacacttaaaaaggagcttccggggtcgggcgcggtggctcacgcctgtaatcccagcaatttgggaggccgaggcgggcggatcatgaggtcaggagatcgagaccatcctggcttacacggtgaaacccccatctctgctaaaaatacaaaaaattagcc

SEQ ID NO: 42569 - DNA, 1344 bp, Homo sapiens
gcagttcgagaccagcctggccaacgtggtgaaaccccgtctctactaaaaatacaaaaattacccgggcgtggtgacccttgcctgtaatcccagctatttgggaggccgaggcaggagaatcgcttgaacccgggagacggaggttgcagtgagccgagatcgctccactgcactccagcctgggcgacagagcgagactccatttcaaaaaataataaataaataaaaataaaaaatagcttcgtgttttggtccttataaaggcaaataaattgagcatcccaatgttgcggattcacaggacgaacactttttaataataagtatacctggttttgttttcaggtgtcgttatttgtgcaacaacattgaaaaacaagcagaaataaaacattgacggaacggatacgaccgcagattgcgggagctgtcctctcaatcagcccggcagcggcggcccacaatttacgcgtgtgcaaccctaaccccggcccaagcttgacctacaatttgcgcaggcgcagatcctaactttggcgtccctgtgggcggcctttggtgtgagacgcgtggtattctgggaacgtcggagacggaagttacttcgtctttagctcctggcgctgctggcttctgggcggtttttgtcttttgatttcaagagttaggagctcgagaaccgtttggcaatatgtacgacgcggatgagggtaggtgaacgctcaaaacacacgccgtggcggtccatttaagcaggaaagcgttgggaactgattggattgaggatttggggccttcccatgcgccggctgcacagtccccagccttgttcccacacttaccaggccgggaacgaaactggggtagggagaggcggagggtgcagggaacatagtgttaatgttccaggttacgttcactgctgctctctgcactttctcgttccgttagatctgatcctcgtttcctgtggtgaagtagcgtgcagaatcgtaagataaattacgttttgaatttgaagcaaagggcaccctttaaaaattttccttaaagccacagtcgacttaacgaatagctcaattgttgagtgtcagcctgtgtcaggcagtgtggaaggtcctggaaatattccgggacagagaatatcggggggtgggggtggcgggggggactcggtttagtctgacatttcttcatactgtttgtaagtcaaagtaaattgtcttaaaggatgacttttaacttcctcttctcacaatgtcacagttctcagatgatatgtattctgctgcactgggccaatgtataatacctgtttgtttgcgcatatggaattcttag

SEQ ID NO: 42570 - DNA, 301 bp, Homo sapiens
aatgagatggatatttaaaacttatctaaaccctgtggtcttcaaaactgttgatgacatcttcccggaaactcactcagctttctagcgacatcactttcacttgatttttcttatctgacttttctcattttctttcctgttcacattctccttgggtgatctcatccattttccattgtttcagttaccatctgtatgcggataacttctgaatgtgtatacttctagtttaaaatctggggtatctaactgccactagccaactaggatatctcccaggctgcttaaccttgtcaac

SEQ ID NO: 42571 - DNA, 1003 bp, Homo sapiens
aggtaaagaaagagaaggtaagtattccagactatgactctgagatttatgtaatttgagtgctgaatgaaatcccatatggatgagaggacattccaactaaaaggtggaattgggagataatacagagacctaaaagaatttcagcatgccagacttttaggaaacattaaagattttgtatttaaatgacagtggatatctactgaagttttaaactgaggagtgacacatgaggcctaccttttaagaaagacactctaaattggagagatctggtggcccaggcagggtgtttgggggaagggtagatgagtaaatatggacaaaacatttataagggcatgctgttttaaggtcagagccttggaaataaactttcatatacataaattcatcaggggaaaattcaaattttctttctctcaatcaaaataatgtttgtacaacagttctaacccaaatcagagttatctgctacttcccaggcattcctctagatgcagtcaccagcctctggcagttggggacagccctgtgactaattgctgaagaggacaacgtaaacaggaaagactgacatctgtttcaaccctacccacctgtgctcctaaatgtttccccctctcaattggctggatgaatgtaaatttaaaggcaatcttgaaagccacccattgaagttggcaaagcccacattaggctgggtgtttttatttttactttcagtattaagatcgtatgacaatttttactatgatttaaacattagaaattcagtggatatttacaattgcagttaatctgcctaaacacaaaatattacaattcatacaagtttagtttaacgtataaaaacttgaatattttaagataacagatcattttacatttgtttcctgtatgctattaattttcaattctctgcacagtactttgttagccgtgatgactaaacacttcaccatgctgctgactttcatatgagatatggtagtacttc

SEQ ID NO: 42572 - DNA, 751 bp, Homo sapiens
gtgcaccataagaattatataacacatgggttcggagaatgagtgcaaggttttattgagtggaagtagctctcagcagatgggggagccagaaaggagatggagtgggaaggtggttttcccctggagtcagggcactcagtggccaggctttcctccagctgccccagccaaactccacattgttctgccggttgatgacctgccacactgctggtgcctgccagtgcctgtcagtatgctcttctgccagtgtgttccttgtgatatccagccgcttgtgtctctgccagctagggtcacagcacagggttgtggcaggccagggtagtcttgggaaatgcaacatttgggcacaaaaacaaaaatgcctgtcctcaactagatcccagggcacaggcctcggggtggagcccttaccaaggacccacccttctctaccaagcacttccctgccccactcccatatcataagcactaaacagataagctcaaaggtattttaactagaaatattatatgacttccaccttactgaattatatgcatagtatgtaaaaccttgagataaggagtccatctgtcaattaatgattcatctaaaagattgttactgaacaactagaatgggccaggcattgctttaaaaaaggaatgtaagacaactatttgcaaacagtccagttgcaggcaagtatattatctcttttccatgccatcttaacatgcagtcatttgaatattaatatat

SEQ ID NO: 42573 - DNA, 591 bp, Homo sapiens
agttgttccttagctagagtttaattgtacattggctctctctgagtttgccatacataagttattgaagaaaatttagggaagcatatatctagtggatcaaaaccaacgaatacacattgtgaatcatctaagcgtcttccaaaatttaattatgtttcattcctttaaatcactctcatattgtaattttctacatatcacaaactttatgtaaagattgtcaacacccacaattgccctgctgccaagtccttggtcagggcagtgacttttcctgccttcgtgccccagctgagcaaatgagctacattccccagctgcttagcaaacactgttcacatgcagtgaggggacggcctcagcagaaggagccagctggcaaacaccctgccaaggggcagcttccctttgcctctgcctttaattaagagatggcaatgagcccatcatcacacggtagcagagaagcccaatgacctctattagagcagggcaatcacaggcagaaatgccagctggcaaatgcatgtgccctggaaagctctgccacctgtgtctggccaaaagccatccaataaatggtggtgt

SEQ ID NO: 42574 - DNA, 1568 bp, Homo sapiens
tcttagaaggggagataaattagaaaagaaatgatacggatttttatatagtaaccataaccaaagtatgaaatatagaatagtgaacaccaaagaagtccagaaatatgtaaacaaaatgagttgtcgcccccattagtcattcacagcttgtaccttttaactgatagctgtctttcagaagagtttgtcaataacatatgctccataaatcagcctcaagaactgcataaaaggccaccattttgacagaagaactgaaaacgtcaaattatttcgagacgtacttgttacataatctgtttctcccaactaccaagtgtgacgcaaagacacacttttaaggcgtttcaatacttctaccatggggagaaaagttatttggaggcctaggaactggagctagactaaaaagcagaagccaagatcgcgccactgcactccagcctgggggacagagcaagaccccgtctcaaaaacaaaaacaaaaaaaaacccagcagaaatcacaagcacctctcaagagtaagacgtaggcacagacgaaatgacgacatgaaaacttaagaaataataaaagtacagtaaattaactctggttatcgacacacgatcacacttgatttcaaaaattcctgcggctttcccactgaaatccctcagagatcacagcctcagcctagcatttccttctccccagcctcgggcgcccgtgccccagccagccgctcaaccactcgcctggagcggggggcctgcacttaccagaccggacgcagccatgttccggccccgctgagccagcgcaactgtctgaggtggaagcccacacggaccacagctccaggaagccgagcaagaaacgaatcgccggaataccaggccgcggccaagcaataaccttaagtctcaggcgactgccgcgagagctgcgatccggaaggcgcgcgctaacaacactcccccgccattggctccgccctcaacaaacaagaacgcttggcctgtgcctgggtttgaacccggagacacatgcgcaaaacgggccgcgccgtccaataggaagcaagccgttagtgggctcgccccttcatgctccaggccaacggccctccagcctgcagacccacccgcccgccctacctctagccgctctgctcttcccacctcccttcctcagcgccgcgcccgggacaggcgcgagactgggcttttattaggaaggcacgatcctgggaaccgctccttgtgcccaatgtaaaacttctcaacagttctattaaggaataataagtaatacttggaaggatgagaggtagaaattgcagacgactttttttttaatagaatctttttttgaagagatttttctaatgcagattcgtcagccacgcccagcccatctaaccatcatctctgaaaataattgaataattatgtataataatggtgatgatggcttgtattctttttcaagtatgtgggcgatatttttatgatgcattgccaacaaatgacccacgtaaatatctatcatttaagtatgatgcactgaaaagaattctata

SEQ ID NO: 42575 - DNA, 2491 bp, Homo sapiens
tgtattctgacagtggtggatagaatgtaaccacttgctttattaattatgagatgattgaaagaggaactactaaccaagaaattggtaaaggcctagcacaaatattttccccctaattttacaggggcgggaaagacctgaagaacttcaaaaccaagtgggaaataagaatgggtaacttgtgtatttttttttcctggctttttttttttccttcttccgaagtcaacaaaggcctcagggtgtccagattgctactgattcattcttaccaagttccttctggtaatagttttcaaaagaggatctcagtggaggtgcacagtggcgctcctagctttctttttacggaaaggaggaaaggtgcttggcaccagtcggggaagctcacgccaagtgaccgagaccagaactcgctctcgaccggagccccccaagtctggtgacttggaggaaggaggatcccgaatcccagccagaactgagaaagccctcaaaggtgcggaaaggggacttttccctcaggaaagccggcaacagcagaggccctagcccacgtcgccacacccactccgcgcgcgcccctcgcctcccagggccggctctgctcggccccgcggcctctcgggcgcccccagcccgccggaaagaaagaagcagaaacccggagcctgggtcccacccgcgacccctcaccttcgcccttctcgtcctctcacctgccagtcccccaggaagaacaggacgcctcttccccctgatgggcggccacaggctcggatccttccattgccgcctgagacaccgccgccggctactggaaggtaggaaggggcgggaccgtgggggggtcaaggggcgggcggagacgtcatcagagggggcgggcctggggaagctaggagcccggcagcgccttcccgtcaaccctaggggcgtcctggtttccggtttgggtgtggccgcatggcgtgctgtggtgcaggtggccgaagggggcgttactgttgcgactggcatccgcatccggcagatgtagatggaaccaaagtccagaagttacgcgtcacccttgctctacagccaaacatgcaggactctagtaacccgcgaaatgatgggatagcgttgcaaatccttaaaagagtcttaacggtaagaagaggaaacagctttattttataaataaactgaaggctgctaatagctccagattgtcagtgaggggataccacttaaagatgttatacatttaataaataattttgggagtccactacatgtgaggcgctgcctcagatttaatagaatcatgtgacttttagtgccatagatgtcgttagatcatccagtttggtcccttaaatttgtgggtaagggaaaggaacttccggtcagtgcaagtgacttggtcaaggttatagagctagtcactgttagattaccagaacacatatctaaaaagttctcatataattctttttcatttacttccgtgtcacctttcttagaaagcaaaaatgagttggacacaataacattaggatttgtctttcactaaataacactgtatatttgaataaacatctgcaggatttttaaaattagcatatactttgggtattatgtaattttctgtgatgtatcatatttttaattagaaatttttcctctcatatggagatgagggtccaggcaaaactgtattatccttcgtgccctctattctcttcaaaattgcacatcttaaaatacctggaagctttatgttgctcacctatagcattatccgtgttcctcaatccagttgtgaaccttttccacattaaaatgttcttgatctgtgttctattctttcaaggctctgctctagcactaagataatgctacaggactgaagataatgaaaaagattgaagaaagcagaaacagaacaaaaatcagattatttcaaagtttctttccttgtaaaggttaaaacagagcatacttccttattatgcccactaggttaactagaatctcctgtttttttaaaaaaaactggctcattttttcaaaatccactttaattacatggtgcttagcacaagcaactccattctggtttgatctgatggggcctagtgtagaaggctaggccaaaacaatggcctgccattacccacgcttcttcatattttaacatccatgaatagaggatgaatttttaaaaaataaatacagaaaacgatgcatcttaaaattgagggcatgttagatttgataaaatatggtgtgaattatttcaggcatgtaacaagcaaccagatttaacagattttaatgttttgtcacatatgtaaaatgggaaagaaaactaggcgatcacagctttttgacagtgaggctttatgtcataagaaagtagaatgacatattgaggaaacttaagggaaaaatatgtaggccaaagattttacattcagcaaaactaatatacaaaagg

SEQ ID NO: 42576 - DNA, 684 bp, Homo sapiens
gagaagaggaagagttcaggagacagcatcgctctttgtatcagtgtttgactagccaatcaagaaacgtttgctgaattcttcatgtcatacatgtctgtgagctctgcccttcgaggatgtctgttgtgaatgatgactcagtgattaccagcctttatcagaaaaaaaaaaaagtcttaaagttttggaggatgttaaagctgaaacaggttttttgtttgtttgtttaacactttccacattctgaacccttgagaatctaataaaagctatggaacctctctccagaaaaatgctcatatgcagagattcagagaaaaaaacaaacttagcatgcaacttccagggactcttgtgaatggcctgaagcgacctttacccatgactggtgtccccaagctcctccctcccagtgtgcagagggggtttccctgagcctgggagcacaggccccatgcctccttcacactccaccaggaaaaggtcacacctcctcaaggcagcagtggccttttaagagatttttttttttttaaagaaaagtggtttttctgcttaaacattagtaactggagccaacaatcactgtccccaccatgcctgtcactcttcactccccacccagcagcaataaggtttcatagagttttggagactcctagcctgagaatgaattccagt

SEQ ID NO: 42577 - DNA, 502 bp, Homo sapiens
aagacaatctaatcagacactgatgacttaagttaaagataaactgtgctaagatgtggcaagttaaagggaatagacaacttatatttctctccttctttccctgatcctctgaaatccacattgccttataatctttccctaggccatccatgcttctgaatactccccttctttcatctcttcacccttatacacagtgaacaaaggcactcttggcatgaccaacttgcggtctaggcaagtccaggcttcagctatgactgcagtattgctccatgagcacacaactgcatttactttggcagtctctactagaactgcagtgggacactgataattgattccaaccttgaagccagagaggcacagatctgcaaatttgtcttgatggtggcaatgcagccttcatatttgtggaaaccatattacactgatatagtaataatgtattattaccataatactatacaataggtagtgagccatacatttatcattt

SEQ ID NO: 42578 - DNA, 1742 bp, Homo sapiens
gtatcttaaaagtattcccacccattccactttcccagcttgtccctaacctagggcagttcattgaagcatgaagactctcctgatgcagaaaccagaaaaattaagaaaaaaggattacacgcctaatgtaacttgactctagagcccacttaacaacccccgacaaaaaaaccccaaatcaattaggcacacagaagagatgtgtgagacacagagcagcgaccgtgtcatatttttaactataatctttccaagactattatgttaatcttagggttgaaaaagatcttaaagcagcatttaatctagaccactctccagagagacactgatctaggacctacattaatatctctagggcttgggaacttagtattactatctttccattacagcaacgtcagttctctctacatttcactgaaatttatccctccaactctctgtaacttgcattcatttgtttctgactgtaccctctgggagctacacacggtttttctaacataatagcacccaggatttctttgccagcctaagtcacacagtcatctttccaaactaagtattcctttttccaagtactatgtttttccaaaataagtattcgaggaacaaaacgggtaattcactttgcctatttaacaggaacagccagaagttatttgcagatatttctcaagattaataacctgccagtgccacttcctaaacttgctcacttaccacaccaccagtgttgatcgcggcattaggggttttcaaattttagcctaacagaaatggttgtcctgaaaatacgcgttacatccgcatgatcctaccaggaaataaacctaggagcttgcaactcagaaagggcccctctcagcccaagacagctaaacggaaagtcaagcgtgaaatccgcatcaaagaaaaaccctactgagatgaagtgctaggccatatggagactgaggacgaaagggcaggcctggtctccgccagagtctaagtgtctcggtgggggccaccggctcctcgcgaggccagctaacctccccaacccccaccccccacccccaacgacgaccactgctccatcaccccactcccgggccccagcctcgcctcggcccgtcatctttctccgcactaacctttctcctcccgactgtcagccgccatggctccccttcggtttccgccgctgccaccgccgccgccgcttagacgcgactcgcgcgggcgccgcagccgcggcagaagcacgggcccgtccgtcagtccgtctgcccggatacgcgcgtcgcacttggcctcttaacactcagccttctcgactcttcccgctttttccctttctcccttcctttcactccagcatccagcggcctaggcccagccttctcgttagggctcagactcgggctaggtatgggggagggaagggaaacagatggcgacggcgggcggcgctaaaatggagcctgcttcctgcgcgaaacaatcccgctcccgaaatgccctgcgctgtttacgcttcgttcctctctgggaacgtcacagtgcggagaggggcggggaggcggggacgtgcaaaggaacgtgacgtgacgtcagcgcgtcgccctgccgccctcagcccactggtacctggaaggagtcttattcagggattaggttacccaggttgttcatggagttcccgctgtacggcctataactggatggcgcaattttcccacctgaaactc

SEQ ID NO: 42579 - DNA, 1559 bp, Homo sapiens
ctcataagactttgcacaacaccaaaagcacactctttttatagtccctttgaaatcatgtatgaccaaaattttgtcttggggcctccacccttaccagactctgagccactcagaaattaccacccctccttaatccagacatggtctttcatttgtgaagcagcaaatgagccatgcctctccctgtcgacacctcctggtcctctcaacataactgacttgcaggcacagacatgtttccagacaatacagatggtgctcctgctacagcgacatggtggataccaacctgtctctcaagaataccccaaaaattaagttttttttttccaaggtgcccactccaatccctgtgtcatgcctgaagtagttactgagaaagtcaccccttttccctttattctataaccaaataaacaggaagattctccctggggcctgaaagcttgaagggatgagtaactcctcctctcaggcccagttccaagatgcaaagccatttgtgtcaacagcttgcatcagaaagatagcagaagcaggaagagagccaactggaagacacctaccctggctggaagacacatacccctgaagatcaagaaagagaccgtctgggtactacatagcagtcacatcagactgggacacttactgtttacagaggactacaaaacccctgtcccatcctcacttggggctgacgcccctttaggccctagcccacctgcacccaggtgctcattaaaacagcatgttgctccacaccacctcgtggtttctgttggcatgctctcagggtttgaaccgatacaagaacattacaggggtaaaactccacagtaagagggacttctctagctgaactttgtaacaatttgaacaggcaagaagcctcatggccagaaattgggggagggcatgaatctagcttgcagacttcacaggcaggggaagaactaaagcccttttctttgcagctgggaggtggaaaatctcaggcaaatattcaagtccaactctccctcctccttgaaaaagactcgggactattgcaggggccacggtggaagtgggagtggcccttcagtgtgcatgggaggtgggttagaactgagactgctggctttcccacacttccctgacgacctcatgactcagcagaggcagccaaaatccacctaggtacacaactccagtgacctgagaatctcacctccatccccagcagtagccaaagcaaggccctcccaaggaaggtctgagctcaaacacgcctggacctggcccacctggtggtccttccctacccccctggtagcagaagacagaggacctacaatcttgggagttgtagggccgtgaccaccaccagtccctctccacaatactacagctgatgctttctggaaagtaccacctcctggcagaaggccaatcagcagaaaatagagcattaagccaccaaagctaaggacccccacagagtcctttgcaccctccacctgaacaggcactggtatccacagctgagagatccatagatatttcatatcaca

SEQ ID NO: 42580 - DNA, 556 bp, Homo sapiens
ggaactgtgagtcattaaacttcgttcctttttgaattactcagtcttgagcatatctttattagcagcatgagaaagaccaatacagtaaattggtactaggccatagggcactgctataaagataccagaaaatgtggaagcaactttggaactgggtaacaggcagaggttggaacagtttggtgggctgagatgacaggaagatgtggaaaagtttggaacttccttaagacttgttgaacggctttgaccaaagtgtgataatgatatgaatgataaaatccaggttgaggtggactcagatggagttgaggaatgtgttgggaaatggagtaaaggtcaattgcgctatgcaaagagactggtggcatctagcccctggcctagagatatgtggaactttgaacttgagagagatgatatgaggtatctggtggaagaaacttctaagcagcaaaatattcaagaggtgacagagtataaaagttgggaaaatttgcagtctgaaaatgcagtagaaaagaaaaccccattttctggggagaaattcaag

SEQ ID NO: 42581 - DNA, 2418 bp, Homo sapiens
tcatgtggatagaaataattcacttaaaattaacaataataagtatttggagattgaaatatatctcagaaactgatagattgaacagagaaaataaattctatgaaagttgattgtattagcaacaaaagtaacaaaaataacgtactgaatcctgcatcttcaaatagagtataaatattcttttgaagtgcacatgaaaacttttataaaattaaactaaggcaatgtcacagatgaaatctccacaaattctgaagtatatatatcatatgtatctatataatgtgatacaattaaaataattataaacttaaagagaatgtattacctttcaaatatacacatttaagaatttcattcagtggagtggactgtgcttaccattcatgacccaagtctttactaccttttctgctccaaacacatataccatgaagagaagacggcatagaatatactcaggtaagtatacaactgagaaaacttacacaccagttgttagcattagagaaaattatatgaatagattcttataggagctataacaagatggttttggcaggataaaaaatgtggcaaaagccttaaaagtggaaaacaaaatttacctacggagttcagggaatttctgttctgaaaaaatgtaagttgtaataactaaaaaattaaaacaaattataatgaaactgatctctctagatgacagcagacacatgcaggaaatgaaagtttgcagaaattaacagctgttgaagattaactcatgaaaaccacatgaggaaataaccaattctacacaatagtaagattttcacccaaagtttataaatataggaaaaaatcaaaataattttttttctcagagatgagaaaatacttaacataaaaatggaattgggtgagaagcatgaatagaaagaggaacatttagaaattgtggaaattagaaatacagtcactgattgtataaaatgtaatagagttcacaaaataaaatggaaccgaatgaacgaataaaagaatgaacaaaacctgcaataaggtgaattagtaaactttctctttttctgactgaaccttgactgatagagcttccaacagaaatcacctaatactgtaggaattgccattaagctgattaaaatatgaaagtgttatttgctattaccacatgttagagccctcctgattgcctgctttacttctgaagctctgtcattatggtttcctggttttaatcactcattctatgcttcactgaaatattttgaactgattcaatgtgtttctctcaaatttaattttattctatcctgtctcttgcctcctgcaggttctcactgtgagcaatccagctccagagcttaccttctctgacctagggttcctcatttttttttttttaccagtttatctgaacttcattgatcttgttcctttgccaatcactctgagccactgtcatcatgactcaggattctagaatttgaacaaattataaatttgccctttgtatcttctgtatcccaaagaagaaccagtagacggtaccacaagagaaaaatgagtgcagtacatgaacaaaacacctgaatgaatcacaaacaaaaagagatggttgattagatttataattaagcatttgccaatcaaatcagtgattcatttttatattatttggattggtaaaatttaacatccaccatagatgaagcacgaaataactgtccactccagtgctgcataggtgggtgtacatagagggaggtagtgtttgaaggatacccctgggctcaactgactcaagctagctcagtcttggtaagagggagactggacacttctggtacagttgggctgcagacacactgtaccaactgtaagttcactttggtgagaatcttcatatgccctcacttgaaagaattttcttttccagataagtttatgccttttattcatccgaattttaccatgatgctgtgctcaaagatacaacaacatttgaggcactaaaaaatgaaaaattttaaatattgttgtctgctctaacagttttcaatttactgaaggtggaaattttacagttattaagaaataaagtaaactgaaaaaacataggtggagtgagactgagagaaaaagaaatggagagagtcatggaactcttcccagcagggtgaaaattattggatatttattaagaaaagggatgaatgaaatgaaaattaacatggctaaaaaaaggtctcaacacaacattatgagaggtaaggtggtcaaatgagactttttgaaattaatccaacctaaaagggccccaaactaatcagtttcatttatcgcagtgtggagtagtttaaaaagcaggaatgcagagatcacagttagaaagctgcttaataatttcttcag

SEQ ID NO: 42582 - DNA, 1784 bp, Homo sapiens
agtaagttttgagtccagaaattcatatatttcttctaggtttactattaatttatcataacaattctaatagttttgtattattttggtctcagtttttatgtctcttctttttccatttctgatggtttttatttgcatcttgtctatgtttttcttgcttaacttagctaaaggtttgttaacatcattgatctttgaaacaagtcagggtcactggtctggttgtctaaggtgttatcagagcttgtgatctcaggaccaaaaaaattaagaagcgtggttacaaagggtgaggttggagcaaaaatttaataacaaaaaaacaaagctctcggcagtggagagggttccctgatggttgctgtgttacggttgtattcaaaagctcttatgaggaactgctttcatctctgtaactgagtaacttttcttatctataaaactgcctgcatagtttcatctctgtaactgagtaacttttcttatctataaaaccgcctgcatatctcccagttattctctgtcattgtggatatgtctccaggaaagcacaaagtgctgtttcttgcgtttgtataatgatgggtttgttttaggtacacccccctcctctctttgcaaattcccatggagcccactgtgtacatgtctgaaaaggggaggacactttttcctgggagcttactaatcatacaaagagcaaagggtttctatgctggacattgcatgccttgcctgcttatctgtggcttatctgtgcaggtgcactgtagctgtgattttttttttaggcaggcagcttctgcagtctgagtttttccccaagctgctctatttttcctgtagttgtgagttttcaggaaggcagcatttttgaggaccagccttaattgtttacttaactgattttctcttttcttctccatcatcttcacaaaaaaacaactttttgtttcatagatcttttgtattgtgtttattttagcctcaaatttatttaactgtgttctggtctttataatttctttctttctattagctttgggtttggtttgttcctgcttttttagttctttgatgtataggattaggttatttgaagtctttcaacttttttgatacagatgtttgttacaagaaactttcttcttacagtttttttggccatcttccatagatgttggtatgctgtacttccattttcatttgtctcacaaaatttttaaattttcttcttaataacttcattgacatgtttgtcatttagcagtatgtttaatttccatgtgttcatgtctgttttccagattcttcttttaatttattttttgttttatttcattgtggtcagaaaatatacttcatatgatacttgtgtttttgaatttgtacaggcttgtttggtagcctatcatagaattaagggagacattttttgtgctaataaaaagaatgtctattctacagcaattatgtgaaactttctgtatatgtcagttaggcccttcatatctagtgtgtactttaactctgatgtttctgtgttgattttcttcctggataatctttccattacagagaatggggtgttaaagtctcctactattgctgtgttgcatgctagttttgcctttaggtctgttaatgtttgctttacatgcttgagagctcaggttttggtaagtataatgactaaatcttgctaaactgaccccttcattatcatgtagttactgtctttgttttttgttttttttttcccgtctgatttgtaatctgtt

SEQ ID NO: 42583 - DNA, 1020 bp, Homo sapiens
agatagattctgccccatgttaccctgattcagaaaacttcccattcccagtacctctttagggcactaaccttatattagctgccagtagacttgtcccaaggtttcttgctcatctggtcagtttcactttctctgctccagcagaccttctttgctcatgtccctgtcctgggcaccacttgtcactgccagttgctacaggattgaatgaagggggatgaatggagaaatgaagacagagacagaaagatctgttttaaaagaaggtgacagggggctccttgtttctagtgaacaagggatctaagcttctacagcccttcgtatttataaggtagaaataggagggagggagaggtaatggttggtcagctgcttgatttatcacaggtacacttaattgctttctttgtacaacaggcttcagatacttctataggtaatcacaaggaacactgtgcttggggtgtgactgccctcagcactctttctgggggcagacacagtcatcagttttccaaatcctgctttcatgagaacagttttctgtttgctccagtggtatactgagttggtcaggaccctcattctttcagcctgtaacagagggtattagagtctggattgaaccgtagcaaacagcagtagccctatagaaggagggcttgactgttaaaagaaaaacaaacaaatagaaagctacagcaacaacatgaacaaaaaaaaaaaaaacgcccataaaaaacccgttcaaaggtcagcaacctcaacaaagttgagaaagaatcaatgcaaaaacgttgaaaatttaaaaagccagagtgcctcttcttgaaatgattgaaacaactctccagcaagggcacctaacttagccaagtctgagatggctgaatttacaaaagtcagcttcagaaggttggtaataacaaactacactgagctaaaggagcatgttataaaacaagacaaagaagctgagaatcataataaaacaatacagggctggacacagtg

SEQ ID NO: 42584 - DNA, 1269 bp, Homo sapiens
tgtagacctattctgaggaactgggtgttagaacacaaacaaatgaatttggagtaatgagccatgattcagctcataagcactatttaatatttcaaaataatatatacattttgccaaaaaataccaatagcagagtatgcattctcaacatatatgctttctattatcccaacattaagaaaacaaagtgaaatacgatgtccaaatgaacattctaataaatctaaagaagataatgaaaaacatcttattagaaaaattaagatcttatgacaaactttcttacactcaactagaaatcctttccactgtatttaattgtaagtgcataaattcctattctataaaattattttagaaagcttttatgtaatttgtgctatgttgcttaatttgatgatcttttccatgaagtcagctatattccactttgactattgagataagtaggctgtccaaagttcagactcagtcaccatcaattgattgagaaattgaagcatgaaacacacttaggattaatttggcttatgagcttgctgaatttatcttaagcccagcgtaaattaaaggaagagttggtcatgaaaactggaaaactgtgaatagcttctgtttttttatgttttgttttattttgtttttctgctgaatctgtgtttctttgactctggaaagtctggaaaagtacttatccggcccataaattttagtcactcaatttaaaagttattctagaaaaactccagcttgatggacatgagataaccatgttaatacttccaccaagccttctgcttgattataccaagattctatttaatgtgaaggttctcctactttcagtaactaagaaaccctcacagaagatatctatacttttctcctaacagcttctttagaactgcagtctttcatggtgtggcaggcaaataaaactgtcagaaatagaatataaaaataaaactgcatatctgaaagtgtgtatgacagtgctataataaataaaactcctcctgctgaggagttactcagcaggctgtaggcagccaagttttttttgttttgctaaccctttatgttacaatggagagttgatggctgggcttctcaacgtttcatttgtatattcgtttctggtttctcatgggaataccgatgtctcacctcttctttgtatattcctggaagcacatcagtattaatgaaaaacatgccttaaatacagaggctgaatgttttggtttgtattttttgtttgtttgt

SEQ ID NO: 42585 - DNA, 2094 bp, Homo sapiens
atttattggcaaataattcttcactcaagttttaaaagacagtcacaagatcaagcctttctttagcaagaaattcttgcatctcaacatagagtggtatgtaaaggtaagagtttaaaagcagggaaaatgataaaattgtatattagttactgagacatgccaacctaatggaatgaaacacaaattgttaatagtaactgcaagaaattaatttaaaatttgtatttactgataatatctgaggtaggaaaaaatgtacaggagaaaagacatggttgtggtttctgtcttaataagcagaaggctgataatgacattaggtaaaatgagttttaaaaagctcatctagcaaacgcataaagagctgatcactcggtgttttgagccctcatggaggtgatagatgtctggagagagaaactaatgagagaagaaagaataagtaaccagttaggcagatagttaggacaggttcttggtagaagtcctccccaaaaaatgacaatgtggaagaaatcaagctgcaagcacagataaggaagcaaagtccaaagcccttgtcttctgtgcaaccagtgagctccgcctacacacggtggcctttggtgagcacattccttttctttctggacacactcaggtaaaggaacttgcacagggtgcttgcctaagacagacctgtagctgtatagataaggaaacttacacagaaccagacacgtctgcagtgacacatacgcaataagcaaaataaaacaatatgcagtaactcaggctaaggacctgcatgcacactagagagaagaggtggagctaacaagaatttgtatgtatgcaaataagacatccagtcctaacctgtttttcgtgccttatgtgaatgaaacactctgccctattagctttttttttttttttttttttttttttttataaaagtctttggattcaactgtgaaatgaatgacaaccctctcaagaactcctggtaatacctcaaacaacaagactgctccagtgaccctaggctgcttcggtgtaaaaagtaaagtagagattcctcttcaaagacttcccctccatctaattaagaataagtagtaacttctcttacaagcaaaatttattcaaagacctgtgctaacattcttaaatatctgctaaccataataaagaaatcaatgtattttatgttctcagctcccacaatttagtgtaaatatttgccctggcatgcttacactggtctaagcaagcattaggtcatagcctgttcctcttccttatttgaaggtgtttttacctttctcagtataccacaagttacttctgccttcctttgttctcctctgcctttgcctcttttaaaaagttctaagttgctagccaatcaggacaaatacacaatgtgatgtcctgttccttccaatagaaaccccggacacagcagtaagcttgacatgtcaagttataaatgaccgtctcctttatttggtgtactctcatggcaaaactgctgatgtgtgcaccctttctgcataaagtaaaaaaaaaaattggcctcgctgaagaaattaaatttatgttccagtgctatttctttacggcactgaagaacaaggattttaaagattcactaacacatgtaacaaggcagaaacaactcaacgttaaaacatgtggagtctcacttacaatcagcacacattgatgcaccacacaaaaaagcctaggctacagctcggttcctccttttaagaaaagaagtgtgaaagaatttaagaatgaggaaagacaatgagaaaaactgctttggaacaattttttggtttcatgggtcttccatttgaaagcatttgtgtaaaatggagaagtgtgagggcattccacgtctaatggtttaggaacaccccctagtgctgtgttgccatggagctttcagaagatgtggttgtttaaaagtgcgtagcagcttcccccaccttcctcctgctccaatcaggtaggtcatgttgacttcccttcactttctcataattataaatttcctgaggcctcctcagacagggtacctatacagcctagggaact

SEQ ID NO: 42586 - DNA, 455 bp, Homo sapiens
ttccatcctagaaattaaaattagttaagtctgaaggataaaaagaaatcatttgagggtacagaggttgaattagccattaatgaaattgtaacgaacctgatgtgcgtgtttcaaaatagtatcaaagtctagagataggagacaaatctgtgacaaggttcaggtacatgtcagggcaaagctgataagaagttgacattgatcaggaattagtactgacattacatcagtgaattagtgattaaaaatataaaagtaaatggccttagtttgaatcatgacctgatatctactgatcttttttttttaatgtatctgttcctagttttttttttattgttaaattgaatgaataagaatggtaccttacttatttgattattgtgagtagtaatgtaatgatttttaggatacttggtagaattattctcatcattaagagaataagtaga

SEQ ID NO: 42587 - DNA, 5326 bp, Homo sapiens
ggtatgcaggtttgacaccactgggtggatggtcactgtggcctggttttctgaatgcaaatcctgtactggcctatattccccagacggcttccgcactggcaagagaatgttgttccatggtgactggcatttggctatgattccatgcttatgaagccactctaaatgtttgtggacaccccgtatgtcctcagggagtagcgagtactgtcggacccgaaccggagtttctcccagttttaactctaccaccaccggtgcctgatttacgctggcaccagtccaggtggattactttcagcccaaactctgggaattttagtaagtaacccatgcatttcatttactcctggttccggagtcttttttgcatagtctccatttctcagcctgcaggacagtgagggttaacatcatagcctctgggcaaactacgtttaaagttacattcccttgcggcccaaatgtaatctgtgcctgcagtttttgaagtaggtctcttcccagcaaagaaactggacaatttaggaggtataggaattcattttggacttctcatcctcctataacacacctctttgaccgacaggccacttttcagagactccagtggctcctacaatagttgcacagttcttggattgtggctctataggtcaggtcactactaagtgtttagttctggtgtctaccgtaaagtccattagctggcctctaacttctaatctgaccatgggctcctcgggtcccaaagagaagcagcctggtctgtcctaccctcatatccttcagcccctgccagtccaatcagatcgatgtctggttcctccctggtgtggcagccaccagtaggtggccttcctatactactgccctggggtctcttttccctccagtggttcttgcaaaattggtttttcctgtggctttctttttgtctctgtgtttgccggagaagctttcactttttgctcagctcaacctacaagctcctgtgactttccctttaactctgtgtttacaggcgaagctttcactttgtctttgcagctgccagcacaggtgatttctctcagctcgacctgcgagtatcctgcaataagctgctaaacagggctgcattcagccatgagttaacataaggaaatttggtctgaatgccctgactgtcctccttgttattattctctggacactcatccttccagtgtccttttcttttgcaccgctcacactgatctctttccagcctcggctggccctcaaatccctgtccagactggcctcttccatgcccatgtccatacccacatccatgagggatgctgccagcaaatcagcctttttctcaagccttctattagcctccctctttgcctcctgatcttggttaatgtacaccttcgtggccacttcaataagctgagtagcattcatccctttaaaaccttccattttctgcaattttcactggatatccccctgggcctgctctacaaatgccatgttcatcatgcactggcctcaccaagtcttttataaaaatggctggggctttcatctgcaccctgatgcccctctgagatttttcctatattgattgcctgtctcccgccttcccttaaattttgcaggagtgcctcttggtatcttggcagctgctatagttgggctgcctcattcctttgggttctagtgggggtcctctagtttccaggagaggcatttgcatagccctaacacaacctgactggaggtggcttgcctgtttttcctagcatttcaccttaacttcctggagtgagggctcagatttttccctctcaagagagactgggggcatgtatccatttgagcttgactcctcagaggcagttaacctggggaaagcgggggtagattggaacatatggaggaggggtctcttttccctccagtggttcttgaaaaactggtttttcctgtggctttctttttgtctctgtttgctcacgctacaagctcctgtgactttccctttaactctgtttacaggcgaagctttcactttgtctttgtagctggcagcacaattgatttctcttggcttgagctgtgagcattcttcaataagctgctaaacagggctgcattcagccatgagttaatataaggaaatttggtctgaattatctgactgtcctccaactcaggtcaccaccttaaacacacggccaattttctccctatctgtagcacatttggcaggccagccaacaccaaaaaagggctattctaattcacagagagctctcagcatctgaggggttaacttgactccctcaacccctgcaaagcctttcttaaagttctttaacatacattccaatggggtgggtttccacgattttcctcccatttcctcccagttatgatgcagcacattcacctttccttttgttttagaccgattggacccggttggtcctacattttgctcggagcgtacagcctacactaagagatcagcagctccacacatgtcattcccgttggttcctcccagaactgtctctttcacacgcactcacacacttccccgctcccagttccctatcctggttggggcagtgaaccgctctcactgcatccagtttccttctgaactaacttagcgagccactctcgcgtcctgtgttggttggggtgtgagtttcatccaaatttgtgagccactctcaccgtcccccagcctctctgtgttggattagttgtcactccctgggaggtgatcaggctccccttctgtccttatgggataggtcctgccttgggccccaaaactttaccatggttctgaagaaagggcgccattcctggaaccgtcctgcaacccctccgggttcccttgtgctgtcaggggaggggcaccggggacgcgggagaacagctcctttctctgggcttaagttcccttgatgggtcctgaagttaagggtctcccacagccgaggccccagaccgcccacaggcaaagaagccagccaagctgcagtctctcagtcccatgtgggtcaccaggtgtgtagcggatcaggaggacccgagagagaccttggggtatatagaggaggatatctttattgagtacactcagacccaacggacttaccatccaaagatggggcccccaacaaagacagcacttgacttttatacacactttaaaaaaggggtgggctaacttggtgcaggcttacggtggcacgaaagcagggatacagaaggagaacaattaataaaattgtgacaggttcataacccaggattacacatgactattgctatgcaacctagatgactgttatctaggttttgctcaaaagagccttgcactggtttatcttataaccttcactatggtgcccagacagctgtagttcaggcgtactcagacttctcaggacctttgctgtgctttttagataaagcagaaatcttgaggttactagttacagagaacaagaatctgtaaagtcataccataaaacagaggaaaatttgtttttcttctccctatgttgaaggagtgctgagagagtcaccagaccacatttctttggtgtgtgtcctggctttttagatagtattaagaatttccctgggtctgggctgcacccattgctgcctctgggactagttagcctaatacaggaaagcctatttctctttttaattttatttttctttctttctttaatttcctgcctcaatctcagtaaattaaattatcctaaatgttaacttttcagggagaaaattttcaccctttaactctttatagaatttaagactcttagttttccaacattatggcactgtatttaatattttgtgggatctgggcaagggctgatgcaatcacatcagccttttcttctgtaatgttatcaaccatcgatcccagacaaaacactgcaatgctattttctccagagctctgggaaaatgtccatttcctatgaagaaagaatttgctccatcacaaaagagcaataacacagcaaacactattgaaaagaatgctatgagcaaataaggatgagatatcaaatattagctggaattgctggagtagaagctatgataaaacatacataatatgaaattttccaacttaagcacttctaagtgtacacatagtactgctaggtacacaatcttaagcaaccaatctccagaactttttctgctttaaagttaaaactctatgctgattaaacaacaactttttattttatggagtccttttcacgtggtagccaccattctactttcttttcttttctttttttttttttaatgaatttgactagtttagataccttataaagaggaattacagtgtttgtctttttgtgacttattaacttagcctaatgataccaagtttcatccacattgtagcataaaccacatagtgtctgtctgttcattccttggtagatgctgggattgtactgttatgaatatggatgcgcaaatatgcctttgagagcctgattttaattcttatggataaatatccagaagggggattgctgcatcatatggtaatcttacattaaattttttgagaaacttccatactgttttcaataggaccaattttttaaacaaacctcatcactcagttcctttggaaggagttaggtgctacaacatacatttcttctattattaatgcatagtcatgcaactgtgtgtgtgtgtgtgtgtgtgtgtgtgtgtgtttgacttagtacatataataataattaaaatagcatcttatacagtaatggggaaagatactgttaaaaaatatgggacacagactcttcatttataatattttaaacactaatatggattcttaggaagactaatgttatttgtttatttatctttaattttgtattgttatagttctgccaaataacttgtgctcattccaggcagcttttctgtttagtcatgagaatttatttctctgcctatgagcacaaaggaaaagttacttgtgattgagaagacgttatatatttctctcaactatataatccaacacaaaacattttttcatgttcttattggacatttaaatattccttggtaaaattcctgtttagatcttttaaacattttttgattaaattatttgtctttttaacattgagctgtaagctttctttatatattttttatataagtcacttatcaggtatgtaacttgtaaatatgtacttcaaactctggtttctcttttgaccttattgatggtgttctttaatgtgtaaaaatt

SEQ ID NO: 42588 - DNA, 4631 bp, Homo sapiens
tctataattattacaaaaagtaaatgggcattggctttacctttgtcatcagctgcattagccactacaagagattcagcctgttttttgtagcttcaaagacaagcattgacttctcttctctagctatgaaagttttaaatggcatcttcttccaacagaaggctgttaggtctacattgaaaatcatttgtttactgtagccacatttactgagtatattagctaagtcttctgcatgacttcctattgcttcacattgaacttttgcatcatgtaggcagtttattcctgtaaacctcattagtcaacctctactagcttcagtctttttttctgcatcttcctctcctctctgaggcttcatgcaattgaatagttaacgctttactatgtattagtttttagctaatgccaaaacctaaggtgatgttgtggttggtttaattttttttcttttcttttttttcttttttttttttttttttttggtagtggttttgctctatcacctaggttggagtgcagtggagcaatcatagctcactgcagccttggacttcaaacttctgggctcaagccgttctcccacctgagcctcccaagttactgggattacagatatgaatcactgcagctagctagctaatttgattttctctccagacaactaaaattttctccatatcagcactgataatggttatttgttcttatcatttgtatgtacactggagtagcacttttaatttcctccaaaaacttttcctttgcactcacatcttgtttaactgtttggtgcaatggtgtagtttttggcctgtcccaggctttttttgttgctacaaaggaacaactgaggctgtctaatttgtaaaagaaaaaggtttttatttggctcacaattcttcatggtatacaagaggcatggcaccaacatctgtgtctggtgaagacctctggtttcctccactcattgaagaagatgttgggagccagcaagtgcagggatcagataatgagagatatgcaagagaaagaaggtggatgttcctggctctttttaataattatctctcctgggacctaatagagtgagaacgaactcacccatttccccagggagagcattaatgtactcataaggaatctaccctcatgaccctaacacttcccatcaagccccacctccaatattggtgatcaaatttcaacacaggattttgtagggtcaagcaaaccatatctaaactatagtactcattaaacttattcctttatatttttggtttaaattgagagacctgctacttttcttttcactggaacatttagaagtcattgtatgttatattactgtgtctcagggaatagggaggcctaagaagaagtgggatggggaaacgaatcagcggagcagttagtacatgcacaacatttataattaagtttgctgtcttatattgtaacacatcaaggtgcccccaagctaataaacgtgtaaccatcaaggaacactgatcccagatcaccgtaacagatataacaatgaaaaatttgaaaaagcatgataaatgccaatatgtgatagagtcaaaagtacacacttgctgttggaaatattacgccaaattgattagcttgactcaaggttttcaaaaacctttaatttgtaaattgcaatttttgtgaaggacaataaagcaatgtataataaaatgaaatacacctgtgcgtaagcacttatggaaataaatccttgaattgaaattgactgatatcccttttcctatagttgtttgaatatatactcttgatttagactcacaatagataattctataaaatatataataatcaataatttagtaagttggagctacataataaatatagttattaaatgaatttcttatatatcaagctgctccatgatttttaaagaattgttggggaatttctgaatgcatggccagaacccacttttgtttattggaaaatgctctttcacccctttgataacacttttgttttattttaaatttcaatcttgtcagggggcttttactataatcctattttaccaaaatttgccagtgacctctatatagctgtacccctttaaattaatatctgaatgtagacttgaggccaagagatttgtattgtttacctagatccataaagcctggtaggctatctgcagctaggcacagcttactgaatggaaaattatttaaagcaaatcaatacatgtaaattcaaatcatgtctaaggctaaggacatttgaactgggatcctctgaatattagttctgtgaaacagtctatgcataagaattcgttggaatacattaaacaatattttagtgtcgaatataattgtaccttttttcatgtttctacataattctcaaacatatttggataaaaacatgtcttgcattgaccagctctgatcacaactatatgaaaattgcaaagcaaaacaactttttatcagtaaagcaaggaaataaaaataagtcaagtaggtgtatatcagtaaagtaaaaattctactatcttatgccccacaagaccgtaagtcttttaactttttataatattttttcaagtttttgtgaagtaatcacctaagaaattaaagaattctagaaaatgttcaatttaatgactcttgaaaaattaattcaaagaagaccttctgaagattttcttaaatacatgatgagagagaaaataatgattagcattttatttcaatagaaattctataaaattcagactaacaatcagtgattctcaaaaatatgtgatgttgatttgcgctatttggaggaaatacaaaatataatctcttagttattgatgatcatttttaagtatattactggtattaagaaagtaggttatcttacgcttagaacaaatacactttctttatgaaaaacagctacaacattttctaaaaaaactcattgacctgcatatatatgtcatagacaatgtatgacaatttttaaaaatatttcttttgataactaaattaaaaataaaacaaaagtgtcttacctaatgccttactataaaactcttcccaaaaatgatagtcgtaatcctgaatccagaagtggaacaaaactgaaagcattgaattttttactctttccagaaaggtcattctgtctgttagtcctgtcataggcacaggtacataggaaagtggagctggaagtttcccacagcttcgctccatattgcctcctacagaaattctaagtgtgagcacaaaagggactgcaagcaactcagccatcaggtctccacagggaatcacagggtctataagcattacatcgtagttggtttcctgtagcttcttcataagcgtctgattgtagataaagctctcacacatcatttttaaagttcctcttatttcaacaaaaaaatcatttaattttataactgattgccaggttgataagcctggcaagacattcagagctaggtcaacaaatatttcattttcttctgttctgtcctgtggcatatggaccacctcaaatttcaatgcagaaggcttcctgtagtcaattaacgaaggctttgagtgagtcaatactgttacctcatggcctctcactatgagctcttctagaatgaccttgacattaagccaatggctcatgtcacagggccacaccaggactttcccacagaatccacagccaacacagaagagctgcaggagcagaaataccaaagctgacttgtcagacctcatgatggcagttccctcacacactgatctgcaatggttttgtagttactaagcaaggagttgaaatgacaatataagcacagaagttaaaaattaatattttaagagtaaagttcactggtggttgccagtttaacatgtactgaaggtatcaaaaaaatgcaatgtatcagggaaaagttgttccaaccctctagaacttagaaataaaatacataaatatacttttattacctggattgatgataaagaaaaaaatttttcaagtctttagatttaataattcatgtgcagaaacatgcacacaatcacacttacattcattccacactaagtccaaggcatcagatggtttaggacagcacatgtttcacatcccttgctcacaaggacaatacaaaggtttactgagaatatacttagagagtttgggtaactattttgactaattttatataataagtacaaagtgttcagtatttcagaggggaaaatgcacaattgctttaatatgaaataataaaagctttaataaggcatttgacttaggaggtgagatgaaagctttgataggatttactgttgccaaaggaagcatttcacaatcgatagaagcatacaaaagtataggatatttgaaaatcattccagtgagtagtggtcacagagaaagttcagagcaggacgttacagaagaaagttagtttgaaattggagaacataattttaaataaaaaattatgagtttgaatcataatttataggcaaataattatttactcaagttttaaaggatagtcacaagatcaaccttttctttagcaagaaactcttgcatctcaa

SEQ ID NO: 42589 - DNA, 1161 bp, Homo sapiens
ttatttaactgaatctgtctttctaaaaacctatagtctattgttcacttaagtgctgtactagaactgtgggtgagaatattaacatctttgttatacaaccatgagtacatgcagatagctgcatagcagtgatttccctcctatttccctgtgattaaatccttaactatgctcctatcagcaggaagaaactagattgattttcacgcttttttatctctatgtccacaaacttaagaataagatgtatgaaagccaaaagagatattaaaatcacctttgcaaaaattatatcagtgtgtaaccaagcagcttagcttcaaaccacattttaaaaacttttttatttcctctttctctccagtctcaagacacagctttccaacaatcaacagatgtgtattctttcatcttgaaatagagcatgagaatgtgctttaaaactccactctcctttcccactttaagctcccatgccttctgcacattaatttacctagatgcctgttaagcacacaccatgataacttatctgactatataccggttagaagcttcagggatcaaatcctaacatgctgcaggcatttctggaattctcttcccaacaggagattacttcaaggctggagttcactcccagttagagtaactgcaagattctctgtgattaatttgtaaccaggttgagcacataatgttctccccttcactagatggaacaataattcaagataaaccactggagtgtgtcacacaacctggcacatccgaacccaccttgcctcttctgcattccaagcccttcttcttaaatcattgccctatctacagaaattgagaagtagtaaattttgaaagaagtggtaaattttgaaagtgcttctggccactttcccctttgctgacaacagtaataaaatttactgtctttcttattatatcctgcttttactattttggcttctttctacaagtggtgagcaaccagaccctcttttgttacagtggaaggtgactggattatgggagtgaagcattattgaatgatttagcacaatccccttggtgataagttaactgtcactcaggtaattcacacaataattggttgcttcaaacagttgggaacatcccttctctctcttgatcccaccc

SEQ ID NO: 42590 - DNA, 1444 bp, Homo sapiens
taaggttaaaactttctaaataaatgtcatgagtgtacatgtgtaaatagaataaaagccatgatgagaatatacatattttacattggtaatatctctagatagaaattttagaaatatttccttttctttatgaaacttttcatacttttgttaaattacttacagtgattttgtattatttttatgaagttgtcacagagtctgaaacaaccagtccacatcagtgatgaatcagtaaacagaagttagattacttcaacactgggtggatgaagaaggctctgggcatcaagccagtgagagtaaaccctgaacacgagttacagtaaatgtggcaacaggtaactgcaatcacacaaaatgtctagatgccccatgtattatctggaatagtagtacaatgactctcacattaacattgatgtcttaagattaaaaatcatatttgaaaaaaaatacagcaatatatggtcttcacagtcaatatttggatttttttctttgttttataaacagcagttcaaaaaagttttaccctaatgattaaaactgaaagtttttaaatttaaatattggcatagattggagaaagcaaatcagagtaaatatcaatcaattttagccaagtacatcttcaccaagaagtgtagtgtgagtgagctactcatgagggtgaccagatctcccctgtggaaagcgctggtggcctctcccattatggtgcaagtgctgctgcctctgagacacaacaaagtgacaatgagagttcctcacaggcagttataaatagaacatcaatttaacagtgtgatttcagggaaaagttattccacctaaagaatcacctgaaaaatatgatcattcaactatctaactatatactgtacaattcagtattataaatgagactctcagtactaattcatagaaattccaaaccacaaccagactccagaatgtcagtgattcttaaccaccactttttactgttactttttttcttttttgaaaaaaaactgggaaactctgacaaaattttagtgaagtgtaaaggattacagaggaagataaatgtagacaaaaaatcaccccaactgtgagtaacgtttcctcagtgtttatagttagggaagaaaaccattgatagcttcaaactaaaacaattctatagaaaatgttgcaggaagtgagggaccccgaacagagggtccagctgaagccatggcagaagaacataaattgtgaagatttcatgcacatttatcacttccccaatcaatactcttataatttcctatacctggctttaatctcttaataccagtatcttcataagctgaggatgtatgtcgcctcaggaccctgtgatgattgcattaactgcacaaattgtttgtaaagcatgtgtgttagaaaaatatgaaatctgggcaccttgaaa

SEQ ID NO: 42591 - DNA, 2460 bp, Homo sapiens
tttatcctcagtacctgttttaagaaaaaaacaaataagtgaaatcaaagacaggcagcccagcaccatgcccaaaaccagccctgggcctgcctggcttaaacctagtagttaaaaatcaactcatgacttagaaactgatgttattcataaattccagacattgtatagaagaacatggtgaaactccctgccctgttctgtttctctctgaccaccagtgcgtgcagcccctgtcatgcaccacctgcttgctcaaatcaatcatgaacttttcatgtgaaatcttcagtgttgtgagcccttaaaagggacagaaattgtgtatttggggagctcagattttaaggcagtagcttgctgatgctcccagctgaataaagcccttccttctacaactcggtgtctgagaagttttgcctgtggcttgtcctgctacacacacacacacgcacacttgcatgactgtgcattaataatagaggaaatgtatcttgtggcacatacctccttccaaaggaactgagtgatgaggtttgtttaaaaaattgacactactgaaaacagtatggaggtttctcaaaatatttaacgtaagattaccatatgatgcagcaatccctcttctggatatttatccataagaattaaaatcaggatctcaaagggatatttgcacatccatattcataacagcactattacaaaagctcagaccttgaaacaatcccagcatctatctgagcaaagtgtaggaacaaccgggtccgactggtctaaaatgaaaggaaaggtgaatgtgctgtgttgtaactggcaggaaatgggaggaaaatcctcaaaacccaccccattggaattcatgttaaagaactttaagaaaggctttgtggtggagggggtggtggttagggagtcaagttaacccactgaatgctgagagctctctgtgaattagaatagccctcttttggtgttggctggctggccaaatgtacttatagatagggacacaattggccctgtgtttaaggtggtgaccggagtcagaggacagtcagggcattcagaccaaatttccttatattaactcatggctgaatgcagccctgtttagcagcttattgcagaatgctcgcagttcaagccgagagtaatcagctgtgctggcagctacaaagacaaagtgaaaacagagttaaagggaaagtcacaggagcttgtagcctgagctgagctgaaagtgaaatcttctctggcaaacacagagacaaaaagaaagccacaggaaaacccagttttgcaagaaccactggagggaagagacccttcctccatatgctccaatctacccacctttacccagagttactgcctctgaggagtcaagctcaaagggatacatgccccagtctcacctgagatggaaaaatctgagccctcactccaggaagttaaggtgaaatgctaggaaaataaagcaaacttgtctccagtcaggtcatgtttgggctatgcaaatgcctttctgggaaacaagaggaccccgactaggacccaaatgaggcagcccaactacagcagctgcccagataccaaaaggcactcctgcaaagtttaagggaaggcgggagaaaggcaatcaatatagggaaaaatctcataggtgcttcagggtgcatatgaaagccccagccagttttataaaagacttagtgaggccagcacatgctgaacacggcatttgtagagcaggcccagggggatatcaggcaaaaattgcagaaaatggaaggttttgcaggcatgaatgctattcagtttattgaagtggccacaagttgtacattaacggagatcaggaggcaaagacagaggctaatcaaaggcttaagaaaaaggctgattggctggcagcagctctcacagggagggaagctggctttgcaaggtggcgtgatgtgggcatggaagtgggcatggaagaagccagtatggacagggatttgagagcaggcccaggttggaaagagatcagtgtgcacagtgcaaaagacaaggacactggaaggatgagtgtccagagaataataataaggagaagggtcagggccatcgtacaggaaggccaccagccaggggctgccacacccaggagaaaccaggcactgatctgatcagactggcaggggctgaaggatatgaggactaggacagaccaggctgcttctctttgggccctgagaagcccatggccagattggaagttagaggccagctaatggactttatggtagacaccagagctaaacactcagtagtgacccaacctatagggccactatccaagaactgtgcaactattgtgggagccactggagtctctgaaaagaggcccatcggttggtcaaagaggtgtgttataggaggatgagaagtccaacctgaattctcatccca

SEQ ID NO: 42592 - DNA, 1400 bp, Homo sapiens
tttattatttaaaaagtcaaaaataaaatctaacttctttacatttatcttccagtcctagggaaaatataataaactaaaagaggttgacattttattatacatagtcacattctttatggccagaaacaaactatctttatttcaagtgtagttacctttcacaaaattttttttcaataattttctgggttgtctgtctcctaattcaatcattacacctacccttcctcctaatgtatagatgttgcaaatgcaactgaaaaatgacagctcattttcatgatgatctcctgcattttctatgggagtaaatcctcggtctttatcatggagtgttggtaacacatttcatgatggagtgtggcctgtccttcctctattcaagcaccatcaccaccccactccctgctgccttggatactatgccttatcatactcagtgacttcaccatttctctaagagaacaagttctggcatgcatcctgcttcttttgtgggggagggtggtaatgggaaatgggtgacacacaactatctttatccacagtgttctctatttgtccacatgacaatattgtattaattcttcaagtctcaagacacataccacatcttaatgtgtagccttcacttattgccccagaggacttggtgcatcttcctctgtgatctgaaaccaattttaatgcagttttactgttgcaataatttgttatctagagaacactgcctgtttcattgcctcatattgtgcattgctcattttatttctaagacttacaatgcataatttttcaaaaaatcatctattcttaggtcatccacaaaccaaagcttttataactcatgatggatccaatggaatgtatgagagaatctatcatggaatccctagggtggggcttcctttattgcagatcaacgtgacaactttgctcacatgaaggctaagggggaagctgttagattggactcaaaaacaacataaattacagatttgctcaatgcattaaaggcagtcattaatggccctacacaaatgtaaattttttaacctcatagcatgtgttcatactttctcacatgaaggccaagggagcagcagtgactctgaatatgaacacagtgctgagtacatatattttttgtaacacttaaaggccatgatcaatacaccattgtgttgcaatgtgtttttttcgtttgttttaatggaaacatttgtcagaggttttaggatagtgcataagttctaaaatagccaaaaagtaaaataagaggaattactaaagatggtaacagaaggattataagaaagattgaggccaaagttgaagcagaaaaccataaatattattacagtactgactaattttcagcacacttatgttgtctt

SEQ ID NO: 42593 - DNA, 1519 bp, Homo sapiens
aattagttgatacatattgaatgtgtatgacacacattgtcttggttatttgtgttatgtaacccaattgtatgaaaaaatatatcagaattagtgccctcttctgaaaaacacagttctccaactgtgtttttttaaataacaaggggagaagttacctccattgctattgctacagtgccatactttagcactttttggttttgacttggtaagcgagatacttatatgcatccttattctttgtctattagtccataattatttcaaaactagaaacaaatggaactacaatgcctcaaagtaaaatactgaaagccacttagattctaaaatcacaatacaagaaaaatagtaataacagtgaacatttactgacaatcactttatgacaagaataattctaccaagtattctaagaatcattacattactactcacaaaaatcaggcaagaaagatacgattcttagtcattcaatttaacaataaaaaaacttggaacagatactttaaaaaaaaaaaaaaaggaccggtagatatcaggttaggattcaaactaaggccatccactttcatacttttaaccatgaatccattgatgtaatgttaataccaactcttggtcagcgccaacttcttatgagctttgccctgacatgtacctgaccttgtcagatttgtctgctatctctagactttgatattattttgaaacttgtatgccaggtccattaaatttttttttccctggataattcaatctctgtactctcaattgattttttttaaccctttggacttatctgatttcaatttctaggctacaaacacttgttctctcttaaattatctcttcacatcttgaaatcttatgcatgaaacaaattctagcccataaaacaaaatctctataaccactatgaaataaaatattttatttttcatccacttttatgtggcactcatttttaacatctacacaaaaatttcacatatttatcttttctggttcattatataagttgatgtctatttgattttcctttagctgtaaaaaaaaaatgtaatgtagttatcaatcatttattatgatcagtctctgaagccattggaccaaaaactctcctggattgagtttgtcatgcaccacaatggagccacctaccaacagtctcacctggttccagtactgctctatggatgtgctggactgcatggcaattgttactctctttgtcataatatgttgcttgattatcaaaagttgttaaggcgagaaagaaagaaaagagagtacatctttttgagatctaaggcaggcaggcatgatacagaaaatcatgccatttaatgtcaccactatgtatcaaggtatggagtaaattctttactacatttttcaagacctgtgccttcttgatttgtttgaaatttttaatctttgttaaacattatgtaaggtacaattttaatttcagaaaacctgtaataattcaattttaatgcttatctacgta

SEQ ID NO: 42594 - DNA, 3330 bp, Homo sapiens
ctgaataacagtaaagagcagggtcttgggggggttgtgtcttctggcatctaccacctcacaaccactccagtgttctttattgatgaagcttaacattcaactagctggcaaaggaggaatatttacaggatcctgattcagtatcataaagttatatttgcacccaggggacaataaattgaaaacttgtaaagcataaaatttcaattttttcatttgttatcattataaaagttgtgttccttcagacactgaatcttggcaaaatttggatgagtaggagacatggctttcttttgaaaataacatttttgaaagtgggggaatgtagaggttctgagaaagatgagcttagagttggcccactgggttctccacctccctggtggtcacttccctaatgtccaaatatataataagaattgacatactagcgggttggatttttgatttcagtagtagctagctcagacttggttagagggagttttgtgatgctgagcccatgaatacccttagcctatcaccactctattcatactcccaacaaatcaacactggagtagccaggtacttgatgctttacccaaaaatggatattaactttcaccaattcaaagcatatcaagatgtctcattgagttcattgcaagttcctaattattagtctgattaatcactttttggatttatgatccagtgagaattttgttcatgtcctgcagtgattttttcaagttacatttttctatagattcttcttggtatagagactttatttaaggatgaatttgtttttcataaaagatctagaatcctgattcatcatgacagtggctcagagtgattggcaaaaaacaaggttgataaaggtcagataaacaagtaaaaattaatgaataatcctcggtcaaataaggtgaactttgcagttggattaatccaccataatgaggacatgcaggttgcaagagttaagtcagaatgaaatacacttgagacaaacacattgaataggtcataaatgcttggacaaatcatataatgagtagctaagatcaagaaaacaactagaaacaagagagctttggaaaaaaaacaggtaatcaggaaatttctaatgtaaggtgttaacaagcaatgcttttaggttttaatctgtttactgacaatttctagagcattagataattcctcttttgggctctatcagtcaagcatttggtttcattttatttcatgtaatcaaccttcatttcatatataattagggagcccatttctgatttcagaaatatctgattatttttgtattcatccttctcacctcatcccattcttgttttatattagtgactcttccatctctgaacatttgaatcatacttatttaaaaatctcattttgtctaggcatggtggttcacatctgtagtcccaacactttgggatgttgaaatgggaggattgactccaggagtttgagataagcctggataacataatgagagctcatcactaccaaaaattaaaatactagttgggtgtggtgtcatgcacctgtggtcccagccacttgggggactgaggtgagagaatcacttgagcttcagaggttgaggctcaagtgagttgtgatcataccactgcactccagcctggacagcagagtgagagagtcacttgaccttggtaggttgaggctgcagtgagccctgaacacaccactgcatttcgttcagcctggacgatggaataacaccttatcttaaatatatatatatatatataaattaaaaatcaaagtctcattctgattgtttcccctatttatgatccttgggtgaaaatcttccaactgcgtgtcactggttatttcctcatatggttttcttgaggaaatcttcaacatgtgttgatttctgcaacatccctcatattctctaatgtaagagaatcccttcacaatatttaaaattgcctctgctgtagtctagggagatctccagttacacacacattttattattattattttttaacaaaagtcactgcactctgtaaatttttgttccttgcttcaaggtactatgtctcatttggtttcctcccaaaagtcactttttcatagttttcacaagcatctattcatagaattcgttccaattttaacaactggtggacattcttccttcattttatactaggctgtatatgtcttttgacatcattttttaatgcatgtatatgtgtctggagcagaagtgggaaaaagttgagtcgcttatgatcacctcactatactatgttgtttaatttatttgaggctagtttttaggacacctatttcatatatgaaaatctttgagtaaatattttaaaatgcttaatgaatgtttcagtagttgtaaaaatataaattcacacaatttttaggattttattgtgtttttaatgtccatatgtaatgaatttcatagttgcttagaggcttctgttgaccaactcaatagcttaaatttgtggaattttcagacatcactgcaaatactttgacattcttattaaaccgtggtccctccccttgaaatgtggcaaggcttgtggcttgcttagcaaataaattatactgaaagtgacagcataatttggaagactgtgttagaaaaggcagtacattatctctgtctctgttcgtctgtctgtctgtctctgtcttctacttataccttttcctctctttctctctccttctccctctttccctttttctccctctacacactttggagcccagtgtcacacacaaagtcctgacgataaaggacaatttcaaggagagatgcaaagaggagactaaagtcatgattattcagtctcacaggaatttgagtcttttgacatcaatcaccaagtatgtaaataaatgaccttcagatgattacatccccagccaccatatgaaagtatcagcctgagaaatactgtgtatgaaccacctgactgaggctacccaacactcaggctatgggagttgtaataaaacgcttgctgtttttcaaaatccccacaattgagggtagtttgttataaagtgataaataactacaaggatatttctttattgtattatgtttattatactttaagttctgggctacatgtgcaaaatgtgcaggattgctacataggtatacatgtaccattgtggtttgctgcacccatcaacctgtcacctatattaggtatttctcctaatgctattccacccctagcccccctccccataacaggccccactgtgtgatgttcccctccctgtgtccat

SEQ ID NO: 42595 - DNA, 8598 bp, Homo sapiens
accctttcacaaaagatatttttagcatgcaatgctgtcagatagcattttacccatagaagatcttctttcaaaattggaattaatcctctcaaactctaacgctgctttataaagtaagtttaagtaatattctaaatctcctgttgtcattcaacaatgttcataacatcttcaccaggagtagattccatctcaggaaacaagtttctttgcccctccaaaagtagtaactcctcacttatttgttttatcatgagatttcatcaattctgttacatcattaagttccacttctaattatagttatctttctagttttattatatttgcagttacttattccattaaagttttgttataggaccaacagtttcatatgcttactgtccaataatagtccaattacactgagacgtcagatttggcagcaaagaaggagtttaataattgcagggcactgagcaaggagataagaagagaaccctaaatccagctcctcaaggagttctgggttggaggttttaaggagatcatagatggtgataggctggaaaatttgggtaattgattagtcagggtaatagggtaaagtcatcagaacaagaaactacattatttgctgagtcagttccttgtggggtcctctagatcagctggcatcagtgaagtctttcagatcagctgacatcagtgagatccttcagaccagccgagtcagtagttttagcagtatgctggacctgaaggaatacctcaaaaggaaagttgatcatttcataatgtttaagttaatatttatagaaggattaagaggaactatagtcttgtaacagggtctgcataattctaggacaacagccaaataactgtgaggaagtgagtcggagaacaagctaacctaatgattaatgctgaatgtactacaagcttggtttacttttctctttttctttctttatctttgattactttaacaaagtttaaaaagatagtgtcatcttgaaactctcaatatcttacatgatggttgtaagaatcaacatgtatacgctatatcataaatgaacctttaaaatattatgttacataaaagaagccagtcacaaaataccacatattgtatgattctatgcattaaaaattgtccagaataggcaaatctatagagatagaaattcaattagcaattacctaggacaggggaaatgcagaaactaggggtggagagaaaaaggctaaggactatagggcttattttggggagataaaagggctctccaactgattgttatggtagatgcacaattctgtgaatatactatgaaacattaaattttacacaataattgataaatagtatgatatttaaattacatgtcaacaaagtttacaaaaatatgtggaccatgtttagtcatttaatctttagttttgtgtcaaatggactgcagaaacaagatctgtcactgctactgttctggacactcttctaaaatatattgcataagacagatggcatgtccatacaagatccttgatattagctgaaggatagcactcataaacataaaagggaaattaatcacatctgtgtgaacagatcatttaccttcatttgtctctttgccatccacatgctcagactgttgatttaatgatattgtatgtactttgacttataagggttacattttaacttcttggctaatttatctttggacataaccatgagaaatgacagaaaggaacagcaactggaaaacaagcattgcattgcaccaggatgtctgtgaaatggacttcagtaattttgctaatacaactgagcttttgctttagctctgggaattgtggaaaggtgctggtgtgggcagcagaatacagccattggatgaatataaagacaatcctggatgagcttattcagagaggtcatgaggtgactgtactggcatcttcagcttccattctttttgatcccaacaactcatccgctcttaaaattgaaatttatcccacatctttaactaaaactgagttggagaatttcatcatgcaacagattaagagatggtcagaccttccaaaagatacattttggttatatttttcacaagtacaggaaatcatgtcaatatttggtgacataactagaaagttctgtaaagatgtagtttcaaataagaaatttatgaaaaaagtacaagagtcaagatttgacgtcatttttgcagatgctatttttccctgtagtgagctgctggctgagctatttaacataccctttgtgtacagtctcagcttctctcctggctacacttttgaaaagcatagtggaggatttattttccctccttcctacgtacctgttgttatgtcagaattaactgatcaaatgactttcatggagagggtaaaaaatatgatctatgtgctttactttgacttttggttcgaaatatttgacatgaagaagtgggatcagttttatagtgaagttctaggtaagtatttttttcaatcagtaacatgaagctctaacttatttgtgtctttgaagcagagcttatataaagccataaagtcagggtagtggggttttggtaagtgaatttataaaacaaaaatacaagatgatctattaatctcacaaatattatagaaaagcttaaattacagggtcagttaaaaccctgtggccatcactcacacagaacaccccaggaaatcataaacctatacattagtgcatctaagactttaagcaattacacatctgttttactatacattgttttacatcttaaaaacagtaaaatccatcaaataacttcttactgaatgcatagatttagaatgagtagttacacatttttctacaactatctatataactgcagaaattgttttttcttgtaaacttgttttcttatttagaaatcaaaagatgttcccatattaccagaaggtttccttcacagtaaagagagataatgtctatacctcagatgcaaaaatcaataagggcaatttgaagtttctaatgtttctatactctttcacgaaagaattggaaatcattaatttaaagtccaatcatcttgttgaagtgtgaaggttgttatatctacatagttttttgaaactatgtctctttattagaacatatgagacaaattaaggttgagtacaaatttttatttcaataatttctcaaaaatttctagctataatgtacaaatatatttacttaaaaatattattaagatcttagcttgaatctaaaagagtagttggtacaaggatttcagccatactctcaacatagtccacagttcacttgaaccaaagataaaagaattagcttaatgagttgtgtaaactagactatttcttagaaaattatttttatgggtagagtagaattaattgattatggagctcaaagagttgtttaaatgtccgtatgctactattgaagctttaagagaaaagaaattttctgtttaactttctatggctcattttaataattgtttatgattatgagcatactgatgcgacattagagatgtagcttaacctcacaattctcctactactttgtctttcttataaatacacatgggcaaaatatgtaatacataaaattaaattatatctatatatgaatatgtgtatatatttttcaaagcacagatatttgcctacatttttgcctacattattctaacccctttcagaaatttacctaaagtaattatcttgtgtcatccaccttttttttttctattcctgtcaggaagacccactacattatctgagacaatggggaaagctgacgtatggcttattcgaaactcctggaattttcagtttccatatccactcttaccaaatgttgattttgttggaggactccactgcaaacctgccaaacccctgcctaaggtaaacatacttttgttggttttattttgttggctttgaattttcagtagaaatgattctatagtcttctttcagagtgtttgacttacactgaaagaaagatgggaaatgggtggggtaaagcagataccaattagaaactcatgtgcacgttaataccatcacacgtatatgagttttatgagtattacaaatagagaggaatactaaggagactttgaaaatagggttggttaaattaaagtcttcattatgcaatacctaagaaggtattggtcatccaatcaaataatatttacaaagggattagcacaaaacacaggtaagtgcagaattttcagagaaaaaaatagacacagtttctgtccccacataccttacattctacttcaaaagatagaatatgtgcaagtaataaaaattatataaaaactattatctgaaggaaaaacgcaataccaagaaagcatcagtggagataatagaaagtatcctgcagtcactgattagtaagatgagagctgaacaatatgcaggaataggtaaaagaatgacggggagagacagacaaaaaaaaaaaaaaaaaaaaagaagcaggtaaagtggtcaggacagttctcaagtcctcaagtttagtttgcagggagagactaagactcggatgatggtgagaggcaaattagagccagatacgtattaggagttgaaatatttattaagcacattgaaaaactactaaaaagattaagaaataaaaatatatgaaaagattctctttttaaaggagagctttcaagatattcaatggattaaattgcaggagggccagactgtaaagagccaaccattcaggaaattttgcaggattcaggtagcagatgatggaaaagtcgactagaaagttgatagaaatcattatgcccacatttacaaaaatagtggcaacttcatattgtgttgagtggaaaaatattaacacagacaaaacacttaaagtgtctctggaatatagtcagtgactcagaaatattattaattttgcaattatggctattttgttattattactaatactactaattacttaacatgtgctggtcacttgagatatcattcttcatttaatagaaccagattgttcagtacatcaaaattatattctcttgcagagtcatagttgacagataccctgtggacttgattaaaagtagacatatcagttttgacagtaagatgagctacttgaaattctaaaattctaccataggtaataaggatcttcaccagtattgcagcgtaaaacacttcctcaacaatagaaatgtgttcctttaatatttgcagacaaacttagtgttcacttgatcttactaaagcatttaaatcattcttcattgagaccccagagatttacatattacagcataaacataccctatgagagcagatgatttttgccgtatgacaagcaacttattaaagcttcctgtgggaactcgtctcaacatcatagctgcctgacacagaagcacagagataatgaacaatgcatgtataataaagcacaaataatttataccacttgtatctgaatggcgcccttagtttagattccagggaattctgtcagcatataagattatattttttatgaaggaacacaataaactcatatattttaaattaatatcacacttttaagacatatgtacaaagcaagcattctttgttacgttattatttaatctcttaaaagatcatttttgtctacataaaactgaaattttattccattgttaaaactcaatatctatgttgaatgaaaattgtatgggctttatatgataactttctcaagagacaaaagctgaggtaagactaatgaaaaatctatgccaccctaccctactcttgaaaaatttccccacccatactaagggaaaaactgatagtgtcagtaggagggggaagagaataggaggtgtagaaggacaagaaaagggatgactagtactaaaatagtgataattactactactagctgttgttattaacttgcagaaagatttgaatgcaagtcaatggttgtgaaacccgttcttcgtttattatgtaaaataattgctaacccaggttgctttcatttcaattaaatattaaattctaagataatttcttataagagaaaaagacacttgacaaaatgtatcaggtgttttaaaaatgaatattgctatcagttttataatatgttcacgtgaaatcatacagagaaaaaaattaatcaaggtgtacctattaaacattatggaaaatattcataaaattaacattggaagtaatccaacatcttaaatgaaggaatgattaaaaacttatactatgtgcatacaatagcattacaataattttatcaatgaaatattcaactacactgtcagccatattacaaataaagtgagttagaaaatgataaatataacaagatgacaagtttttgcaggaggaaaatgtatacataataagattaaaattatctaaataagtgtcacatgtgtacattgagctatgtaaataggacaaaagccatgatgaaaaaatatattttacataaataatatcacaacataaaaattttagaaaaattttatttaaaaaaatttttttcatgcttttataaaatttcttacattaatcttatattatttttattatgttatcacagaagaagaaacaaccagtccatatcagtgatgaatctgtaaagaggctcgattccttcaacactgggtggataaataaggctctgggcatcaagctagtgagatgaaacactgaacaccagttacattaaatatggctacaggcaactgcaatcacacgcaatacctagatgccccaagtattacctggaatagcagtacaatgactctcatgttaagattaaaaatcatattttaaaaaaacactctgtaatatgtggtctgcagagttaacatttggacttttttttctttgttttgtgaagaacagttaggaaaagttttaccccaatcattaaatctgaaagtatttaaatttaaacatcggcatatattggacaacgcaagtcagaataattctcaatcgattgcagccaagcacatcttcactaggaatgttacgtggtgtgtgtgagctactcaaaaaagagacaagatctcccctgcagaaaggcctggtggcctcttctgttctggtgcaagtgctgcctctgagacacaacaaagtgatgatgagagttcctcacatgcagttataaacagcacatcaatttaacagtgtgatttcagggaaaagttattccacctaaagaatcacctgaaaaatatgatcattcaactatgtaactatatacaattctgtatgataaatgagactcctggactaattcatagaaattccaaattacattaccagactccagaatgtcagcggttcttaaccaccagcttttatttattttattttttttagtttttgaaaaactaccagaaaactctgacaaactttaagtgaagtataaagcattgtagagaaacataaatgtagatataaaattatcccaactgtgagtagcttatcctcagagctcatagttagggaagtaaaccactaactgtttccaactaagagaattctacagaaaacctgcctgaaataaacacaagggatttagtagaacaacaatatagaattaaagctgagtggtcccactttccaagaacctatattagtaactttagtattgtaagagaagagtctgtgtataatatttttaacattatctccctgacaacaatgtaatagctccatttcttttctcccttacacacatgcacacaaatacatacacatacacacatatttacacaaatatccttaacagcatccacctatctcatattatacatctacttgcaaaaaaactgagtgattgggtcagttaaaaaatattatttactccaataattcctcaaaatactggattttctctctttagtaatttgcaccaattcttttggtagtgcccgctgtgctaatactcttttgtgatgaagcaaattctttcttcacaggaaatggaagactttgtacagagctctggagaaaatggtgttgtggtgttttctctggggtcaatggtcagtaacatgacagaagaaagggccaacgtaattgcatcagccctggcccagatcccacaaaaggtaagatgaagtgccttactggtgtggaaaactactgaaagaggctgttaaagtttgaagtaatccaattatagaaacttctgataaatgtgaagttgaccaaaagttgaaaaattagaacaaggataatcttggagaaactatgagaagtttgaaaattgtggttgcatttttttttaaatggtgttaagtatgaacattcccctatgtaaatatgctgacaataaattgaatggagaaaggtatttaaaaagtgtttggagacttctcacctcctgtccataaaattttgaattgtgtatgtgatctacatagaaagaatattaaagagtagattgaactcttcatagctgaatatagccttaaatatgcttgtatagcatccaccgacaga

SEQ ID NO: 42596 - DNA, 648 bp, Homo sapiens
tcatagactcaattagaaagtttttcagttgtgtttagttgtaggtgtttgaattcctgtttgataaaagcactttttaagaagcttttatgtaatttgagctatactgtttaattctattaaccattccattaaagcagctatttgtaactttgaacattagggtaaatagattgtgcaaagttcagactcactcactgtcaactggttgagaaattgaaacttaaaacatagttatgattattctgggttatgaacttcttgcacttgttttgagctcagggttaattagaccaagagctgatcatagagactaaatggcttccatgttattttcctgttgcatctgtgcttctttgactctggaaggactggaaaagtacttgtatggtccatgaattgtagtcaattaatttaagagtgttcagcttcttttaaactgctgacatttttatgatcagcatggaaataaagctgtcacaagtggagaaataatttccaaaatatgagtgacagtgttgtaataattgaggagtcattcagcaggctgtaagcacacaagttcaatttctcttttgcagaccctttagcttaatgtggaaagttgatggctgagctcctcgacatttcatttatatatattctttt

SEQ ID NO: 42597 - DNA, 4050 bp, Homo sapiens
aagttagtgaggctttagcgaactgtgtcaggcagtctaagcaatattggataatgctagagcccagcccctggaaagatcctgtgggtcactctagtaaattattcaccctgagaatggggtcataatttgtagccaagccagacagtagttaatggatagcctggagactcactacttgcaactggcgtctggaaagaagagcagtgagattaagccctttacttgtggaatctcatgctattgtcatgtatctagcggcttacttgaattaaattgtgggaaaaacggttgttgtcagctgagaattaaattgaaccattgtgaaggtaaaacatccacatattggtggctggaagttctgtgttgtgagtgaatatacagaaaatcagtttttttcccctaatcattttctaatataggggtttataggtataagttttcctctgagccttgctttcactgaatctccaaagttttgacatgttgtgtttttattgattttaaagtattttataattacctttgcgatttcttttctgacttattggttgttaacattaacagaataaaaactctactgctatatagttccatcactcttctttttctgttactgaggtgacaaattatatctatatattgtgtgcttaataacatggattactaattgtcttttaagcaattgtcctctaaattataaaaaaaataaaaagtagaatcacaaccaaaattacaaaaatattatattttataattgttatgaatttaccttcactacacatctttattcctttacatgtgttcacattgctgcccagcacccttctatttagaactaaaatattttctttagcatattttgcagggccggtatggtaatagtaaattttctctgcattttaaaaatctgaaaatgtcctaatttctatctaatttttgaaggacagtttttctggatgtacaattctttattaaccttttttttcagtacttcaattatgtcaatccactgctttttggctccaatgtttcagataagaaattggctgataatcttaccaagaatgacgtatttatgatgagtcacttctctgttttccagtttctcttactgttttgactatgagcgtcttgattataatgtgtcttagtgtgggtttttttgaggtaatcctacttggggtttgttgagcttcttgaatttgtagatttatgtactttattacttttttttattttctgtaagtagtttttcaaatattctttgcatcttttctttccttcttctcattctcagacttccacagtgtatattttgttttatttgataataccctacaattttcttaggttctgtttatttcttttccttttttttaactgactcaataatttcaatgactctttcttcaggtttgccaattctttcttctatctgctaatatctgcttttgaaatcttccagtaaatttttcacttccattattgtatttctcagctccagagtttccttttggtttcctctttaatttctttttcttgattgatatcattttgttcattcattgttttcttgtcttgatctattgattcctttagttatttagacacatttaagacagttattttaaaatcatttgtgtagcaatttaagtgtctgtgctttctcagaaattgtttttgtaagtttattttgttactttgaatgggcagtactttcatgtttctttatatacttcataatttcttttgaaaaccagacattgattttttcatggactatgaaatcagattatctttcttgtttagggtattttttttaattttttaacgatttctccagcctctatacaaaagacatgttgtctgtcagttctgatgtgctgccagatacatatgaagaaggattaggaagcccagcattgactatcatgaataatgctgcacacaacatggatgtgtcaatatattttcaagatcctgattttaattatttttggaaaaataccccgaagtgacactgttggacaatatgctaattctgttttaatttatttcaagaagcttcatactcttctccatagagacttcaccatattttattcctatagataaggcacaaggctatttgtctatattctctttaacattcattattttctgttttatggaaaagttacctttcttatgctcactttagacttagttttccttttcttagttccttgatgggtaaaggtaggttgcttatttgagatgtttcatcatttgtaatatggttattttttgctataacgttttctcatactacaaatttttgctgtatgcataatttttgattccttcttcgcatccttttttctatcttttatgtgtattctttgtgtttagaatgaggattacatgaagcattttaaaattataacaaactattttagatgaaatgaaaaaactttaaagattaaaattttacttcaatcacatataaaactttgtccctttacatcactcatccccacttaatattcttaatatcactgaagatatcttcttatattgttattaatttatgtacacttatagctattttatgcttttgttttttaagttgcatatcagaactaaaagtaatttatgcaccaacgttaactacagaactccatatttgattatatattttcctttactagtgaaatatttatttttgtgtgcttttgcttagcatactttttttttttgagatagaatttcactctttttgcccaggctagagtgcaatggtgcaatcttggctcactgtaacctccacctcccaggttgaagtgattctcctgcctcagcatcccaggtagctgggattaaaggtgcttgccaccatgcccagctaattttgtatttttagtagagacaggatttcaccacattggccaggattgtctcgaactcctgacctcaggtgatctgcccacctcagcctgtaaaagtgctgggattacaggcatgagacacggcgcctgacctgcccagcatactttcatttcaatctgaaggactccttttaatatttcttctaagtctagcgttgattatatccctcatcattttttttttctaaatctgggaaagtttcattcctctatgatttttgaaggacaaatttgccagatgttattctcatttgaaaaacttttttttttaatttccttgcagcattttgaatatattatctcacttacttttggtttgcatgatttttgctgagaatcttgttgataatcttatgggagtttctttacatgtggtaagtcccttttttcttgctgctttcaagattttctttttgcttatgacttctgaaacattaccttgtacattgttgcagacttctttggattattctcatttgaacttcactgagttcttgaatttgtatgcctattatgctctgcaaaattggtaattctttgttcactatttctctcaaatataatctctgccccaatattttactctttttttactaggactcttataatgctttattggttagcttgatggtgtattttaagttgtttaggctgacttcacttttttattgtgaattttttctttaaatttttgctccccttcctgaataatttcaaataacctatgttcttaagtgtgtatttttttttatctgtttgataaagtcttcttgtgttctcctctagtgaatgctaaaagttcagttattgtattcttcagctccagaatttttgcttggttctttttttatagagttttaccttttcgttaatgttttcatttttataggcactatttttattattttatatagttgtgttctctctttgctaattgagtattttaaaatgataattatgaataatttgacaaataattcatagatcttcatttccttgaggttattttctagaagtttattttggtcccttcattgggccatggtttagtggtgtgtgtgtttgtgtgtgtgtgtgggggggggggtgtatgtatgccttgctgccttgtgttcttttg

SEQ ID NO: 42598 - DNA, 646 bp, Homo sapiens
tatatcctttctgatcataatggtcatgccaaagtactgttcatcaaaaaaactcttaccattttattatctgtcatatacattgtttttaaactgacatctgaggtgaattcaaattatctgaaaagctaacttgtcaggcaggaaatttttatcctttaaccctttacagagtttaaagctcttttcagtagttttccatcactcaggcaatttatctaacctttggagagaagtgcacaaaggctgttgcaatcacattgaccctttcctctgtgatgttactgaccattgaccccagagacaacgatgcaatgctattttctccagatctctgggaaagttttcatttcctatgaagaaataatttgctctgtcacaaaagagcaataacacagccaacattattggaagaattgctacaagaaactaagtagaaaaaatcaagtatcagccagaattgttagcggagtggctatggtaaaacatgcatgaaactttccatcataaccacttctaagtacacagagaatgctagatatattcacaatgctatgcaatcaatcttcggaatttttttcttctaaaatgaaaactctatacctaatatacaacaactttccattttatgctctcctttttacct

SEQ ID NO: 42599 - DNA, 4050 bp, Homo sapiens
acacagtttttattacttgcatatattctatctttcaaaatagaatgtaaggtgtgttgggatagaaactgtgtcccatacacgtacctgtggtgtgtgctaatctctttataaatattctttgaatgaatggccagtaccttcttatatgttgcataatcaaagctttaatttaccaaccctattttcaaagtctctttagtatccctctttattggtaataatgatgaaattcataaacttgtgatagtatcaacatgtacgtcagtttctaattggtatctgctttactcttcccacttccacctttcttccagtgtaagtcaaacactttgaatgaatatagaaccattcgtactgaaacttcaaagcagacaaaacaaacagtaatagtttaccttcggtaggggtttggcaggtttgcagtggagtcctccaacgaactcaacatttggtaagagtgggtgaggaaattgaaaatcccagtagtttcgaataagccatatgtcagcttttgccattgtctcagataacgtagtgggtcttcctgatgggggaaaaaaaaagaaaagatagatgacacaagataattaaactaggtaattttctgaaagaagttagaataatgtgggcaaaaatgtaggcaaagtgtttgtgccttgaaaaaaaatacatatattcgtatataggcataatttaatttttatgtattatatattttacccatgtgtatttacaagaaaggcaaagtggtgagagaatcatgagggaaaactgcatccctcatgtcacatcagtatattcacaatcacaaacaagccatagagaattaatctccatttctttattttgtaaaccttcgatagtagcagatatacgtataaaccactctttgagctccgtgatcaattaattctaccatacccataaaaacaattttctaacaaatagtctaatttcccattcattaatctaatcttttatctttggttcttcaggttaactgttgattattttgaaatgatggctgaaatccttgtacctactactgcttttgagtcatgctaacctcataataatattagtttttaggtaaatatgtttgcaaattacagctagaaaattttgagaacttgttgaaacagaaatttgcattcaaccttaatttggctcatatttttaaagaaagatacatagtttcaaaaaaaaactatacagttgtaacttaatgttcacactttgacaagatgattagccttaaaataaatggtttccaatcctttagtgaaggaatagaaacactggaaacttcaaataacatgcattggtttttgattctgaaatggagacatcatttctctcaactgtggaggaaacgttctagtaacatgggtacatattgcaattactaaataataagactgaaatatacaagaaaaaacaatttctgcaatgttatatagatagttctaaaaaatgtgtaactactcaatctaccagtatgcattcagcaagatgtttctgaataagtctgacttttttttaagatgaaaaaatgtataataaaacagatatgtgattgcttaaagaaatcttaggtgcactaatatacaggcttatgacttcctggagtcttctgtatgagtgatggccacagagttttaactgatcctataatttacattttctatagtgcttgtgagtttggtagatcatcttacaatttcatttgataaattcattacaaaaataccccactaccctgactttatggctttatacaaactcagcttcaaaggtacaagaaagttagatcttcatgttaccaatcaaaaaagttacttacctagaacttcactgtagaactgatcccacttcttcatgtcaaatatttggaaccaaaattcaaaataaagcacatagatcatattttttaccctctctatgaaagtcatttggtcacttagttctgacataacaacaggcacataggaaggagggaacagaagtcctccactatgcttttcaattgcgtagccaggagagaagcggaggctgtagacaaagggtattttaagtaactcggccagcagctcaccaaaggggaaaacagcatctgcaagaacaacatcaaatcttgactcctgtagtttcttcataagtttcttatttgaaactatatccttacagaactttctaagtatgtcattaaatgtccacatgatttcttgtacttgtgaaaaatatgaccaaaatgtgtcttttggaagttctgcccatctcttaaccagctgcttgataatatcctcaaactcagttttagttaaagatacaggataaacttcaaatttaagagtagatgggctgttgggatcgaaagaaatggaagctgaagatgccaatacagtcacctcatgacctctctggacaagttcatccaggattgtctttatattcatccagtggctgaattctgtgggccacaccagcacctttccacaactcccagagctaaagtaacagctcagctgtatcagcagaagagctgaagtccatttcatagacatcctgatgcaatgcaatgcttgttttccagttgctgctcctttctgtcatttctcatggtgacatccagtataaatcagtcaagaagttaaaatgtaacttttacacttcaaagtaaatacattatattaacagtctgagcatgtggatgacaaagagacaaataaaaggtagatgacctgtttacacaagtgcgtttaatgttctttttggatttttttttttttgagagctcactgcaagctcctcctcccaggttcacaccactctcctgcctcagcctcctgagtagctgggactacagacaggcacctgccaccgcacccagctaatttttctgtatttttagtagagatggggtttcactgtattcggcaggatggtctcgaacccctgaccttgtgatctgccctccttggcctcccaaagtgctgggattacaggcgtgagccaccgcacccagccctagatttttaagtgctgtaattcagctaatatcaatgatcttggatggactcatcacctgactcatgtaatatatttcagaatagtgtgcataagagtagcagtgagaggctcatgttcctgcagtctctttgacacagaactaaagataaaatagctaaatgtggttcaaaaacttttgtaaatttgttgacgtataattcagatatcatacaaattatcaattattgtgtaaaatttaatgtttcatagtatattcacagaattgtgcttctaccgtaagagtcaattttagagaactcttatctcctaaaaataaaccctataagctttagccttttactccctaccccttctttctgcatttgtcctatcctgggcaactgctacttgaatttctgtctctatagatttgcctattctggacattttttaaatacatggaatcacacaatatgtgatattttatggctggcttattttacttagcataatattttaaaggttcatttatgatatagcatttacgtgttgattcttacaaccatcatgtatgatttagagagtttcaagatgaaactattcctatagactttgttgaattaatgaaggacaaagggaggggaaaaaaaaaaaaaaagtaaaccaagcctgtagtacattcagtattaattattacattagcttgctctctgactcacttcctaatagttttttggctattgtcttagaattatgcagacattgttacaagattaaagttcatcttaactgttctatagataataacttaaacattttgaaatgtggttttctctttgaggtattccttcaggtccagcatactgatgaaactactgactcagctggtctgagggacctccctgatgccagctgctctcaaggaccccacaaggagctgactcaccaaagaatgcagtttccaactcctactgattttatcttcattatcctgactaatctatgactccaatttttcagtccatcaccctccattaa

SEQ ID NO: 42600 - DNA, 1742 bp, Homo sapiens
gatgttctatatatgacaatttttattctattttgtgatacttacgttaaaaataaagagtttcttaattctttcctgaaaaactgtcccaaaaactgttccaaaatccaaaagttaaaatcgtggagccacaagttaaaaaagatggacagcattgtattttttactctttccagaaaggtctttatgtccgttagtcctgtcataggcacagatacataggaaggtggaggtggaagtttcccagagcttcactcaatattgccacctacagaagctctaagtttgagcacaaaaggaactgcaagcaactcagcaataaactccccacagggaatggcagagtctataagcactacagtttagttgggttcctcttgcatcttcaagagtgtctgattgtaggcaaaactctcacacagagttttaaaaatttctctagattcagaaaaattattcagttcttttgctgactgccaggaggtcaagcttgacaagacattcaggactaggtccagaaattcattatgtacattgtcaaaattcactttgtcatgtggcacttggaccacctcaaagttcaatgcagaaggcttcccatagtcaatgaaaaagcctgtgtgtgtgagtcaacactgttacctggtgacccctctctatgagttcctccaaaatattgttgacattaagccaatggctgatgttacagtgctgccccagtaccttctcacagaatccacagccagcacagcagagctgaggtagcagaattgtgaaaacccacttctcagacaccatgatggcagctacctcacacactgctgtgcagagtttgagtgtttactgagcagagttaaaatgacaatttaggcaaaccagttaaaagttaatttttaaatattaaagattactagctttttgtaagtttaatatttttggaggaaatcaaacagaaatacaatatgtcagggaaaagtttaagcaactgtctagaacttggaaataaaatacctaaaatagagataattttattacctagattgatgttaagaaaaattaaacaataacttttagagttaatgttttacacactgaaacatacacacataaaccaattgacatccattgcccaataagtccagggttccagatggcttaggggaatactgtttcacattacttgctcactttgactacccaatgatttaataataaaaatacatttcaagacctataagaaccattttgataaattatatatatttagtacagggtgttcagtattccagaggaaaaatacagtaagtttcatatggaacaactaagaaaagccttagtaatgctgttgacttatgaggtgtgacgaaaggtttggtaggatttatacaatgttgccaaagaaggaatttcataataattagaagaaatagaaaagatatttggtaatcttcccagtgggtatggatcacagagaaagttgagagcagaagcctacagaagaaagctaacttgaagtaggagaacgtagtctctataatgacaaattatggatttgaattctagttttaggtaaaaagatttactcagattttaaaggacggtcataagctcaagcttttcgcaagtaattctaacagacagccatgaattggcatataaaagcaaaactttaaaatgacaaaaagattaaaaatgtacattagtaacctaagtatgtcatccaaatggcctgatgaaacatg

SEQ ID NO: 42601 - DNA, 2533 bp, Homo sapiens
aatgaagatcctgaaagttttacctgagagacaaaactgattttatagtcttaaagaatgcagtatgtgctttaaattagaatctgatagcaaatatcttccatattttagtttaagtacatgggtctagaattaaggaatttaaaaagggaatgaattctctcaaaaatatgctccattatttttcctgaactattttttttatcattgcaaccttaaggcaatttgaagattgtcaatcacaagagaggaatatgggatccaaatatgggaatatgggattcatattacctatggatttggccacaattaacttagattggaaactgagagtgcctcttgattattctgagctactgtgttttagactttggccagagaaagcattactctcctggctgtggttattgatccaaaataccaaagataaactaggatgctaaaatatgttgagtatagtctaaattatagctaatatctgcatattacaataacgtatcttaatgctttggtattcaataataaaattcagtgaaaagtaatggcaaatcattaagacaaaacatattattacattgatttgaaattgatgaaattttggataattctaccagctaaagaactttgaccagaggaagtgctgccagagaataagggacacatgcaatgtttacgaacaaaataagttaaacaactaacttcagcctcctgattaactctaaaggatgatcttataagagctgtgcaaaagcactccagctgatgtgacctggtgtctgctgtgtgagggatgagactttccacatttgactcatctgaatagtttttctaacagctgttagggaaagttgatcctcagtctctctctctctctctctctctctctctctctctctctctgcctctgtatgtgtgtgtgtttgtgcatgtgtgtctgtgtgtgtgtatccatgtatatcctgcagttacactgactaatccagtttgcattactcaggaatttttgccagctggtcttctaataatattcagacaaagagagataactgcagaatatcaaagagaaggaggagagaaagcagctcctatcttacctgctctttttctaccttggcctcgcctcgctttcagtggctgtgtctctctgcaaccccatctcttaccatgttatcttgtttccacagttccacttcttaaggaactctaaaatgtcacttcttttacttttcctttccaacctagggttgatggagagtttcttctcttggtaagtcacagttcctaatttattttcttagctctgtcaacattactaggaatagtaacatcctaaagctgaattatcctggggatacacctgtaaataaaataaagcccctcagctttcaggcaaaacaaaacaaacttagcagcaaggagaccccagacagattcagtggctttggcaacgctggaggttagtcgcacctcattactccccttccctataactgccacaggactttattttctagtaattgaacagacaccagtttctgaaaaaaatgactgaaagattttttccaccaacgttgacagactgtctaacatcatgactagactcccctcccttactgtggtttctctaggacagctgactggacttacaaagcattctttcctaagcaataacgactgaccacagactggtttggaccagcccacgatgactgtgcacaaggcgcctttacgccctctgattgactttttgatgtaaagagacaagtttcagttcattttaatgttaagtctccatgccaaagtgaacatgggatgaacatacaggtttgttcaccatgcatgtgtttggccttcttcataaatattcctaggattattatatatcctactgaatatgtatgcattactggtcgggtcctgttaggcataaagcccagcctcttttttttgtctctgaatcatatgcttttggtattagttggagactctgtttcctagcctgcagattataactctttgtaacaaataaatctctctttttttcttcttccacatatctcacagtgtttcattaacccactttcctgaagctcctaagcacctacctagctcctaaactgacaatttcaatataatccagtaaattattattatccatgtatatattttaaaaagtcagttgactggaataattgagaggggaaaagagacaaccaagtctgactctttagtattgaatttaagctaagtgttgagagtattcctattcaaaatgaacacactgttccctttgtccagaaatcatggcacaagggctttgaaaaggtagttttatgtagactatttccactaaaaaacacactgcgcagaattccatttgagtttgccttcttccctacttctcaaatgacagacttcaaaaataaatggagtactatacctatccttcaagtttggacactaaataaaataattgtctcagatagcctagaaaaagtttaaggcacctatacaaattcagagcaaatgctga

SEQ ID NO: 42602 - DNA, 416 bp, Homo sapiens
tactttgtggattaacaatagtatctgtaaagctacttttcaatcttcttggtacagagtaagagcgtagtaatgttagcggtttaataaatttgtccaaagattgattaggaaatcagtaggccagctacagaatgactggctagacttggatatagtgagatcagatatggatatagtgttgcaattcttagtgaatcccaaactgagcaatagcaattatgtaacaatgctgttttgaaatcattacaggctaccattaaaaagagaaataagaacaaatagagtgattaaaaggataaaaatcaaaaattaagattagaaaataagtgacagattttaagtttatactcaattgcccttaaattatgtaatttcaggcccttgagtaacaaaagaactgggaggacagagaa

SEQ ID NO: 42603 - DNA, 1054 bp, Homo sapiens
ctgggacactcatttccataggtgaaagggatgggaaaatgcccttacaaaagcccagacaatgatttcagaaaataacctccaaagcaatgtgagcaggcaatggtggatgggttccatgagacagaaagggctgtgagatgcccaggagccgaagcctggaatcctgctctctgattctatgtaaaaatacaattgattaacaaatgaaaattgtatatattcaaggggtacaaagtgatgatttgataatcatgcagtgagcatcagctgttggcagtgagcatcagctgtggtcatcattatgcaataatcatgtagctagtgtcagttgtgtaataacttgtgtaatgattaccatagctgatgctcactgcatgcctgcttgcctgctcttattgcaatgtcacagcaacagaatatctcactttccggcatgcagaaagcccctgtataaacagcactgtccctataaacagtggagctgaatttgatgctggttctgaggtatcagctctaattttgtgaaagttacttaacccactgagcttcagtattctcacctttaaataggataatataagacaggaaataaaataaatgtttgaatttaatgctaatacaacctggtactttgaaagttgtagtgtggcaagccacagtggctctgcactttgagaggctgaggagagagaatcacttgaggccaggagtttgagaccggtctgggtaacatatcaagatctgtgcactacaaaaaatgtaaaaattagctgagcatggtgatacacatctatagtcccagctacacggttggctgaggtgaaaagatcacttgagcccaggagttccaggcgcaatgagccatgactgagccactgcactccagcctgggtgacagagcgacaccctgtctcaaaaaaaacaaagacaaagaagttgaagagtgaagataaaaaaatgtttcaagtgaattatattgatatgcacatattagaaaatttaaatcttgaaattaggagaaatatgttctggtgttcagcacaggagggtg

SEQ ID NO: 42604 - DNA, 1857 bp, Homo sapiens
agtataataataaaatgtacatatatatatatatatatatatatatatatatatatatatatatatataaatgttccaagaaaacatagatcagagaccacacaaatagatataagcatgtaataataagtagaaggaacattgggtcaagagggcagagtggagattcagcctagagagtcttccttgggcaccagattgggaaatattttgcagaggttatgatcatgtctaggatattaaaggtgctattaaggtatccaaatctatccaaatataagattaagtaactgaagttcccaaatggtgaccagaacacagcagtaggtgatttctctgaagttcaaacgggtctgttgggaaaaagaggactccccataagaagtaggtcacagccctcagggctgcttttcagaacagagctccagttcccaggtaaccaatcctacagagactattgtaggcgtttgcctttcggagacttagacattaggtatgatatagaaaaaagatttccaaaatctgaactacatgatcggggacatgaactttgttatccaaatagaggcactgcaggaagatgagctatgactcagagaacaacttgaaactcggtagacagcagtggaacacagtgtcctgggtcaaattttcggcaaagggaaattggggcagagttaggaaatatagtctcattatgaaaacagcatttcttggaccatggtactagggaggggaacttaattctaaatcataatatatgggagattaagtaaaataaatcccttctttcttatcagtactagtgtagaaaaaggcaggaagagcctgtggttacattgttcctttgttacaaaaagttaacaatgaactttagccttagagaatttggaaactcagaatcaaaggaacaaaactgggatctgattaataacattgaaaagaatcaacatattaaaagcatattattctcctttataaattcatttgattgcccaaatcaattcataactgccctcgtttcaatcaactacagacaatctcttatttcttcagatgtgtgatttagacactttaaatctctgtgcggaattgaagtgcagttttggacatttctgtctcataaatagcatcaaatttctcattttgggccacggtgaagtaattcttccagtcaccagccgtccctaaaggtaaataaaaaaacataggaaagaataaaatatttccataagaagaaatcagtatataccaaaggaaaagattagaaggcctaaagaaagaccttccttttatttgaatgaattcaaacagtctttaaattgtattaacctttaaatttttcaggcttttaaaatttgaataattttttacatctggaaaggtggtttataattaaatagagtctgacatttgaagaggcattctgagaaagactaattttcttgtttaaattcctgggctttacaatagtttcccaagagtgataattttactgtttctaatggtcgtaggtcatgagattatcactgagcacttggatcaatagtcaggcatattttatttcacaaagtaatttttggaaactagacaaaaaattagtcatcagcacagcaaaactgtgaaataaaaagttgataagtatcatttcctagaatttataaacaaggatgctatgatatggagatgacagttgtttttcctaaattcactaggcttgttctttatttgtaatttaggtgggaataataacattaatatcaaatatataacatcctggaaccatgttttttaaagtaaatctttgaggataaaaatttaaatttagtctctcatacttgggtatttataaatatg

SEQ ID NO: 42605 - DNA, 1908 bp, Homo sapiens
aagtcacacatacaataatgcatatgctgtctaaataatattacaaaataataattccaagtgggttaaatttacctgatgttcttaatccagggagagtcatttccaacattggaactttttcagtaataaaacctcgcttacatttttcaatatctccatcatttagaatcatgtctataatttcactaacccaagtagtacctgtgacaaaaggcaacattttcaaaataattacccaaattgcacgggagagggagaagaatttattggaaacactaccatcttaacacattctattacaaacttaattcccctttctatgcaccaaatgccaattttaatatactaaaatagatggctgcacaaaatgaatattaactttatttagaatggtaatgattttatggacaagttgatttccaggaaacaaaaaatgaggtcggacttgaatttgtcaggccacagaactcacctgatttaggataagtggctatcacaatgtcatctggtctgctatggaactgttcaattttttcccagttgcttgcaaaagcacaggtcatgggataaccatggaccaacttcagatcttttcgcagaatatcttttggggaaagcattttaataccagattgtacaaatatataatagattgacagttgttctggagaaatatagagaataaaaatcagaatctgagtaactaatgttggtcttaagacactgcaatttgtcacaaagtaaaattggcctttaacattctgcgcacatggagatctaagtacaaagggcatattttgtgggcattaggtgcagtagattgcaagagcagtaactggctctgtgacaagcaggacaaaggtctctagtggaagttttggaaagaaatgaaactgcatatctctctttgaattaaaaagcgtgtttcacagaaatatggcaaaaacaatctgaacaatctgacttaaggcaaaataaatccactgctcattattaagacttcagctacacgtcatttttccttacagaaaatttgctgtcattctgacctttgattttcagtttgtaattcatcctttttctttgtgtgcttctaaggtttctttctttatcacttattttgagcaagtagattataatgttcctaggtgtggttattttcatgtgtgtgtgtgtgcacgcgcgtatacattttagctttattgagcttcttgaaattgtgagtttacggtttccatcaaatttggataattttcagccattatttcttcaaatattttttccatctctctctccttctgagactataattacatgtatattaggccatatgaagttgcccacagctgagagattatctatttagttttttaaaaagcttttctctgtgtgtgtttcatttgggatattctctattgctatgtctttgtaattactaaccttttcttctgcaatgtttaatctgtctttactcctatccagtgtatttttatctctggctttgtagttttaatctctggctgttcaatttcaatatgtttatttttttgttctcaactttttaagcatactaagtacggttataatgatttttttctttgtttaacatctgggtaattctatgttgttttcaattgattgatttttttctcattatggtaggctttttctccttgtttacatgtctgataattttttattggatgcttggtgttcctgttaacttcttcttgattagaagctgtcattgataattttttgtgtcaacctgactgtgccaaggagtccccagacatttggccaaacactactcagagtgtttctgtattggtgttttaggactagattaatatttaaattggtagactgagtgattgtcctgcctaagtgggtgatcttcagcca

SEQ ID NO: 42606 - DNA, 889 bp, Homo sapiens
cccagaatcagaatctacattttagtaagatcctcaactaatttgtttgcacttaaaacttgagcaaatgactttaaactacctttaattatctaatgatacagggtgtaagtaaatgatttaatcaaaatgaattcagggtcttttaaaacaaattgtactgattgtgcttcatgtatatgatctctaatcattacctaccctgaaatgataagtcttacttgcattttgtggataagattaggaaacagatcttcagagcgtctgctcaaagaaacacagaaagggagtggcaacccaggaatggactttagtttgcccagctctgttcatgtgatcatactgaaaatttaccgtaggcccaacccagagtcaaaaatgtccgtgatttatctcattcaaacaagagtatttacaaattggaagggatttttgctttgacaatgaaaatcccccgtgacaaaaaggtcaggcacttcatgctgtaaaattgttgccggagaaggatggaatgagtaggaagatgaaaataaggcagctgtttgtgaatatatgctagtcacctctgggaagtgggtgtgtccaattcaggaagctacagggtattaggcatcaaacagcattacctcgtcatgaccagtggataaatgatgagttctgaattatatggggagaagagtatggagaggaggactggaagatgtcaaataattaatataattaaactagatatgctgaaagatgatttatgaatgacatttactttaaaatctaaaaattagttcataaaatattttaaaccctattggaaaggaacaggctatttaaagtagttgtaaattatacatgggatctcaagacttcctatttaagatgagccataggctga

SEQ ID NO: 42607 - DNA, 763 bp, Homo sapiens
caaaggagacagccaatctgtcatctctccctcctggctggcgcaccagaaatgttgcagaaaaatcaggagggcaagagagacctcggagtaaagcaggagaatctttattgagtgcactcagacacagcagactcaatgtccaaagactgggccccgaacaaagacaaggtcttgctcatatacctactcctaagtggtgcgaaaacaaatgtacagaaacaagacaaaggcacttaatcaggctatgccaggcatataactcaggtttagtataccccttactatgcagcccagatggtcattatctgggttagttcaaagttcaaaggagtttcacaaatactcatcttgcgacccccccaccatggcgtccagctggctgtaagctagacctgctcaggcacgtctggtgacctttgttacactgcttagatgaaaaagcaggaacctacaatcattaactatagggaaaacaagaactcataacacttacagagcaaggagcaagatatagttacatagcagacggcatgggattcgagggggaagtttacttacactaaaggagagataggagaacttatctcctcacatctctatattgagggagtgctgggaaagtcttcagggcacatccctttgagctctggcccttagataacgttatcaaaactttgcctgttactgcctttgaaatgagtctgcctaacacaggcagcttgttttatttttttcttttaatttttattttgcttttctt

SEQ ID NO: 42608 - DNA, 780 bp, Homo sapiens
tggagtgaagaaagagaagccaatgaggaaagaaataagacagcaaggaccctcaatcagacctagctcagtttattaagacctgccaaagaagtcattgggttgtatcttaacatgtcaattggaaaacacctatttaaactctttgcctttaactcttaagcagacctgaaaattttaaaaagcagatgacagctaaagaaagaatgtaaacatcactcacctttcgattattattttagaaacctgacttctctctgctcccaaccacaaaatagcatactgtgaatttttcaggtaatgatagctaccaacacttggaatttacacaagagaattagaaaaataaatggccaagggtttgtggaatccacaaatgcattacctttcttttcatttttctgcacctactctgtcacttaagaaaattatcctttgctccaccccatcaacacctccaaccctgttatttcttatttctctattaattactgttagattacatttcctttgagaggctcactcttacaagactctatgtttctcttagtgacttttaaactttgaactttctcctaactagtatttattttactgtgttgtaaatcaatgtttgcttgtccagagtactttttaaattataaatagcttgaaaacagggtcttactctgtaattagcatttttttctggcatctagtaggctaggcattgaatatgtatttactgaataaaagtggctgatttattcaagaaatataagaagttaagggggctatagt

SEQ ID NO: 42609 - DNA, 699 bp, Homo sapiens
tttgaaattttaagtctttggcacttattcatttaagtaaatgtttaagcatttcttttcaagaaaaggcagcacattatcagagctcaaagccctaacataaaacgactgtgtttgaacagagatcaaaagctctcatgaaaatgaaatcactcttttctggggaaaatcttggcatcactgagcaagtgataagcagaacacatggatgaaaaaaaatttggcctttgaaattaccaaactacgtaaacaattggcaaaaatacagttcaatcatgcctttggggatgtacacatttggctggcctctggtctgtccttttaagccctagtgcaccaataatagcattgtccctgaggtaccttgagatgaatttaattctgacttttcctcctgtctttgtttcctgtgacttttctctggttggcaaacaaagtgtctctgttcttgtttgtgaatgtctgtattgatttctgtcatcatacttattttccttgtactaaacattaatccctggtacataccttgagtgaacttgtcctttgtggtcataaatgacctgttagtctatgcccttcttagtggaattcgcacggaagctggatacacctcctaatgttgtcatgagggtttggggaatcattttgtaagtttctgagttggcactaaatttctattggtatttaacattaaaaaac

SEQ ID NO: 42610 - DNA, 676 bp, Homo sapiens
ttttttaataagcctgaattgctctctttacctccattaaacttaatacaacggtctcttcatagcctttagtaaatgctctttaacaaactcagcagttaagtgactagcacaggacatgtgcgtgacttgcttttcagttatttacaccaaaaacttctgggccgagcaaacccaaataccacttctactataaaactgactctgatgtaatcatgaagggtccacgtgtgaaaagctgaagtcattctgtgttggcttgtggtcaactctcttcttccaaaagtccttctgcatgggcttactacaggtacaaacagcaggtaataatccgggacagaaacaaatgaatcatcattttaatacacaaagcaagtgggtgttttactgacaagctgccaagagctactgtatcaatggcatatatttctgctgcaaactcctctgtttgtaaaggaccaatgccaaatttgttcagtgtcagagtttccaggtaggtgcctttggaatccaccgtgaaagaaaggaagcaggggcaaaaaatgacatcagcctgactccaatgagtatttatgaagtatactacctgagaagttactgtgaactaggaaggcttccaaggaaggtattttaacttaatttttattttaatgtctatcaaaaaatttacatcaaa

SEQ ID NO: 42611 - DNA, 2061 bp, Homo sapiens
gaaactcaaacccattaatattcctatttgggggataacctcctaatttctaattttcacattctggtgctatgatatctctctctttctctctctctctgtctctctctctttccctgtctctctctttccctgtctctctctctcacgcacacacacttatatttccttttaatctgactcttttggcagcttgaaaagtaccagatgataactatctaatagtttcttgacataaaataaaactggcagcaggggccccatccatttccatactctccttgacagacaagtaggctagtacttagataagtgcagagtgccctaagcatacttatttcacagaccaaaaataaaaatcaattttttattctaggtaccaaaaggcaaaatgaagattctcctggtctttctagggcttcttggtaattctgttgctatgccagtgagtattttttaaatgttagctcttctctttgtgttccgttaggaacaattgttgagcttatttcaactgatgttctgcatttgtcactgacattctcttacttccagatgcacatgccccgaatgcctggatttagcagtaaaagtgaggaggtatgtacgttcagtctcagaggagaagttatccagagtcctatcctacacatttactaaaaaggagaatattggaaaattgtctcatatataatatttcttatgaaaaaggtaaaaagagggagatttgaaagtcttaaactctcaaatcgaggcaaagtagtaatttccccagccatcagcctacctatgtacttcagtgttccttttcaaggtagatgtggatttgtgttaaaatctagttgatgttaccttatctgctaagttttttagctagcaaaagtgaccaattgtaccaagggttattagaaggtagatgcttaaaaatagaaatacctttcacatgactcatatcccagatcattaatcaaattcaatacatatcagaaagatgaatcatcttgtcacataattctcatgttctcaaatcctgaactcaaaaagaatagaacagaacattcaaaaactttacagtagatcagacttttattttctatgattctctattgattattctcaaaataaaattctgacttaaaagttaaactgcctgagaagcttctttaattgtatactttcttaaaattcaagcataagtaggaaaaggtgatatgactgttgtgcattaaaatcagaaatttttacactgggaagttctaaggttaaaaaaagaaattttacttatttcttacgatttgtgcattgatttaataaaagtttcactttgtatcacattaatggattcctttggttgcagatgatgcggtataatcaattcaactttatgaacggcccacatgtaagtttttctttatgttatttctgatgatttcttgtttatctagataactccgttataaagtttgccttagtcaatagagacaccaatccacatgttttaagtataatgtaatcattacaaaagtttcaaggtggaaaaattattgcccctatcctctcacaccaaattttcttcttattcattactattgttctttcatgtaaatcaaaataattattaatgagaaatgttatttatttgagactgagtctcaaatgtatagtcaagaaaagatggttctgggaaaatatcacataagatgtcacaaataatgacaataaaaataacatagtaagtattggtggggggtaagttttacttggattatcttgaaagataacactacagttatgaagcaagttttatgttatttaaataaatataggttattcttgtcactgtatgctaattgtcagaacagacaaatcaagtatcaggtggttctttggcacaatttttctgataaaattgtatgttagcataataacactacacatcacttttgatttccatggaatgatcatgagggccattttgaggggaaaatcaaggactacatccatttttttgtaaccctttttatccaagtcattctcttttaaagctctttgcctaaaata

SEQ ID NO: 42612 - DNA, 2245 bp, Homo sapiens
gagacagagtctctgtctgtcgcccaggctagagtgcagtggtgcgatatcggcttactgccacctccgcctcccgggttcaagtgattctcctgcctcaacctcccgagtagctgggattacaggtacccgccaccacgccccgctaattttttgtatttgtagtagagactgggtttccccatgttggccaggctggttttgcactcctgacctcaagtgatccacccacttcggcctcccaaagtgcttaggattatgggcatgagccaccgcgcccagccatgtcaccattaattttagcaacgtatcaaaagttcagcttccaactacctacattaaaaggtataataatactaaccctgaaccttacatatgtaatgcctaaaaacttacaccctgaattactctaacattacagggcagacttccttgagaagagtcagaccctgcagcggggctctgccttcccactgtcagcctcggggtcatctagctttatcgatccccatggagcgggtcaccgagccctgtgagcagggagagggcgatggggatgagtaaacccgagccggaggcccggcctgcgctctcgcccggaaacctcccgtgggattctggagtccagcggcgctgcctgaggctgtggtacccagaaatatggtattgggggtgggggtgaaatgagaggaaagcaatctgattaacttccagcctgataagcagaaaagagaaaacaagggagcaggaaaactacgctagcactagactgccggtcgcaagcgccgggtacacacgcagttaaacctcaatggaacgcccccgggacttctccggggcgtaaagcgcagcgccctctattggccatcgggacctcgcctggaggtgccgtcaggattccgtcccccagccactcccaggcactcgagagtaagcgcattagcccgagaaagcgttctgtggaacggaacttccttatcctatcgtttccacacggaaagattttaattcaccggaatcgactggcgttaaagggcacagtgaaaaggaagttggtatcaacgtgatctcgactaagggaccgagcggaagtcctcaatcgtacgccacgcggagagcatgctgggggccggaaggaagaggaaattccagtagccgatcaggagtctgcaaactccggtggtaggggagcgcgctgctgtttagagccacgagttaccggagcgcctgattcctgcgccgaagtcagtggtggccgaaagtccggagtcgctgtaaaacctgagattgtgagccatggtggggagatcccggcggcgcggagcagctaagtgggcagctgtgcgagccaaggcaggtcccacgctcaccgacgaaaatggagatgatttaggattgccaccctcaccaggggacaccagctactaccaagatcaggtagatgactttcatgaggcacgatcccgggccgccttagctaagggctggaatgaagtacagagtggagacgaggaggatggcgaggaggaggaggaggaggtgctagccctagatatggacgatgaggacgacgaagatggagggaatgcgggggaggaggaggaggaggagaatgccgatgatgatggtgggagctccgtgcaaagtgaagctgaggcctctgtggatcccagtttgtcgtggggtcagaggaaaaaactttactatgacacggactatggttccaagtcccgaggccggcagagtcaacaggaggcagaggaggaggaaagagaggaggaggaggaggcacagatcattcagcggcgcctagcccaagcgctgcaagaggatgattttggtgtcgcctgggttgaggcctttgcaaaaccagtgcctcaggtagatgaggctgagacacgggtcgtgaaggatttggctaaagtttcagtgaaagagaagctgaaaatgttgcgaaaggaatcaccagaactcttggagctgatagaagacctgaaagtcaagttgacagaggttaaggatgagctggagccattgttagagttggtggaacaagggatcattccacccggaaaaggaagccaatacttgaggaccaagtacaacctctacttgaattattgctcgaacatcagtttttatttgatcctgaaagctaggagagtcccagcacatggacatcctgtcatagaaaggcttgttacctaccgaaatttgatcaacaagctgtccgttgtggatcaga

SEQ ID NO: 42613 - DNA, 3327 bp, Homo sapiens
gaaattttctaagactgaagctatcctgtaaacatttcccttttgaatgcttcttgttaaaagactcagtgaaaagtagtattgtaagtctcatggtaattgcgagtagtaatttcaaaagtgatttacagagaataacaacagtaataaaaatgtttacttttcctttcaaagaagtacaacttcctctacacagggaagggctgaacagagaagaggaaaaagcaggtgggcaaaatgttacacaacagtgatttttaattatgagtcaacatggcttctatgccagcattaaacacaaggctaatcagctaggaatccaggataaagaaccatgagagtaactggaaattgtctttattgccgaaagaaatgtttacttaagggaattactggatcagtaatcattgattcgaattctcaaagcaacggtggctaattactagcgagacacgggcactgtgaaagagaaaactgtcgacctgtaattgacatttgtcgtataaattctaagctgtttgatttaaaatgcactcatgcgcacccgcggcactagaaaaccagggaattaaagtcaaagcaaatacaggatttcagtacagcgcacaagacgggaacaaaagaggtggtggaaggaagacacccacctttggtttctcacataaagagctcaatactccaaacagtgaatcaacggttgaagttgcagtgtgtgaaaggcaaatggtacagtttaatacccgggggcagggaggtgcttttttaaaattagctttcgcctcttcttcaacccagatctttgtgccttcgtgctaccgataaagttggcggttacacgacaaaacgccgccaggtatttcgccaggtcttccacttttcaagcactagacacacctgaccgccttacagggcccagcgggggcgggtaaggaagaggcccagggcccgagggtcgggaggcagtcagcccagccggagggaagcggaaggtggggagtgggaagaggaggacgctgccccctaggggagccgagtcacaggctgggggccggggcgggaggggctggaggaggcggccggtagcgaggccgcgccgtcgggcggggcggtccctccagctggcttggaccctggcggggcgggctgtgggccgagcggcggagcccaggcgccagcccgtggccgagaagaaaggtggcggtggcggcggcggcgcagcggacgggacggggcggcggctcctcgccctgaccctctgctcccccgcccaggcccgggcgcgaatcggaggctgcggcgaaggaaggagtgagcatggctgagaccccgccgccgcccaccgctggtgccgaaagttgcagcgaggagccggcgaggggcggggagtggcggccggaggagccgcgccgcgctcccgccgggggcacggaccgagagggcgaggcggggccgccgccggcctcccccgccgggcagtcggagcccgactcgccggtggccgcccccttcttcctgctgtaccccggcgatggaggcgccggcttcggagtgcgcccgccgccgcagcagcagcgctcctggaggaccccgccgtcccccggctcaccgctgcccttcctgctgctgagctacccgagcggcggcggcggcagcagcggcagcggcaagcaccgtgagtggcggaggggcatggggacgcccgcggggaagggagcattcggctggggagggccggcccggcccccgcggagctccgcctcccgcggggtgacccgagccgggtggccgggaggcgggggctttaggggctaccctcgggaagctgttctcccgaggcgcccggtgaggaggcagcgggacgaccgcggttcgggcgccggattctacctccgcgtctccccaggccgcggctcctgcctggcctggtctctctcccgtcttgggctgggcgctggtcttcgccggcctcccacgtgcttgggcgggggcgagaagcggcctgcctgcccccctccacccggggcgccctggccctgtcccgggtcccgggctgggaaccttccccgaaggagtctaagagggggcggcgcccggagaccccgtggcccctctgacccgcctttttcgggctcccggcgccgcggcagctgagtaggtgtggctgctgcgccgccgccgccgccagtgcggccttagtaatactagtaactaattttttacgagcgttccttccatgccggtaaatatgacagatccgtcccccggattggaaagagaaatcggagcggtgcatgagaagacaagaagggaatgtgtggctttggaaggctacctcccagggttatatcggttgtcgggaagaggcctccacttttaaagccactggcacacgcgagcgctctgaatgcagctgacccacactccgtgctgtattttttattagtgaactgtttactgtgctggcaaacgagtagggccctagagtcgtcaatgaatataaggactcttagaggaatgttaaatctgattttcaaatacaagctcttacagtatgaaaatgtggctgacgatacaaggcatgctgtaagcgccaaatactttgctgtatgagttctggaaagggagacagaaacttgcctgaagcgatgagggaaggacctttcccaccatacaccctatatttttaaagcacaagtacaaatcttttagctgctctgccctgccaagaaaccctgactcaccttttctgccccgatccatctcctaggaaaagataatatttattgattatttcctatgtgcatgtgttgtgataatcatggttaataagtttgtgtgcgccaaactgaatgccactttttcagatgcggaagctcgatttatcccaagtaacagcttaagagaaggaatgcagttgacccagattgcttttctgctaaacccatgctctttaaatctaacaagagatccaaaactgtgatggtgggtgacaggttaacaggaagggtctatgtgattcagctggaggttgcccagtgttcacacctccttattacttactgagtaataagtcagtgggcagacactgaccattgactgtcttagtgaagccatagtttgtgtgttggagtggtctgcactaatgtgcagatggattgtcagctcatggcagaagtgagtcttcctatacagaggaggcaaagataagaatcttctcaaggagactttgcttttgttttctgaggaatccttctactttgtactttaaacaccgcctctttttttgtttgcaccaaaaatgttttctttctgtgtaatctacatatt

SEQ ID NO: 42614 - DNA, 2396 bp, Homo sapiens
ttggagtgcgatggggcaatcttgcctcacagcaacctctgcttcccgggtttagctgattctcctgcctcagtctcctgagtagcagggactatgggcatgcaccaccacacccacctaatttttgtattttagtagagacggggttttgccatgttggccaggctggtcttgaattcctgacctcaagggatccgcccgccccaacctcccaaagtgttgggattacaggcgtgagccaccatgcctggccaggaaatgtttttagagttacaaagcaaagcagtggtacttgagaaggtaagtagcaatatggccatgccccctactgtatttgaataattgtgaaaaggttcatagtctccctaaaacttctcaaggctgctggccaaggtggcattccctctctttgcaaagccttttttatctgacatgctccctaccgaccggacaagatactcagctttgtcagagggagtggtggggcgggggtgggaaagtttggaagaaaggtgtgggaaccttatgatgtgtaggaaaggagagcctggcaggccaagacagcaaaaagcaggtggaaagctgaagtcgttgtagcatgtcgccttttagagtgtgattcttctaacttcagagtctgtttagggactctccacagacatttatctacttctgctgtcttttttatgaacttaggaaatctgatcacttgaggtgagaatgcttggtaaaattctgacccatctctcttccttcctcaaaatctgagagataccactgtaaccctctgctcacatctcctttttactttcctttgcctctgtcccataaacgtttatccttactgactttcattttatgtgttgatagggtttttccagaactctcaaaggagaagcacttatcatagtgcagttatggtgacatttacttactgcttactttgtgccaagtgccatgctaagcatttaactccgaaatggttaatattattatccccattttgttaatgtagaaatgggcacagagaagtaacttgccaaggttactcagcagctaggtggtggacctaggattcactgtgagcatgctgactccagagtccacatgctatgtcacactctttcatcacctcccgtaactggaatcaggtcctagattagaggcacgtcttcaggcaaccagccctctggttccatattctactcactaatgccctatttactaaaaatgagtaaattaatgaaactcaagagtcaccaatctgatagaaaaaatggttgtatatgtaaaaaacgctgaataggtccatttataacagacattaagactttcctaaacacctaaaattgtctgtttcttgtctattgccttgttctttcttctgcatccctagcatatgggaggtaccctgtacatgttgagtgaatgaatctgttatgtacatgtaatgaagccagtgttagactgacctgtttgttggggcataaatatggtttgattttatagaatttgggggttttcacaattgaagtgaaacatgagggtggaaaaatgccattgcaaggctatatacatatctataccagcaagtatctattgagagtctggtatttggtaggtactattttgagtagatacgtaagaggtatgcaaaatgcatatttctttggtggagcttctggtctttgtggagctagttatttagtttcattttacaactgagtaaattgaggcaagaggaggataaatttcccaaggtcacctactaagtttttgatagctttacgtctgtgtaaattattgcctacagccactgagccatgaaatcagttttacttttcagggtagaggttatttttaatcttatgctggttaattttaacaagtgaaaagatgatgcattataatactcctggtagtgtttgtttctaacaaagtaatgataaatcaactttctgagtatatcagtttatagttgttgtcaactttggttaatatctataaagtgacactgagcctatgaagtgtataaacttaaaattgaagaaatcttggaatcagaggtagacataatagattgtggttctgggaaaggaggtgggagggtgtactggagcatgtgaaataatcatgatcattgagttgaataatcatataatttaacagaaacatctgggctttccaccaatgtcatcatgatgatgattcatcaaagataccctttcatggctggatgcggtggctcatgcctgtaatcccccagcactttgggaggccgaggcacgtggatctctcgaggtcaggagttcaagaccaggctggccaacatggcgaaaccctgtctctactaaaaaaacaaaagttagccaggtccggtggtgtgtgcccataat

SEQ ID NO: 42615 - DNA, 1829 bp, Homo sapiens
gcagtcaatttcatagaaaaaaaaagagagaagctagctcacaaaggtttactggagatggttttgttgtggtttttgtagacaactttccccatttttccataattccataagcatcacaagcttttacagaaaaaggcagcgtaaagtattgggccaggattcaaatcaattagctcagccactggcagacagcagccatgctgattagcctcccagtctccctaagttaaaggagaagcacaaattgaattaagataaatatgacctaaggaatcaggggctgggtagttaaaaagtgtgcagacacttcccagatgccacgtaccaagaagagaaaggttcatctacaaagcacaaaatatttgcaatctaactacacaccgacttttctaaaaaaataaagaaaaaatggaaaggaaaacattgcaaattcattcctgggaccccaagttgtgtcctcaaccctcaacgctccctcccattcaccccctccccccaacagctaaatctccaaactgctttcccagacgaggcgacacacagtccttaaagaccttctgtatgagtggagttgcagaggtgaccttcagtaaaccgggacagctcgtctttccctggggacaggagagggaacggcgcgatggggacaggctccttccctacaagccagcccacgcaactgtgtgcgcgcaccttcccagcagcggccgaccgagaggcgccgagggccgcccaggcctagcgctcgggctgcacggaaactcccaaccctccggcgggctcgggcctcgcaacttcacaaccagccggcggaaagcaagaagatgcgaggtgggggcgtcagcagcctcacgaaacctaccatgggccaggcggggaacaaggcctcaacattcaccccagccacacttacactgcccaaccgaccagagactcgaggcgagaacaaaacaagcagaagacccgacgcctgggagagcttcccttgttccagggcccaataggagcacagggtggacgggggcgggtgtgcggcgagtgtcgcggatccccgggcgtgcccgcgaggcgcacacggagggacggaggggcgcgggggcgcgtgcacgcggcccgggagggatctcgcgccaggtccctcacggcgcccacgtacctggctgtagctgcgcgtcgggacggcggccgccgccgccagcgactgcggcagcagagaggcacggagggcagagtaggacgcggcggccgcggccgcggcagaggtggccacagcgggaggccccgccagcctcccgggaggcacaggcccggtctggaggccacgcgtctgggaggcagcggccgcggcggccccgagcagcagcagcaggcggcggcggcccgagacgcccgacgggatagagccagcggcggagtagaagggcaggcaggcggcgccggtgcgccggcagctgctgcagttacagccgcagccccggagcagcgccccgagtacccagcgcgtgccggccatggactccggaggcggcgcagggcctgaaggcagctgctccagcagcgatggtggaacggaagtggaatccagggccggttgggggtggggtgtgcctggcacatgcgccgcgggcactgggtggggggcctccgagagtcggaaggaggtggaggagagcgcgacgctccgcccagtctccgcccttgggcggggctgcccatggtttgggcggggctgcccatggtttgggcggggctgcccatggtttgggcggggctgcccatggtttgggcggggctgcccatggtttgggcggggctgcccatggttt

SEQ ID NO: 42616 - DNA, 1725 bp, Homo sapiens
ttgttttgctcagattctctttgaaaacttgtagatttgatgggtgttgtgagtaaagaagacggacatctcttcgatacccgtatttccctcctaaattggtaatgctgtggtgacatattcaaggtatgtgaaggattcttaaacagaatataaaggcttgccctgggccccataaccctgtgagaataaaagtccctttgtaagtgggtctgaatagcttctagcttctaggatgttctgtgcattagaatgcttacaagctttggccccctaagtggttacaccgatgaccaccctatcatgctgggttccgtggtgaactgagagatgccattacctttcaccgcccttggccggacactcacggtgggcctaactccggtggtaattccatccctcactgcgggaccttgacatccccgagctgaagcccacttcctccctgacctctggagcccagctgagcggctccgagagctctgccatgactcctaaccgggtggacaggggggccgggcagccgcggcgcacacgctgggcgtcgtccctagcagcagaggagaccagaaggtgagagtccccatgccgcagccggagggccggggtgggcttgcaccgctatcgcgagagctcgtgaggtgggggcggcggggagctggggaggggctcgcggagagcctgccccgcctccctttccttcccctcccctggagtgattcaagacgagcgctacccacttccgccccctccccctgccattggaactagctgagccgaactagttgcggccaccgagcagccggctctcggcacctcctcctccgcctccctgtctcctgttccattcgcctttcctcttctttcctggcccacgccgctccgaggcctcgcgaccgccgagcctgcagcctgccccgcggccaacatgagcttcttgttgtgagtagccaggccccgcacgcgccggctttgttcgggtggacctgggcccccgcccgccgcccgccgcccgtcgcccgccctcgtcccgaccctcctggcccagcgctcccggggcccggcgtcaccaccaagcggggccccgggactgcgcggagcgctcggactacctaaccgccgcctccccatagggcttcgagtactcgtgggctcctgcagccctgaggaggttcttcccccccggcacaccccggggccagcgcctggattccttcatcacccccgtctctgccttcgctcgcattcccgggcttgtttgtgcgcttctcgtgggtatctcccactcgcctgcacaatccgtatccaagcggtgctcggttgaatggctccgtcgcggctgcccattgctcttttctgggtcccaagcacagaagataagactgtcgtactttcccctgtcatcccaggacccttttaacttcctctctcgtcttagggctgggaagttgggatgacaagttctgtagatgtaacactgaaacaaggctacttgcgggtcgggatcccttggacacagacgggggtccctgagaaaggggtctggagccgcccccttgcttcctagaggcgcccttcctcccagaggacttccctgaagaggatgagttttatctttttagacaaccagcaaataggttttggatagtgtgccctgcctaggttgattaggtccactggggagttgttttgaaaatcatttgtaaatgccaactttggcgtcat

SEQ ID NO: 42617 - DNA, 1469 bp, Homo sapiens
acctacccaacgtgctaacttctatacagcatggtcgtgcatccaaatcaaatggaaagcggtatgggagatctggaaaggcctcctgtgggtggcatctgactacctaaattcccatcccagtttcacttactgactttgacacttggaacaagcagcctctcagtgcctgttttcccactggcaggtaaatgggctaatgacggtatttctggcactagacttcgttaattaatgaaaagcacatagaagaaaacagcctggctctctaagtgggcagtgcgattcccaaggacggcacttcgcctgatagtcttcctctaggctgagaagccagagtaaatccatttgattttcctaccacacagtgccttctccccagatgagttcaaagctttaagtctatccagttctgtccagacgcgtctgttcatctccaacaggcccactagagaggcgggttttccaaagcctggcacggcccactgcaggtgacgccctctgccctccagcgccctcaggcctctggggtccacccttcctccccacccgactccggaacctcttcccgcgccctgcccgggcgcctggctgcttggggtagaggccttccgccacacgcgcggccccgccccggccttcacgtgacctggcgtgcggagcgcgcacgcgggaacccgcgctggaggcgggcgagggccgaggggcagctagggagcgcggcttgaggagggcggggccgccccgcaggcccgccagtgtcctcagctgcctccgcgcgccaaagtcaaaccccgacacccgccggcgggccggtgagctcactagctgacccggcaggtcaggatctggcttagcggcgccgcgagctccagtgcgcgcacccgtggccgcctcccagccctctttgccggacgagctctgggccgccacaagactaaggaatggccaccccgcccaagagaagctgcccgtctttctcagccagctctgaggggacccgcatcaagaaaatctccatcgaagggaacatcggtaaggagcctccggaaatgtgggacgcaaggctggggtgtcgcggcagtggctgaagcttcccttcgccgcatctctctgcagcaactcggtgagggctttccctccagcctggcggtgtggacgcggcctcggcttcctttcccacccagagcatccttcccttacctcccgctccacggggtgactgcggtccccggggtcagactgggcgccaggcctgcggtctctgtgaggcgcgctttgaacctctgctccctctttgttgggaactcgcaaagggaagcgggggaagggtattagatttcttgaggtgtaacttacattaaattcaccctttttaggtgtactcttctatgaggtttgacaaacattatgccttttgctatcaccatgatcgagatacagaacattttcatcaccttagaaagttc

SEQ ID NO: 42618 - DNA, 2375 bp, Homo sapiens
ttggcaaagagtacttgaacctcattattagacttaggaacagaataaatacaaataatcactttgctaaggctgttttcctaactcccaaggaagacagaaaggcatcagtgacataagtgaaggacacagttgacaaccacgttatcttcagacatcttttgttaaaggtgaacaattacttaatactgtgttatggcagcactctatacgccccaagttttataaagtagagtcaagagtgatctgagctgggaaactcacgcaattttagttctgcatgaaagcacaggctctccccactggggaactcttttgagtaggacaaaaagctggacctaggacccagcccagggcgtgagagaaaaggaacctgggaggcaagagcggccggtccggagccgggtcctccgccagctccgggcgggcgctgcgcacagagcccaagcccccggcggaggcggcgcggctcgaggcccctccccgccgccgatgcccgggcggctgacgccgagcagcggcccggagcggtgggggccgggctggcgggcacgagcgagggcagggcagggggccggccgaggccacttacggctttaaatatggatcgcaggctcgcgctcgcggcacagcctccgccgcggccgccttccgtgagcccccgcaccccggcttgctcccgaggggcgcctgggctgggctccactgctgcagtgttagttactagcaggaacatcagagatccccataaatatgcaggagctgcaggaggcaaagtagagtagacgcccgcgctcttacacactcgctcgccgcgcaccacacaggctgtgtagacatccccccgcgccacctttcccctttcctcgcgggccgttcaggttgcagtcctgcctgctccgaagaccctcccgccccagcgcctttgccccgctctcccgcgctcgcctctctccggagcgcgcacccacccaggcggcaaagttgtgactacttgggcgcgggtgactggcgccccgctcgctccgcgcccggcgcagacaacttcccgcggctcggccccgccgcgtcccgggctcgcgcctccagggattccgcggccccccagcctccaaccccggcggcgcgccgggcagcgcttcggtggcggcggcggccgcggtggcagcgaaggcggcggcggcggcggcagtggcagtggccgctgcagccccacactccgccgccaaactggaggagcgacggaagccagaccccaggaggtgagcgcccggccccggcagctgccgggagggtcgatggggtccctcgctccaaggcggaggcgggcgcgggcccgggggccgattccgtagggcgcgcaggcggcctcagcgcgctcctgggagggagagagaggtcaattgcgggccgggcatcccctgagctgggcgcgggcggtgtgtggaggctgcttccgcggaaaagtattttttttccttcttagggtttagaggaagagtttgggtggtctgcttctccctcactgctaagtcccctgcgcgcaactgggcgtctttacgaggactgcggggccagttctgcggcgggctgggctcgggctcagtgacacgtgtgttgctgtgagcctgggtggtcgccctgtgaccaggcacctgcttgagaggaacacatccctaaacccatcacagggggagatttggggactcttggtgctaccgaggccgcggcccccacttcactgccagctccaggacggagcatttacatctctccctggcacgccaaaggcggggggtgagtcaggcagattctctgcaagtggcacacacacatttatttgcaatggatttggctaggggaggcataggttaaactggaatttctcttggccagcgacaacggagctctccctcaggtactgggcagcatgtgagtcttggcaaagagaggtgatttcttttttcttaagtgcattttactcagccgttgccagtccgttaataagtcaccagaggaaggcaggacctgggaactacatcagcaaaccgcagcaagcaccataaagacaaaagttcttatagaacaaaaagaaaaacttgaacttgacgtgaaagatggaggaagcagttctacctctcttctatcacttttttcagcgccctgtaaaactgtttttttctatccttccttccctctcaaggccctaccttctcagcataattgatcgcagcaagctctttccaacttgacactgaagagcagcgacccctttggcttaccctccccatttcttttcctggttcgcttcagtgccctggaaagttgctcctaatgagaaatcaagaacactgggctgtactaaacgctcattg

SEQ ID NO: 42619 - DNA, 1423 bp, Homo sapiens
cccacaccatttataccatctcttgaggacattagatgatattcacgtgaccctcacttgagtgtaattcttgagccaggaccaaaggtttgacatgagatgaatatttctcagtttttttttccttgagtttccagacttgaaattggctagcaatcagctggaatatttggttatagagacaaatttggttacgctagaaacctgatctttagaatggctttatgctctttatgcaatgctgaaagtcttcagaaagtttgtgtcaaattttcttgcctttgtagtttattctgcatgatcagaataagtgtggcataagttactttatatgacaagggcacatattttttccccccatgctcaatataatatgcaaatcaaaaggaccctcatactatctgtgctattggctacagtgtattatgtctaacttttgaaatgaacagtggcatttttatttcatagtcatctattgagcactctgttaggatcttggaaaaaagaagcagcagggcacattcctccctaatgtgtaacagtctactgggggagacagggcagacacatttagaaacagaattctacaaggatgttgcaagaacagggtcaagtgaagggtgtctgaggttcacaggtgctgaggcttgaaacctttcttttcttcttcttttgaatacaacacttagatcacattgttgcagctaataaagatgtatcataaaatatgagtaccagtagctacctgtaatgcattttggagattttcattttattgtatctttcttcagaaaattatgagcatttcaatctgttagtactctgcagttgcatatcaattggactcaaattgctcaatctctgattttcagacctatttatttttttccttcctgattattgtgagaaatacttcctgagtattgtgagaaatacctttaaaacctaggttttaaaggtagctgactttgctattgtggtgagttatgcttaaaaattggaaaaataaattatgatgtatttttggattaactattatttacagttttcaggagattttagcactgtattttatttcatcattattatttttatttggttgtatgttatttggagggactgttccagtgctttttgtggtctaaccatgaaagtctctgagaattgaacatttatacacttttccggagaacgctgtgaccatgtttatctcttttttccttttgcttttcaccttagttgcctgtcttttgaagcctgccatgctggcaatgatatcacatatttctggtgctttttgtaactaccagtgtggacaccaatggggtgcccatctgagtagccctgggtgtcgccctgagctcacctgcatgttggcctgagcactgctggtattgtagggatagtcaatgattgcttcctt

SEQ ID NO: 42620 - DNA, 1819 bp, Homo sapiens
aagtgatagagaaaaaatatttgctactcagaatttccaaagaattgtctgaaaaatgtgaaaagacttcgagccaaaatatgacaaagaaaactcgcattcagaatgtttttctttgtaatttgtcttggcaacatttattcctttgcacagatccatgtggttgttagattgctttcaaataatatcgttgtatgacagggtgactgcatatacttttaccacaaaataccttcacaaaacagtttatctttttataattaccttttgtcttttcctttacttactcctacagattttaggcttttggcagattcagaaaagatttatcttttatttgcttttaacaatataaagacatagtgattctcctatgattctgtattctgtaaatttaggtctgtcatcaccatactttatttaacatagagaattttttatatattacctgtgaaactccaaataatttgcaaaattaagatatcaaaatggtatatgatagctcacaccatgaggttgtttttaccaggaggtagaaggatactttgggtctgtaacacaaactactaacaataaatttctgtccatcctaattgcgaatataccagtttttaggagtgacctcaatgttgctgcactctgaagttttaaaaatgtgggtatgtttaacagctccccaatgaatctgagcaaaaacctgaagtgttggagctctgccctaatttggtggacagatttttcacaaatctttattgctaagaagatggaacatttgacaatttaaagtcatgtcccccataagttgagagtaaacacattagtaatagtgtcacttgaatttatctgttttttttttttttttttttgtgtgtgaacagcttataatgctttatggagcttatcaaagccacatggtgatgactgtcaggcctggagttgtgcaaaaatgaactttggctcttgcagcgaaggaaaattagacgctaaaaaccagggattttttttagaattacctaagacagggtttgtaagatttacaaccaaattcacggatgtgatgattgcagtgctccctcaccaaggaagccagccaactgtgaggatgtctcactggttgtgtgtgaagacaactaagatgccatctaagaaaatctaaccttccagccttggcttgtacaagtgtgtctgccctcaaagagtcattccagctttctgtcttctgtctgaaagaataatttaggtctaattttaaaattgtctaattttcccctaaaattttgagttctttatctctattgttactattctggggtttggaaccctctggctttttctctaatgggctgttcactgagcttaggtttctcacttggttagattcggggttagttttaatgtagtcaccatcctgtgttgaatcctcaggatcaggaatggatctaggcagaattatgtctgactgggagagtagccaggaagaggcccaggcctctggagctgggcagaaggtgggggttgcccttgctgggagcagagggtgaataccagtgctgacctgctgtcagaggggctcaccagaaatgagaaaaaccagatggtcactaagaccagagttggaatccacaggacagaggcacaatggggttggagaaccatgggatatgaaagtgtgaggggaaggttgagactagatgaatgagatgaggtgggccatattccacaatggcaatgacatttcctgtgtgcacgcgtttgtgtgtgtgcacgtgtgtgtgtgaatagggtagcaggtttagttttgggtaggccaggtcacatt

SEQ ID NO: 42621 - DNA, 1190 bp, Homo sapiens
tagtagagacggggtttcaccatgttggccatgctggtctcgaactcctggcctcaagtgatccacccaccttggccccccaatgtgctgggattacaggcgtgagccacaactcccagctatcatttctatttaagaaaccattcatttcagaaaattagttcttaccaaagatgtgttaactgaaataacatttttttcttgctttcattcctctgtcacttctatttttaatgtttcttttattctgatttttaaaaattggcatttggggtcatttttaagttttattcttgtcaaaaacattacacaaacaggtctgtatttcccagggtgaccacctttcaaaaatgcccagctggcccatttccatgcctcagccatgtgcccagttagtcctctgactattatcaacaagttgagaaatttgacctctgatatatcaagaggcacatgcttgatgatttctttccttgattccctgcaaggttcaaaagagggaagctcctcttatcctttatttttggcttccaccttggaactaataagcttagaaaagactttggaaggctatctggttatccctcctgctccatgctgaggagggagcatggcatggagcattggagtcagagctgggtttgaattctctctccgccagttgctagtaatgtgaccgtcataaacttgtgccaggtggcagcaatttgacctttatgaacttgtgcctgtctgggagaaattaaggacttgcggcatgacaatactagctacgtgccttgtctacctgctctatgctaagtatctaccacgcagggtgcttttgtgtctgttatcccatagcttctccacaactgaacaatgtgggtattactaagtccatttttcagatgagaaaatggaggcttagagagttggtaacttgaattacattcactttataaaaattctttactaattttgttttaaagaaactgtgtgagtgggacaagatgtggagaataagaattgagcaagaaataccactttagatttgctttgacattaaagtttttttttaaagcaatttaatccttactgagactgaataatatgtttctactaatgaatgggctgtcagctctaatgataaaacagtgcaaatcagcagtataatggagcaataaatgatttgggtactaacaaaatgg

SEQ ID NO: 42622 - DNA, 3289 bp, Homo sapiens
atgtagtttgtaaccttttgggatgagcttttctcactcagcataaccccctggaaattcattcaatttggtgtgtgtatcaatagtttgttcatttttcttgctaagcagtatttcatggtatggatgtaccatagtttaaccactctcctgttgaaagacatgtggattaattctggacttttctactatacttaaagctgctgtaaacattcatgtacaggtttttgggtgaacgtaagtttttatttctctgggataagtgcccaagagtacaaatgaacttttaatacagttcataaatccagaattagatttggcgtgatcttgctctgggttgcattttcaccttttatccagttctctcagtctgattttgtgtggggctctcacctatttccctctggccctgggcctgtgtaaatttccaggctgattagggtgctcctgagctctgggaaggagatttgcttcgctttgttgctggctgatctccgggagtcatcactgctatcagtcatgcttgtcagttttgccgcaccgatgtccctttcccccagtatggatgtccagagctccagcggtctgcatagttaagtcagcaactgtgttctgtcttacttcctgtgggaatgaaaggccttcttagagcccctgcgaagtttttttttttttttttttttcccagcccctgtgaaattttaaaaggaatggttgcagctttttcttgccctttggttccctgtagtgaacacatgttgccaaaagatggcagtgcactttgcagccactgagatcgctcttccctgtcgcctggggcttagagaattgtgtcttgttctttatgtgtatgttgaaaatgtgcagagcagattttacaaaacaacaaaagcaccaataaaatgctgtgaagtttagaatcatgaaaaaaaaatcacgtttgcaaatggtttataatggaaatagtcccccacttcttaaacatgatttgaatagggaatagaactcagaaatgtgtgtatgagtgtataattttaggtgtcagtactgattgttatattctgtatagctcctgaaaaagacctgtgaaatgctgatttttgtctttcatctgatccaagattagccaagtaacaggcctgcttttgaactctgagactgcagtcctcaagtaaaggcccttgtatacacttagttttcatggcaaaaatggctaataataaaactcttcacttgctagcattggtcactcccctgtgtgcgtcactttggtgtgcgtctgtgggcatgtgtgtaaagaactgtttaaacattggctatgcaccagaaagctgtgtgaagtgagagattatggggttcaccggatgtcataaacagaccaagctggtgaggataaagtgggatgagttgaaatacaagattagctaataaactttaagctgcatgcacggagagaaccagtgatattaaactctggtatgggcatgttaaacactggtgccctgctgctctctagggtgccatccccgatgccttttgggatggaatcaaaaagccctgctatgaacttgatccatgtgcagcatcgttaagtgcagagcaggctgtggaagagagtgggctagctctgggattgggtatacaagctccggagtggatcctctacacaccagccagtgtgtcaaggttggaggctctgtttcacttcccctgagctcagtaccgcagtcgctttcatcctacagtttacaaagtagctgcaatcctgggtggcagggaaacaggtggcttcacggtaaagcagcaggctttttgctactgcatcctttggcaaaagcttgggctaggaggagaaatgtgctgtgtaaagttttaaccctgaaagcagatgctgttactatagagacaagtgaaatgctacagtgggaggcgtaacaggggagggatgggagaagggaggtgggagggcaagtaaggcgaatctaaaggctagcacactccaagaccttcaacctttagcagcactgtgacggggcaggcttgcattctgaaacttgtgtgctggcggcctgccacgtgctgactggctgagtggcagctgcttgcgctgtgcggactagctggtgagcacgttggcagttggcatgggctctgggggtgggaacttagaggggtggaatgtagatgggtgctcaagacccaatggctgacagttttgcacaaatgtttctcatgctgggcttaagtcacccttacgagcctgctcagtgattaggaccggctggtgaaagccggtccttttggcagtagatatgacatgtgttacagttaaatcattgtggtgtcccagaataacagagaataagaaaaaccttgctttgggtgtggacttctgtagaaagggtataacttgtacggtcagaggcctggctgaaggaaggcattattggccctgagtggattttatactgactggtgtgacccttatccccgtgatgctggtgagaagcttccaaatctattctgaactttgcctcatgctggtgatgtgagcaacccagggagctttttagaaacatgttcttccctttctttgttttcagcgaatgcaggttgtgtgaaaggaacttttaagaatgggtttgagggcctgattaaggactggatgagttaatttcttcctattgatagaaggaggaactagttgggtcagatggttattttaaaagatatctctgtcttactaataatagcaagcaactgctgagaggatttgcggtggggagggacacgaacccaaataattgacatttgtggtgtaaagatgaagaaaaggtgctgaattcctgtattttgtgcagaagcctaggtgcaccaggctggacttacttctaaggaggagtgagggctgctctggagaaaggctgctgtgggtgtacaggttttatattttccatttgcctcactcacctctttttgcttcctacagggaagaggctgctttgagatgctctgcattgtctgtcagaaagaacgaagtttctaattacttgctatgtatagtcttggagggaatgtgaaatatgcatcaaagagccaaggaatgcaccaatcattattctctctctctaattcagatggaacatagtgacagtgcctcagttaggctggatggttttctcagcctaggaagagggtttttctgaacttttctactatcccctccagtttttgctggtttttattttctctttgtttctgtttttcttttttcttttagagatgagaa

SEQ ID NO: 42623 - DNA, 1324 bp, Homo sapiens
tgtactcccaataagtgattattaaagtaactaaggtctgatagttcttgttactttgaaatatttgtgctttaaaagtgcttagggtcccctaatttggggtgattggagtcagctcaacctgaaggcaagaagagccagatactctctcttagttgcttcgaatgctgtggttctgaggagagagacttcaaaccacgccctcagttcaccttgttcaactttactctcagtgggtggcatgacacttaatccacattctaaaaacttaatagaaaaccatcaactgcaaaactcactaagcacagagtgagtcacaagaggagtcatctgtttaagtaatgaatttatctatgtggcatatatttaaaggcctaaacctcattgtcacataattttcttcatgtgttaatggcttaaagagatactctttcaaaatgaaaccaagtgccaattttaatctttaaaataaatagaagcctttaaatctgctcttccactggttaccttgtactatgcgtggttttaaagttaacatttttaggaggagaggggttactgtggataaactcattttaaaatgtcagtatttcagatattcatatttatttctttatcaaaatgccccagctcccacccaggcccttccacgcttccacagaattggtctgtagatgacaaattaacattaccagaatgatccataagtgttgaccacgaggaacaaccactcacttttcgtttcaaacatagatgggggaaattgctaattacgtagcaattacgtagtgattgctaattacgtagtgaatgaagattgagataggaagagtcagtcccaggtaactttttccaaaaacagaagaaaatcctatggatgttttattcctaaaaaagccagccagaattttggatctgtatgatataaacagattacttaatagtctcatattttgcaataggggaaaagagcaaactccaccttatcctttgagataaggctttggctctgcaaggctaggtaactcccagcaggccttggcaactctgacttcatgaggaggggcctcttcttaacatcaagttcaaccaacaactcagaaaatataagatgcagtaacacagtattggttgaaatgtgtctccatttttgaggcttggtcagtactctcctagagctattatgctatattgtgctggttttcctcttccattcaaaacttaatgcagtgggaagtatgcacccatctgtcccaatggaagaataattctacaaattcacatgtctactgatggacattaggagggagtgttgttgaaaatg

SEQ ID NO: 42624 - DNA, 1700 bp, Homo sapiens
ttctctgtatttaagtacttgcaataaaaacactgacacttgcctgcatcttgaaaaccccagattcagtttcatcaacatctgttgaatgcctattatattcttgattctgtcctaggcctattcctatgcattgtcttatttaatccccataacaattacttgaaaaagctatttcattcccattccatcgatgaagaaactttggcctgattcatagagctagtatgtggcagaggctgaatgtgaaattacatcttctgaattcttcctttactgggtagaaactctgtttcatatgggaagttgtattagggttctccagagaaacagaaccaagagggtatatggagatatacatgtgcgtatatatatttattataggaattggctgttgtaattatggaggctgaaaagtcccacagtctgctgtctgcaagcttgagaccagggaaagccagtggtgtaattcattctgaatccaaaagcctgagaattggggggccaatgtcctggtgtgagtctgaaagcccaagaaccaggagtgctgatgtctgagagcaggagaagatgaatgccccagcttaaacacaaaggtgaattcacctttccgccatctttttgtttgattttgtccctcaccaaattggatgatgtccaagcacattggttgggcaaccttctttactcagtctactgattcaaatgctgatctcgttcagaagaggcaaacctagaaataatgttttaccagctgtctgggcattccttagcccagtcaagttgacacataaaattaattgtcacataattgctgttataaaaggaactataccttagtgtggaagtaagccagctatgattaagtgagaacatgtgaccaaattctgggtccagattctcaatgactgattcagccttgggcaaggttttgacctttgtattttagaatctctactgattaaaaagagatagtaaaagttgtcttagaggagtcttaatctatagctgtctgtatttactgaaaaaccttacttttacaaaattttaattttgtggacaacttggaactctttagttgggaaataaattccagcatagttgttttaatagcactgcaattaatagaagttatattatctaaatcaattgttaacaaatatgctcagttactgggcagaatcttatttgatgggaatatcaatacatatttgttgaatacctactatgtgactgacaccttacattcatgagcttatttaacccttatcatttctgtgagttctcaattacttgcctcaaagaatgaggctcagaggaattaaataatttttccaaggtcacataactagtaggtggtgaagttgggatttggatctttgaatgcacaaaaatagcacaattattactagtgtgggattttcagttagatttaagttccagttctgtctcttactagcagtgtaacctttggtgattgacttaatctatctaaaccttcatttttagattgagctacttaagaggtctgttccattctaaagattcaattgcaactgtccctttagcatggcctgacacagtgagtgaggtatgcaatggcacctgtttataagggtttagcatgttaaatgaaagatgaagcataaagatgaaatgtgagcatttttttcataatgtatgctaaaatgttaaatcat

SEQ ID NO: 42625 - DNA, 533 bp, Homo sapiens
atgggtgtaaagatgccacaacacaggtgtgaacacatggacttcatgtgtttaacaaacatttatggaatgcttattgcaaggccttggctttgtaaggtactgaggaaacaaagttgaatgatacatggtttcttttcttagggtactttagacctgtctttaaagtacttgtagtctgataagagtcacagccaagtcaatcaatgaatgcctggtgataagcacaatttcagaggtaaggctagggaaagtcagggaaggtggggggtagtcaggggagttagtctttccaaaggcctggctagagttcagaggcataagtggaattttgggactttccctctgagatagatgaatgagtatttcaagtctacttccttcaggcatggagcaagtgacctgtatttatatacagtggagttcatggcacaacagtgaaagaggaaaataacttattataaaagaaaaaatacctaacttagctagcacctagaacctgcagttcttgtttttctttaaatcttttttaa

SEQ ID NO: 42626 - DNA, 831 bp, Homo sapiens
gaggacatttaagtacatttgagagtaggattagatggaagatgagaaaatttccatccaaagcagaattttctaatctgattctgtatcataatgtgctttatttatttcccagtgggatataaagcattcctaggtatactaaagtttccaaaaaaaaatctgtagtacagacagttgtttaatttcatttaacctgctgttcctcacatttatctgacaaatacacttttgtatctgggctctgcagtagacagaaatgcacctcaaattaattgaagcccaaaaggggatttagtggcttatgaaactgggaagaattcttggtgagttcacagaacagacaagctgcaggatgtcactgactgagactggggactcaacagtctttctcttcatccattttcctcttttgattctgctggtttcattttgggtgctgacctcaccctttcctggtgtggacagtcctgtgccctttcaacacgacggggaacaacctcagctgaaagggaacatgttgatttctacacttctaaatattgatttttccaaaaggtttcatccctgtgattggcctccatgctgtagaccaaccactcttgtcaggggaggagtttactaagattggctatatctaggtcttttgtccacatatgtggcctggataggatgtgtagaacccacttctttaagaagagagttaggaaggcttgttgggaagagcagaaataataaccatcactcatcattcaacaaatatttattgaacgtttttcctcagcccctcaggcacttttctagacattagggacctaacactgaacaaaa

SEQ ID NO: 42627 - DNA, 599 bp, Homo sapiens
atcttgggctcttccattaacctccaccagcctcattttcctcaccattaaatgggaataggatactttctttactgcagagggtcatatggaaatgtaaataaagtgatgaatgtgaagtgctttggaggccttataagctgggcaggcatatgatgttatcatttttattgtcctcattatctccccgttaggtgatacatgatcaatatcaaggtgggatttatcccacgtcaccttttgtagatttttttgtaaattttttcttactcatttactcatcagatccccgcatccacagtgccaacatgccacagggcaaaggccctgtgtgataagtgagggattttttccaacttggttagaggtgaacctaagtggggttaagtttgttattgtatgtttcaggacctgtttgctatgaagcaatgttttgtgcattatgaagaaaaaatgttggtaaatgacaagaggacacccacaaaataattttgactgtctgtgaatgatgctttattttgaatttctctcatatttctcttcccttactttggctgtcaccatgtggcttacttgtagaggacttggtttttgctgat

SEQ ID NO: 42628 - DNA, 1055 bp, Homo sapiens
ttctcctagaatacaattttgatacatctagaaattacagtaagtggcaaaaacactgaaaaagaggcatagaaaattaatgactatgaatttaaatttgttgaaccaaaacttaacaaatattaatagttttatatattttaaggactagggagtaaggtgatttaatgtggaatttaaggtggaagataatctcttgattgaaagggtatgtactttaccgcacaaaatttttgattttctggcaggagaagtcttcttgacctgggaccaggataaggaaatattttgtaaatttggtgctaaggcccaggtcattttacaggtctatggcagaagttgattcattccttgcaaatatttatggagtgtctactatgtgtttgacactgttttaagtgctggagataaagatagatgagcaaaatagacaggaattccaattttgaatcccagttatagtgtagggtattgatgaaaacagtctttttcagtcacccccaagagataccagtagtggggtgtagtgggcttatttaggggatgaagtcctctggcttcacttgcttttctaaacagtagaccaagactaagcagaaaagcattggcagagcctgaaataatctgcagttatgtcacatgccttcataaatgtggcagtgggttattcacaaaagcacaggcagctcaaatgagtcaactgagaacagtgtccttgcttttaaaggcagacagctcagagatggttcacatagggcctttattgtcaggctacaaatagacatgggtgctgggtagaaacgtgttgtgaaaacacagatgagtcactgcatggctgttgtctaagcaaactcttctgccagcttctgttcagaaggtcttgcctgtttgaagcatttatgttagagcatatatatacacatatataattagaagcagattattttgggagctatgtagattatttcccatgaaattatgttcaaaatagaacagttgaggctacagtgactctaagtacaatcatacagttataatgctgacatagatgattg

SEQ ID NO: 42629 - DNA, 1310 bp, Homo sapiens
ctgtacattctgaagccagtggtcaacttaatcaattatgaacagcccttgttccactagcaaaatatattgagtaccttgtagtatcagggaagttttatttcttttttttttgaaacctgaaacaaattttaataccgtctctttaaatattcaccatcatttcttatcagattagagcacagcagatgtgtccaaatctttgttttatctaggtgaaaggtgaacacatttataataaataaaaattcattgtgcccttatgttgttattaaagacatttttactgtataaccctgcttttaaaaatacctaattatgcatttaaggtctttttctattttagttttatagtataaaataattatcttttgcttacagctaatatctcaatatctaatgacaccacactggccccagagtatttgccaactatgtcttctactgacatggtaagtgacttactattttaaattaccttcatactgactgcatattgtatacttgtttataatacttataatatatgatgtcttctaccactcagcaattctggcatgaacacatacgtaacaattattgacagtggagggacgggaaaaaaaaaagccactttcctttgctctagtcagcactttttttttatttgccttaaaaaaagctgaagccaatatttacttctataacatgctttttaaaacttcttagaatttaactgccacattgcattaattgtaacctcgaaatattttcacaagggaaaatgtgagaagttggaaaatgagagcacagtatcctctctctgtttctcgtatggttaagaattcttaccaaccaaatggtgctgtgttctcttcactaagagtgattgtagcaggacctttcccctgtcacttagaacggactgtgcctctgtcacatgatatcctttcccatggctggtaaccaaggatctttaggagactggaactaagctttaaaaatgagctgttttgcatggaaggtcacacactggaaggaggcttttgtattggagaaaaaggggaaagtgctgtttcagacttccaattgtgctccttctatgctgaacatggaatcttaccaaagaatatcaatctttcagttataaagacagaagccataataccttgtgttgatagagtgcccatctctcaggagacccggacatttctacagatattatgtagtgagtgccctaacatccctttcaaagatgatgttttgtatctttcctgggcaactctcacgtgaccctcttttttgtttttatattctgtggctctcttgac

SEQ ID NO: 42630 - DNA, 1621 bp, Homo sapiens
ttggctttattcctagagaatctgacagttgagtaatcatggatgattccaaggggacacagagaatagatactgtataattactatttttaggagagatgcaagacttacattttcaacaacgcctcttcctaactattttctcaccctgcacccaaatatggctgcagaggagttaaagctgaaagttcttttgttctttacaatgattcttttcacccctgataggcaaagtgccttagtatttacagaaacagattagaatgagagaaagaaggcagagagctgtaagagatcagtgagcatgagctttctttccctttgaccttccttaattgatccatacctgggctcatcctcattcagctgctagtgttcatgattgtggctatttccacctggcaattttgagttaccccaagtagtcattgtaagaataaatgaaaaatgcagtccagcaaacgtttttgttaaggttttccccaaaatgtgggaaatggaattgttttggcaatatagtttatagcatactgtacacaacctatatttaaaaacaacaagaataaaacagtcaaggattcgcagttgtgattctttacttcagtaagttaggctattccttacttcgggaatcacaactcctgataaagtcagctactttcagattatgtaccattgaggtttggtaagttaagtgcgtttatcacaaatcccttgttagctcatttgaaaagtcaatacaggaagaagcagatattgagggtacagtttaactaaaacctaagttatgactaagtaagagtcaagattaacaattaaccttagaattcacaaagaaagtggtgtcaggggttatgttggagtaggaaaccttttttcctcccctttgtgactatgtgtttttttagagaaccagaggacaacttaagagaatcattttacttaagagtctgtctttgaaagggcagatcaaatgaatgggaaaagagaaatgtgttacttttactttttaaaatgaaatggctcaacaccatttctgcaaactccatatatccctcacaagtttaatggtctcagatgatcctagtaattttctttcatgcattaagcagtgtaggaagttgtttctcctgcctgtttatgcaagcttactttgaaaatgaagtttttcatttttattctgatctctttgctgaggtccgtcttttatgtggaagaatgtaaggaattacagttttaagttcacgaggataccccttgaccctagccagcaacagtcatacatgcctcaaagcactgaatctaaccactgattcggtactgaactgttgggaagcaagaataactggcgcccctggctggttaaacagcttagttctgtgtttctgcagcagaaatactgcctggtaagtgagtattctgtatggggaaactagaggaggctaaagagcatcaaaaagatgaaaggcacttccttgagcttacttttaccatttttctggcaagtctgaagaaataaaaatcaagtgaagttcactgctacttttgttgcctttgcttgaaatagtttaattcaagttaattaggagtagtcaaatttatctttaagatttgtttagtg

SEQ ID NO: 42631 - DNA, 1767 bp, Homo sapiens
agataatattgcctgagagtttaacataatgtctgggacatgttaaatattcagttaacggtggtgattgaagtagcccagtgaatgaaatggtctatgcatattcaaatactacctcattgtgaatactttgaagatgtcttagtgttatatgtgtcgtacagattttcttgattgctaaaaacctttatgatgttttaatttttaatacttagaaatcatatgccagctatttttttactttaaacttttaattattttatttaaaatctcacatggaaggcaatggttttgaaaaacaatcttttcacattaaaattctaattgaatgtgatcatgcattttggtgaacaaaacaaagtgagtttcaactaagacttttataaaacaactttccccatgtagaaaattatgagagttcactcggtataagtccataccgtcaagatcaggtctgtcatactctatctagccttacacaaagtaggtttctgtggtctttgataggagagtatctatgcttgctgtgacttcatctgacatggtttctttcatacttttaatatttgctctttcagatcttggcacttgtagctgtcagaaaaggcatggactacctcttctcccagcacgacctcagcttcctggatgatgtcattccagaaaaggacaagaaaaagaaggaggatgagaagaaaaagaaaaagaagaagggaagtctggacagtgacaatgatgatgtaaggaactttccaaattccaaaggaaagctagttaaagaaacaaatgtgaaaattgtccctttttatacctgatgtgaaatggagggctgagttctaagaatgtttatctggacatgtggtgtattactcatttcacctccctttgccctttatattctctggttttttatgttttctgaattctttctgtaaccattaatacactaataatgacataatgactaataatgacttctaaaaaatttaaaaacccaccacattaaaaaaattctgatctcatagatataaaggaagtttgcttagtaatgctataaaatgtatttggtttctattaataacccagggcttatatttgagataataactcaattttatgtaattttaagcctaatgtggatagatgtcaatgatctcacttcacgtgatctgtgaatctatttgagtaggctctccaccaaagttctatgctgttatattaatattagcattatatttatactgatatgattcagcattatttttctgtagttcttcaataaaaagaaaagggaatgggagtttggggtctttttacataattatagtggttagtgtcatagtccagagggtcctcctccaattaggtgattaagttgagaagtaaaattgttgcccagttttttctttaggagaccagctcacagaaatacagattctccagcagggatctgtaatcagtactaggaggaaaactgggatttgtttactttaacacatgcggacaccttattccagtagccttttgaaaagattgccaaaataatgttttccatttgaaaatttgctctggattttacacagtgcagtatcacaaatgattttttgtgcctcattacccattctaaagtaggaatattgttaattgttagtttctacttagtacttgataactttgattgatcattgcatactttatccttaattgtctcaatagcttgttatcacattatttatttttgttcccattttacagatgaggagattt

SEQ ID NO: 42632 - DNA, 1351 bp, Homo sapiens
aagataaaatgatttcctcatttaccatctgttttgtccacgttacagttaaggaatcatgcctgttctttatcaccactacatgctcttaggcaccattacttacttagtgcagtgtctcacacatagtaggcattatgatgatttgttcaatgaatgcatttgggatataatggtgtaataattgtttaatttcagtgacttaagaataaacaaacaaaaatatcactcctgttgccatatatattgaagttaaaactgaaaagtagtgaaaaaatttgattttttcttgaaaatgtttgataaaacttctattgaataaagggttctttggttttgtattaattctgaaaactgagctactcttgcaggtttgaaatttctttaataaaatgccacatataaggcgatcacattctaaacttacattaactaatggagaaagagcagctgtacttgggattagtgtgtttggggcgaaggtgcagaatatcatcattttacaaaatttgctacatgccttttactatgcattctgtctttttttttaatatagagattttaaaagatagttcaaaatgcctgctttgttgtatgatttatgatagggaaatgagcatttttctaggaaagcatgttaatattaacttttactatttgagggaaacgttgacttaacaaaggtgctttcctaatgacttacctgacttgacattcttttgtgatttagtactgtgaaagttacacattattaatcgataagttttgtagctttctctgcgactccagtgtggacacaaaatatctctgaagtgacttcaaacttggcctttttcacttcctttaacacaattccattcaactattactcttttcactaaagttttgtttgtctctcttttggaaaaaagaatatcaggctgtttcctaataaaagtcttaaataataaattgtacaactgtaaggaaaaaatcatgtttgaccttatctgaaaacagatggagaagatccatagtttaaatcatggaatggaagaaaaagaactggctttgaagaaatcaaagtttgttttgtgctgtttttgcttgtcatggatgctttaagaagctactgaaagttaagagtcctctccctagaggaaactataaatcaatacacacaaattctttatgacatttcagagagttcacaacatgctgaaaatcttctatgaattctgttaagaacacttactctcaagaaaaatgtgcaaatagtaaagattatttaatacttaactaagttgctttccatgaaaatctgtttaaatggcctttgttgttttacttctgaactaacttaatatcagtt

SEQ ID NO: 42633 - DNA, 1821 bp, Homo sapiens
cacggcacccatgcaggcactctctttactcccattaggctcttacaccccacatttggccactatcccagaaagaaaccctcctcaccacaactggtcttgacactctacactggatcaccccccatacccagacatcctccttacctgacctggacacccagttctttttatcatgccatccctcctacacagacaccctcctcatgctgcttgggctttgactccctgtgttgggctcaccccttcaggggtgtcttccttaccctgcttggctttgagatcctgcacctgggctatgcctctatagatgtgctcaggttccaacacctgctgccaggctgcctgctcacatggatgttttccttatcctactgaagcactgtcaggccaccttgggctgcctcctttggtggacgctctcattacccttagcttgctctcaattctcactcttgaccactgtggctctcccaggctgagatggacacatgctcaactacacctggttggctaggactgaagtgtccaggaaaggaagtgaagaaaagaggaagagagctgttggtttattttaaatgaggaactcctaacttttgtcttttatcatctgtgtgtttcaataagtctgacacttttgtttctctttggcagaattgtatatacctagcattttaagtcatagaaagctacctggatttttttttttagaccaaatccaccattggttttcccttgtccagattagatttaatgcaagcctttcccaatttggtccaaacctaattttgttgcctcttttctgtgtactttctgccaagtaacttaggaattcagctcctgtgaactctttgccttaaacaaatatgtcatgccctttcccacatttatgcatacctttttcttcctggaatgccctcataccatttttctgtttggaaacctctgactcattatttaaaattcagatcaagtgtcacttctcagtgaaacctttttcaactccctcagggtgagtaagttctttctgtctcttaagagagtgttcagagcacttgctatttaacttctatcatcgaccgtgtaaaattaggcaaattgcttacctttcctgagtttcagtttcctcaactgttaagtggagataataatagataataatcaataaagttgtccttaaggtgaattgcaaataatcaacatgctaataattgctatttttatgtttatctgattatgttaaaattgtgtgttctaggctgatgtggtggcttatgcttgtaaccctagcacttggaaggctgaggctggcagattgcttgagaccaggtgttggagaccagcctgggtaacatactgagacctcatttctaaaaaaaaaaaaaaaaattgctgggcacacagtggctcacgcctgcaatcacagcactttgggaggccaaggtgggtacatcacctgaggtcaggagttcgagaccaggctggtcagcatggtgaaaccctgtctctactaaaaatacaaaaattagtcaggcctggtcgtgggtgcctgtgatcccagttacttgggaggctaaggcaagagaatctcttgaacccgggaggcggagtttgcagtgagctgagatcatgccactgcacgccagcctgggagacagagtgagactgtctcaaaaaaaaaaaacaaaaaaaaacccttttcttagatatggttccagaagttaattcaaaatccacaatatgtgatgaacattttctgaaggaaattattcattctgtaaatatttttaagcgcataccatgtaccaggcatatgttatg

SEQ ID NO: 42634 - DNA, 1790 bp, Homo sapiens
acttacagagatgtgaagtcctcctttcccagatgggagaattccttgcagactttattcttttcataatcccggcctaggaggcagaaatagaaaaatttgtatgtgtccccttttgatgaatattatgttacatgtacatgtataaagtgatcttccacgtggcctacaatgaaagtcgtattttctcaatgtctatatgcaatttcatattttgggggcctttctagctcttctctcataacaggccacaattttatgacattctgttatattttagtcaccagcagaacaaaaggagagagtaaactaatactgaacgtaagtgagtcaaatgatacatgtcaactagtgagtcagaagctattgatatggcaactattaggtcctatctttataatgataccaaaatgagaatttttctccttccctccctccttcccaccctgcttcctcccttccttcttttaatgtctcagttttacctaaggcctgaaaagaaaaacagaactacaaataattggagactgtctccactccaaggtgaggggctggtgccactaatgcaggactttaaaggaggtacaggagagttagtgctgccacccatgctctgctacttggctcctggctgtctaagggaaggctaggaattcagctggggacaaggtggaaatcaggcaaagaatattttagacaaagtgtggtgagtctgggggatggtgggaagtgtttcctttcactttcacatagtgacaagggcttcaagaaaccactcagcgcttgacagggagctcttggaatttggggtgtaatggacaggtgtctgattcaggctggagaaatctagagggtgatgggcttgctaagtggcctggagaacaaagcagaggactgggtgggaagttgtcatgtgacctgcagacctgatgtagctcaagcaagagagcgagctggctaggagttgtcttaaatatatttcccccagtcccagctctacccccaacaaagtgctatctacagagcagtggactgccaacagttgggtctctgtgtggaggtagacaatttgaaaaccaggggcccagaggagagtcttaaggtgccagctgcatatgagagatctccaggaataacaagggagagagatcacagaagaacacagtaagagaaaacggcagctttacacatcttggtaaccagaggagacaaccttggctcaccatgctgcccattgaattttttgcccattgagttgagtttttcctgctgctatctctcttactagcttctcctttcctgtgttagccctggaggaggtagaagcagcctagagcgtaggaggaaggaggaaaagagaacaggcaaaggagacaagaggcaggtatctgtgtcttcctttcccaccacaggcaatagaactgaaacaggcctgaatggggtagtagcttcaactttcaatgaattaaaacatttttgactattaaatgtaactagccattctcatgatgaaatgacattggtatttgagagggaacagaaaaatcacagtacctgctcttgagttcattcacgctacagggaagagctagttactaatcatgagacccccttgttcaacatgtccatcacatatgtaatagggcggacacatcagagtcagtcagtgttctcctaacctgactcatcatttatgcaaataagcccaggaaatttccctcctgtgatgttatatctttggaaaaaaatgtaggaagtatataaattgcttactctgttttaagtggctt

SEQ ID NO: 42635 - DNA, 3297 bp, Homo sapiens
ctgggtggaaatttctatttgatggcttgcagtggaggtggtggtgattagatacagacttgaaagggttgtatttttttttttaaagattctctttaggactcatcagattaatgtcacctgtttaatgtcagattgcctgtagaggaagcagtcgcagcatgtacttttttggatggatacccccccaaaatatttttgaggtgagaaaagtcggatttgataattgtgagaaaaagacattcttcagcagcactttttaacaagagacctactcaaacaccctcaaaaccacacagaaggtggaaaataacccacatacctgaatcctgaatctgatgttattctggcaactaggacaaggcagtagagttgataaagctaattgttagtggaaccaaaaaaaccacttgcaacaaacctctgtaatgtctgagaaccttcacatcttgtacattttctgaaatgtattgattagtttacaaggctggatattgtgacacgttcaaaaggttaagcaaggcagaaaacttccattaatcattaatggtattttatggaattgaagactagaacacagagaagaataattagggctagaactgtcctcatgtggtgatgagctgtacttacgatgtcaagagttgtttttagtttgctcctaaagcagagctaggagaaatgtctggcagttacatggcagtagattctagtaagaaatctttattccaactgtgtctattttataactgaaatgaaagcagccttttgaagaggtgagtttgttttatcattgtaaatatcaaaatagatttaaataaccatatattgtaaagatccctgaatttagtacaatgtatcctcatcatctataagatcacttgctggggattataatctagtctcttttaaaaatagcgagagattataaggaatattttttcccaaggcttactgtattttaagacatacacaaaatagccctaataagaacttcttttccttataataaataggagctaagtttgtttaaattcccccctacaaaatggaagagtttatttttattagtacttctcttgtgaccattcaataacatgcaaagtgaaatcctgtattcaaatggggtacccccgatgaacattttgagaaatattttgtttctaaccttccagattctgatttctcatttcactaaaaatgtaaagtttcatttcatatattatgggaatgtgagtgtgcatgtgaaggtagtgtaactgggcactgcatgttatcccattaaatagtttgaatttatttaactatttgtgtttgcacacagcactttagaattcatgggcattatatactgctttagttagaatgcaaactgatgagagaaaagtgggaaactagatggaatgaataaggcttaaagaggttttgaaactatttttgctggaacattcagccttgggcataacaggaagcaagggaggaagctcaagagggatattgagaaagctcagaattaaaatataaaaataacctgtagaggaagctgttgcaccatgatctttcaggtgagctacccaaaatgtacttctgataaaataattttataaattcatttgcccaaagagaagatatctagcttacaagacaaagccaatgtatgtcaatcattgtctcaattttcaaatacagcaaataaatactaaagttaatttgcaatgtgattattactaattgattccccattccatggaatactgcttaataaatgtttttggtgtaaaaccagttgagctcactccaattcatatagttaattcctgtctcaaatgaactgtaaaattatacgctctgttttcaaatgtaccattcggttataaagaaggtgatttggactttgatatggccctagtaaatattggcataatcttagtgactctgatgaaatcactttcacatgaagtgaccccccacagtactaagtgtttacaaatttcactaacagaatttttgctttctgcaatagcatgtttcactttttatctatattgtgaaacattctggtaagtcttgtttaattctgaacttttgaaagccagtgtgatttattttcaggaaatctttgctgcttcaggcaccttacctctgccaacagagttgacaatattcattcatacatgtaacagatattttttgaggcttactttgtgccaggcattgggttcaatattgaatttgaacttacaatggaacccaaaatagacacatccttgccctcatgtaactttcgttgtaatggggatagctaataagatactgctttgttacaaagtttattaaagtaggtatttggatgccttcactattactagtctttcactaaaacctaatttggctccctagaacagttattcgtataccaagtacattaatggatcctaaatatcattgacataaataagtgctcgtacaggatgctaggaactatctcaagttgctgttttcctattgtgttctggagaatcatgggctttaacagctctgttgggcattttatattttcacaatttcatttctttggcatttttatttctattctgtactgacagactcatccatgtcagaaaagctcagtatatttgttagtatttttttaaataaatttaccttttaagaatatggtttgcagtgtttattcaaactagtcaggcatgatattgttcatttcacagtagtgaattgacttaaatagtaaacattattgagctggtttaggaagctgatctggttataagagatttctgtatcactaaaaatattgccaatgaaaaagtttgagcttgagtcaatgaaaagaaattcaacccttttaatactaaacccagagacccacatgacatctatagataaactaatctagaagttaactgtacctcttaggatgatatcagtgcaacaaattgagcgtcctttcagactttgaaaattcaaacacaaacgaaaacagcaaaagatatatagtcaatgggttaattactcagaaactgcaactgcaataggagacagcatcacagactcactcaaactaatgtccttgggttcacctcgggtggtagcctgtcctttgtgacacttaccaaagttccagaggaagcattttttctccatgcatttcatcccacctctctttccttttgtgggttggttacctcctcatctgtaattgcttttgtaggggtaaagatagagggggaggtttgcctcttccacttttgggatgggtaaaggtgatatcccctg

SEQ ID NO: 42636 - DNA, 1788 bp, Homo sapiens
gggaagagggaaagatatattgtatattagtatttcatccatttcagtcctaggggaagaagctacttgtaggcaactgggaaatactgccttgttgcttttcatagggtagcaaaagtggacattttcttatggtactaaccagatttagcagatttggtaagctctcttctccaagatgtacccagtggcttgggaacaagattcccaatgctgtttgataggagagggctggcttaattggaacctgtccagtaaagggtcatctgtaacagtatccattttagacccaaggtttccaaagaatagttccacaggtatagacattgtagaaaagggtcaatatgtttagatactctgagttagataagatttctttcctgtagtgtttctcagaacctttaggacgacaaaggcatgaattgtgaaaccaccaagaaggaataaattatggctcatttcttaaatatatttggccacagaaacttcttttcaaggtaagtcttgagtgtaatatattttgaaacaggtgcttaaataaatgctgtgggtggtcagctctctagaactataacaggcagagaaaactgcaattcaaaccaatcccccacaatacaaggctactcagaacctaagagttctcagaactcccttaatctgtacactttgtaacttcctgccaggaagaacacagctagcttctaagtaaactgctgacttggtctttgggtcatgctcaggtattagagaatagagaattgatagatcaggactactctccccaaatattgaaagttaatgcttacaagtgtattatgtatgtctcaagatatcatctggcatatggcacatgggttataagaatgaagtttagatcttctaggggactgactggaggtttttagcatccatttcatcagaatctgaggactgctgagaatgttgaaatatagattgcagaatgctctgttattctccaaaggacactttcattctttgaggtgaagccaatgtgcacctattgagtcagcagtctaagatggtgattcatgctcctgcttatggcctccatatataattccaattcctagccattattggaccttctgtgtttgaagaccctgatctgaacctgcttcagtaggatttttcaggatcagatctgccccagcaaatccttggccaaaagaataagacttaaagggatttcttggaacatggcctattcagaggtcttataagggacacaatttatgttgcttttttataccctatgctgtctgggaaagactttgtagtcttacctaaggacgcatagcttacttaagaattgatgggtaagacgagttaaaataatttgaatgatgaaataagaccaaggaaaagtaaatgtaagaagaagaataaaaagtcaagagtaaggttattcatgttacagttaataactgataattcttgggaacacacattttattccactggcaaaacacattactattatgaataataatgtacgaattaggtgaggctgttaactgacagcactaaatgaaaaccttaattttacaaagcaggataaatgcagatgtcccttgtgaacattaaagaatcagccagaaaagtaaattgaagctaatgatgaaaagtttcccagctgtagaattcataaagttgtatacttcccataatctcagtctttatcatgtaaaaaaatttttaaacattgcccaaagatgaacacaccatctgaagaataatttcaatgaaaaatataactgaattatctta

SEQ ID NO: 42637 - DNA, 670 bp, Homo sapiens
tccttctactaatagtttacaactagtatattttatgggcatgtaatttgagagctcagagaggccctgtaggacatgaaatccaacatcttcattttacagaagagtgaactgagcactgggtaaattctgtgacttgtctagagagtcataggtagatcattcattggaattagatgagttccactcctggtttttgcagtagccctattttcaggaaatggtcaggtacaggttgttacacatgctctaaaatcaaatccctactcagctttcatagctgtgtaaccttgggaaatttattttacccctctaagtttcattttcctcatatgcaatgtggtgataactcagtacatttgacacaacattgctatgaggttaattaaggtaatctgggtgcagggctcatggtaacatccatcacatagtaacatggattaatgtcacctattactcttattctagttattgccacgttctcccactggctttccaaatttataatatctgtgaaggtcaatgaaactaatgaggccattggaactcagtggaagagtttaaagacagccctgtgtccagggtcccgcagataagtgatttaaaacttcattatcaactcagtagccaaggattatctacatgggcagagtctatcaaaatttcagta

SEQ ID NO: 42638 - DNA, 994 bp, Homo sapiens
tataaatctaaattttcagttccctttggctgaattcctagtttactgtgcaagttaatttaaaaatgtattttagttctatggcaaattatttggaaatgatactccaaatgagtgtgaaaaagtttaaaaactactcagaaccccggaactcaaaagaggtaggtaacacattagcatattgatacagttttcatttttctttaagataatacactgtatttatacttctgtatcccttttattcaactgtatttcgtcatcttctgattagttcattcaaaaagacacactcagattattttctacgaattttgatacagagtttaagaccagctcattctttcattttttaaaaaattaaactttatctctgcttttgcaataatatttaccacgtttgtttaatgataaactacatgtagcaagaattgcaacatctcatttagatgccctcttgagaaatctctatacgagctgccaaatgcattctcttggctgaattttctaactgaaattcggcaaaacaggctagtagctaaatatatgagcctttttttcagtcttatttatgtaactttccttaatctttcaaatgttgattgcttactgtgattctaaaactgggaagaaataatcataattggcctaaatgagaggcctcatgtgacaatgattactctagtaagtcagatggggaaaaaatgggtgaaaaagaccaaatcaaaccttctcacattgtctataatagcagcagttatagcaactagaaatgtatcactgaatatatatatttaacaagaattatttattgaatacataagcagtagaattttgcaggagctgtttttcctgtaaaaaactgatttgaagtagcctctttccctctttcctctttttccatcttgccattggcttcagaggaaatgcagatctcttcctaactagggctagttccaggcaaaattgtgaggcagataaagcctgtctttag

SEQ ID NO: 42639 - DNA, 640 bp, Homo sapiens
ctggtttgcatggagagagcaaggccagaagcctagctggtaagaaattcttagccttttgccagcttgccaggtttctggcttctctttctctgtgcagctttggtgaccctactcactgtaccatagttctgggggccaaacagcattataaaagaacagcatctttctccattttatggaactataggcaaaggcctctcattttttttcaacatgccacccaacgggctgcacaggaggatgaagtgttgaattaaacacacaaaaaggaaaaatggatcaggatgtgagcaaggcaaactctggacccaggtgctatcaagtgttgcctcacagagataatacccggagtggttaggctcgcatgctcaaacagacagatggcagtaaagttcacaggcttcccttccccacaaggtgtggcaaacagggggaaagtacctagaaggtttgaaaagtaacagagtcctaccagctgaactgaggggccatttcaatccttcctgtatggctgtctattcaggctgtgccaattgaccagtcccacagaggtgtctattcaggctgagcctgaagttaatgaaaagtgaataaaagggaggaggaaggaagaagaaaaaagaaagacaaacaaata

SEQ ID NO: 42640 - DNA, 1072 bp, Homo sapiens
tagcagatgttttaggtgacccactcattctttcagcccacgtctgatttcagcaacagctgtggtgaacaatttctgcaaacaatgtcaacttttcatctcaaaagaggcccactctcagcgtttgtgcttcagtgctttcctgaaagcagcaggtctctcaacctggaatgagggacactgaatgccttaagggtgtctggagtcagtagataaatgccctggccacaggtcatgatttccacatatttactcagagagctcttttcgcccacagcactaggcagctggaaaactggactttattgagttttcttctttcactttctcatttaccctgttcactcactcttgcttcctgtaattgcctcccaaatatggcatccaagtccttgttttagactctgcattaggtggaatccaaaaattacagacaatcatgctgttctttattcgagaactattagttgagaataatgtgcttaaaaaaaaagtcattaagacatttcataaaataatggtaaatcttctaagagtaaaactagaaatgtatgggatgaaaagacagataccaacaaatgttaatactagttagtactattttccacattcttcagcccatattagtttttttggtagctatttcaactgacatgaggtggctctcagctgaacatggagttattgtttgctctcagtttcgtatcttatataatagcagtgtcaaaatcctgtgaaatctgagcaatcttcagctgtgaaggacaagggaagaaagtcttttgagacaaagggctcgtaacttggattcttgttttttatatgtatattttgcatttcaagcttcagccacaagcttttttttccccagcatatattttatgttttttctctttctcttacatgccttaatctacttcttcttttgttcaactaaatgtatgccatgttgagatcctcatagcataaaacctttcatttcagagttgtttctgcataattgcctaggcaaatggtattctaccattaaattgtttcactttttattgacatcattactgattaaggagga

SEQ ID NO: 42641 - DNA, 613 bp, Homo sapiens
ttcatggtcctttcttttgtgtgcatagatctttttatcatcatgcagccccctctgcattacctgagctggcaggttcatcatcatctcctaaatattcccttggtttcccattacataaggagaacaggagacagaagctctccaaagtagcacgtgtttcattatctgtgccagaaacattaaattgattgcgtctttctgatcatcaaatagacaggttggtgttggtcattcacaccatgcctgaagcatgaaaagacatatgacacttgtgagtcatatgtctcatatgtctcacaatgagtcatgttgtgagtcatattgtgacatctgtgagtcatgtgtctcatgtgtctcacaatgagtcacattgtgagataggaaattacctatctcacaggggaggggatagggaatttacccctctcaggagagggttgctatgcttctacttttaccggttatatagattaattattataccacatgaaaatacctgcttacagaagttttcagacactggggattagccttcaacttacatagctctaaaattagtgaaatttcctagacaggtgaagaagccctgcaagtaatgatttacctggct

SEQ ID NO: 42642 - DNA, 1090 bp, Homo sapiens
aactatttcctttcattcactcaaataagaagtatggcaaaaagttgccattggacatatttaaccaaaaattcagaagtaagaagtgaaacattaaaagaaaatttccaaatatatctttaaactatagtaaaaaagtaaaaggttataaggtatcttttgttattaaattatgatctttctcttggtcctgactcaattttcaaagaactatatttttctctagttcagaaaggaaagatcacaatattccagaagtatttcctagtagagggatttcggttgaatcaggaattccaacatctctcccaggcgttcctttccactggtcttttcaccgctgatggtgatagtgctgcttgccaggaactattgcaccattcttacctctttagagaaagggtatttaagccttattcttagaaacccaggagaacttactcctataagcaccaagtttcctaagttaccacatagggatcaagagtccatggggttcgtgctggcaaagcttaaactgtgagtaaccatccacacagcaggaaggagagcacgaggctactcacggtcaggatgttcatatggcaaccagtggtgtttggtattctggtattcaaagtgggagtttcgctgctgacactgctgtgctctgaagtcctcaaagtgtttttggcattcttctgtgttacaaagctggtactcaaaattaacaccaggacaatcctgaccaccattgatgggcctaaagaaaagacaacatttaaaaaggccttttggcttctgtctagcagttgaagcttgcagacacagtgcttgagggcacaaagccaaagtttctgggctgccagcacaaagtgaatgaactcatacttcctaatttcagtccctttccaaagcacccttctctccctgctgggtggaaaaataaaacaaaacacaaagctcaacttaaatcagcttttcaaatcatatattttaaatgcatggcaaaagtgtgtaagaaaaaaaaagcatgtatattgaatcaataaaatgatattttgctaccatgtataaaacacacagatgcagctcaaagaaactttggtca

SEQ ID NO: 42643 - DNA, 1156 bp, Homo sapiens
aattgtatgctggcatgcattctgcccaaagaggaaacaatactgggagaagcaggaaagaaaagatctttttttggctttatagctgtcagcagtgacttacacatggcccgtttcatgggctactacaaaagcagatgaaaaaccatcctcatgattcagggtacaacttctcactggatgacacatgccggtgactggagcatatcctgtagagaataacaattacttttattttcattttatgagaaaacccattaagaattacaactggacttttgcctagggggaaaaaagtaaaagcctttcaggaaacaggggtagcattatttccctactagcattgtgtcacattctcttgggaaagccacaggtaatgttctctaaaaaggttcactgggtctgcattttctcctttcctaagggaaggaatggcctggggttaccattttcttctgcccaccagctaagccctgcctttctgttttagtaaatggtccttcatatcgtggtactgatgaaggaagccagaaattccatcaatgttaaaaagaaaatcatcagtctccttcttccaaagtccacatcagaatttattagataaatgtaagctgactttggaagaaagctctttggcagcagtcatttctcatggcatctcttttctcattccaaacagttagtggaaatcacactgcattttacagcaccccctccatgccccaaatgcacaatcactattttaaaagcaagtataatttacgatggtatttaagtggcatttaacattgagaactccacataagtcactgtaagcaaaagaaagaaaatgtatgcttggccggtgtgtggtggaaagcagtggtggagagcagaacatttgaacagactgcctgatttaggattactttttaaaagtcatgccctcaagtatttcttctacatattgacagcaataccttgcattccagcaggtccaaagtcttgcctggttaaaaaaattgcatggtcatggtgttcagagtggttgagatcagatctttgctgttgggacgcccagcgacacacattctccaagcttctggatgggtttcccctttctatgaggctgatggactaagtgaaaacaatatgttaaagacacacctgacaattt

SEQ ID NO: 42644 - DNA, 509 bp, Homo sapiens
agtcctaacaattgcaaatatttttccaaccatcgagagagtaaaagagacactcagatgggttgtctgttcttattgctcatctataaagcatgcatgaatgtagaaggggaaaaccctgagtaccacaagttgagtggtgttgcaaatgaatgacgtgtacgttctgtaaacactaacccactactgataatgttacttgacacactaatgcagtgccccacatgaatttctccttctatgctaagttttcaatcagaaaatagacatatgacaagaagaggaaaatatgagttaatagagtattctctatctccccacatggcttggatcattctctgcacacaggaggatctcatggaatattgattcatcctctgggtactttcctgccttccaggcctaaactgcataaaatgctcattgtccctttttacccaatgcaagatgtgtctcccccttgctacctgtcaacaaaagaatctcactcatggaagggtattaccaat

SEQ ID NO: 42645 - DNA, 1127 bp, Homo sapiens
acaatgaccaaaaattgattaaaattaattctaccagaaaaggtacagagtgttgtagaaacaggttcatgataggtctgtccaggtcaggttgatccatcaaaattcattcagcccctactatgtcccagggctgtgctaggctctagggatatagaggagacatggtacctgctaagaaggagcacaaggctagtagagaagagatccgtgtatacaataattacaataagatgcactatgtaagtcatatacaaatacaaaagcatttgtatttgtgccaggcataaaagtccagatgcttgtccacttatgatgggattatgtcctgaaagtcaaaaaatcataagtcaaactgttgttaagtcagcaaccatctgtagacatcattttaaaataagcattatgaataagggtaataatacattatagatattttactgataacttcctgggaaattttctaagaattacaaattctaatttttaaaatgccttcttgatagatgtttttatttctgtattacccaacactgcattccattgcaaacttagagagttttagaatcaaatggaggtcgagatgtcatctccattttcctgcactcctatcccaactctgtcctaacataccagacagatgagaaaatcctctacttttgtaggcagccagagaagggattgcacaacctcacttagtagcccattccaaagtttaacagcctattggttcagccagctctcttttccatgttatcttaagggccagtattttgttctttctagagaaataaagtctaggctcttggacatcatgtaatttttgtttgtttgttttgatctaaggaggctgaaatatccttagcaactgttaagctttgctcagatcctttgatcacgagacatcctaaccccttgctgcaatcgctttcacatgcacaatatggcctaatagccttaaatcaacgcattaaaaaaaatatatagtaccgacaaagtttcaggacttacacaaggaattttctcatagagcattccacttaattcctacaatccaatgagtaaaaattataatatattttaactggaggaggtccttctattctatgcatattatctttctccat

SEQ ID NO: 42646 - DNA, 749 bp, Homo sapiens
cagcagctcaaggaggaaagaatatttaagtaagagaaaaattagtgtggctgaatgtagtgatgaagatggaaaatgccagatagagagtcagaataatttaaggctctttttagcaactcaggactatatattaatgccgtaatcaatgagaatccagcatagactgagttatgtttagtagcccccaaatcctagtgacttaaggaaagaaaagtttatttctcattcatgctatatgtctattgtgaattgacaaggaattgataaggactgttctatacagagtcactcaaacccaggctaaaggaaactccactgtcatagtttcatcatctggaatgtgcaaactaaagtccccactgcagaggaaagtctgttggtcaatactgtggtttaaatgtttgttctctccaaaactcatgttgaaatttatttgctattgtaacagaactaagaggtgagaactttgagaggtgattaggccatgacagcttcacttttatgggtggatttaatgccttaataagagggttccggagagtgggttctctctcttgcccttctgtcctctgccatgggatgacataacaagaaggcccttgcaaaatgctggctccttaattttggacttcctaggctccagatatgtaagaaataaatttctgttcttcttaaattacccagtgtgtggcattctgttgtagcagcacaacacagactatgacagtgagtcagactccagtttt

SEQ ID NO: 42647 - DNA, 762 bp, Homo sapiens
tgggatgcagaggttgcagtgagctgaggtcgcaccattgtactccagcctgggcaacaacagcaaaactccatctcaaaaaaaaaacaaaagcgttaggtatggacagtggtcttcactgcctgggcttatttgtacccatccttcttgggaaaaatgtctatgtatttgaaggggcttgagtattatgatctaagctgtatctacattaatggagaccccaatccccacaacagtgtggttctggcagactctaggaggtactgacttgatgatcttagaaagaactggaagaattctccggattaccaggcaagtcccttgttctcttcccttttttccaaacaaatggactgtctctctgttatgagccacttggagctgggattgcggtgacacaagcactcctgtgaccaccacccctaggactgtgctggatcagatttaaagtcaacacatcactgggtcttgcccaaagcttgctgtaatgattacctggcctatgtttgctcaaggtcctagggctttacaatcagcaggtggtaaagccagccagactagtgtccttcccttcaggatggttcattccctcaggttctgggtaggtccagatatgccatgtaggagccagagactgaagtcaaaaaccttataaatctacttggtgttctattcactgcagctaagctggcacttaaaccactcttccctcccctttacacaggcacctctccccatggccagcaccagttaaggcccatg

SEQ ID NO: 42648 - DNA, 2967 bp, Homo sapiens
ctgccaaaactacagaatactcaaacttataattaacatcacaatttatgtatgtgtgtgtgtgtgtgtgtgtgtgtgtgtgtgtgtatgtgtgcgtatggtcttacgtggatataattagcttacctggcatctcttttggaccaccccaactgatttgcacgaactgcaacttcttggttaagatgcctggcaatagtttttatttctggctgcaaattttccacctagctaaaaaataggttttgttatgagcacataaaggatctttattcataatgactcataatctttcacattattccctcgagtcatttaaaaatgtagtttactgatcatatcaagaaatcttaattctaagcacaagatgttaatttgcttaaaatgtcctcagtcacaaccaaattcacaatgcatacttatccatgtgatcctgtgcaagtaacttaacctctaaaatcatgttccctcacatataaaatatataacagcacctacttcacagggttacaaatattagataagaactgcaccctgggctttactgttccatctctacatttcctagtaacgtaagcggagaaaacagcagtttgttaagaacctttaatacactgtgatagccacaaatcaaaagtaaaaatagcatttattcctgccctgtgctcattcttcctgtaaaatggctcactgccttaatgttgctgctgattccgttcctgttttgtttccggttttttttccccatgctcacaacctgaaaacaagaaagccactatttttgaaatatcccatttgaataatcaagcactttaacccgtattatctgacttgctctgataacgctgtgaagtaggcaaggaaggtactgctagcctgattcctcagaaaaaaggattcagcattaaaaggtcaagtaactgcgaccaaccagacacagtcttagtcgggtctggagaggaaacaagttcgcaaactgttagtctagtagtttcttcctaataagaaagaccagctggaatactttgggacgaaagacactgcagacatactggctattaaaacttttaagacataaattttgtaggtttcgccaacacaatttcttctgcgactgatttctttgtctccgttccccgagagcaagtatagtaaccacttgtgcttggagcacaaatccagtaagacaaaagaaatgacaggtacacgtgtcacaaagtatcttatttaacacacctaatgctagttcaattttttttaacgctaaaatggtcacaatgaaatggtcacgatgattaaacactaagcactgcagaaggcaacatcgtgcgatcgaaaaccctgagtgaatgtcggccttcctccgccgcaggggttgcagcgcagggtacgcgcacggctcggcgcccctcaccttggccaggatgtagtgctggtaggctgccaaaggcagcgtgacagcaccccgtaaggccacggtggagagcagaatgctgccccaccagggcaggcccgtggcggcgtgcacgccgagcagtacttcctccgcaacccgcaccggcgaagacgcggccagggcctcgtaccagccgttcgcatgtactgcagagactggtgccactgcccacactgggagagtggggcgcttggcgccgctcgtaggaaccggcgcaagcggcaggtccctagcccaaagctgcagggcagggagcggccgcagccaccgaccgccgagccggcacagcatttctgcaccacggcggagcccagatcccgggcctcacaatccagcggacatacaccggccagccaaggctgatacgcgcacgcgccagcaacagcgggcataaagcgcatgcgcgcctgcctgcagccgcgattgaccttcccagtcaagccggtgacgtcttgcgtcgcagtggatgtgacgcaagagataggaaagtcccgcctttcccacgcggcactggacaggcctactgcgcacacgcgaaagtttcccgctgctagggtgtagttagtccgaggccggaccaaaactgcagagacatgggtggagcctgctgccctccgccaggctgggtgttctttagggagctctcgccttgtaaagttcatctacaccgtgtaacttaccattctttttcactaaagctaatagtcatttgtagtggaattatccttgctcggttttttgtgaccagaagctgatccccaacctctttacgtgcacctgattgcttccgttagcgattacgatagattatcatactcaagagtcacacgttgctaaagtacctgcttgtagagagacgcatgtttcttgctgactctgagtgttaagcacgagggatagttcagtctcttgtagatttaattggcccatctgttccagttagtatttggaccaccaactgcaaactgaatttcttcggtgttttgtcttccatgataaatagcagcaaaaatcttatagtaaaagtatcatctctttatttaagggaaactatcactggcagtacggtgaattccttgagtttacttgtatcctatataagctttaaagagcctgaacagcagcactggctgtcttctggtttaaaggaatacgttgaatctacatggactatatagttttaacttttgtgttcctggaaacaacaaaatggaatgttgtggaggagtttcctcaccgaagggtcacccctagactacagactaaaatatgttgtgaggagtaaaccttgatttttatttatttatttatttacttacttaggaaaagaagcctccaacaatgttgggtaatgtcaaacgccagctattgtttgcccttcactgtgcacctaaccaagggtaccctacgataactttctcaggattctggaattcatctgctttccaaactgactgataaatctatacatgaatttttaaatgtgtttaaacacacagcacaacacacac

SEQ ID NO: 42649 - DNA, 1843 bp, Homo sapiens
tttctttcttggctcataaaggtatgaaaatcatcttcaaactctgtctgcatgtcatctaaaagatgttttttaaaaactattctccacccataatctagcattctgaattattttatgtgtattttaaatatgtgtcaaaacaatgtcagttaaggcatggagcctacaacatgtaaaaccagtcctcataaattcataagccaaacaatatttagttttcattcaaaaaagtctgacttcatcttttaagtgctgtgcttttgctagatactctctgtcctgcctttcaaattaaccctctccggttttttttttttttaagccaaatttagcagctgggggttgtataccaactttagtgacactaacgttaataagttctgataacccatgacactcaaaccagctctctgctaggttcttgaaaagtttggcccaccaccaggtttttacaccctgcggtaatgcaacatacttaccttaggctaggtgagagataagtcttgttcctgaaaagggcaacagtgaaggaaaacctgtaggtagaatacccatactttctccagcaaatcgattttaggaaagaatgcatctaaaagctaaagatacagaaactgcctgcatcgtaaccctggaaatttctgctggactcccagaaagctccagtctgaagatcagtagaggagcttttacccctgctgaagtattaggaacaaaacagtaactggtgacctttactccctggatcaccacaagggaggagtaatatctgattggtgagtttgaaagaagaaactgagcatgtgtgactcagctcatttgagccttgcttatgtgttttctccacgtggaccccagtgaaggagggagaagtgtgcttgttctgtctagctttgattttgtggaacaggtaagtaagtataagagggagaggaggagtgaaagcaaaggtgaaacgtgcaccagaaaaacgtattatcaaagcagctatggctacaagtgtgtattaagtctctctacttcaggattaggaataacaaaatcaatattttatctgtatcgtatctgtatagacagaaaaatcctgggaaaggaatgctttgggggagaatcaaaacagcaaatgaagttttagaattttggctcatccatgatgggttgttcattttgctggaattttgtacttacctggtagcaggagctaattatgactgctatttaagcgggaggtgggggggatttgggggtggagaattttttttaaaagaataagagttttaattcagaaagcaggatttcatttaagcccatatgtcctagatgttgatgggggtggtaggtttgggtaggtcatagggtgtggctgggtcttagatatgtaaatttctcagggctggcagagtcagtcaggggtagccctttggcaagagtaatatgagtttggattatcgaacttcagagtttaaccctaagaggtaagtatttgctcgtttctaaattttgaagttttaaagccggcgttttgataatctgatatattttactaaccctctgaattcactgagagtaggtagggcactaattcagaggtcctagggaaaccttctggggggagataccaagttatggctacaaaatgacccaactttacatggcacggagctctaaaagtaagcagaattagcaagtgtggatcaacagatacaggatttaagaggcatcataagtttgcaggcggtagctgaaactaacaaatgaggtaaccagaggaaaaaggtgtaactgtgtgtgtgtgtatacatacacacatacacctactattttactatatataataaaa

SEQ ID NO: 42650 - DNA, 3205 bp, Homo sapiens
cttggtctcctcttagaactaagtttaaaatcagcctttaaagctgttttccctctgctgataaagatttccctctccaaataaagatttttctagattctatttcaggaaggagacaagagagtggtaaaacagctaataactagtaaagctaactctcagttggttgtcagtatggtatgttttactgagcctttgggttgtaagggcttctgtgaggaataaggtcctgcaacgccgcctgtctgtggacccaggaaaaattataaagttattatgaaaccagatcactaggacaaaccgagaggccttcctattccaactcaccacaaccaggcctggctccaaagcctaccctttggctgtcccatattacgggacaacaggtcctagcttaattctaactcactaaggaaacattcgaaggcatgtatgtatgtacgtgtaaggatcaaatatatttttcatccacttacaaatgtatatggtcatttgtaattatttaaagttactgataaatttatacaaatacagcatcagttcatcgaaaatccctgggagatcgaggaaatgaagttacttcagcagccaggatagttacgaaaaaccctgcagaacagtatggaaaagtacagcttctcacgtgtccctcacatacacaaacacttagctctgagtccattacaaccttacgtcccccctcaaactgctcccctccacctcacaactgggagaagttgatcaacctcctagttggtccccaagagactcatttacccattattttactcctcccgctttgatcccgatcccgcctcagactaaggtggccctactggccccaggcagaccacccccccaccccccggcgtgcaaacagggaatctaaccaattccctccatccttaaccaagtgagccatcccatgataacaggctgttcaccaactctgtgaactccgtggtcctcccacccccacgtgtcagctaccctcccccacattcccacacctcacgatttaggccgagggaagaaagggggcagtcgaaagcctggcccctaagagatcaacccactggaatctgtcccactccaaatcccctcccaccttcggcccctatcccttacagtcccttcctccctccttcctttgaaaccaggcccttgcctcagaaacctcctcttcctcgtcgtcgtcgtcctcttcttcctcgctgttgttactgctggtgccgccgccgccacctccgcctccaccgccgcctccaccgccgccgctgttgtcgctgtcgctgctgctttcgctgctgctggggggtcggcaagtccggttacgcttggccttgtggtgctgctgctgcggcggcttcttcttcaggagcaggtcgcagactcgcaccatcccacgaggagacgaggccgagcgagctctgctgctgccgccaacgccgccgccgacctccgccgccgcgggggggcccgccacagccgccaccgccggggggctcccttctccttctgcagccgtcgccgccgccaccggaaccgtcgccttctccatccccagggaaagagggagggcgcggacgggggaggggcgtggggctacgctctaccgcgacttcggccgcactggggccgacacagcaatcggtgccgcctccgccgccaccgcctcggtcacctctactgccgccgccgccgccgccgctccgccagctctcacctcgtctcgcgatactaagggcggggagcctgacgatgggagggagggagggagggagagggagggagcaagggaaggagggtgaggcgtaacagggagaccgggtgtcgggagaaccagaggagaggagactggaaagaagcggggaagtgtgcctggggcagcttccgaaggggaacggcggggacagatgaggggggcgcgattgcaaccagagcgcccgcgagctcccggatttcttctctttcctcgctatttcccgcacacacagccctgcagccctcccttcttccttcctggcttgtgattagaacgcagccgcaggcggaagtgcagtgacgccatcagccgtcgcctgagccgtggcgcgcgggtggccgaaaggcgaaagtgagatttcaagggccgggtctggggccccgcgggcgcgcagtgctgcggcgtgtggggagtacggggaggctggagaggagccggccccgggcagtgtgaggtgcggaagcgcggtccagacactttgctgacgggaggccggtccgccagatccgggaggtggggcctcgttctggactgctgtacgtagttttattcctggtcatttttttccaccgccaaatcgagagatagagctttggatcatgagagatggcgtcgtgttgggaaaagagccttctttacctgagtttaagctcggctcatagacatcctctacctgagtttacacgtgtgtaatatgaaggcagtcgattaggagatgtctaagatcattacttacacctcaagtttccaaggggaggaagacacgggaaggatgcgtggtctgtgccagactttgtagacgattcactgaatgaccctgatttagctcttccggccctcttcgattcagcttggaagcaagcataaatagtgattgttgtctgtatacttctctcggaaggaatgctgttatgggagttgtgggttcatttttaggtgtctgaagaagtttcaggacttttgaaatgatagtggagcccattgaactcagaattatccctttctggtctagtaggagtatagtggcatacggaaaatgaagcaaacatcaaagacagatgtactggcacaagattaaaagtatgtctcagctgacatagttgccattttaagactgcttagtttagctgaatatgcctggattttttttttttttagcattttttttctttttagcattggcataccatatgaaatgtgggcagttgccagtactctacagagtaccaaggcagaattggcaatgactaaatcaattcattcaaacaaaaattcatcatgtgcctactgtgcgcataatttgtggaatcaaagtctcttgtttccaggggctttacagtgtaataagtgctatagtaaatatatatacggagtggtaaccatctgcctattcctctcctacagtcgttgctgagttccagtgtagaacagagcactgca

SEQ ID NO: 42651 - DNA, 1212 bp, Homo sapiens
gtaaaaggaaggaaaggataagtacaaagaattgcccacaggacaaaaaaaaaaaaaaaggatgaaacttaatctgttgtcagatgtaaggaatgaatgttacgtaaaaagccagaggacaaatcagaagtcatgagttgtgtcaacacaagaatgcagtgggagaaagaagcaagatgggcaataaggctggagaatgtagcactctagatatgaggaggggtgaattacctgaagctcgctgttattgtctgtgagtcacatggtgaatatgtgagggggctcaagttaaagggtaactggttagggaagattttccctctggccccacacaattactcaggcttcccctggaagctatcacttctctttggtaggaggttctcttccagctctgtgccttaaattaaccgaacatggccatggttccagaaatttgcctgccctgatctgttcactatgatgattatgtacatgattccctggttccagatctgcactcactccatagtccatctggcttctgactctggctccattcccattttatagttctgctcctgtccttcgtactagactttagtatttggtttcctatttctgactcttggcctgctgccacaaaaaaaaaaaaaaaaaaaaaaaaaaaaaaaaaaaaactgtactaattatcatttctacttcaaactacttcactttcattattctgtaggcacccaagccccatttttggtcatggaccagtgccttaataaaaaacactggactttacacagggattcacatcagtggttgttcatatggttttcttctacaaatactgtccctaccagctgaagtgccaaggctagctacaataatggcaaagtccagatcattccctgttgtgtattttggcttcttgtctctcgcagttggagtgagttgcaaagatattgggttacaagtggagttctaaggccatttgcacagggaccagttaaaatgaatttgggatgcatgaatggtaaacctggaagtggaaggcctccacccctactttatggttcaggagacttgtttatatataggtgagaaagtagtgatgagtgggacatatctattgtgagaaaagccacagagtctgctctctgtattgtctctcttagtaattaagactgtcagcttaaactttcatttatttaacacttattgagcacctaccatgtatgc

SEQ ID NO: 42652 - DNA, 4258 bp, Homo sapiens
actgaaagtataggacataaaaatggatagcataatggagacacctattgtctagtgattcttaatatttattgttctttagaattttaagattaaattgcatcgttgctttggagagaaaactgataatgtttttcctggtttacagctttttttctgctatgaaacagcttgttttatgctattttctaactatagtttatattattgattttaaaaagcattaatgcttgcccatagtaaaactgttagcacatttctgctaattaacactgccttaaaggatcctattgatattcatcattatatctttggattaaaaaaacactagaggatactaaggtcaaccataaaatttgtccccttttcaagatcttattcagaattgtgaatgaaggccttttaatagtcagggttctggcaagaatccgagggcccattcgaaccaggtaatttgagaagaggacttttttacaaacctgcaggcagagtttagaaaacccaactatgccagatctagcaagatggagagacagtattatttcttttcttttcgtttcttttcttttcttttttgttttcttttctttttttttttttttttttttttttgagaagaagtctcactctgtcactcaggctggagggcagttgttcgatatcggctcactgcaacctccgcctcccggggtcaaacaattctcctgcctcagcctcccaagtagctgggattacaggcatgtgccaccatgcctggctaatttttgtacttttagtatagatgaggtttcaccatgctggccaggctggtttcgaactcctgacctagtgatctgtctgcctcggtctcccaaagtactgggattacaggtgtaagccactgcacccagcctgagagaccgtattatttctaggcctgaagaagcaaggggagagagcagatactgtaacacagagtgggtggctgtttggagataactgcccaaccagagctgaagcttcccaaagagagaccaaatgattcacaatgacccagcaggcagggagcaaggaaattaacagtcttacctcattctcctatcaaccccaatctgccaccaggcttcccactgacagaacctcatggaacctagagggcaagggattcagtagacacggtccatgcaggtcagtttcctgtagcacagaccagggtggagaagggtgtggtgtggatctggcgaagtgaatgaaagaaactcagcacaggccttacgttgttcataaagtggaagactcggctattgattttttttaattaaaagaaatatgaatttatccctacacatatttgtcatgtctacagatcaatgcctttttcatgaaaagtatcctttcttcctatttttttctttaatttattcaattaatatttattgaatccttctttgagcaggtgctgaagatacagagataaagacaccatcagatggggataagagaaataatcaaaccatcaccttatggcctactgtaagcgtggtgaattagggggaagtgcaggggacaatgggagctcacagatgaggtagctacttcaccttatagattgtctgaaaggcttcctggaggaggtgatttgggcataatccttgctcagcttaattgtttggtctctattcccatgttgaatgtattttattaccattaggaatgcaaattttgaggcacatctctgaatcttgtctttaaacaaactaccaaatgtggatcaccttatgaaacagtatgtacatttttatggtattgaaacatattgccacattgccttcagaaaggttgtatactattaatattaccataaacagtgtatgagggcacgtttggcacacacttgcactatcactatgcattatgtattttgaatattttccaattttgtttgctcctttctgttagctggctgtttgtgtcagcttcaccctagcaatggctttttatgttgaagaagcatttggttccaatttccattttctttatatattcccagaactagccttattttgccatcccagaaatacctgcagctatggtagtgttctgtcctccaatgtttaagttccgacttctttcacgattcattatactaatccattttgtttatgttggaagttttctttattatatgttccaataatcccacatttctactttgtctctattccattttccactgggagtcagagtattcataagagataaattatctgccattccttgaggcagaaaccctcagtattctttcttcatttctgttgtagctctacttctctattccttttattcagttcaattttttttgtggcttctctttttttcttgatcaattgtgccagaagttttcaaattttattaatatttttaaagatttattttatttgtttaatgaatttctctgttgcctcttttttttcccagtttatctactgctgctgttatccatattatttctttctaaaatatattggtcttcctcctgctttataatcttcttctgcagctgtctttggcagattttaacaggaattaactgacaaaggggaaacgcaattctcaaagtttctgtcccaactttacaaaataaagaaaagaaggatgggtttagatcagagagacagtaacttaagaactaaccaatatgatccaaatgatatattcttggaatttagcttttattttccaagggaaaaatattaaattaattttttctttctttcttcctgttcttgttcattttgttcttgctgtttttctcttccccttctttttcctccttctcccacttcttcagttatagctctgaacacagataaaataatggttatctatagaagaatgaagaagctatggtatccatgtctttgtcagcatgtactgcattcttgaaacactgaatttcttgtaacatttaatgaactgctcttgcaataacaggatgttgagtgttgagagataagtgattaagttagatctggatttgagtcccggcttatttattaactaagcctatggccttggataagttacctaacctctccaacgctcagttttcttttttgccctgagggtaaaataaaataatacgtgtgaaacctagtgcctggcacaagataagtgctcagtaaatgctagctgtttattataattttccatattaaaccactgtggaatactttttctgtcatataaaacattgttgaaatgcctgccatatattagtgccctgaagtccaaaggtagaggaaccgagtgtttaaaaattactgtggctgtggagtcaacatgatgtaaaaaaacaaacatttggataacaccaagaagccagatatggttgaaatgttgactggttgacaaaaataatttgggttgcttaatggtgcacaaaggtaatgcaaaacacactctctagatatataatatcttcacctttaatttctttctaaagtacctaagaattggaatttttttcctcaatagtaactgtgtgggttatactcagtttgagacatttctgattcctacaagtagaagaaaaaaattttttacagtgatattttctcttttatagaaattgtattacttataaatttcttgccttataagttatacaccatttaaaacgcattcgatgtttaaataattgtctgcaagaagcagcagcaattctgcaggacttttggcccgtatttaaactggatagctttctatgcacaagcctctgtactaagtggtagtcaaagatctgtatagttagctcaattcagttccacgaacataaattgggatcttacaacaggctaacagaacgggcatccatgaacaaaaggctgcatgtttatgtatgaatagaaaaagatagcagaccatatcaacttaagccactgttaatgatattgtcttagtaaaagaatgacagcaatatgctagatgcctgttaagcctccaaaaacacattctcaatctgattacaatagcaacactttttgtaagactttaagtaatactttaaaaaaaactgtgggctaggcgtggtggctcacgcctgtaatcccagcacttcgggaggccgaggcgggcggatcacctgaggtcaggagtttgagacctgcctgaccaatatggcgaaaccctgtctctactaaaactacaaaacattagctgggagtggtggtgcgtgcctgtaatcccagctacttgggaggctgaggcaggggaatca

SEQ ID NO: 42653 - DNA, 1718 bp, Homo sapiens
ctgaacaatctatcttagagactatgtcacataaatttataaggagttttctctttttttcctacaagacatagtattacattgaattgatacattattgatgacatttagatgattggaagatcattttaaaaccaggagtaggtaattcttagtatggaatgttgtttgaagaatacgaaaaaaataaaaatactgggcagtgtctcattatcccactgatgactttaggcgtaggaaagtttgaaacctactcccctagaacaatagggggatcaaatatgtgatcacattcttctggtgggtacaaaatggcaaataaatactggttattttccattggtactccctgcctgcctggctagatattttaaaatcccattgaatatcaaacttagaattaaataggtcagtgagaggaacttctctccatgcaagtgaggaaagcagtctcatattaaaaaaggaaaagttagtaacttttgtagtttgtccagaagtaaatgccagaggtctgtatgaaataaaggaaatgtggcaactttgtcaagagtacatgaaaatattggggccaagaggggaaaaggccgaaggaaggtatgcctactccagatgagttttttttttttttttttagtgaggagggggctgctggcatgagcccttaaacttggttatatgtgacctctactccctgtggttagaatttcatggccagagtcaacaagctgtggatgggattgttaaagttttgtagtagagcagagtagacaaacatgcctgggtgagttctctgggataagacacgttgtgactattctagatgatttttccatgtgacattggacttagtgattaaagtgttgccaaagggactgttacctcctcataggttgggccactgtgcctgagacctgtccagaacactatgttcttatcacaaggcagtccaagaaggacagtatgatgatcagaatgagagtgactctttaggacttcttttattttctggtttgtagctaacctaaagagaaatgattaggatttagcttctcagatctgccaagtatatgaagttctaagttttactgttgtggagtactttcttgtcttttttccagtgttcttgaatttaattttcttattccataggatttatagtgtactgtccattcagcatactatcctgtgtggatatctcaaatcttgtgtggttaaacatgcaaaaattcaaccttctgtatctaagataaagttctgtgaggaccgtatttggctatagtcagatataatagcagatgaatttaccaaatagggttatcctacctccacttcagacccataagctggcatatgagtttagtgcacatgcctctctttcattcaataagatgtgattgtaaattttcaagacatgatgctatagatcctaaaagaactctctcattaccatgtaattgtttatttctgctccacaggggcctctgcataatgctgccgatgggtactttgtgaaggagtcttcctaagagttccaaatgggaagcagtgcaaaactgtttttggctttctcctcaacctgcctgatttttcatcttatgtcttatttccctgtttggggataataggtctcagagtgacattagcaatgtattcatcctattttcattccttttgattttttcttttgcttctcctattcttcctctggaaaggct

SEQ ID NO: 42654 - DNA, 1788 bp, Homo sapiens
ataaaatggaaagatataaaagatatcttttatatataaggtaggtgagaaaaaagatagaaaataagagtttttttagtccagagattatttggtttggtccgtactattccattcaattttttaccagtcaaattttccatttatgggacaacacccattaaacagcatttgtgtatgtccaaggtttgtttaacttaaagagatacaaaatatacacgttttccaaacaaaaatggctggttcaaagttctgtgaccagtgacatgtaaactgaagcaatcagtgcacgtctggtgatgcgttgttaaaatttcaaaggttaccatgcgtgggctttagaatttgtttagagaagcagtgataaccttgactctctttcagcagaagtacaagtttattaatgtaagactcagtactactattcacattttaatcatttatgtgtttaccttaaggttccactataggttacttgatttccactatatttccactataggttacttgattcttaaaactaggtgactatattttacctttgcttaaccccatgctccattattttaaattgttctttttggagtttaattttaattaagcttattcaactcaatgtcagatggtcgaatgcagctaataggatgtttaacattctctgtagaaacagggttgggcttgtgacttgtttgctaaactcaagtttagggtttttcttgtttagtttcttaattgttgaaagagaaatagaccttaattttttaaataaaccagatattccacttttaattgaaatctcttgtgcattggttaaagaagtttaatctttcaatgaaaacatatcaaagataattggttgaggttgaatctcatcaaaactcatgtaacaagtgcttaatatgcaagaacatttactcactgagcacctcctactgcttattcagatttcctctttcccatttttagtgtgatacgttctcagttttcttttaaggtttctaaaagatagatctgcatttctattttataatatatataaccaaaccacaattgttattatctcttgatttaatcatccttttacctgccataaaaataattttttttgtagatgttgctctgaaaatattttatttgacatctatatttaacatacatatttcttggttattttggcagaagttggtaaatcttcctactcttccatagattacctattttagatattttaaatgaagactaggataatagacagctagtagatcccaacttagaactaggtttttgtcctgactctgccactcactagtgttttaatgtaggacaagtttgttcttgtctctggactttcctcattcccttccagtgctgttagaagaattatatttgacattacacaagtgatattgttgcattaacatatagcattattataatcattgtaaggtcctgaaataagagactcatgcctgtttaattaaattatatggatcatattttgagctaaaaatactcatgatctaacaaatgatttattttttgtttgtgagtttaaatagcaagacttcaaatgtataaaatgaaataataatcaatcatgtttttaactaaaggtaatattgaacagaataaaattaaataaaatatcagtttgtctcagataattcaggtagtgatttgtcatatagaggatctaataatttgattctgaaggcagcaaaatgaccaataaaatactaggggtaacatttctctttattaagtgtatttgttttgatttagaaagac

SEQ ID NO: 42655 - DNA, 1120 bp, Homo sapiens
aggcatttttatgtcatattaaaacagaagttaaggatcttcagagaaatgctctctaccatgacactattttttgaatgataaatgaggattatttaacaatgagccctaattcattttgaaaaacaattagtactaaatatcagaaaaacgtatgaattatacatagtaaatattatcttctgtatttgtagtgtaaactgagacaccaaaaagtaactcaccccgagtttagtggctgacctagtggccgacgtgttttaacatttatatgcaggtttctgctatgcacctagcactattctaagcactgtccctgaaatcattttcgaatttgtgtgtaatatgacactcattgcaatttttaaaggactttttcacattggaaggggtaaagtaattttcccagggactgtagaaaactgacattataatcctgagttttatttcaccatattgtttcttataaatgtctgtccaccaatgtgttaaaaatgggctcagcagagtatgtgggatataacaataaaatatatttttagtatttcccaaaattagatcactgtcatatttaagtgaatgattcttttattatattaatcattgcaggttttagagctgtaaactgtcaaccgcattacagaatgatgagactcatttgttgattctctgcccatgaaatctccagttgatacacaaatgccagactcagcatttctccttctcccagagataggctagttcttgaaggtcattttttttgtgtagactttctgtaattcatttgctcagagtatacttttcaatggacatagttcactccttgttgattagagttgtagagtatttgctgtctgcctgagttttgcaaattatcagtggtaaaggattaaagtgtaaacataaggtcaatggccttcaaagtggtggatgggctgatattacagtttaaaaatatttaaatacatttattctttaatatattgaaggatttctacagggcatattttttaggcaacagaaatgaactatgatcagaggcgattctaaagtgtaaggtgttggatcttctatatcttaaattttgaaagtactatgaatgaatggaagtacatattgc

SEQ ID NO: 42656 - DNA, 5283 bp, Homo sapiens
ccctgatcaattctattctattaattttattttactaaacaatactggccatgacatcctaaatttatttcatgaccctgtttgaaagttgttctaaagatagttgaaaattaggaactttctatagtaggtgtgttgtagaaatttttggcaatgaggcccttacggaagaaaggtcaaggctaatccagattttggggttgtgccatatggcattaggaaataagcttgagttcacagggtatagaaatttttcctagatgatcatgactacaaacagaacagtttctaacccatgaataaattagttacatataccccaggatgtggatgacaaagaatattagaaatagcatgaaatatcatcactattttttttactataaaatatatgttttagtttaaaaataaaggtagctgtgttaatatttaactacactggatttttcctagtgagtaatgtccccaatatcctcccctccctatgcttgtagatacatttcatatttgatgttttccaggattatgaacaattttaaggtacagtaagagtgaacaaaagaacaacccctgaatggacagatttgtggctgttagtttaatttggctaatcaagaagcaactgcaccaatgtagtaagtggccatgagcaagtttctctacaacaaaaaacattgcttcacagggtggttgagtcactggaaagattttcatatttaaactcctttagcatcccctttgtctactcacctaaaccaaatacaaaataatatcaatgggaattagtactggtttgggacttggatttgagtggggaggccaaagaagagccagccataacagcacattgtaagtattgagtaacattctgggcaatgactgtggtgtggctgctgggccaataggatatatcattgggccatttaaatagaccctgttttgactagtggctagaatatttttaacctcttcagttggtcaggattgaagtaaggcagcttctgctagcctgtttaccttcacggtatacctttaactacactaatttctggattgcgttctaatgagaaaagaaaaatgtagaggatgcacggtatcaagtgctcatggccatttaccatatggctacagttgactcgatctgacaaattaaattgacaatcaatgaaagttttgaatgacttctgtatctagtctgtatctatctgtatctaggcatgagctggatctagtgttagatacagtgaggatgaaccatggttagtgctttcaggaaacttattatcttggggatgtaggatataaattgtagcatttctgttgtctgcaacattaatctaaaaacctcaatgacccaaatagaaaaggaaaaaagctttctgaacagccaaacagagattccaaagttcaggcaccaaagttcagaccctaacagttatttacaagggtcagttaaccttttgttctagtgggataggattcccatggtgagatttgaagaactgtggaaccactgtttcaggttctttttccactttgccacccgtttgaaattccatccattaggaattaactggcatgatgggagtcccttttataataaaatgcctctattctagaaaggttaggtatgggggaggaaatagagtgttgatgagattaggagcatgaggttcagataaggagaggttttgtgagattttgtagaattagcttagtaagatttttaatatttaagacctacccgaatttgccaacaggttaagaaagggaagttttggtatggggtttatgttagaaaggaggcacatggaacttagaggctgggtaatggttggaaaggtgggacccctaaaagatagatgtttgaggtatacagaaggcagtggaatgggagagagaaatgatcattttcatgcttagttttgcctgaaaacccagataattgcgaactcggctttttttttttctgcttgccagcctgcatttcttttctttcttaaggttctgcaggaagtttcattgtctttgaagctgggatctaattctttgctttgatattttatgaaacatttagaaattacacatcatcatatcctccttactttcttcagtcctctgcctactcattccatttctccaggaaaactgtcttcacaagcaaaaataaacacagtgaatacaaatttgaaatttgaagtctgttggattgtataggtagctaaggaggttagagcccacacagcttatttacacgtgagattgtccttggatgtagagcttctcctccactgcttctttattatcccaggagtaccttgtattctacatgcatagtaatttataatgtttcactataattatcttcttattttcctgcatcccttgttacattgtgagctccttgaaatcagctccttaaaataattatgaaacactgtcttatgggttgtgccctgtcaacaagaatgctattgttaaataattagcatgtttgttgatgctggccaatatttacttttaggtatcatcacttctgatgtggattttttgtcaattttccacataactgcagatataagtttggactcatcaacacagccatttgctttcaagacattaaatgctttaaacacagccatttgctttcaatacattaataactgaataaataaacagtatacatttaaaaattaaaattgaatcaaaataataattatctgtattttatctagtaacttaagttattgctgttaaatacatagactatgtcactgctgtaaatcagaagcattttggaaaaagagttccattgtcaacatcatatgttactaaaattagttctttgttttatttaaatgcatgtttttgttgcaatatattattgttaactgaatgattttagcaaaccaaattttcaaagtattattctaacaaaagaattttattgttttcaatatctatataatgaaaaactaatactgaacaattcaatgcttatatacccaaaaatattttacaattatttttgaaagcatttatattatgtagtttattataatttggctagagatgaatttctctcaaaaaagtgaacatctgccaattatttatatgatatatttcttaaaacttacacttttttggatcaaataattcatttattgatgtcagcgcacacataccttcttggaaaactcctgagaatttcaaggcttaaattccaagcttcagctgggttacgggttgagaaagttttagctaagaactggcactaaaagattacaaaacatctcgcaaagcttaaagctatagaagacatcaagaagaaaaaataccttttaataaaaacattctaaactctatccactaaaatttcaacatgagactattttagctatacaatcttagttgttttatagaagattgataaagttcaattttataactttaaacttaagtaacaagtttcttgaatttcatgtttaaaatatagaatatgaatagattcaaagtgcattcatttctgtttaatttccatctgtggctatccttatgagacaggattagtattaatttcaatttatatgtttatagattctattagttgttaatttattaagaatggataaacatggattgcagacattaactatatttttcttgcacttgaaaaacttgataaaaaaatatgagaaagtctcattaatatagtttaaataagtttaaatgaactttttattctttaaaaatattaagctgaactagctagagcgtaatacttgaggagcaattgtgaggcttaggaatgaacaagctctcaaacttgaatcctaattgcctaacttgatatattctttcctaccactcaggtccttttctcatttgataaggctgtcacattgaaaacatggaattgcagaatgttcaaggtagaaggatcgttaaagataatttagtccaacttgacccatatggcatagagatatatgcagatctgcatgtccagttctgcagctagaaactgacactgagctgaattaaaccacacggagaagaactgagaaatttaaagtaaaaggttaggaaattcgaatgtatatatattccagaggcccagtgtaacatgaagaaagtcaaggagagggactctttcatcatggaagatctgggggcagagggacttaaaaggtgggacaagccaaagatggtgacctagggtggtttttatgatataaccttttttctcctcattccctatgaaatcttcagccaattccatatttctcactaattcaagtgaatatctggggggatggcttatggagggaaataagggagcaattgtttggattatattccaattttttatttgcattagaatacctatatgtttatacatttttatttgcattagaaatacttatataagtttatacactttcattctaactttttttgagggaaatgtatctccataagtgaataagaagttaaattactgattatgtttcaattggttagtttgatgcttaacagtctttcacttttccactcttgcatattttgtagagagtaatacaagctcttcatgataggaaggatctgcatatgtttattttatagtagaaaaatggtaagattttcctgtccccaattttctctccaaacaaatccaaatttcttgtattttggaatgactctgggtaaagtggttgtttatagaaagtctcttataaaatattgaggatattattagatattattacatttccatgaatatgtttccctttatctttaagagaagaagagtcagaaatataacctatcagagtgggagatggcataaaagctggactaaatggattgctagatggagggcaaacctggtgtgaatgactcagtgagaagcttcgggagtcctgagggtagcagaagggtgcggatttaaagttactgttagagtggctggaaaatgggagaccggttcagagacattttatctacttaaaaactgtgccttttgtatcacgtcaaagtgaatgcaaaacaaagaacaaaagggttaaaggctcaggtttaaatcccaggtatatgtacatttcaattgaggtattttttttttcttttctaaatgatcagtacacttattctttctaaagaaaatacttttcttaactactctctatttttaaacttctcccacaaagatgagaaaacatttaaaaatcattggggctatttttctgtttaccgagtaaagagaatctctaaaccatattt

SEQ ID NO: 42657 - DNA, 6970 bp, Homo sapiens
tctcataacctacagagaatttggggtcagcctgtcctattgtatattatggcaaagataatcatcatctcatttgggtccattttcctctccatctctgcttaactgaagatcccatgagatatactcacactgaatctaaatagcctatctcagggcttgaatcacatgtgggccacagcaggaatgggaacatggaatttctaagtcctatcttacttgttattgttgctatgtctttttcttagtttgcatctgaggcaacatcagctttttcagacagaatggctttggaatagtaaaaaagacacagaagccctaaaatatgtatgtatgtatatgtgtgtgtgcatgcgtgagtacttgtgtgtaaatttttcattatctataggtaaaagcacacttggaattagcaatagatgcaatttgggacttaactctttcagtatgtcttatttctaagcaaagtatttagtttggttagtaattactaaacactgagaactaaattgcaaacaccaagaactaaaatgttcaagtgggaaattacagttaaataccatggtaatgaataaaaggtacaaatcgtttaaactcttatgtaaaatttgataagatgttttacacaactttaatacattgacaaggtcttgtggagaaaacagttccagatggtaaatatacacaagggatttagtcaaacaattttttggcaagaatattatgaattttgtaatcggttggcagccaatgaaatacaaagatgagtctagttaataatctacaattattggttaaagaagtatattagtgctaatttccctccgtttgtcctagcttttctcttctgtcaaccccacacgcctttggcacaatgaagtgggtaacctttatttcccttctttttctctttagctcggcttattccaggggtgtgtttcgtcgagatgcacgtaagaaatccatttttctattgttcaacttttattctattttcccagtaaaataaagttttagtaaactctgcatctttaaagaattattttggcatttatttctaaaatggcatagtattttgtatttgtgaagtcttacaaggttatcttattaataaaattcaaacatcctaggtaaaaaaaaaaaaaggtcagaattgtttagtgactgtaattttcttttgcgcactaaggaaagtgcaaagtaacttagagtgactgaaacttcacagaatagggttgaagattgaattcataactatcccaaagacctatccattgcactatgctttatttaaaaaccacaaaacctgtgctgttgatctcataaatagaacttgtatttatatttattttcattttagtctgtcttcttggttgctgttgatagacactaaaagagtattagatattatctaagtttgaatataaggctataaatatttaataatttttaaaatagtattcttggtaattgaattattcttctgtttaaaggcagaagaaataattgaacatcatcctgagtttttctgtaggaatcagagcccaatattttgaaacaaatgcataatctaagtcaaatggaaagaaatataaaaagtaacattattacttcttgttttcttcagtatttaacaatccttttttttcttcccttgcccagacaagagtgaggttgctcatcggtttaaagatttgggagaagaaaatttcaaagccttgtaagttaaaatattgatgaatcaaatttaatgtttctaatagtgttgtttattattctaaagtgcttatatttccttgtcatcagggttcagattctaaaacagtgctgcctcgtagagttttctgcgttgaggaagatattctgtatctgggctatccaataaggtagtcactggtcacatggctattgagtacttcaaatatgacaagtgcaactgagaaacaaaaacttaaattgtatttaattgtagttaatttgaatgtatatagtcacatgtggctaatggctactgtattggacagtacagctctggaacttgcttggtggaaaggactttaatataggtttcctttggtggcttacccactaaatcttctttacatagcaagcattcctgtgcttagttgggaatatttaatttttttttttttttaagacagggtctcgctctgtcgcccaggctggagtgcagtggcgcaatctcggctcactgcaaactccgcctcccgggttcacgccattctcctgcctcagcctcccgagtagctgggactacaggcgcccgccatcacgcccggctaatcttttgtatttttagtagagatggggtttcaccgtgtgccaggatggtctcaatctcctgacatcgtgatctgcccacctcggcctcccaaagtgctgggattacaggagtgagccaccgcgcccggcctatttaaatgttttttaatctagtaaaaaatgagaaaattgtttttttaaaagtctacctaatcctacaggctaattaaagacgtgtgtggggatcaggtgcggtggttcacacctgtaatcccagcactttggaaggctgatgcaggaggattgcttgagcccaggagttcaagaccagcctgggcaagtctctttaaaaaaaacaaaacaaacaaacaaaaaaattaggcatggtggcacatgcctgtagtcctagctacttaggaggctgacgtaggaggatcgtttggacctgagaggtcaaggctacagtgagccatgattgtgccactgcactccagcctgggtgacagagtgagactctgtctcaaaaaagaaaaaggaaatctgtggggtttgttttagttttaagtaattctaaggactttaaaaatgcctagtcttgacaattagatctatttggcatacaatttgcttgcttaatctatgtgtgtgcatagatctactgacacacgcatacatataaacattagggaactaccattctctttgcgtaggaagccacatatgcctatctaggcctcagatcatacctgatatgaataggctttctggataatggtgaagaagatgtataaaagatagaacctatacccatacatgatttgttctctagcgtagcaacctgttacatattaaagttttattatactacatttttctacatcctttgtttcagggtgttgattgcctttgctcagtatcttcagcagtgtccatttgaagatcatgtaaaattagtgaatgaagtaactgaatttgcaaaaacatgtgttgctgatgagtcagctgaaaattgtgacaaatcacttgtaagtacattctaattgtggagattctttcttctgtttgaagtaatcccaagcatttcaaaggaattttttttaagttttctcaattattattaagtgtcctgatttgtaagaaacactaaaaagttgctcatagactgataagccattgtttcttttgtgatagagatgctttagctatgtccacagttttaaaatcatttctttattgagaccaaacacaacagtcatggtgtatttaaatggcaatttgtcatttataaacacctctttttaaaatttgaggtttggtttctttttgtagaggctaatagggatatgatagcatgtatttatttatttatttatcttattttattatagtaagaacccttaacatgagatctaccctgttatatttttaagtgtacaatccattattgttaactacgggtacactgttgtatagcttactcatcttgctgtattaaaactttgtgcccattgattagtaacccctcgtttcgtcctcccccagccactggcaaccagcattatactctttgattctatgagtttgactactttagctaccttatataagtggtattatgtactgtttatctttttatgactgacttatttcccttagcatagtgcattcaaagtccaaccatgttgttgcctattgcagaatttccttcttttcaaggctgaataatattccagtgcatgtgtgtaccacattttctttatccattaatttgttgattgatagacatttaggttggttttctacatcttgactatcatgaatagtgttgcaatgaacacaggagagctactatctcttagagatgatatcatggtttttatcatcagaaaacacccactgatttctatgctaattttgttacctgggtggaataatagtacagctatatattcctcattttagatatctttgtatttctacatacaataaaaaagcagagtacttagtcatgttgaagaactttaaacttttagtatttccagatcaatcttcaaaacaaggacaggtttatctttctctcaccactcaatctatatatacctcttgtgggcaaggccagtttttatcactggagcctttcccctttttattatgtacctctccctcacagcagagtcaggactttaactttacacaatactatggctctacatatgaaatcttaaaaatacataaaaattaataaattctgtctagagtagtatattttccctggggttacagttactttcataataaaaattagagataaggaaaggactcatttattggaaagtgattttaggtaacatttctggaagaaaaatgtctatatcttaatagtcacttaatatatgatggattgtgttactcctcagttttcaatggcatatactaaaacatggccctctaaaaagggggcaaatgaaatgagaaactctctgaatgtttttctcccctaggtgaattcacctgctgcttagaagcttattttctcttgatttctgttataatgattgctcttaccctttagttttaagtttcaaaataggagtcatataactttccttaaagctattgactgtctttttgtcctgttttattcaccatgagttatagtgtgacagttaattcttatgaaaattatatagagatggttaaatcatcagaaactgtaaacctcgattgggaggggaagcggatttttaaatgatttcctgaccaagcttaaccagtatattaaatcctttgtactgttctttggctataaagaaaaaaggtactgtccagcaactgaaacctgctttcttccatttagcataccctttttggagacaaattatgcacagttgcaactcttcgtgaaacctatggtgaaatggctgactgctgtgcaaaacaagaacctgagagaaatgaatgcttcttgcaacacaaagatgacaacccaaacctcccccgattggtgagaccagaggttgatgtgatgtgcactgcttttcatgacaatgaagagacatttttgaaaaagtaagtaatcagatgtttatagttcaaaattaaaaagcatggagtaactccataggccaacactctataaaaattaccataacaaaaatattttcaacattaagacttggaagttttgttatgatgattttttaaagaagtagtatttgataccacaaaattctacacagcaaaaaatatgatcaaagatattttgaagtttattgaaacaggatacaatctttctgaaaaatttaagatagacaaattatttaatgtattacgaagatatgtatatatggttgttataattgatttcgttttagtcagcaacattatattgccaaaatttaaccatttatgcacacacacacacacacacacacacttaacccttttttccacatacttaaagaatgacagagacaagaccatcatgtgcaaattgagcttaattggttaattagatatctttggaatttggaggttctggggagaatgtcgattacaattatttctgtaatattgtctgctatagaaaagtgactgtttttctttttcaaaatttagatacttatatgaaattgccagaagacatccttacttttatgccccggaactccttttctttgctaaaaggtataaagctgcttttacagaatgttgccaagctgctgataaagctgcctgcctgttgccaaaggtattatgcaaaagaatagaaaaaaagagttcattatccaacctgattttgtccattttgtggctagatttagggaacctgagtgtctgatacaaactttccgacatggtcaaaaaagccttccttttatctgtcttgaaaatctttcatctttgaaggcctacactctcgtttcttcttttaagatttgccaatgatgatctgtcagaggtaatcactgtgcatgtgtttaaagatttcaccactttttatggtggtgatcactatagtgaaatactgaaacttgtttgtcaaattgcacagcaaggggccacagttcttgtttatcttttcatgataatttttagtagggagggaattcaaagtagagaattttactgcatctagatgcctgagttcatgcattcattccataaatatatattatggaatgctttattttcttttctgaggagtttactgatgttggtggaggagagactgaaatgaattatacacaaaatttaaaaattagcaaaattgcagcccctgggatattagcgtactctttctctgacttttctcccacttttaaggctctttttcctggcaatgtttccagttggtttctaactacatagggaattccgctgtgaccagaatgatcgaatgatctttccttttcttagagagcaaaatcattattcgctaaagggagtacttgggaatttaggcataaattatgccttcaaaatttaatttggcacagtctcatctgagcttatggaggggtgtttcatgtagaatttttcttctaattttcatcaaattattcctttttgtagctcgatgaacttcgggatgaagggaaggcttcgtctgccaaacagagactcaagtgtgccagtctccaaaaatttggagaaagagctttcaaagcatggtaaatacttttaa

SEQ ID NO: 42658 - DNA, 943 bp, Homo sapiens
aaatctttttgaggatgtttaggaatagttttacaagaaattaagttaggagaggaaatctgttctggaggatttttagggttcccactagcatatgtaatggtttctgaactattcagaatcagagaaaactcatttttcctgctttcaagaagctactgtatgccaggcaccatgcacaaacaatgaccaacgtaaaatctctcattttggagagcctggaatctaactggaaaggtgaactaataataataatatgtacaatcatagccatcatttattaaacttttattatatgcaaggcactgtttaatttcattagcttacctggtttacagagcagctctatgagatgagtgccatctttgcccctattttagggataaggattctgaaatgtggagatggtaagtaaaattgcacaactgaagaatgagttacatgacttggctcaaatactggtcattgaactccagagcctgaatattcttaaccacttacatgatgcaagctcaccaaataaatagttcgaatgtattgtgacagagcggcattgatattcatctattcatgtggctttgagtaggaagaagaaaggatatcattctgaccagaggggtgaaaaacaacctgcatctgatcctgaggcataatactattaacacaattcttttatgtttcagttcgatgaatttaaacctcttgtggaagagcctcagaatttaatcaaacaaaattgtgagctttttgagcagcttggagagtacaaattccagaatgcgtaagtaatttttattgactgattttttttatcaatttgtaattatttaagacttaatatatgagccacctagcatagaacttttaagaatgaaaatacattgcatatttctaatcactctttgtcaagaaagataggagaggagagataaaatagttgatg

SEQ ID NO: 42659 - DNA, 4185 bp, Homo sapiens
aaaaatgctcatcatcactaataatcatggaaatgcaaatcaaaaccacactgtgataccaccttacctctgcaagaatggccataattaaaaaaataaaaaaatagtagatgttggcatggatgcaatgaacaggaaacacttctacactgatggtgggaatgtaaactggtacaattactatggaaaacagtgtgaagattcctcaaagaactgaaataaaactaccatttgattcaataatcccactactgggtatctatccagaggaaaaaaagtcattatacaaaaaagatacttgcacacgcatgtttatagcagcacaatttgcgattgcaaaaatgtgggaccaacccaaatgcccatcaatcaacgagtagataaagaaacagtatatatcactgtttctttatccactcgttgattgatatacatcatatatattgatatacatgatgatatatatacacatatatatagatatacatatatatatgtagtatttcattgtgtgtatggatatatgtatatatcaatggaatactactcagccataaaaaggaatgaattaatgacatttgcagcgacctggatgagactggagactattattctaagtgaagtaactcaggaatggaaaagcaaacgttatatgttctcacttataagtgggagctaagctatgaggatgcaaaggcataagaatgacacaatggactttggggactcataaaagactacaaacatggtacagtgtatactgctcgggtgatgggttatgggtgatgggtgcaccaaaatctcacagatcaccactaaagaatttactcatgtaactaaacacgacctcttccccaataacctatggaaattaaaaaattttaaaaaataaaatagctagtaatattacaaaacacccatatgatgcaatgttataccatcactcaatagcattttcagggccatttgtcctgtaggtgttaaatttattaaatacttattatatgccaaaatgtaaaacatggcttttctttactattcagacactataagaaattttgaggaacaaaggagatagagatgatgataagtgtggttgacagaattgggggaaaaaagtgatcttagaagaaatttaagacagtttagaataacagcactcaaagagtgtaagaagtttggagaagccttattggaagaggaattagaacacctggagaaacatacagtaagaagtgatgaaggtctactgaactgatgagctggaggagttggagggtgaatgtttcttgtaaaacactaaaatattattctgggcctctttttcctgttcccagaggtaagtcatatcatacctttgtctataaatgtacaagtctatcagacctttgtttatgaatttacaggcctcttagatctttgtctattaattcacatacttattttatccttattagtttgtgtttttaaaatttttatcaaattggtttcatactgtacatgctattccacaacttgttcttaacaacactgcttaatagtttcattttaagtgtggtgcttacgaaaggttctagtacaaagttacaaaaagtttctttctattgctggaatgttctgcgctccccaccattccactcccctgtccctaagcagcccccactttggtccgtgttgaatgtatcgaacatattttttttcacatttgttgcaatcatcacaaaagtcagagagtgctcagaaaaagagaaatggagatggtgggccctggctggtcaaaggccccagagacggacctagaaaatgttcaataaagcgctgtcactgaactggacctacacaggaccgggtctgggcaccctgtatcaatagcaatgccaccctgaccagtctcaggcaccaaagacgaacttaaaacttttggaaaaagattcccccatatatggtaacctgagctccagcttccccacttcccatggagtcgaccagaatcccagaggaactcaacagttaagcctatagagccagactcactgctctagtttcagagagtggtctggcaagctcatcactctggctagctggcttttttgtttgtttgtttttttcctgcacagtgtggaagattggtacacccgaatgtaccaatggtgcaggcacatcgatgtgcgtgcacgtgtgtgtgtgtgtgtgtgtaaaatgttgttttcatataatattggagggcacatggtatgatatcaacatgatttatcatggggatattaggattgatcacttggttaaggtggtgtttgccaggtttctctaccgtgaagttatcacttttccctttccatactctatttttggaagcaaatcatgaaatccagcccacactgaaagagagggagagggataagcttctgaaaatgggagtagctacatgtcttatttatattttcataagaaagacttgttatttaattgttcatttatgtcagtataaactcatatatattatatactttgggttataattcaatgccacattatttagttgctcaaagtatctcagctttggggcctctttttggttggctcccctatgcctttgacaggtctctatactttgttttctttctggcattgcaagctgcctcaggctcatcttatatttccctttcccagccctagaaatggccatttcttaaggaaggcctggttctctttattagagaatggttttacaaagatctgagtgctgggtattctcattgctaatgggatatcactgcttctagaccatttcagggaatggagctaagaaaggtaggtatgaatactaatattcatatcttcatttgaatacacacacacaaacataactgtaattatttctgtacgtatgtagctatctttctggttaatgatgagttcatactgatgtctctgactctaatccagaaccacaggacttattctagccttcctccttgcctctatgacagcaagaaacttctcttccactatctagcctccatctacccatttgttccacctcaggatgcatgtaaaggagtttcagagttataaacccatttctccatgaaaatcaaatttactaactagagtgcagtgtttacatacagttccttttgtctttagccatacgatttccagtcaaaacattattctccaaagtcatgtaggtcagctccatttttgcattaccatcttctgtgaagtcatgacaggtgactttgggtggctcattcacactgaacacaaaataagtttagggcactggcctttgacttgcctttgggcttgagctgtatgtgtgggccacccagcagctctttccacctaagtaggctttgcctacaatacataaaggtagcagcagtggtgacaggtatcctttacccagtgcattctctgccacaggtacccagggtggtcactccatttctctatagattccacatcaattgtcaggcagtctttgagggtgaccatgcctatctcttccaagggctttgaagaccatgggtctgcaataccagtggacccttccagtggatgtcctctcttgcctccatcgacatggttacattatgcttccctgggttggttttaaagtcctgccaaacatttcttggaggaatgtgaacactctttttgtttcaccttaggcccctcacctattcttactgttggtggttgtgtgtggaaggcaggggtgtaagtaacattaaaataggtcacattgtagaaatgctgtgatcatgtcctaagaatttaggagaaaacgtggtcgaaagatgtgttgttctctttatgttaagaaagtctgagtagtaaatttaacatgacagagatttgcatttgtgcttattatcagtgaaacacaagagtcactggaagccagaattgagggtgacgtgatggatgatgcaggatcataagtaatgatgtaaccagctttaaattaaatcaatggtaatcgagaactgtagaggcaagaagatttatttgtttcaatacgaacaacctccaaagagacattgtgtcttgagtaataacagcattgctactttttttttttgagatgggagatataaagttagcccggaatgaaatgcatttgacaataaagaacgtagttccacctcaggatggtaccaataggtaccatcaggg

SEQ ID NO: 42660 - DNA, 1226 bp, Homo sapiens
tatgcatccaagaaaagaaaaatgtatatgtaataattcttcattttcaggaagaagaattacagaaatacatccaggagagccaagcattggcaaagcgaagctgcggcctcttccagaaactaggagaatattacttacaaaatgcgtatgtttttgtaaacagtatttttagtgaattaaaattattaaagagaatgtagccttccccattctcctcctttggaagcaacaagaatgacctgtgaggtctgatctgtggtattgactttaagttccccatactgtgcaaatttttgcagtaaagatatccattctgtcatagtctgtccgagttaaagcaccaaaagatcacagttaaaatcaatgaagctccgaggttgagaatacaagtcaggcttcctcctggagtttgctttttcattgtgatatgcttctataataggagtacagggagtggttgttagagtaaatgcatctcaaaagttggttcaaataccatgtagatgaaacaaacgagctgacctcatgtcttctggcatgagagtagagagtctgtgagaagaagcaaggcggctaaaaactcatgaatgactcagcaggacttagttaaaaaatgcttctttcaggtttctcgttgcttacacaaagaaagccccccagctgacctcgtcggagctgatggccatcaccagaaaaatggcagccacagcagccacttgttgccaactcagtgaggacaaactattggcctgtggcgagggagcggtgagtgtctgcttggtttggtcccatctcatttctgccctgtttgacttgaaatagcctcataattcccctctagggaagacggtaaaaaccaatgtagagatggccttaggaggcttgtttgattagtcacggttggaggggtgtgagaacccagctctggatggctggcatgtggccatgcttcctattcctccagggtggctggtggaagttcagccagtttagtcaacaatatctgagccaactttatatatcggaaagacagaacgaccaacatgtaactcataattcataacaattcataattcataacttcaaatcataatttctgctttttgttcatatacttactttgatgttttaaaaaagctttatctttgattgattaaaattagtcatgctattttagccatatttatattttcaccttttgtaacatgatattattattatga

SEQ ID NO: 42661 - DNA, 1539 bp, Homo sapiens
ttgcagcaaatttgggtacttccattccaagcacaggaaacacatcattgaatctttttttacactatttacactttgaagagaataaccatcttatttaattcaaccatgcagtttgggtgttaagaaatgacatgtacatttcagttcattgtgggagctcttttgtaatggtgatggtcatgcaagtcaatggagcttatgttcttcaaactcccatgcattttaatcctcacttgttttgtaaatagtcttccttcattggaaaacccattcttctcttttttcctctatcacagtctgaggtatgtttcacagtatgataagaatgttgcctgttctggcaagctttttctattgctctggtctactttctattgctctggtctaagtccaacatgaaaggcttgctaagtgagcagtgcaggcaattagtgctgccagtgcccagataaggggtgtgataactggatgggcaggattcggagatctgggtctttgagtgtagataagacacagttaagaagagcggacaggaaaggatattcctgggggatgaggggagattgccttccactacacataagtatggtcaagtatgaaatagtgttttatccacaacctgcacaactccaggctggtggaacacttggcatgctttcagcctcaatctttctactgaaagtactagacaaggtgtgtgtggtcagtctggtgataggttgatggagtaagggtttaggctctgaaaattctctactaggaaggctgtagaaaaatagcattgcataacagacttctcttgtattttgttttgttttaaatcacaggtttctcattaaccttgtgaagcaaaagccacaaataacagaggaacaacttgaggctgtcattgcagatttctcaggcctgttggagaaatgctgccaaggccaggaacaggaagtctgctttgctgaagaggtacatgcagctcatttcatactcaaaatacttgctatggaattttctgtagtggataatgaaaggaagaccctacaaatttataactttaaaatattttcagagagatttaaatttcattgagaagcagattgagggattctataagatttaaaaaataatcacattttcttgcttaatattaggaaaatttataatattaaaatatattaatagaattagtaattttaatttatttcctagtagagaaacccataaagtgaatgtgtaaataattgacggtaatttagatagtttctggcctaaaattgatcaattcagctaaatggattaaaggatttaatagcaaattaattgtgcaaacagagtattaggagtctatttgtagaaaatgtttttgaactcatttagaagcttgcttttgtacatcaacagagtagtatttaggagttattttaattacatagtaattttagctggataattagccagattttctttaaccaggggattctacctaacatttaaaaaaattaccttttttcagctttattgaggcatgattgacaaatacaa

SEQ ID NO: 42662 - DNA, 2772 bp, Homo sapiens
agttatctatttttttttcttttaagacagtgtgaattcttaagacctagtctcttagcatattctaagcatacaatacagtattattagctgtagtccatgtgatgcatttgaacttactcattctacgtaactgaaactttgcaccctttgacaagcatctccccatttcctctacctcctgcccttgataaccaccattttatgctctgtttctagtttgattttttagattccacatataagtaggattatgcagtgcttttctttctgtgtctgatttatttcacttaacatgatgttctccaggttcatccacatattctcatatggcagaatttccttctttttaaagattaaatagtattccattgtgtgtgtgtgtgtgtgtgtgtgcgtgtgagatttatttatttatttagttttttatatgttgactgacaggttgttttcatattttggctattgtgaataatgaggtaataaacaccgaagtgcaggtatatcttcttaattttttatttttaatttttgtgagtacatagtaggcgtacatatttatatatctttgagatactgatttcacttcctttggatatatatgcataagagagattgcttgattatatctgttctggccctttgttcctttaacatttgcagtattttaagtttttttttggttgtctatttgattaagtattgtgcatacttagcctgtggacttttgttccaactcagtagattttttccagcgaaacacaaaggtaatttttttttctggttaatatttagcaagaattctgcagagtgatcaaaaaaatcaaatactcagtatttcagaaatagattaaataggttacttttttactgataatgtgaaagaatgatataaaaacttgattttcctcaacaacattactttcttttgtaaatgtggtttctacaaagatgaaactactaaaacttacaggttttatttttttcttgttttttttgactgaatccctaaccctgcccacacaacctcgggatataggtaagaaatttacttgtatatcagctaaagcatgaccagttaggataatttctatttttaaaattttgttttctttcaagttaattctttacttgcttttttcaccctctcactaatttacataggctaaccagttatccaaaactaaccttttcagaatttttattttgatggtaatttttatattaccaagtctatatgaagaaagagttgtcacatctgaagaataatcagcagtctatgacaggacagaaagtgttgctgggagatacatttggattttaatgttggtatttcttgcatatatgtatagtttatggtaacagtggaacaatagatgttaactgggatttttctggaacctttggttgtccaacatatttcccaactatatctttatggaatgcagaacctagttcctccttcaactgtacagtttgaacatccctcctgagcctggccaaggccatctcagtctgtaggaagggatgactttttttatttcttccatccaaaggggaaatattttgaacctcatatgtctagaggaggtgtctttttctaatcctttttggcctagaaggagctcctttctttgacttgaacaaatgtgccctaagcatggcagtggccctgaaggcatggatcgtgtcttacgtgtcttactcaatttgacatgcccctacaataccagctagtgaagactggtcatttctgagttttcctgctccttttccctcgtaacaacctgtttcaaaatcttgattttttgcctctttaatatcttttgtatctatattttccttttcatttccattactcctaccaaaatttagatcttgctgatttctcagtgtgacagttgcaaagtctcctatggccttcttactttgtcccatccacccttcttttgcccatttatttgacaatagttctttctacctttttctatttgtctggcactgtggaaagtcccatgacattacatataccactacctgactcgtatttcttagtgtatagaaatgatcagattactatcctatataaacattttccagggctctccatgtcttccaaatgaagcccatactccttagctttatatacaagactcctataatctgggcccaggttctttctatcctaggtaccattattcctctttgtgacccactttctcatcaaaatagattgactttccctaaatacttctcaagatttcttaatgcatttattcacatcattctctctccacacagacagacagggtttttcatttttccgtcagctgaatctcttacatttactcatgctcaactcatatctcactcctcctataatccttttttttctttctttctcacccaggattcataaagcattcccaacttaatcccattctaaattagattattgtcacatgcacgagtaacttctattagagagcagcttaggaacctgatgtcaaggggagatattttagtcattgttgattgcttcacagggtccagcacaacactttgcaaaaaataaatgtagcttatgtgaacaaacataaatatgctccaattagtgtatgctcattgggagggaatccatgattttaggtggatctggagatgacctaaatagctgtgactgagtagcgctaaaaactatgctgaccaccagcatgctacagcatctctcatcaggctctgttatggcattgaatcagccattagttaatc

SEQ ID NO: 42663 - DNA, 1513 bp, Homo sapiens
gggctggggtggagagtaccttgaggcagatgccaggaggggaagaaacccctgtaccacagtgtttgatcgcccctttcagttggctttttgcagctgtctgtttgcaattgaaagtttgtttatatgccaccaagaaattaatttgtaggcatctaaattcttatggcttggattttggtcataatgccatttaggaccccagcttctagttttacttgtatatagggatatgtcatgagtgcatgtgttttatgagtgaggttaacagtgatcttagaaagatctaagtattcatctaaccatatttttagaaattccattcaagttttaagatcgtatctcagttgcaactcttgttggtacaggcagatttagtttttggagagttatgtggagtaaatgaaaatcgaactatcaaccctgctgtggaccactgctgtaaaacaaactttgccttcagaaggccctgctttgagagtttgaaagctgataaaacatatgtgcctccacctttctctcaagatttatttacctttcacgcagacatgtgtcaatctcagaatgaggagcttcagaggaagacagacaggtacaaataatctcttccattcttctttttctttggtttgaagacacaccatgtattagtgagaaggtttatctagtggatatgtctttttgatatcacaatcctgttccttccaccaaattgtccagtctcttctatatggaaaaatacaagtgcatattttttttttgccattgtttatatctagcttgtcttttcatttgaaagagacttggaatgtccaagtctaacattacctttagaaagtttacagcagccagcaaaaaggctcataggcaggctgataatgaatttcatttccttgagggaatgcccggagaatatcatttagtgtttacaaaggagaggcctaaagggccaggaagtttactttcattttctcaataaatgctttaaaatgccaggaaattagacctagttttttggatttagacagagtctgcctaatgtgtagtggagacaacattcagctaccaaatatgaggaaatggaggttgttttggacatgaattttctggaaagatcagacgtagtcatgtataccataatacttggcataataaaggcctaatatatgttttcatttttaaatagaataatactcttattatgtgcaatattcatagattcacagtgcaatacactcttgtattttccagtccatcctattctagtctggtctattttattctttttaactatcctgttttcattttaaaaatgaaagcgagaaaatgcaaatttttgttaattcttagatcgaaggatgggcatacgggacttattacattttcctctttggtgcattaaaattttattacttaaaataattactctaaaaatgtactctaaaatgtacttttaagacatcaatgggttgccccctgaagtttggaattctataagttactagaatactgg

SEQ ID NO: 42664 - DNA, 556 bp, Homo sapiens
gagtctatgaacaaattacttgactctgagtcttaatttctcattcaagacatactaatattgctaactatctgagagtcatataaagtgaccatagtaagtgtttgataaattaggtcccattcttttaggttcactcccaatgcttgtacagctcctaactccccttctccccagggacttgaaaatgtacccagcattagaacctgagccctgaccatttagtcaatctgtggtagtatatgtttatcttcttcccttccactttagaactttggacatgtcaacaatcatttctaagaaatgaggtattgcagaccaacatttgccaagagtgtttatggattacttaattataaagtttgcatgttgaaatcttaaagaaacaagcagattgacatgacttgtttaaaaatgcagtattcattaatgaattcaatccatcagcaatatttcttcattgtcatagatttcctcagttttatcagggccatagttgcttggaaaaaatattcaccagaaaaaggtttctttttaatagtaattacttggaaag

SEQ ID NO: 42665 - DNA, 680 bp, Homo sapiens
acaataaaactctccatttgtactttgttgggctaaacacgggaacaataatacagtctgtctcctcttatgttctttaagagatgtttgaaaatcttgtgacacttgagtatggtcaagcagagaagctttctttgttagagtgagtcactataaatgatctctttgttctctcagtttgccagggataaagcaatataagttaccaactttttctctgtttttctgttaagaacaataaaaaataatctcagaatgaaatcttcaaaaataacttctcctttttatgttttatagagccagcttataaactacccctgctctaaacaggctatcctatccagcaaggtcactcaatcctgtgaacagccagtgccattccaaggggaaggcatattaactcagaaaatgctgacacacctgacctttcatccctgccactcagcagttctacagaagaccaatttgtatgcaaacaattcacttacaagccagaattcctacaagcataatacagtttttctgtaaactcttagtgatagaatatgtatttatgaattccttgggaagggttgcaaactcgaatgaccacaagggccagccagggatggagtgggaactgtgggcaggaggagatgctttgtagagtccagaggtggcagtgactgttcagcaccaga

SEQ ID NO: 42666 - DNA, 2299 bp, Homo sapiens
cttcagtaatgtctgtttttcttatgactaaaatatattcacttatagggaatttatggcattgactctgcccgaatttcattggtggcaacaaaaaatatttattaatactaatggtagtgaatatgaagaaagtcatcccttatcctctttacttttgaattcttttgaagcgtgttttatggctactatatcatttgagtctcacaatagccttatgatgtagagaaggtaatcctaatatatttgttaattttccagcaagctgtactattcagaatacagccaatcaaaacaaatgtcataaagcccaactacaggtaataactttaactcaaaggaaaactaccaggtcctgactcagaatctaattagtcttatggcagataaaattacccatttccccaaatctatagcagcttaataatcagaaagtggcagacataattatcgtagaaggggggttaggaatggaaaagtcaataccaatgaaaaacagaaactaaaaatgcaaagtaacctgatgctatgtcatagggctaaagataagaatccccaggatgccagtcaaattctcggtgaccctcgcagacgtgacagcttagttttgtcacacaaatataggaggccaaaagtcatccaatatattctgtgtttggccccttatttttttctaccatctacagcagaaaacaccagttttcagctctggattgtgtaatttgaagcatcaccccatacaactgtgcacatgactaagcttcagggcagttatccagagttttcaagagaaaactggttggaactttatgtaatatcaaatagtttaacttgcccaaacatgggacttctgttgctctgactaaagttcaggatgtatatcatttgcaaatttaaatgatggggaggttttctaaggagtttaaaaataaaaaggaggtagaaatttgatagacaaatagaatatggtcacttccctacccatactgtaagtaaaaaaacaccactgacgttattcaaatgtacacctgtccagtttgtgctctttatgttattctgtcatgacttgtccaaaatatgcaaaagctgagttttgaaagatattaaaaacagatgtgaaaaatagcataagcaaacacaaccttaacaaggctgttcttctcttttgttatgaaagatttccaaaacacttgtgccagatatgagagatcaaagtactgcccatagaattgtttccataaagaataacaagtggtcagagctcaaaaaaactgattttttaaaagcttcttcactccaattaagctgatacttcctctgtgtgactcatttcaaacataattaaactaatgtgacaagaccaatgattccgtcaaagagagaactgaaagacacaagattatagcccttcctgcagctgaagttctattgtcatttaccccacgtttacccactgcagatataaaatctgtcatcctgcaagagcagaggtgtaagttttgcctagaggtgcccactatgggaaaaagaaaatagtttaaaagtaagaaaacagtaaatttcttttcacaattaaaggctgagaattaaaatagatgttatcttaaatgagacaaccagagggagggtgtctagaactggattgaaacaacaaaagtgataccttaggtggctatgcaccccattagcgaaccagaaaccagggaaaagccacttcaaattgtgctgtgccttcctgcctgagtgttcagctggctcccaggaagtactcttggctaattaatgacaaccaaatctaatcttgctcttgtttgcgtgtggttctgtgtgtatgtaaaaggaatgggatctttttctgccaaatgttctacagttaatcttgttactggaaaaggacaagccagtcaaggtttctaggtaatttttctccactttaaacaaaaagagccaattcctgtttgcttcacagcaatgtactaataaacaatgcaaaatgtaaatggatcctatagcaggtgtatcatgaggatattattttagaacctgtggcagtatatggagaggcatattaccttgtccacctgggctcttgaaactcatccaaaaattcagaattgctaggaacaagtgttttaaatttgagaagttaaaaaatatcatggttaataataatatattgcatacttcaaaagagttaaataagagaattttttatattctctattctcaccacaaaaaatgataaatatttgagatgattgatatgttaattagcctgtttggttcattctgcaatgta

SEQ ID NO: 42667 - DNA, 1102 bp, Homo sapiens
tgttccctaaaaataaaaaaaaattaattacaatcagtcttagagtttttaacgtaaaaggtgataatggtactttcataaaggtatgagatagaaagaaatagtttaatggaatctttactgttctgtcactttaacttaacataagtcattggaagtggaagcattcttaaaatatcagcaaatgttgaagttgctaattcataaataaataaccaaaggtgggaaatgactgaggacaaaaatggtgagaacagtgttctgtagcaggaggcagccacgaaacaggaatttggtttcatattcctttttgtatttcaacatttttaaccaacctaaattaagcactggtgtgtggctgataccatctctctatacactactccctcctgtgtccccagggcatgggatgggacaccagtgccccaactctccaaatctgtgttcccttgtgtaagtcacttagtatccctgaatttccacagctgtgaaatgaaggtgatctgtcctacttgccggggctgtttagactattaaaggcaaccacagaagtcaaagatcccagctggctgggtgaagcaacagtaagcaaaggctcattgttactgtggcaggggagcttctctcctggcctgccccacacagctgacaatggccgactttggccaggaaagtttgtaggggaggagccctctacctttccgcccttctagctgggtatcaagatctgagaccagatgtgctggtgagtgactcagcgctttcttgcctggaaactcctccctgtgtctcccactgggaaaacagctgtggtaaggaatgctcctgacttatctcaccctttgtggcaggtgggccctggcagtgggaacactggctcttaccatacctctattctatctttctctcagtgtctctatgtcttgagatgctcctcttgagatgatcatcatttctcacttggattattgcagcagcctcctaaaagcctccctgtatctgttgtttactctcaacagcagaaactgttttaatgcaaacctgaccatctctcctctttgctcagaactcttcaatgtcttcttgtttttcagattaaaag

SEQ ID NO: 42668 - DNA, 1687 bp, Homo sapiens
ggcgggcgcttgtagtcccagctactcaggaggctgaggcaggagaatggcgtgaacccgggaggcggagcttgcagtgagcccagattgcgccactgcactccagcctgggcgacggagcaagtttccgtctcaaaagaagaaagaaagaaagaaagaaaaagaaatagacacaaatttctcacacttttatatgtgagacacaaaaaattgattttctaggaaagagccttggtttttggaacgtgaaacactgtatcacaatatgtaacaagggtgtttttaaacatcatcaaacactatataaggatggtgttttcactaaactgaagaaaaccaaacttccatataaactggacttctatctaaatgaactgtaaattataagtttctccaggatagaagttggcaccctgccacaagcagtgtggagagagaatcctggtataagccgatgaatacccaggattcttcatcatggccctggaagagagctagccaaggagagactgaccttggtggggggcaggtcagggggagggatgctgaggggatcccagggtcctgttcctttaaggctccagcttggttttaatgagtaatagtggacccagagtttactgtaaaatgctctggtgtactttgtactttgtggcctgaattgcagctgctcagcctatgggaattacccgcattctgacgtttgccatgaataatgtacttagcatgaaatgagttcctcaatcttatcaggtatttggctggctggaagaaactttttatttaattttataaaactgtaatatacatgaatgtgggataggattatgggtggaagtgaattatgtctgatatccatagatagagtggatgtcaaatattagttgtactaagagatttttttcctcttgttttaataatgacttacagcataattaagtggccatcctagtccttccctaaaaggcaaagaaccctgtcctagtctttacaaagtgattcttacagtttgaacccactaaggacaaagcataaatattgtcatatgccgtcaccctacacaaacttgaaagacttccgtgtgatacaaatgaacctcaggggaaaatacactcaacgaggttgccaaaggcatgtttatcccctggctgtgcttcctgagtttgtattacttctgcttcttggagacttgctgaaaaatgttcatggttccaattaagcagccactgagctgcttagtgacaacaacattaagaacaacatttcatcccagcactttgggaggccgaggtgggcggatcacgaggtcaggagatggagaccatcctggctaacatggtgaaaccccatctctactaaaaaatagaaaaaaatagccaggtgtggtggccggcgcctgtagtcccagctactcgtgagtctaggcagaagaatggcgtgaacccgggaggtggaggttgcagtgagtggagatcacaccactgcactccagcctgagcgacagtgagactctgtctcaaaaaaacaaaacaaaacaaaacaaaacaaagcaaaacaaccattccactgtgtgtgttgccatgtttaagagcaggaaccaagaatatttgaaacagacttcagcaggtgaaaaactgaggaagaaaaggatagtgctaattagttctcttgcacaggttttcttttt

SEQ ID NO: 42669 - DNA, 1679 bp, Homo sapiens
atctcatgatgacgttattgacccttttgtgacaaaataacagatgtgatacccagtttctcataataatttcttttcatttcactgggtcatcaaacatggataatgtgaatttttaaaaacaatccccatgtggacaaaaattctaatttttaaagtagatgctcctaaatatgcgattaaaatcctctgtctctggcttattttgaaattctaactttttatacaaataagtcagaacaggctctcttatactttaattaaagacaggtattcagcgttcttcaggagaatgatgccctcctcttagaaacttaccttcaggactcacaggggcatgcagtgtttgctcctattcctttgatcaggagaagaccctgtatatgaaacctgggcaaacattgccttctggctgtactggccaggtagaaggcagcctctggaacactggctctttgtgcttaatttgtgcttagaagtgcaggtggctggttcctttgtttcaacaaaggttgctggccaacatgcttggaaaaagaaactgtttggaataatgcactttctgctaaaatttattacatcatgttaattaaacttactaaggacaggattgtacacgtgccttttgagctgcccttagaagaggcatagactgcaaagtttttattaggttactaagtagcagaaaaagtctgataggttctgagagtgaaatctggttggtattctaaaactggatttaaacttctccattaatttttttttaaatacatggttagcatttattcacctctaaagtgcccagatttcagcctatgacctaaagtgaaaatactttgaaagtaaccataaaaaacatttatttttatttttttccacccagctcactgtgtgaagcagtgtgcaatgatgactccaggcaataaaacagcaactggaagcttagtcatttcagtacaaagctaacctgtgccaataccctttgaacagggaagtttctaaactcagagaattctcatccagtagtgggatataaacgttatgtttcctactatgctattattaatatcaggacctcttattttactgatcatatgcaatcctcatgaaatttgctgaaaccaaaattttgattatgaagattctgcttaactattaatttccattcttttcatgtagttctgtgcaggaaaataaaaatacctcaataaattgctaatttttgtcttgtttaccacaacaatgcctagtaaagagagggagctaaaaaactacttgccaagtgaataaatgagtaggggtgtttgccagatttgtggtatgctggatatcatagttggtcagtggcattgttataatttctggtgacagcctggcagagatttcccctagctccaggaattttgtttatgttaggaggtcagaagttctcagaactttaatcctttcctatggtgagaatttgttctcagtacttcagtatgcatcagaatcacatgattagttctggggtgaagccaagggtctatactgtgaacaggcatctgagtcagaagcaggtggtccatggacctcatttttaagaaatgcttcttattcaatctcaaatgtaatgtgtccagaactgaattccggatcctcaactgcaaacctgctcctcctgtagctcctgcttctcc

SEQ ID NO: 42670 - DNA, 525 bp, Homo sapiens
gcctttttcttctttacagactcactagctgagtttttcacattgcctgccagtagacactttggctgacctcaaagggcagccagctggacacagattttcaggaaggcacagagcagttctgatccttgcctagcacttcccttgagcttttataaatggaacttgatatgcctatcctggaggactttgcaaccgggtaaaactaaagaccacacatacaaatctgccatacgtgtttagagactcctgacagagtttctatttcatgactcacttgggaaatatggagcacctttgtaatatgctgggtctggagccagaaaggatgtgaagggaatctgagacactgtcctctgacaggtgtttctgctactatgtgtttgctaacgtattggtggtagtcacgcggaaaagtgtgccatgctccagtaagtttgtgaaagtctgtgtaatattaagttaaacaagtttcttcagagcctttatttgctgttgttcatagtgaattgctaagtattaagg

SEQ ID NO: 42671 - DNA, 1953 bp, Homo sapiens
gtctcagggatagcccctgtcttaaagagtatacctatgagttaaaatacataatcatgaaagagaaaactgagatgaaggagtgttagacttgaagtaagagttttggaaaaaaattctaggagaaatagttgaagagctgagttttgaaaacgagtagttattattgttacattgaatttaattatctttctgaaaaaaagttttctttaaatttatatttttttcttctcacagcttttatagtgtcgtgctttgaatccagtaagtgcataaggaattggggaaggacgtttggggaaggggctggagtagttttaaaggttaagacttccagaagggacatgtaagcatacatatataagcatttatttctttcaaatatgacttcttgggcaattaatggaataacactttaattaaagtccttttatgataacatagagcagtggagcatggctaggaaaaatgaagaatcatactctttcctatcttgattcttcaatggattcttgaaaaagtgtaagaagaggtaaactcattatttgatagtttagaaacctagccaactctgcaggcatttatcaagacatttcaattgtttggttttatgaaagtctttgtttccatcattattgcaaagaataaacttttatttgttcactgaagagtttctaaagcgttggaattttagcagcaggaaattcatttctcaacttgcacttatcgcctaagaggcatcaaattgctcatgaattaataggctaaaaggccttattgtttcctggtgggactctttcacagcgctggagaaaactgaataccaagtgttgctcatcatgtgtcttgggatatgttactgagggtctgagatttacatagaatttataggaagcaatgaaaccgagttaagtagagaggaatctagatcctagaacaatgctgtggagtcagaaggctgtgccaacagaacctttagctactacttctttcgcacatgcactgagtcagaaaatgctgtttcatgggctgtagctacttgtcaggccactgactcaacaaactgaaatattagccaagtaaaatgttgcgcaattccagctgctcattcatagcacaatctgtagcctcagatttgccagtcttagtcgactaagaggagccgacatgaggcaaaaggagaaacagtctgaccttagctataaaggacaacaggatgccagcacactagggtcatgagtgctcttttcctctttcattgaattggcgggcccatgactaatttatgcaaatatgacatggaaaataatttcttgaagagagctgctttgtgccaaattctccctgcttttcttttggtctggtctatggatgatattagcttattttagggtcaggcttccaattttcctgcaagacagggccaagaaatgtttatttcacaaagaggccaaggtctcagatgcaagactacaactgagtgaggccccagaggaggatgacaatagaagatggtttcactggcattccattcctttctcctccccacacccaatctcagagtggccatggttcactgaaggaatagtaattgtcatttaaacctgggaacagtggtgcttggtacttgaggggtgactcatttaaatttattcacgttcccactggaaaaactctcttctctcaactaacaggatatgaataccaattccctaaggtcattaagatactagaaggaactttcattataataaaataaagtatctagaaaaattattctgcaataggagaatgatagtcccttggttctataggagcccattgttggtcaacaagcgtttccaggcatcgcttacagtccctctgaattctacctgcgatgcggtctaaacatactgctcctccacctgcactgtcttgaactgggtggctccatttttttccctagatttc

SEQ ID NO: 42672 - DNA, 1168 bp, Homo sapiens
gctgagcagaaggtataaaactttcattatattttcaaagacttaaatggttaaagtaagaaaggttaagaaccactgagataatacttaaaatggaagctaaactgttttagtcttagcacagtcaacgttaattagacaaaacctatagaacaccatttatattcactctctggcctccagaaacagtgtgtggtcccttggagtctccacagttctgtgaaatgcagttgatgggaaagagcaagcagcagagcctctcccccagtggtggacttcagttgccaggacttcccgcatgctgctcaccatcctttatgccactgtatcctaacctgttatttcttacccttgccttcaaggagcctagaagatatcggatggttaattcaccagtggaatgaaactgctgtttggctgcacagtttactgctttatctatccaccactgctaaattagagcactaactaaaactgtattttccatgctaagttcttctctgttcatggaaataaaataattgtccccaagggagaacaaaaacaaagataagcattttcgttttctttcgttgacattgttcttgtttggataggttgcaagaactgggaaatttctgctttcattcaagaaatgtttgtagaacattgttacatgcaggcactaatctggaagctggaacacagtctaaataaagcagttgtagtctctgattttgtggaatttccagtcaagtgggtgagacaaatatcaataaatggttacacaaatgggtggagagctcatcatttcaatggaatccatcaatgtggaatgtctatgtgggttaaactttgtcttaaatacttcagtcaccccaaggccaaagtgaggagaaagatgcagttaagatgaagctcatattgtgaaacaaaaactttaaaaataaaagttttaggagagttgtgagaaacaaaatatagaaattatagcatagtaactgctttttttccctaagtcactttcttcaagttgctaagagttttatctcaactgagcttttaaaaattttacatctatttataaaaataatagatcaaaataataaagaaacttttgagaaaataagaaaaacatcactacatatcactacagaatcataaccacctttgaatcagcatgaaaact

SEQ ID NO: 42673 - DNA, 2618 bp, Homo sapiens
cccacattactcagaaagttactccataaatgtttgtggaactgatttctatgtgaagcacatgtgccccttcactctgttaacatgcattagaaaactaaatcttttgaaaagttgtagtatgccccctaagagcagtaacagttcctagaaactctctaaaatgcttagaaaaagatttattttaaattacctccccaataaaatgattggctggcttatcttcaccatcatgatagcatctgtaattaactgaaaaaaaataattatgccattaaaagaaaatcatccatgatcttgttctaacacctgccactctagtactatatctgtcacatggtactatgataaagttatctagaaataaaaaagcatacaattgataattcaccaaattgtggagcttcagtattttaaatgtatattaaaattaaattattttaaagatcaaagaaaactttcgtcatactccgtatttgataaggaacaaataggaagtgtgatgactcaggtttgccctgaggggatgggccatcagttgcaaatcgtggaatttcctctgacataatgaaaagatgagggtgcataagttctctagtagggtgatgatataaaaagccaccggagcactccataaggcacaaactttcagagacagcagagcacacaagcttctaggacaagagccaggaagaaaccaccggaaggaaccatctcactgtgtgtaaacatgacttccaagctggccgtggctctcttggcagccttcctgatttctgcagctctgtgtgaaggtaagcacatctttctgacctacagcgttttcctatgtctaaatgtgatccttagatagcaaagctattcttgatgctttggtaacaaacatcctttttattcagaaacagaatataatcttagcagtcaattaatgttaaattgaagatttagaaaaaactatatataacacttaggaaagtataaagtttgatcaatatagatattctgcttttataatttataccatgtagcatgcatatatttaacgtaaataagtaatttatagtatgtcctattgagaaccacggttacctatattatgtattaatattgagttgagcaaggtaactcagacaattccactccttgtagtatttcattgacaagcctcagatttgtcattaattcctgtctggtttaaagataccctgattatagaccaggcatgtataacttatttatatatttctgttaattctttctgaaggcaatttctatgctggagagtcttagcttgcctactataaataacactgtggtatcacagaggattatgcaatattgaccagataaaaataccatgaagatgttgatattgtacaaaaagaactctaactctttatataggaagtcgttcaatgttgtcagttatgactgttttttaaaacaaagaactaactgaggtcaagggctaggagaatattcaggaatgagttcactagaaacatgatgccttccatagtctccaaataatcatattggaattagaaaggaagtagctggcagagctgtgcctgttgataaaatcaatccttaatcactttttcccccaacaggtgcagttttgccaaggagtgctaaagaacttagatgtcagtgcataaagacatactccaaacctttccaccccaaatttatcaaagaactgagagtgattgagagtggaccacactgcgccaacacagaaattatgtaagtactttaaaaaagattagatattttgttttagcaaacttaaaattaaggaaggtggaaatatttaggaaagttccaggtgttaggattacagtagtaaatgaaacaaaacaaaataaaaatatttgtctacatgacatttaaatatggtagcttccacaactactataaatgttattttggacttagactttatgcctgacttaaggaatcatgatttgaatgcaaaaactaaatattaatctgaaccatttctttcttatttcagtgtaaagctttctgatggaagagagctctgtctggaccccaaggaaaactgggtgcagagggttgtggagaagtttttgaagaggtaagttatatattttttaatttaaatttttcatttatcctgagacatataatccaaagtcagcctataaatttctttctgttgctaaaaatcgtcattaggtatctgcctttttggttaaaaaaaaaaggaatagcatcaatagtgagtttgttgtactcatgaccagaaagaccatacatagtttgcccaggaaattctgggtttaagcttgtgtcctatactcttagtaaagttctttgtcactcccagtagtgtcctattttagatgataatttctttgatctccctatttatagttgagaatatagagcatttctaacacatgaatgtcaaagactatattgacttttcaagaaccctactttccttcttattaaacatagctcatctttatatttttaattttattttagggctgagaattcataaaaaaattcattctctgtggtatccaagaatcagtgaagatgccagtgaaacttcaagcaaatctacttcaacacttcatgta

SEQ ID NO: 42674 - DNA, 1119 bp, Homo sapiens
tacaaatagattcttataatattatttaaatgactgcatttttaaatacaaggctttatatttttaactttaagatgtttttatgtgctctccaaattttttttactgtttctgattgtatggaaatataaaagtaaatatgaaacatttaaaatataatttgttgtcaaagtaatcaagtgtttgtcttttttttagttttagcttattgggattctctttgtttatatttaaaattatactttgatttagaaaacataaatgcttccccttagcattttgtttatggaaaattacaaacttttatttttagaaaacagaactcctttccagaaataggttacaaacagtagtgtcctccacagaatgttggaaatgttttcaactccccactgtatactatcttgctaataagtctgtcttcagatttcgattaaccggtttgtatgtctgtgcgctttagcatagctggacatttaaagaggaaagagagtacatattataagttgcttatcagtaactgaggagtaaaactgataaatgtgaggcaaagaagtttaaaatatggttaaagcctaagcatatttgcaaacaaatcaaacaatactctgagaagtaaaaacataattatttaattaacaaatttcagtggataaattttataacaaattagacacagttgaaaataaaattagaaaactagaaaatagaaccaaagaacttctggaattcttataagagagataaagaggtagaaatttggagaaagaagtcgaaaggcgtagaggatacaggtgtaagctctaatagatgtctaattggattgtcacaagcagaagagagaggaaagggtcagagacaacatttgaagtgacaatggcaaaaatctttcggaaatgatgaaaaataacaatcgatgtttcaacaaatccaatgtatcaacatttacctttatattcctactcaaaaaacaaggattttggaacttttacgtttaaccaccttctagctcataggctattgttgctgggtattttaagttcacttctttttttttttcttttattttattattattatattttaagttttagggtacatgtgcacaatgtgcaggtt

SEQ ID NO: 42675 - DNA, 1364 bp, Homo sapiens
agcattgcatatccatcagatggtcaacaactggtaaatctggtaacactgaattttggtgaggatatgggaaaatggaaattcagacatggctggggtaaatataaatgcacataactttggaaattggcaatatctagtgaaagctgaagatatgcagaacttaccccagcattatcccttctgcgtctgcactagagaaatcttcaaccatgtacataagaaattgctataaggatgcttgtgaagcagtgttggtaatagcaaaaactattgaacctcaggagtaaaattcataaacagtgcaatgatagagttaaaatgaaactactcaatctaactggttaaacaagggtaaacctttaaacatacttctgagtaaaaaagaatacaaaatgctacatccagtacaatgtcattcacgtagatgttaagcactaaatactatatagagaaacatgaatctatggtaaaagttcagaacactaaagagaatgatactatcatcacaggatttgaatagtgaagagagaaaactggcgaatgggactttagagtctatgtattttttaattaaaaaagattggaatcaattataatcaaatattaatagagctaatctcagaggtgggtagataggtaatggttatatgcacatatattttacttttttgaataaaatgctttataattgaggtctaaaagggtaatatgtgtggaattttttttttggcaggggaaaataaggggatttaaatcatttcttcatcaaaaatccctttgaacttttatttgccaaacttccttcttccttgttatgaagattagtaactccaaaccatattcacttctgcggtttcattctgaaaaaagaaaatttggctggtttagataaagcattccattaacctacattctgaactagatgttctaaaaggaagttattattttctctggcagagatgaagggaaaagccaaaacattttgatgttgacacagcttttggagaagtgccaaaaaggtcactgagtctgtgatccttcatggtgtccgcaatgtgggccttgcaatgatcccagtcctgcttaccacagggtgcaggtgtctttggagctgagtagaaacattctgaaaacatgcatgttgctgtccctggataaatgcttaatacttaatgcactgcttttccttggtctcaaaattgttcttaaacttactttgtgtggctatctcaatgtttataagccaaagaaagccagctacctattgcttactgatggtacactgcatgttaatttattatttttggcttacctaatacatttatattttataaaatggatattttttgaaggtataattg

SEQ ID NO: 42676 - DNA, 683 bp, Homo sapiens
taattgcctaggagctgagtcacatttttgaagttttgtcttagccatttcagcaaggcttatcttttgtctttagacacattctaatctttaaaatgtcaatatgctaaatctgcaggctgttttctacagattaccactccccaaaaagatgaaggattccatttgctgagtcaggtatgatgttgatggtgtcaggaagctgtgagaacttctcatttagcttcccacaaactgaaggccaaaccacccagccttcctcagccaatgaatttcttgtttccttccagaatcaaaattgtaaaggtctgtgacacctctttcttgctcaccaatggaggtgacaggagaggaagttaataaaattccccagtgtcacaagggacaaggaaaagagttgtgttccataactggcttctcaatgccgtcatgtttactgatgacctttgctggcctgcactgaggacaaagttcttcagaaccagccagaagaggatctagttagacttctgtgaaagaaagtctatgtgccattccagtgccgtactcatgcctgccatggagcaagacggtggaagacacttaaaccttcagtgctttaactcctccacggataacaaagaaggagagagggagaagctggaagctacttcacccttcaatttcaggaggcagtgcagggc

SEQ ID NO: 42677 - DNA, 1430 bp, Homo sapiens
tgctgaatcgctgctctattttggctggagccacagctccctccaccgcggggcggggctaaaatgtcctcccccttaagggagcaggcagctcctcccagccacccaccccaccaattcccatcctcccgcccccctccaccaaccccttctttccacactgccccctgagttcagggaatttccccagcatcccaaagcttgagtttcctgccagtcgggagggatgaatgcagataaagggagtgcagaaggcacgaggaaaccaaagtgctctgtatcctccagtctccgcgcctccacccagctcaggaacccgcgaaccctctcttgaccactatgagcctcccgtccagccgcgcggcccgtgtcccgggtccttcgggctccttgtgcgcgctgctcgcgctgctgctcctgctgacgccgccggggcccctcgccagcggtgagagctcctggcactggggtgcatcccagcctctgcggggccgctgcgttccagggaactctcccagcaacctgccctataaaaatgtctttcttccccagctggtcctgtctctgctgtgctgacagagctgcgttgcacttgtttacgcgttacgctgagagtaaaccccaaaacgattggtaaactgcaggtgttccccgcaggcccgcagtgctccaaggtggaagtggtgtaagttctcctgtgttgctgtgtccactgtgacttaggcaagtcctccagcctgggtcgtcaacctttgtggctcatgggtgcatcctctttttctttacttcagagcctccctgaagaacgggaagcaagtttgtctggacccggaagccccttttctaaagaaagtcatccagaaaattttggacaggtatttgtccctttgatctttgtggtgttttaatatcttctatggaaagcatatacttcacaatgtccttattctctctgtaggatttagactatgcttagaattataaggttgttaagaagaataaggaaactttttttctggaatgttctgggtaaacctttatcaccaatcttacatgcctgaacaattacacagagctcattactgacatctattttttgtctgctctttgcttttattgatttttttcccccaccaaacgcttttgaaaaccaaatgtagcatacaagagtgtgggaattggttatactaatataactcttttctcaacagtggaaacaagaaaaactgagtaacaaaaaagaccatgcatcataaaattgcccagtcttcagcggagcagttttctggagatccctggacccagtaagaataagaaggaagggttggtttttttccattttctacatggattccctactttgaagagtgtgggggaaagcctacgcttctccctgaagtttacagctcagctaatgaagtactaatata

SEQ ID NO: 42678 - DNA, 976 bp, Homo sapiens
ggtgcccctgggtctggagagtgccattatactaacaactccaattggagggggcacacagagggggcacttcacatgtgctgagcattctgctgggcactttactaaagctttacagatcatattcacaatggccttatgagagaggtacaattactgtcaatttacaaataaggaattgagctaaatagtcatggccactaataaatcacattttctactccacctgaatgtgtagacagtgacttgtacattgaactgtgctgcgtgtgtgtgaagtcagcctctggaattcatcccagcaacatcatcccaaacatccacatttatttgctgttaattatcatgggcatgtctagtctaacagtagagtagagcaagaaaaatcaattaaaatgtatttggaagtagattctcaaataaagagggcaaagcattgtgcaatggtcagccaggaattagggctaacctaggatggatcaccagcactcatcatttggaagtggtcaggtcaggagccccttgcaacaaagtccaagtgatgtaagtccctgcttctgtgtcattgcttcatcaggaaagccctacaccttcacctccttccccatctgtattgttttctgtttctcaacagataattctgttgtctcttacagagccatgctgaaagatgggaggaaaatgtacctggacccagaagctcccagaatcaagaagatagtccagaaaatgttggaaggtgatgggtcaggtgcttaatctgttcactttctgccaaacctgtttacctcccaggaagggcaggattttaaagccttgacttttttgaattcttattttatccaagatacctactcttactgtattaaaatccaggtatgtttccattctctctcaaaaatcacattttattctgagaaggctagttaaaagatgacagaaagaagatgaaaataagcaagcctagtttcaacat

SEQ ID NO: 42679 - DNA, 1914 bp, Homo sapiens
attaaaataaacaaaatttacagagacttgtgaatatcatctaaaatttccacatccacattgcaaattagtattattcctattatagagatgaggtgacagtcttgggaaggacgcagcttgttcagaggctgagcagatcattctgactccctacttcctgctcttgctttcacattgtgctgtctttcacacaggaaagtggcatgttagcgaattccatgaactagctgttgaaggtggagtaggaatttgttggcgggggggggcaggcgggcaatgggaagactggaactgcctcaagataaataacaagtagaaagacacaagatcattttaagtcatttgcatgtttgtacaacagttcatagcactgcagggttggagtatctatggggagagagaatgaacaagggtctcccaaccagtttttgcccacttagtgttttttatcttcagtataacttaatgtactaccacccaaactatctttccaaaacccaaatatttcatttccctgaataaaatattcaagatccgaagtccttaacctggcatcccaggctgcgctacactcactttccctctgtgccttagttttcatatgtgtgaaatgaggacattatgagtgtctaactttatggattgattatcttaaggactaaacagaggatgcatgcaaaacatttggcacagttccttatatacagtctgagcttaaaaattaacaacgattaattgtattatagtattatattaccggtatcaatatttctcttaatgtaccattccagttagtctggagtgttgagtaagaattttttattttttatttttttgtaagacagtgtctcactctgttgtccagcaacctctgccacccaggttcaagtgattctcatgcctcagcctcctgtgtagctgggattataggcaagtgccaccaagcccagctaatttttctatttttagtagagacaggttggtctcaaactcctggcctcaagtgatccaccggcctcagcctcccaaagtgcttggattacaagcatgagccactgcgcctggcctgagtaaggaatttaacagagggttgtttttttttttgtaataggtagcaaaaaaaattgcaatagcaatgaaattgctcaaaacaaatgaactttgaaggagaaaatactggaaatcagatgtgtgtggtgtgattttgtttttgctgctttcctttttgttgcctgtctcaaacagcatacttagctttatttaataatttgttgatgtgacttttaaagggtcaaaagagcaaaacaaattttgccaagtcaaacaatcctggaatgctggtgcctcatacattcttgcttcagaatgactttggtctaactgtcctgagaacacttttgagtcatgtattaatctgttttgcattgctataatggaatacctgaggtaatttattaaattaaaaaaaaagaagcttatttggctcacagttctgcagtctgtacaagcatgacaccaatgtctgctcagcttctggtgaggcctcaggaagcttttactcatggtggaaggcaaagggggagcaggcatttgtgatggttaatactgagtgtcaacttgattggattgaaggatacaaagtattgattcttcacatgtctgtgagggtgtggccaaggaagattaacatttgaatcagtgggctgggaaaggtagacccactcttaatcttggtgggcacaatctaatcagctgccagtgcggctagtatataagcaggcaaaaaaaatgtgaaaagagaaactggcctagcctcccagcccacatcttcctcccatgctggatgcctcctgccctcaaatattggaccccaagtccttcagtttgggggctcggactgcttctccttcc

SEQ ID NO: 42680 - DNA, 1065 bp, Homo sapiens
tagggaagaatagactcgctgattgagcggggctgtcggcgcggggcgcccaccccagccgcgtccggcccggggaccccagggcgccgggacccacctgctgcgcgccggctggcggccaccaggagcaggagcagcagcgccacccgcaggagccggggattgctgggggcggcggagagcgtggcgtgggccatggggctcagcagacgcgtcgggaagctgtgcgagaagcgggagagctggcggggaggtgcctgcgacccgggctgtgtggctccccaagatcggcgaaccctttttatgcatggttgagactggaaagcccggagcggccgggccagggaaattcccggagctccagatcgatccggagtcccgaaggaaggcgacggccccgcccccggggtggagtcggatacgggtagggggagcccactggtgacgcctacgcctcgccctccagagtaacccccgtgcactctgggactttgggatattcattttctgccccaaattcctggagaggcagtgagtccacctcgctgaagatacagcctgtgaggggggaccttaggtccccgatgaccccccgcgtacggggtagggttggaggaaagagctggggggacccgtgagaaccaggacaggaaaggcacgacttctttagaggaagagagctttgtctccttagttatcagatttgctggggacccggagacaggcgagttttccctcagctatcctctctctatatagtctatcctctatgttaacctcccggtctctgcctctctcattttcggtttagcgttatttcatgtacatctaacatcatgctctctgtgaaagtacagccatcgtctcggattccagagaagaatgttctacttgttccttgttttgcatattctctaatcacacttagaataccttgtttacgttttccatttggtggcaacagattatcagtgtcaaaatttgaattcagtgttagtgtccgtggaagccagggctgtataacatgacctcttcttttgtatcctgcataacgtccttcctccc
